United States Patent Application Publication US 2024/0084332 A1 - sequence listing, part 10

SEQ ID NO: 41954 - protein, 418 aa, unknown
  TnpB Polypeptide
MQLIKKVRLYPNKTMINVLNDLCDYRRYCWNQGLELWNDLYEQRVEMIPASLRKKSQLAIKDKTIVFSDEEQELLDAFPSPSHNIVRNLMVNDKEDWQYTLSARVLQWAIKDLANAWSKFFNCKQSESKTKKSKVGKPTFRTKKNPRQGFKTDRARIKNGKLVLDKPHAYKGNWYGISFRGYDLPDGKIKHCAITRVNNKYYASLTVECPEQTLSKTGKNTAIDANVNHFDYTDGSFIVCPKQLDRLYEQIKHYQRLLARKRKVNGKKATQSNQYFEAITKLQRCYERVTNIQNDLLHKFTTKIYHKYDMVVIEDLDVKTMQMSKKTKNLHRSLFGRFRFQMEYKADKFGKELIIADRYYPSTQRCSQCGHVKTGDDKITLQGNAKHGTKHNEYICYECGYEDDRDHNAVMNLLALAN

SEQ ID NO: 41955 - protein, 539 aa, unknown
  TnpB Polypeptide
MVESTKWIATIPTPSLANVGKINVANDLLAPYSDLMAYFLSDIDLRFVRDNEHLPFTNAKPYQTKEDYARLFESCKKRYAKQLEKGQMPKESLDGQLKEIELFAIQTPLSARYVQTCYKQTLEIHLSWLTKLEDMVRSFLGHSSIVDELFLATCYRINKLHLWYYSSVDLKWHQTKEGDLLVPSKTHKANVTLPVPADILFFMRKLIKRARKCTRFPQLKRVKTLKLDEKVAVLEVSKNASHFDYFLKLSTLQKGKPIYLPLKRNPYLDDCLKKSERLPFVQVRLTDKLCTISAIVGYDKTPLRPATESIGLDFGMVAMFTTSDGERHGLSSFTKLKIWDEELLQLTKELQKQSIKLSTNERYNQLQQRIKSYFKNEICRILNKLAKKNVGIFVVEKLDFRAAGLSKQMNRLIGRTYRSVVKAKLARLEEQYGIQIIAVNPAYTSQECSRCHHVSKNNRKSQKDFVCQHCHFSCNADVNAGRVINQRRSLMLEFPVYSKSSTSYIVRCQVHEASEECHRRYCHNNGIMTYEEALAKSSL

SEQ ID NO: 41956 - protein, 292 aa, unknown
  TnpB Polypeptide
MEQLCHQTKKNPNVTYKTFDQKFYKFPSYLRRAAITEAIGKVSSYKGNLENWDKTDPTIRGRKPSLPKAGLIYPCLYRDNMYQQTGEYTARIKVYVCNTWDWIDIRLRKSDVDYIAHHCSNRKQCAPTLQKRGHQWFLDFPFEETVTLNNTSIYEQTILAVDLGLNSSATIAVMKADGTILGRHFLRLSKEYDSLTHAVNRIKKAQQYGNCKIPRLWSKANGINTHIATRTATFIMDVANQYNANTIVFEHLDTTGKKKGSKKQKLHLWKSQYVQNIVTDKAHRFGMRVSHI

SEQ ID NO: 41957 - protein, 378 aa, unknown
  TnpB Polypeptide
MRTYEYRLYPNRDQRRRLDACLYESRLLYNEMLQREKQHYQQTGKFLSKYDLTALFKGRGGAYVPASTVQCLADRLDKALKAFLAHRDEDWGFPRWKTGNQWHSIQLRQLGIDFTAAGRLLKVPAKLGCAIKIKMHRPLTGTPKTCYLVKRADGQWYALIVCEMPQVTGDLSHPDGDRGAIGLDVGLKAFLADSDGNTVQNPRFFRTSQATLRRKQRRLCARKKGSRRRGKMARSTARTHLKIERQRRDFHFKTAKRYADAYQTIVVEDLNIRALARSRLAKSILDAAWGAFLTILSCKAASAGGQVVRINPRYTTQKCFKCGELVQKSLSVRTHICPWCGYVADRDVNAAQNILKAGAPPSGTVADRLPVEPRSPIL

SEQ ID NO: 41958 - protein, 545 aa, Klebsiella sp.
  misc_feature (379)..(472): Xaa can be any naturally occurring amino acid
MYIWLFIQATSIHTECKMLIQKAYKYRLNPTDAQAQRLRQMCGCARFVWNYALAETQRILEAGQKLPSAFELNKMLTGWKKLPELAFLSDAYTDNLQQKLKDLHGAWKRCFDKKLAAKAPVFKHKSHGNDSVRFVNFDKYCQLEYRRVKLPSGLGWVTFRQSRAVVGKIKYATVSQHAGGWYISFQVEMEVEQPAHPSTSAVGLDAGISKLVTLSDGTVFEPVNSFKQNQSRLARLQRQLARKVKFSANWKKQKARISRLHSHIANIRRDYLHKVTTTVSKNHAMIVIEDLKVSNMSKSAAGTVDEPGRNVAAKSGLNRAILDQGWYEMRRQLEYKQRWRGGEVLAVNPAYTSQKCARCGHTVKENRQSQAVFVCVACXXXXXXXXXXXXXXXXXXXXXXXXXXXXXXXXXXXXXXXXXXXXXXXXXXXXXXXXXXXXXXXXXXXXXXXXXXXXXXXXXXXXXXXXXXXXXXVQPELHLADHGVGLFHTRFVKLVVSRYTQRLAILQHTFIYLVDDKSPCVDIVGLTCASKKRSRHTLQKVTFLS

SEQ ID NO: 41959 - protein, 330 aa, unknown
  TnpB Polypeptide
MNTTLQLKLAPSSDQHHALVDTMESFNTACNWISSVAYENGSANRNVVHRLTYQGARERFSLPAQLAVRAIAKVCEVYKRDKKKQPTFRARGSVVYDQRNLSFKGLDTVSILSVSGRLKMPVVVYGYAHERITAYGVRGQADLVLRDGQFYLCVVVDIPEPPQKQPKDWLGVDMGVVNITTDSDGENFSGAEVNGLRRRHASLRARLQSKGTRSATRRLKQQSGRESRFGRHVNHEVSRGFYQLASFVEYKAALAGVPFVKVDPRNTSRTCPGCGHVAKANRPTRDQFLCVSCGLAGPADHFAAVEIGRRAAVNQPYAAAAVLGLAASCL

SEQ ID NO: 41960 - protein, 422 aa, Streptosporangium sp.
VEKVKQTRAHVARLELSTAQVAVLDGQAHTARTLWNLLHEYFTFRQGRFATLKDCDTAIRAARHEIDWIGQLPAQAAQAVLKTYRQAWANFFNPDHPAKRPTFKARFGSRPAVDVPQARDLQIKRINRRWGAVNLPKVGRVRFRWTKDLPGLTRGGPAGRITGARLVKDAHGWQVVFRTQILLAPVPTVHPGHTVGIDRGVTVALALSDGTMREHAPWLTPGEKEHLRRLEKTSARRRAARPKRTRPSGRERRTYDQIARLRAKAKRRAVDWQHQTTTELADTFAVIKVEKLSILNMVKSAKGTIEAPGRNVAQKAGLNRSISGEAWGRTVTLLEYKSADRGGQVVKVPAPGTSQTCHRCGHRDAAGRDRTVFACTDPACGWVGHADTNAAINIKNAVGTPVSGRGDLGVTRSVKRQPPRAA

SEQ ID NO: 41961 - protein, 440 aa, Streptosporangium sp.
VFRILTGRKYRLELDFGQKLFAERVAGICRSVWNTGLEQRRAYRRRGAFIGYAGQCGQLADAKGEFTWLADAPAQVIQQTLKDLDEACRRHGTWKVRWKSKAKWTPSFRFPTAKHIPVEKINRKWGRVFLPKFGWVRFRLSRPLGESVKSATISRDGKHWFVSFLVDDGITQMEGHARPDRVAGVDRGVVTAAVTSGGEFFDRRHAGESGVSSPVPPKEEKADREADLGYLSAGEAERCLRLQRRLARTKKGSARRKVVAGEVGEIMRRVRWRRADFNAQSAHRLTRDYGHIVLEDLGVRGMTASASGTIEEPGSRVAQKSGLNKAILDKGWYGLEVALRSKARCTGSVIGKVPAAYTSQTCSAPACGKVDAKSRESQALFRCTACGYTEHADVNAAKCIRARGQAAGPVVSGRGDSGLPGSVKRQAPRSIARGVPRAAA

SEQ ID NO: 41962 - protein, 308 aa, unknown
  TnpB Polypeptide
MEHLTLQTKKNPEPAYDFNQCAYKMPAYLRRTAIQEALGAYSSYASNHENWVNNGKQGKEPKLTYERNAMPTLYKGNMFIRTGSDTARVKVYHRKDWVWLDVLLCKQDVKYIEKHCLSDPNTVQKNPKLKKCGKCWYLVFPFAKAVTFEDVAIEDRTICAIDLGINQNAVCSIMQSDGTVVARKFINFATEKDHLYKALGRQKKAQQHGNRKTPVLWKRVNDINQDISRKTAKGIMDFAILYNVDVIVFEYLDTNGKKRGSKKQRLQLWRKREIQRIVEHHAHKCGIRVSRICAWGTWHVYAGRKRKI

SEQ ID NO: 41963 - protein, 251 aa, Clostridioides sp.
MYCGQHIKLPKLGMVKIRDKQVPQGRILNATISKEPSGRYYVSLCCTDVDIEAFENTNNQIGLDLGIKEFCISSCGEFIENPKYLKKSLNKLAKLQRELSRKTIGSLNRNKARLKVVRLQEHIANQRNNFLQKLSTKLIKENDIICIEDLQVKNMIKNRKLSRLISDVSWSEFIRQLKYKANWYGRKIVKVGKFFASSQICNKCGYKNEEVKDLNIREWICPSCNETHDRDINASINILKEGLRLITIQNK

SEQ ID NO: 41964 - protein, 383 aa, unknown
  TnpB Polypeptide
MKLQAKEVKSVEKVYKYRIYPNERQKEIIAKTFGCCRFVYNKYLAEKIELHKTEKKNITYIRCAKAMSELKDELEWLTEVDSTALQSSLKDLDNAYHKFFKEQAGYPKFKRKKDNHRSYRSKCVNSNIEYLNNHIKLPKLGLIKTKNKLVPQGRIVNATVSQEPSGKYYVSLCCVDVDIQPLSVTNNAVGIDLGIKEFCITSDGEVINNPKYLKQSLNKLAKLQKELSRKSKGGSNRNKARIKVARLYEKISNQRRDFLQKLSTQIIKENDVICLEDLQVKNMVKNHKLAQAIHDVSWSEFVRELEYKARWYGRTVIKVDKFFPSSQICSVCGYKNTETKDLKVREWDCPVCHTHHDRDVNAAINILNEGLKYLTTRDRLVII

SEQ ID NO: 41965 - protein, 716 aa, unknown
  TnpB Polypeptide
MMKQEIQRHHWKQKSGSVTQTQKKQEKIDGNFIIPPSKSYLVESFVLNSVDRVIAKRRRNRRPDPFFSSSRKPNQEIFTLIPKRSGKKADEVDLQLLGSLFDNYVQVVNLMLARIYKDNDRVQSLGQQLSEYRGRAYTLLRKMRDLNYQQNEEIQALCFERLYRNALEHAGRTLLADWTRRQLFNAAIKVLSESAADALQLLRRKHIPSNLIRRVRDACDSAKNDGAGFHHSLGVLRQLRLALDDHILEEQGVKIQWRGRQRKYVASLLQDSVSEKERILFLTARKLEVWKENGYLFSVPCLRSHSLDFSASTENSPGQGYWFSVDPERKNEILFHIKLPPGINGTHHESSPYKGKTLAFRFLDWMSSATIKDGAKAQNAEDNGDCHRAQRLRFRAAMFEDMHQQLMNTIEIQHLTHRLYKVKQKKGKDGEETTKLQSKITELRSSRRSAPPRLLLRGNRISLQIPFLAPDDFLIQQVLGEREYEARAGVDRGIRVPVVLSVMKGKEYRELLLRVDQLVKKREFLRKQAYDLQSVTDRKRNNWGRKRSGLSYPKHILKKDRHIKALWRKIRRLDREIARIIASKTVWFCEEHRVKKIFFEDLRSFQAHGGSKDLSYNLSSNLWGKIIDTVRYMRVSLGHSPYSVWTVNPRFTSQTCHVCGERGVRVADEQSTVERRGGEYFYCSLCDEHFHADVNAARNIIHVQDRVSSAVPGGTA

SEQ ID NO: 41966 - protein, 541 aa, unknown
  TnpB Polypeptide
VKADMDAKQADPEHQSVPWTLEALRQRWNQVNDEVAPWWAENSKECYASGIADLVQALANWSTSKQGKGRKVGFPKFKSRNRDQPRVRFSTGAMRFEPDRRTIVVPVIGPLRSKENTRRVERHLAKGNARLISMTLSERWGRLFVAVNYAVRTKVVSPSSAPAQAGSRAGVDLGMRDLATVADTDGAITIFPNPAPLRASLAERRRTGKQLSRCIPGSHGHRAAKAKLARLDRRCVNLRLASHHQFTRWLVDTYSEVVVEDLDLAAMKKSMGRRAFRRSVSDTALGQIRPMLAYKVERAGSKLDLADRRFPSSQVHHGCGCRLVAKHKLDKMLVCAVSGELVDRDVSAAQNLRDWPDHASCGSVGATAPFVPGPSSDGTGGGSDAGSPGTGGVNVRPALRRGRFAVRPEPNPAMGEEPREGCQSCGLTRVHSTATEPLTPSMGHHHQLVARLDWPVEGELMRLHGQRPKPALRELVGPVGGHPAGMQGSPNSAEEDRPCGVQSRDLNRLQRCRDSVSLRGDLVVEGEMDRDIPSRWRPGIP

SEQ ID NO: 41967 - protein, 443 aa, unknown
  TnpB Polypeptide
MKTDFVTRTVWLRLPNISTNLVRKLRRIYTRAINAFLISLEEHKRTIKETYHELRNNKWFSRLSAKMLNQASQEAFVWFNIRRKERFLTDQGIQKWAKWAKKQGIANFDPLQSLPRIISHSNYLKGWPGKNHGQWPQTAIDGARFYIDSKTNNIQVSIDKVAKKTQVVIGGEPERLLRQSISGIPSLKIGSSRLLVKDGVIQMATPIRVSVNIPDISSLEQPTLIGVDLGLNTLAAVVALTFDQRIHPAKSISGKQLKHRLATLWAKRKNVARKQKSESIQDIDEKTQRVIQHWIHVTAKAVINYASQFPHPIIVLEDLRNYVPTKERTRWASSSMRDQLSKWARGRLFETICMKASLHNLPVIRVNAVYSSPACPRQCLCLIPQGYFEVFHCPACGAKVPRDISAATEIARRGLHLVTDNKVWRSKVLGNENTSSLTQSVAG

SEQ ID NO: 41968 - protein, 380 aa, unknown
  TnpB Polypeptide
MLIKKAFKFRLYPNKGQSELVNKTIGCCRFVANFAISQQKKEEHYWDITNELVQQGFLVENNYRTKFFNKVQSVKDIVQLKKYYTWLKEVDSIALQASVENVADAYSRYYKKQSDKPKFKSKKNPVQAYTTKNTNENIKILDRHIQLPKLGLVRFANSRDIHGTIKRATISRTSSGKYFVSLLVETEVNELPKTGSEVGIDVGLAKFATLSNGVQYNNPKFFQSLEKKLAKEQRILSRRKKGGSNWNKQRIKVARIHEKIANCRTDYLQKVSTEIVKNHDIIGMEDLKVKKMQQAKYLAKGISEVSWYQFRTMISYKAEWYGKKLVLVNPSHTSQRCNHCGHTEKNNRVSQSKFVCKACGHIDNADINASKNIELMALAI

SEQ ID NO: 41969 - protein, 130 aa, unknown
  TnpB Polypeptide
MIPTLKNVRLKEYGYIKVGAKVIRRKYENLKKKGGTATKSNIKKQIVKVQKLHHKLDNIRTDYVNKTISNIINQKPKFITIEDLNVKGMMKNKHLSKAVTNQKFYEFRSKLTNKCNALGIELRIVDRLKQ

SEQ ID NO: 41970 - protein, 382 aa, Vulcanisaeta sp.
MIARRAILIKLPRDKCDVDYVKRLMALANLAYRGFEVWVPDVPRTIQHQLYGFRDFKDSLVFGTTPKRWFAETWVPLKTLRIYQDGSMKGDRTAPVILDFEDDVIRLRQVCRNEHRYVVPIPMPRWVIDRIGEGGDVRFAMIGLENDEPYLALVAERVVEPYQPSNCMLVIDVNAWSNGVAWGLIRDGSIIRWKPERPRLSEIEGLYNISVRLGRKYGRLKRLGLHKTVEGRRLWRNIKRVRRKIYAKLRDYAQKLVHRLVRKALRHKALVIIDDMIEESRRELIEEKIPRGLRKIYLAETRRFVKLLTTQLQWYGVPHEFKRLPSTICPICQHELIQERNRVMACPNCEFKAPRDKIPIHWAIKSHQEGDGKNNPPPLERR

SEQ ID NO: 41971 - protein, 496 aa, unknown
  TnpB Polypeptide
VKKVLLVIESWRYTLITILQEGIIMVQVKLFIILRSLERHIKRFIDTTLLDSLFFHRWSRPLNSYIGVIDMDYVNMQVKKTVIVPVHYATTKFKQSILDNTTARITYCIRCISKLINEDTELTRKNIRKLAKESDIAGKTKLSACFIDQCVDKTIWSWKSYKRLHDDWLRRLEYVVRRDNEVYLWKFLQKEPTPPTFNHKTSCRIDIRTGKIEWNKKSKLSPLWIHISTLKKREMVDIPLNPSRYHLKQLKDAEIKDFEIIKTDGKYYVHISIQKEIDDKQPSSVGGIDQGLNHSAGIVLLPSGKNGIPFEGMICDEKKQEILQKYNKLVSELQNAKQYHKLKQLRNKRFNVAKEYDWQIANQIAEISEGFLIGIGKTNFRQMMYRGNGMPKLRKRIGKWSYARQRQFIMLRRAEHGYDTLLVSERGSNDCHHCGSHLVSRKWLPSGESYILCHCCGLKIDADINAPYNIAYETFLRCQDERLKAGMNMGETYGNL

SEQ ID NO: 41972 - protein, 488 aa, unknown
  TnpB Polypeptide
MRVIERNSIAYRGVDLFTKQNKIKDKSLDEMYCVYKKAYAVALSYMLFAFYNTHSETPFRDIKSMPDKAILEKLFVDFLDVASMRLLATVYNQAYADFKAHVKFIRYYIIEATKKTHSLSDNKSLYHDFKNQIKDYKFTTNRVLHSIFRHVTKRLARKPSLKLRNMMLDSHVVTIQEAKNSASFDRWIRVAPLKGKEAIYIPYKNSTYKEHNTLNAYQFVRIDGAFSIRVAQTVDRVEYNPSDKIVGIDLGLTDFFATSSDKILGNGFMNWLKKHDEILVKLQASLQSQGIKPRKSKKYRKLVQKIRDYTKNEVCRLFNLVMKHEKPKVIRLEFLDFRNQNLGKTTNRLLTRLANKIIAEKVQRLVDVYGVEVEYINAAYTSQTCLSCGYIAKNNRDGRKFKCHCCGHKANANTQASKNIARRSSDSLKLTKKQALTEGLNIFLKNHKVKRLETNIFSIRARSCTRTAIVNNPYLESYFVSLNLCEVV

SEQ ID NO: 41973 - protein, 446 aa, unknown
  TnpB Polypeptide
MAKKKRKERLLEPLKSGEVINIAHKIRLEPNNVQKTYMNKAIGCARLAYNWALAEWKRAYGADEKPNVFKVRKSFNAIRMEQFPFTYEVAKSVTSHAIADLGQAFINFFRGTAQYPVFKKKSYTQGSFYIDGFLLKFKTINKLTNKEIKGQYVLIPKLGYVKMSERLRFNGKINSCVISRKANNYYISFSMEISQDEFNRTHKFKEPQHLTCGVDIGSISAISLDNGYKVKPPKPLSKANKRYKRLSRQLSRKQHPSYKGDKTERSKNFIKATRRLAKFAEHIANIRKDFNHKETSKVVADHKFIAMETLNVTGMVKNRKLAKSISDVSYSDLSSKIEYKARYSNRYIYYADMFFASSKTCLNCLDKNSELKLSDRIFICPSCGFTIDRDTAAAINLREEMERYLIGIAHPEFTLVERSSVDDRSLGYLRSTFSMKQEDSINLFKE

SEQ ID NO: 41974 - protein, 453 aa, Anaerolineae sp.
LSDCCTQYRVAHSRAGNGAGQNDDHALLLGTVGTIARRCRRRSAMIRAHKVRLNPTPEQEAYFRRASGTARFVYNWGLAEWKRHKAAHPGEKHGVMAVKKDFNALKGEQFPWVYAVAKDVAEGAFQNLGKALENYYASNNGKRQGAKMGFPHFKSKKNKRQSFRLNNDKIQVEGHNFRVPKLGWVNMAEELRFDGKIMGAVVSQTAERWHVSISVEVEPPTPMEFPKEFVGGDIGIKELLVLSDGKRYENQAPLRHELKHLKFLNRQLSRRKVGSERWYKAKRQLEVIHGRIVNRRADHIHKMTTDVARTYRIIGMEDLFPKGMIRNRHLALSLSDAAFGEIKRQMLYKKEWFGGQVVLVDRFFPSSRRCSVCGHVNAEIKLDEREWTCANCGTHHLRDDNAACNIEQEIKRILGFTPVVATSGIKARGRGVRPRCAAVPVEARISKRSLLST

SEQ ID NO: 41975 - protein, 360 aa, Micromonospora sp.
MPGGGGGGGGHRKRAAVSLTVTQAYRFALDPTPAQERDLLRHAGAARVAFNWGLARVKAVMDQRAAERSYGVADEKLTPSIGWNLPALRRAWNAAKGEVAPWWAECSKEAYNTGLDALARALTNWSDSRSGKRAGRPVGFPRFRSKRRTTPSVRFTTGTIRVEADRMHVTLPRLGRIKLHESARKLARRLEAGTARILSATVRGKAGRWFVAFTCEVKRAERAPARPDALVGVDVGVRHLAVLSTGELVANPRHLGNATRRLRRMARAVSRKVGPDRRTGGRPSKRWDRARADLARTHARVANQRRDGLHKLTTGLANHYGTIVVEDLHVAGMVRNRRLAKAVSDCGFGEIRRQLSYKTT

SEQ ID NO: 41976 - protein, 421 aa, Natrarchaeobius sp.
MGKLTKTLELKLVDPNAHKRQKLRETRDAYQQALQEAFAAGCDTQSAANDVVVEYDLSGYAKNALKKYVPQLCGNSYDADELHDDHPVRFTNEGLQLDHQPQNALEWYVKIPHHEDYHLWIPAQANPDQREWLEALYADDAEMGESRLFERDGTWYLHVTATRDVEVQSETSADERTPIGVDIGEASLVTVCHRDESGSPVRPHLWADDGKAVRRLRKTYFTATRRLQQRGSERIVASYGDALWVQIDDVFHRVTREVVEYAESVEDPVLVLEDLTYIRENMDYGAYMNRRLHGWGFAKLHAQIRYKAAEKGIPVETVNPQNTSKACHACGEHGSRPRQATFRCSNDGCWVAEYQADVNGAINIADRYRSGESHRQIDREDDSPQKAGDDDSATDGACLTGPQDSHTDAETQQVTRGTYAS

SEQ ID NO: 41977 - protein, 358 aa, unknown
  TnpB Polypeptide
LLINKTFGCVRFVYNKMLEERERIYKQYKDNKDELKKQKLPTPAKYKSEFEWLKEVDSLALANAQMNLQTAYGNFFRDKKVGFPKFKSKHKDKDSYTTNNINNNIRIKESKIKLPKLGFVNLEQHRYILNNQIIKSCTISKSPSGIYYISILVEYEQEIQLKEVDLNNILGLDMDMKNLYTDSQGIKAEYPQFYRKILDKLKREQRKLSKCQKSSNNRNKQRLKVAKLYQKATNQRKDFLHKTSRKLVDKYDAIIIEDLNMKEMSQKLNLGKSVYDNAWYMFTVFLKYKLEWQGKKLIKIDKWFPSSKKCNECSNINHELQLSDREWICKECSNIISRDYNAAKNIRDEGIRILKLVS

SEQ ID NO: 41978 - protein, 312 aa, Campylobacter sp.
MDINLSSKIVEVVNSETGEVTLEKKYYPGGGFKLEGKKINFTSIGFELDLSKCPYYDIELINYKTLKQIVIKIDVNKRIDCIFVFSEKKQEKALNQNFISIDLGISSIASCYSNKIDCMKIQTKRFKGLERAINELKSKRDKKKKGSRGYKKLNKAIRRKQAKLTNKRKDYLHKTSKTIVDLCILNGIDNIICGAIKTKKLKKDYKTSLNKSTQNEGLLSRFKGFLKYKAENKGLNFLLVNEAYTSQTNCLTGKRELDSNLGIREVELSPGFKVDRDINSAVNIAKICGDLWLSHIFEKNRLLKIQKMNITL

SEQ ID NO: 41979 - protein, 408 aa, Methanobacteriaceae sp.
MLKAIKIRLYPNDEQDVFIKKQLGCCRFVYNQCLSYRKTTYETDSKCITSTQTINHIVELKNDFPFLKEVHSKVLQQSVIDLNKSFDGFFKKLTKYPRFKSKKDNKQSCRFPKDAFIGIRGNRIDLIKVLKDIHFKCSKKDESYLNRNQDKIKSLTLTKNPSGKYYLSILIDGCLTHKVNKTNNAIGIDLGIKDFVITSDGEVFSNLHFKKSNVNKIKKLQRQLSKKQNGSNNRNKARIKLAKLYEHINNRKQYYLHQVSNTLIDENQVICMEDLNVKGMSKNHNLAESILEMNFGEFRRILEYKTAWYNRRIIFVDRFYPSSKTCNHCGYINKQLTLKDREWICPKCGKLIDRDYNAALNILDEGLRIIGLSSPESTLADYPTMDDRLSNEVLKSSDRLKQETNVFH

SEQ ID NO: 41980 - protein, 388 aa, Escherichia sp.
VKRLQAFKFQLRPGGQQECEMRRFAGACRFVFNRALARQNENHEAGNKYIPYGKMASWLVEWKNATETQWLKDSPSQPLQQSLKDLERAYKNFFRKRAAFPRFKKRGQNDAFRYPQGVKLDQENSRIFLPKLGWMRYRNSRQVTGVVKNVTVSQSCGKWYISIQTESEVSTPAHPSASMVGLDAGVAKLATLSDGTVFEPVNSFQKNQKTLARLQRQLSRKVKFSNNWQKQKRKIQRLHSCIANIRRDYLHKVTTTVSNMSKSAAGTVSQPGRNVRAKSGLNRSILDQGWYEMRRQLEYKQLWRGGQVLAVPPAYTSQRCACCGHTAKENRLSQSKFRCQVCGYTANADVNGARNILAAGHAVLACGEMVQSGRPLKQEPTEMIQATA

SEQ ID NO: 41981 - protein, 283 aa, Acinetobacter sp.
VTEELVTRRKQFKKAKLKWRVSNKKSARRSLGWIPFKKVAVKYSDGLIQYGKNKFGMWDSYGLSKYTVRTGAFVEDSRGRWYVCLVVDLPKQEKPKATKAIGIDLGLKDIATCSDGTVISNPKFYQKYEQKLGIAQRARNKKRVRALHAKIANRRKDRLHKASTMLVRNNALIVVGDLSAKKLVKTKMAKSVLDTGFSKLKTMLKYKCENASVLFEEVNEAYTTQICSCCKRISSSSPKGRVDLGIREWTCQNCGTVWQRDLNSALNILALGHKRLAGGILSL

SEQ ID NO: 41982 - protein, 435 aa, Acinetobacter sp.
MKINKAYKFRLKPNEEQEVILNNLVGSARFVWNQILVVSFEMFAKNEFINATNLVNKITSLKKNPEYAFLANHSNAVSLQQKIRDLASAWTRFFNAKEHARLKENKRKPRKPKFLKLTDGSEIQLRPLMPRFKKKSDGYDSIRLVQFDKYCRIEGNRVKLPNGIGFVKFRKSQDILGTIKNVTISKRSGHWYISFGSEKELLENPVHPSKTAVGVDLGVKKLVTTSEGEVFNPKNSFKTNQIKLAKLQRKLSKKVKFSENWKKLNTTINKLHYHIANIRHDYLHKVTTTLSKNHAMIVVEDLKVANMSKSASGTIEKKGKNVKAKSGLNKAILDQGWSMLVDMLEYKQQWRGGLLVKIDPKYTSQTCSSCGHVAKENRLTQAHFECVACGFSENADINASRNILAVGHTVLSVEGGCGKGCPMKQKASEIREEVT

SEQ ID NO: 41983 - protein, 377 aa, Burkholderia sp.
MDIKRAYRFRFYPTPEQAAILARTFGCARFVYNHMLRMRTDAWQQRQVRVGYHETSAALTALKRKPEHAWLNEVSSVPLQQALRHLQTAFANFFAKRAKYPSFRRKDGAQSAEYTASAFRWDGTSLKLAKMGVPLPIRWSRSIPKDARVTTVTVSKDTAGRYHVSMLCDDMVSAKPEVTAVVGIDFGLTDFVVLSTGEKIAAPNTFRKNETKLAKLQRRLARKQKGSATRRKARLKVARMLARIADCRRDFLHKLSARLINENQVIAIESLAVRHMLKNRKLAKSISDASWSEFVRQLTYKAEWYGRTLIRIDRWYPSSKRCSNCGLTVTTLPLKVRAWVCPSCAASHDRDINAARNVLAAGLVVSAHGESVNPMSL

SEQ ID NO: 41984 - protein, 392 aa, unknown
  TnpB Polypeptide
MFCDFAHKSKNLYNHANFLVRNEFVKNDKWLRYKEMDKILKADLKFDDYKQMPTAQSAQQILRLLEKDWKSFFAAIKDWAKNKDKYFGRPKLPKYKVKDGKHVLILTNQNVKLKGSMLVFPKTFCGFVMQPQFIKLDNFISFQQVRFIPNYRAFTVELVYNIEVPDETLPDNGRYLSVDIGLDNLATIVNNAGLKPVVINGKGLKSINKYYNKRISHYREVAKRTNGRDYTNRMNNLTMKRNHKIDDYMHKASKYLIDYAFANNFNTIVIGNNKEWKQKSSMSKKVNQSFVGIPHMRFIEMVQYKAQNIGLNVVLTEESYTSGTSFLDNEQPVKTNYNKARRIHRGLFVSNNGIKINADVNGAYQIMKKAFPNAYADGIQGVALHPVRVSVA

SEQ ID NO: 41985 - protein, 404 aa, unknown
  TnpB Polypeptide
MGTTIKTLEATLAPPTAHKERKLCTLLETYREGLNEAFAAGCDTMSETSDVVTSYDLPYQAKAALCNYVPQLQNTQNAQELNDDHPVRLTNQAAKFDHSEERAYEFTWWVPRPGRGTNFWIPLRINPEQKYLWHDLIDGNASAGQLRLQRNRTSWTLYVTVEFPIEEPDYATDGDDVTHIGLDIGETALITGCALKDGSPTGPFVCDGSRAKHLRKEMHTTLKRLQERDAAEWRIDERFNHYQNALTDIVEKASRQAVEYARQFEKPVLVMENLTYIREELDYGAYMNRRLHTWAFARLQNRVEDKAREAGIPVEYVRPEYTSQTCHVCGHIGTRAAQATFRCTNDKCSITEFQGDINAAINVAQRADPWGESVPLKPAGDDSPRDGSASDSTTAPPNRAYHGR

SEQ ID NO: 41986 - protein, 446 aa, unknown
  TnpB Polypeptide
VGESTQQTKVFRVEILKPLNYSWAEFGTIASKATYASAQLANEVMTKQLLLSKKAIQKGESFCSMIETCRDSTLSFVVKCAVCRQAQLKYSKLAKKLLRADISLPTFHNNVLCIKAIGVRLAQAESGDWIARIQLLPGRGAKQPEVLLRTKELEVKSSGYYQILQRIADGSYKMGFCQVQRDRVRHKLYLLMSYTFTPESKVTPVSTRVMGVDLGIATPAVCAFNDSVKRLSLHVEGQKLLRMKWQIQARRRGVMREITRRELRRGHGLSGKFHPMQELQQKWVNFRRTWNHTLSSRVVDFAVQNQAAVIHIEDLSVDGIPRFLGRDWPVAELLQMITYKGEAAGIKVERVNPYKTSQVCSRCGVIKEDFSFKDRVAQGMPIFVCESCGFQDNADYNGAKNIARSTLTRKPSSRASAKPERASSGTMTTGQADSIGLRVEKCLSPV

SEQ ID NO: 41987 - protein, 446 aa, unknown
  TnpB Polypeptide
MKLTYQFRIDKFVSTEQMNKIKDLMSATSNFYRYCVDAFTFEDKAKKKHKVDNTKELFLALKKKEFCTKYKINTQYANSISREAKNKVELFNAQKEDALKRLEFSIYILSKENEELDKKFLLNKENLSYVEKKELLRKIYFNNRKIEELNKQHNKTSNSTMTCGEKKLQRTDIEQWKQIRNDGNFIVSLYDSFNPYGSHHFKFQHIEQNKFNLNLEVCLGEKINIPIQIKLDNKSRQDKICDILKNPIKYKVSYRLINKENKLFVQVSIVISEQSSEQANSKLIDKTNIAGIDFNNGHLDFCIIKEKENLLFETIDFLYKDATSNQRKESLLLAIKQMFKILKQNNISVLKMENLNFTKLKLKHNKNSNNVKAMNRMIHSLPYSRYEKLMIIEAYKNNIQLVLVNPAYTSKRAKDNLLSDYKNLNLSDLSIHQMAAYSIAIRNELC

SEQ ID NO: 41988 - protein, 383 aa, unknown
  TnpB Polypeptide
MKNKGIKYRMYPTEEQEKFLLQEVGNQRFIWNYFLDLSNIKYKTIKEGMFYSEMCMMLTSIRSEIDFLKTGNSQSLQQTLKDLDQAFKNFFRRLKTTRVEKAGYPIFKKKGKDDSFRVPQHFTINKSSITIPKIGNIRINKHQPLNGKPKNLTIKKEGKKWYVSITLEFNIRHFSKTNKTVGIDLGTVRFATGNQGQIKKSFLKIKGVDILFRKIKTTQKELARKDKFSNNWIKAKFKLGKLHRQLANKRRDFHHKFSTMLVKRHDLIVVEDLKTSNMTRSAKGTWKKPGKNVRQKSGLNRSILTQGWYSFIYMLNYKCDWYGKILIKVDPKFTSQICSSCGYKRKTNRKSQSSFVCGKCGTEMNADVNAARNILKRGLTLAT

SEQ ID NO: 41989 - protein, 227 aa, unknown
  TnpB Polypeptide
MPTGKWFASFVVEVIPDEPLLKTGLSVGIDVGLKRFITLSSGEHVDNPRFFVHEENALAKAQRKLSEAEKGTPERSRALKAVHRVHERITNKRDDFVQKLSLKLVKSYDLIVFEDLNIKGMVKNHCLAKHIADAAWNKLITTKSYKVFQLAGWNFSDDSRKAEWAGKRVELVNPNGTSQICSGCGQVVLKDLSERVHRCSFCSLTLDRDHNAALNILRLGIQSVAKA

SEQ ID NO: 41990 - protein, 297 aa, Oscillatoriales sp.
MLLGFKTELKLNARQRILLAKHCGVARHAWNWGLWLTKNILDHNQANPNEKLKFPTAIDLHKLLVAMVKSENAWYYECSKSTPQIALIALREAWKRCFKKTAGVPKFKKKGRGDFFTLEGTVKISASNKIQVPVIGVIKTYEKLPQVLTKSCTISRIADRWFISFRFDVEQQESCQTNIVGVDLGIKALATLSTGEVVIGAKSYKKYAAKLSRMQWFSRHKVIGSSNGQKAQNEIARLHRKIANIRKDTLHKLTTLLAKNHGVIVIEDLNVSGMMANHKLAASVADMGFFEFRRQLT

SEQ ID NO: 41991 - protein, 466 aa, Streptomyces sp.
VEESAEKPRPVKGVQAERIKREELGIEDRRKHEGRKATPLKSHAKETGSHHRVYRFRFYPTESQAEQLGKTFGACRWVYNEGLALRSGAWEQHRVRVGFAETCRALTGWKRAEERAWLKEVSSTVLQQSLRHLDQAFTRFIKGVAKYPKRRKKQRSRDAATYVRTGFRWVEDPERRGTGLITLAKQSGPLDVRWSRALPAGVVPVRLSVTRDRAGRYFVSVLVEERMTALPAVFLSGSREPKAVGLDLGLASLVTLDDGTKLDHPRLLKRYAEKLARLQRELHKKVRGSRNREKVRQKIARLYALIGDVRRDMLDQFTTRLVRENQVLVVEDLSIVTLLRPARGKGRRRKARLSQAIIDAGWGELLRQLRYKCEWYGRTLVVVDRFFPSTRRCSACHVKGPKLDVSVREWACAECGAVHDRDVNAAVNLRDEGMRLYWLVASALPPDRQPPAVIKASELEKCLLAA

SEQ ID NO: 41992 - protein, 409 aa, Actinomadura sp.
MARQVRRAFKYRFYPTEEQAAELSRTFGCVRLVYNKALEERTRAWHGEKRRISYAQSSALLTQWKKTEELAFLAEVSSVPLQQALRHLQTAFVNFFAKRAAYPRFKSRKRSRASAEYTRSAFTLRDGRLTLAKLGAPLDIRWSRPLPEGAEPSTATVSCDRAGRWFVSLLCQDTIAGGPATDALVGVDAGITALVTLSSGEKIANPRHERRDRARLARAQRNLARKAPDSANRDRARRKVARVHARIADRRRDFLHKLSTRLVRENQTVVIEDLAVRNLLKNRRLARAISDAAWAELRSMLEYKCAWYGRDLVVIDRWFPSSKLCGTCGTVRTKLPLNFREWTCECGVVHDRDVNAARNIRAAGLAASACGDGVRPQRDTSRTGRSSAKQETQRATAGTPRSWAEEEVK

SEQ ID NO: 41993 - protein, 418 aa, unknown
  TnpB Polypeptide
MHYAYRFRLKPTAQQRELLDYHRDTCRQLYNHALGEFNEIPESAGTLNQRVRQVRDRLTDLKEWWDDLNDLYSTVAQAAVMRIEDSITALGELKEKGYNVGSLNWKAPSDFRSFTYVQSGFEFDKKNGQTVLSLSKLADIPIECHRDIPDDETIKEVTLKKEPTGEWYASLAVDDKENPEKPSLDEINTDDMVGIDVGILKYAHDTDGVAVGSLDLSDERDRLEREQRSLSRKEHRSNNWENQRQTVAECHQQIKRKRRDFLHKLSAYYAREYALVAVEDLNVKGMLESPRNSRNTASAAWNTFTELLEYKCEREGTHFVAVDPRGTTKECAECGVETDKPLWIREHSCPSCGFEADRDLNAALNVLFRGLSELGMGHSESTPVETALPAGTAVVPAKRVVETGSPTLKKRPASAVSE

SEQ ID NO: 41994 - protein, 421 aa, unknown
  TnpB Polypeptide
VLVSSFHISYIGRGQFQKLNRECKQKSHAPYIVGVKKGFEYRIYPNRQQIQLLDRIFGCVRWVYNFFLRVCIDTYEKTDKKPSCFDCIKMLPNLKGQEDTAWLAEADSNALQQAIIDLDRAFDNFFKRKSQGVGYPKFKKKKVSRKSYRTTKARIIDGSHVFIPKLGVVKARISRPVEGRIVSATIKQVPSGKYFIVFTCTDIPEPPKSKTGKAVGIDLGIKTLVTTSNGEKIGSLEGSKKLEKKLAREQRKLSRKKKGSNNREKQRIRVAKVHEKIANKRKDHLHKVTAKLINESQVVCAETLNVEGMMKNHYLAKSIAMQSFATILGFLEYKARERGKIFVQVDRWFASSKTCHSCGVKADTMPLKIRSWKCESCGTRHDRDINAAKNILAEGMKILEGTEGHSGTTAESFAVTLVERM

SEQ ID NO: 41995 - protein, 572 aa, unknown
  TnpB Polypeptide
MRTIEFKLSLNQSQQAKVNDWINVQRWVWNHGLHLLEEFDSFARWDKSSKSWVACCPLPWEYYKSEDGQLVPFARLAQTKPYRMSCPIPQAYHQPEIESPTFFGLLYYFAQKNHEDKPWFCEVPSKYVAGTLKSLADAWSEYKAGKQKRPRYKRYKDKLKTLVNNNSKSIKISGNRITLPKLGKVTVKTLDKRWDASVPIATLKIVKEPSGYYLQLTGELPKESFKPSNKAVGIALGYRDLFTNDGGKVVEPPAYYHKLEKRLQRLQRKLSRQQNLCPISTYNPELGEHFLSCPISPHKGSNKAKTQQQLSRQHEKIRRARKAFNHKLSTKLVREYGAIATAKSEVRKITRRPKPIVNKEGTGYDPNGAAIKSQFNKTILANARGQLTALIEQKAIVNRREYIEIAPKDIPDEPRQHSERYSKRLQLPRAVYLASFYGRYRAWSWELKPGESSVTLNQEATQVAAPRDAGTTTRPSSSSTNKRREQVGVPPCTTLPEVSNPLSEQHSAAAGAKVTRATAQSSSRIELQSATSTESELSTQSQRAKRQSSAPTTSENKLRRRKRRPAVETDLV

SEQ ID NO: 41996 - protein, 410 aa, unknown
  TnpB Polypeptide
MSLPVRVTVTARVEAVTPKGDEGLLVEFLKTYRDSVQLVIDEIWGLSEVPSWMELHNMFYSRLIGMGFRAHHVSEIYKRAKEVVESTRKNSGSKPVLKKLTARIHTLDYKINLDKKTLRLAVLHGKWIELELKWYSYLNKYLDGSWKPGEILLSYRYGRILVYITFHKDIVFKEYSTVMGVDLNFNNVTYTIINLNSELVSIGVIPFKGLKRALHYRKLAEKLQRKHPRDWRFLKWARRARARWLSRARNILVDTAHYVSKRLVEVAREYNAVIVFEDLEKIRENNNGGKKLSWEKPLWCYKRIQEYTEYKALIEGIKTIYVNPAKTSKKSPNNRKIKFINYRFVELGEVVTTRDVVASWNLALKGLKRMKGSRVTWSPDSPRSEAVKTRAKRGNPETKKHLKTTTATHK

SEQ ID NO: 41997 - protein, 378 aa, Chloroflexi sp.
MLIYEYKLDGTKQQYSAMDEAIRVTQFIRNKCLRLWMDEQGISQNDLQCYCAVLAREFPFAARLNSQARQASADRAWNAISRFYDNCKQHKPGKKGYPQFQHDNRSVEYKQTGWKIEPDGKHIILTDGCSIGRLRLVGNPKQQIAAFPLKQIKRVRIVHRADGYYCQFSVQAERQVEHIPTGSVVGIDMGLKVFSTDSNGNTVENPRHYRKAEKKLKRLHRRVSKKQKKSKNRKKARNQLAKAYLKVQRQREDFARKTANTLVSSHDLIAYEHLQIRNLVKNHKLAKSIHDAAWGQFLGWVKSYAVMHGIEVVAIPSQYTSQDCSGCGERVQKTLSTRTHICPNCGLILDRDENAALNILAKALDGTVGHTGTHERVS

SEQ ID NO: 41998 - protein, 273 aa, unknown
  TnpB Polypeptide
MVGIQALEPYPSNSMWTRVPLTFLHQTTDHFLDAANYVVDVAWKPDWKITSKQKLHDQTYYDVRDESPLPANLVQAARNRAAEAVKGCVERWKKGKKASKPHFTSRFASYDARTGTVNDDHATLATIDGRVTADFILPDERRDTPHSAYLFNDDYDVNGATLHYDEVEDCFYLHVRTKPAVENDEAEQGDAKHVSVLGVDLGITNIATTSTGRFWSGGELNHWHREYEKRRGDLQQTGTRWAHENVQRVGRKANWALRAVSSHDLERTCEGSS

SEQ ID NO: 41999 - protein, 483 aa, Firmicutes sp.
VKTTVRGTILQLIEVQKNFLDNLMGRYCAAVRWSFKRLLDGWKVQDIRISVQAKFSLNSRQANDAVYDAQSTIKSQHELVKYHYENAKAKPQFTEKRIAKAKTPAKIAKLQKRLDKDKEQRKLAKWQHYLETNTFPPVVFGGKKLFLERCKGSITREEWREARSNRYLSRGDKTKGGNLNTRLYEIDGQIYLDLAAEQVQTGRSVRYNRITVPIYLAHKPSKKTGKINGINYRQMVLDYLQTGGAYQVEILRREGKYYVHVTIEEEIPVPYNAIGVTGIDTNPDGLGMVMVDYLGQYRGSQWLGEGEWTYARSNRKDNLIGEMAKQAVTAAKSKGYAVAVEDLKFKNDKSVTAKFNRMSHGFIWSKFLEYIDRCAAREGVPLIKVKPAFTSVIGTLKYQHMYGLSTHQSASYVIARRGLEFTHENIPKVLLEKLIKKKPEFKLMTNWKQWSAIKKAIQKHLKKKGVNSLVSWHVYRKELLDIG

SEQ ID NO: 42000 - protein, 408 aa, Firmicutes sp.
MVKAFKVQLIPTKEQEEKFRQSAGVARWAYNYALGKQLKNFEEGNKFIREGELRKEITALKKTNEYAWLGDVSAQIPKQAVRDLDQAYKRFFEIKQSITEKYTNKTLEKAKRTGKKLTAYDLNGHPKFKSKHKSMPRFFQREDKLVISNGKVKLEKIGWVKIAEKDRFPAGKYSNPRISFDGFYWYLSVSIELENNINYQPKTEGIGIDVGVKDLAIFNSGEKIKNINKTKEVRRLTKKLKRLQRQASRQYEKRKKEGGENRYRRTCNLLKLEKKILSVHRRLKNIRLNHVHQATAKLVKAKPAFIAIEDLNINGMMKNKHLARAVQEQKLYEFRRQLIYKCDWNGIPLVLADRFYPSSKQCSHCGSIKKDLKLSDRTYYCKHCGFKINRDENASINLKHYGLEQFAS

SEQ ID NO: 42001 - protein, 513 aa, Alkalihalobacillus sp.
MKTTRELKLKGLSKQDKRELDDLLRVFSAMSRFAFNRLLEEEKPGDLNKTLPSKFKMNKRYAEDAVLQAQSIIASQKERLPARIEDTDVKLTKLEKKIHLYQTGQRKPKKVDLQTCLNGLSMRKEKLERKLFELNSYKEKETIPPVIFGGKKNFVLRRKGLISKQEWKDLRTNHLYARGDKAKKGNLNIRLIHHDDRFFLEIANPLLTPGGKKYAPRMKVEVTVPNKYMEEIVNIAIANDPKKGPFQAYSIEIVRKNGEYFVHFTYDEKEYGEAVYEIPEYHDIIAGIDLNIDRIVVTLLTKQGNFIESHIFYCHKLEYTSSNKRDNIVGETVKNLFNWLIEKKVGAIVYEDITLKQQHESNKRFNRQTHTFAKKKLTNAIVRNALRMGFHFKKVNPAYTSVIGRFKYSKKYGISVHEAASFVIGRRGLGYDEKLPKEVFHVLRTVVKPYLISKLGSMEESVKRSKQGKKQRQYIGMLLKNIDSFKEHHLWKIWNVVHKTLRFDQYKFKLKEV

SEQ ID NO: 42002 - protein, 371 aa, Alkalihalobacillus sp.
MTKRNKAYKFRLYPTDQQTLLIRKTFGCVRFVYNKMLAERIETYETLKDDKEALKKVKHPTPSKYKKEFEWLKEVDSLALANAQLNLDKAYKAFFKGNAKFPKFKSKRHKQSYTTNVVNGNIEMLDGHIKLPKLKNIKLMQHREIPIENKIKSCTISMTSSGKYYISILTEYEKEIKNKEVKTVVGLDFAMDGLFVDSETGKKANYPRFYRQMLGKLATEQQKLSRKKKGSSNWNKQRIRVAKLQEKVANQRWNFLHHKSKELATNYDAVIVEDLDMRGMSQALKFGKSVADNGWGMFTAFLQYKLKDQGKHLVKIDKWFPSTKTCSSCGTVREIKLSERIYQCTCGLKMDRDYNSALNIKKEGIRLLAAA

SEQ ID NO: 42003 - protein, 433 aa, unknown
  TnpB Polypeptide
MALVGISNEEIMPYRNVFKHRNILIYWLVFQMRRTNTFRFSPNKKEEAELFNLCDLSAVLWNLISFRRRRSFFKGKLDWDTDKEYKEFAPLIGSATAQQIIRKNNEAWKSFFALLKKKKEGKLPDDIKKVRPPGYWKDKKTGKRILRALIRNDTYKIEDGRLSLPKKMSMKIKGNKKWEGKQGRLEIYYDHLSNHWYACQPVECEPLHQPIGNKKAYIDLGVINLLATHIDEDLRAIIYSGRPLLSDWWYWTNKISEIQSELKKVNGKDSSKGMSCAYRKRKRIFRQSVNTIIYRFVETCWEKGVSEIVIGDVRGIRKNNKKGKKTDSMIHNFWSFGYIYDRLRIMAENFGISLTFKDERDTSRTCCICGKKHRNGRIHRGLYECKTHNKTMNADVNGIANIANPIFPEPVFERPRDNWVLANPILVKVKVRD

SEQ ID NO: 42004 - protein, 323 aa, Mycobacterium sp.
VIVRTVIAGRDTYRMQLVCDGGPTKRHAAGQGRVSFDLGPSQIAVAVQHGDGSWEGWVEPLAEAIRLDTARLRRAQRHLDRQHRSGSPECFRADGTHKWVRCGWRRSAAARRTTMRVGELHRRLAEHRKTLHGAMGNRLLSYGAEIACERLDYVAWQKNFPRSVRDRAPGLLVEMLRRKAESAGGTPLYEYNPRTTALSQTCLCGTKKKKPLSQRVHRCECGITEDRDLFSAHLGLHVRTGFDGVDRLDLQAANIGWLHRQDVDESPKSSPRAQSARKRRGRRHPLSRRSVARINARRKAKAAVRQSRSAQTSTTDQPTAIAA

SEQ ID NO: 42005 - protein, 338 aa, Gemmatimonadetes sp.
LTAGATEFFAHIGSETIQRVNAEFATRRQQFKKTKLRWRVSSGSKRSLGWIPFKAQQLKRKGNGLRFSGKAFRVFEQELLQDVKWKSGCFAQDAVGDWWLCLPVERSVSDTPAPLKAVGIDLGLKDTATTSDEDKLQAGQFYRGIEKKIAQAQRRGHKRQAKRLHRTAARRRKDALHKFSGQMVGKYQQIIIGDVSSLKLARTRMAKSVLDAGWGILKAQLKYKGEYAGRCVLIVNERNTTRTCSKCKALTGPSGLDRLVVRRWVCSGCGVTHDRDVNAARNFLAAGVSWKLESKSSEAVAKMRAGPSESPFGRRLQTAHCCDGRKSMVVSEWVKRAA

SEQ ID NO: 42006 - protein, 376 aa, unknown
  TnpB Polypeptide
MARTVKRAYKYRFYPTPGQAAELARTFGCVRLVYNKALEERTRAYTLQGRRVSYVESSAMLTQWKRSGDYDFLSEVSSVPLQQALRHLQAAFANFFAGRAKYPAFKSRKKSRASAEYTRSAFRWRDGRLRLAKMDGPLDIVWSRPLPGGAEPSTVTVSKDAAGRWFVSILVEETITPLAPVDAQVGVDAGLKSLLTLSRPVDGLTDEAGKVANPRYERADRRRLAKAQRTLARKAKGSANRAKARRRVARVYARIADRRRDFLHKLSTRLVRENQTVVIEDLTVRNLVRNHSLARAISDASWRELRGMLEYKSQWYGRNLVVIDRWFPSSKLCSACGTLQQSMPLNLRQWTCSCGATRDRDVNAAKNILAAGLAER

SEQ ID NO: 42007 - protein, 374 aa, Nonomuraea sp.
VKFVVQVRLFPTPAQEAALADTLRLCNAAANLVSRTAWETKVFRNYDLRLHTYGELKSMGLSAQPAQHVIKKVADAYTTVKAQVKAGIRQPLEKPIGFRKDAAQPFDDRCLSWQIPDRTVSIWTTDGRAKGVRFGCSDPQARALAAYRKGESDLVHRDGLWLLIATCDVPDTDVTDPDGFLGVDLGIANIATTDDGTRHAGNALNAVRHRNRELRRRLQAKRTKSAKRLLKRRRRAEARYARDVNHVISKSIVTEAARTSRGIALEDLGGIRERVRLRKPQRVTLHSWAFAQLGQFIAYKAARAGVAVVYIDPRYTSQGCSTCGHIDKKNRPDQETFCCTSCGFAEHADVNAARNIASRGAVGWAVSHAADDAA

SEQ ID NO: 42008 - protein, 427 aa, Burkholderia sp.
MQRLQAYKFELRPDGQQERQMRRFAGACRFVFNKALALQKERYAHGEKKLGYAGLCKLLTAWRKSTETAWLADAPTHPLQQSLKDLEQAYANFFAKRADFPLFKKKGLSNSFRYPDPKQVKLDQTNSRLFLPKLGWLRYRNSREALGAVKNITVNLSCGKWYVSIQTEREVEPLIPQGDAVGIDLGIARFATLSDGSFYAPLNSFRRHEAALRKAQQAMSRKVKFSRNWIKAKARVQRIHSRIGNARRDYLHKVTTTISQNHAIVCIENLRVRDMSRSAAGSARQPGKNVRAKSGLNKSILDQGWFEFRRQLDYKLAWNGGYLIAVPPQNTSRTCPCCDYISANNRRVQSRFECVECGFEENADVVGAINILRAGHARCACEVSDAVTSPAAGTHRSDFGGGSMPRLNAVGISAFRPERMSKETRAC

SEQ ID NO: 42009 - protein, 438 aa, Thermoflexus sp.
MRVMQAFRFELDPNQEARIALAKHVGAARFAYNWGLARCREALAHGERIPSAMDLHRMWNAWKRQHAPWWVEVSKCAPQEAFRDLERAIRNWRDGRASFPRFRRKKVLEDNGARLTGSIRVTPRHVQLPRIGKVRTKERTDRLVALLHDRKARILSATVSREADRWFVSLTCEVERLDPEPREARGPEDVVGIDVGLDSFAVLSDGTRIEAPKPLARALRLLKRRSKQLSRKQKRTVVEQDPETGEERKRTVFPRNYEKAALRLARLHRRVRNIRRDFLHKVTTELAKAKPVLVVEDLNVRGLARSPYLSRSISDVGWGSFRRMLEYKCRWYGSVLITAPWHFPSTRMCSRCGWIGPALPLSRRVFRCEACGLEMDRDLNAALNLRNYGLAVLKGPTGSSPGSDACGDPSGGGTASGRSTSHGSRKQEAAGHGFRPSG

SEQ ID NO: 42010 - protein, 389 aa, unknown
  TnpB Polypeptide
LLKSFRTEINPTPEQRIQINKTIGTCRYIYNFYLSHNKELFENGKKFMTGKAFSVWLNNKYLPEHPEYAWIREVSSKSVKKSMENACIAFQRFFRHQSDFPRFKKKGKSDVKMYFVRNNPKDCRCERHRINIPTLGWVRLKEKGYIPTTKDGYKIRSGTVSISAGRYYVSVVIDMPDPALSVQKPSGTGIGIDLGLKNLAVCSDGKTYRNINHSAEIRKLEKKLRRAQRCLSRKYQNNKNSKKGEAAQKNIQKQKLKVQKLHQRMEQIRTNYINTVIAEIVKTKPSYIVMEDLNVKGMMKNRHLSKAVAAQKFYEFRCKLKFKCEENSIELRIADRFYPSSKRCHCCGQIRKDLKLSDRIYRCACGYTADRDFNASLNLRDIETYEIAS

SEQ ID NO: 42011 - protein, 344 aa, unknown
  TnpB Polypeptide
MMRTASIKLEVTPAQSDALGALRSAYAGACNLLVPVVQEQRVWNRVALHQLAYTSLRERSPLGSQMCCNAIYSVCQAYRAQKERGCISPEAAIPLIHFKDGSVHYDKRTYTLKPDGTLSLYTLAGRITVAMRPGRHQRRILQGGIPREAELIRRNRKWFFNLVVESIDTPARASGPVLGVDIGELNLAATSTGRLFGGEALRHRRDQHQALRRRLQSNGSQSARQKLRQVSGKEARRVRNLNHEVSKAIIGEAQRIGASRIVLEDLTHIRERIRAGSMCVRACIAGRFANSRTLSSTRPAPSVSRWCTSTPPTPARTVRPVVSEGNDVGTGSSVDTVVSGRTAT

SEQ ID NO: 42012 - protein, 451 aa, unknown
  TnpB Polypeptide
MRRVEQHVIEKTHAPFRAIDEMALASKNLWNLANYHVRQSFIFQHTYLNNTAIFHLLKQTQAYKALPAKVANQVLLHLHGSWTAFFEAMEVYREHPELFRGRPGLPTYLHKTQGRNLLVFEWGSIWKADLAHREIAVSQLGRIVETKQHPHSVQQVRIVPKADHYVVEVVYQAEERRAPGLDPDLLVALDPGVNVLAALTSNKPGFLPRLVFGGPVKAANQLYNKHREHEQKQLAKGKDHRFTSHRLDRITTKRHRRMMHYLHTASRRIIDLLVAEGIGTLILGKNPFWKQQVELGKKHTQEFVQIPHAKFLDLLTYKAEAVGIRVIVTEESYTSKASFLDRDVLPIYDPKQGADQEEKPRFSGRREGRWYRVKGRAPIHADVNGSYVRRFGAYQISPKGDEVEGNKPQGHPTYLTRKLKGENSMLGTWLNAKVCSVMHRKSCTHGETCIG

SEQ ID NO: 42013 - protein, 131 aa, unknown
  TnpB Polypeptide
VKELDPYGSSFYCSRCGWENKDLNGAVFECGGCGLRIDRQLNAAINLYMRLRFGYTEKWVGGRKRVQLRMEGASQKEWWDRVVLPSLLGGCVETGGKRNGTSELVRFLNDAVKPKLYAYDRYNDMYLRIPT

SEQ ID NO: 42014 - protein, 388 aa, Bacillus sp.
VKKSFRFRIFPTKKQAELINKTIGCSRFVFNFFLNKQKQKDSYWYVVEEMVQNGQLSANHWKGEFFNRYESVKAVRQLKEHYPFLKEVDSISLQKSVENLADAYQRYYKKQNKAPKFKSKKNKVQTYATKQTNGNIAILDNHIKLPKLGLVRFAKSREVTGRIVNATIRRNPSGKYFISVLAETEVVELPKTNSSTGVDLGLTHFAILSDGTKYKNNCYFKVLEQRLVKAQQVLSRRITGSNNWNKQRMKVARIHEKIENKRSDFLHKTSTDIIKNHDIIGIESLQITNLMKNKKNAKSIADVSWYRFKTMLVYKAEWYGKTVVEVSKTFPSSQLCSSCGSKNKAVKDQGLREWTCVCGAYHDRDINAGINLKNEANRLLTVGATGVA

SEQ ID NO: 42015 - protein, 392 aa, unknown
  TnpB Polypeptide
MARKSRAAEGQVIQYTTLKVRLYPTEAQAELFENTFGCCRYIWNRMLADQQRFYLETDRHFIPTPAKYKKDAPFLKEVDNQALTQEYNRLSQAFRVFFKDPGHFGYPNFKKKKTDRDSFTACNHVFQSGPTIYTTRDGVRMTKAGIVKAKFSRRPQAWWRLRRVTVEKTRSGKFYCSILYEHEEKTPEPKTPVPQATLGLKYSMGHFYVADSGHRADPPRWLKQSREKLVKLQRRLKRMEPGSKNYWEAVRKYRLLHEHIANQRRDFIHKESSRIANGWDAVCVRGDDMRVISKAVTHGNALEAGFGTFRECLRYKLARQGKELIVIDRYTPTTRTCSACGLVLDDEVSCKKTFWKCPKCGAVQHREVNAAKNIKAQGLAQYFRIQERRESA

SEQ ID NO: 42016 - protein, 313 aa, unknown
  TnpB Polypeptide
MAGNIAPEAAAAVRYTVLKLRLHPTPEQAALMEQTFGCCRYLWNRMLADAGEFYAATDLQYIPAPARYKKDAPFLRAVDSQALCAVHQDLRQAFLDFFRRPDHFRRPRFKRKKSGRDSFTTPCRRLPSGPTVYLTEEGVRLPKLGVVRAVFHRRPLQGWSLRSVTVTRTRSGKYFASLACSYEARIPRALSVEEIEGFVRDFGQAARRAREAGFDAVLLHACTGKRGSRHYEAQLQKLRLLHERAANQRRDFIHKESRRIANAWEAVCLGAGTGLLEECLRYKLEEQGKRVIVVAGPAGTPEELRDQGLAQIA

SEQ ID NO: 42017 - protein, 387 aa, unknown
  TnpB Polypeptide
MTKKQGNKTDYLTKGNLKRYEDKIWEFFFRTERQCFKKKWYSFHHMIETDGVGCSILMLRKDKVGKKVRISKTPKQEEYIDELKNYSKIKDKKIVSIDPNLSDLLYCVDKDTKERNFFRYTQNQRRKETKEKKYKKIILDCKNEKINNKTIIQLETEVSKFNRKTLNIDEYKKYIKKKNEVNSLLFKFYEKRIFRKLKLNGYWNRLKSEQRMINRFKKIFGKPDETIVCVGDWEQRKHRKYKEATKGKGFRTLFRRNGYKVYLVDEFRTSCKCSNCNGGDCIKFRKVRNPKPKKNNQILSHGALMCKTCNALWNRDENSSRNIYKIAYNAINKKERPNYLCRSKKVENDLIVRSDTSSVCRLQCNSLEFTPVEAGGLMKLITQPKFT

SEQ ID NO: 42018 - protein, 486 aa, unknown
  TnpB Polypeptide
MLRTYELKNCMNKGKKEKILSVMEEYRKTASLISKKQWELFYKQGAFNKNHPVREIPSKLSERYKQVIAYQVISILDSFISNRQNDFIRIVTRSSISEEQRIKLLYINKYNLWFKKEVSIPLYDSKGNRIEDKFELIDSETLKLGRVIMKHIMSLHRRPSYNHINMALDNKVAVISKKVSNKAKEFDYWIRFSTLTKNKPVYLPLKSNPYFEEIKGKTKKFCQINIDRDCNMTINLIKDREKCFDYVSHTPEIALDIGLNNLFATDRGDLFGREFKEKLIEYDKIITNLQSNLQKQQLKPLSSRRYRELIRKLRAHLKNEVRRIINKIIKLYKPGTIILEKLNFTSPNLSKRMNRILSKFGKREIENKFNSISEEFGIVITYINPAYTSQECSRCGYIDKGNRKNREKFICKLCALKLHADVNGARCCLKRSSIKEVSIYKSKKSVLCILTGRFLRDMERLGRLYSKAKVLTDKNPYFISETKGFL

SEQ ID NO: 42019 - protein, 651 aa, Micromonospora sp.
VSGKLPLAEGEASRTACARALLRSGVDEESGEVLSQAVLAQRVGWCADLVAGMVSGLLAERWNAGDVEVLASGVDAGGRKLPSNAWMALRRLGWIVTTPEGVKVNDRVVRMAQEQAGRALRSASWRAELTAGVLATWPADPRQRTAHEWEQIRQAVPGGEHLPSRVIKSRTQQAAKFLAVNGRLPVDVFELEGVPRVARMLLLAACDRQQATIERSDTDPRRVLLRLQLPTRPDPRSYRDWTWVACPIILPPTVPAGAVVHLPTLRLTGRQVRADLAYTHAVPKAQRTGHTVAVGVDWGLNTLLCAGALRQHEGGRITELGAGGQFRAAGILAKQHRLRRLSERLHAKADHYQRLTGRDEQHHLAGKQAVLRDEIRHLSDRRTNLNTALAWAAARWAVDQAIASRATVIYVEDLRSLEARGMGATLNTRLSQQVRGQIVDRMRHLAAEHGIAVVTVPARNTSKHCPQCLTPLRHRKAPDKPTVAGWKWVICPHQSCRWQGDRDQGAWRRIAARGLTHQAKTVTDKTTGHMVIRAVVDKLEASAVITTTSRGDRSKTGPTRHKPPRPAPRRRRAPSPTRPHNRAGKRPEGHAPTDRRLPRAAHRHQGVNTISTPTTGHSHEEPPWARDSTSTPTRPHHGGKRSRKLNPTQDH

SEQ ID NO: 42020 - protein, 377 aa, unknown
  TnpB Polypeptide
MEVKRAYKFRFYPTPQQAEVLARTFGCARFAYNHMLRQRTDAWFQRKEKINYNQTSAMLTALKKTPEHAWLNEVSSVPVQQSLRHLQTAFSNFFARRAGYPAFKHKDGAQAAEYTTSAFKWDGKALKLAKMDAPLNIRFSRTISKVAVVSTVTVSKDTANRYFVSMLCTDEVRSKPEAVGRVGIDLGLTHFAILSTGEKVASPNTFRRNETRLAKLQCRLAKKQKGSANRRKARLKVARLHAKITDSRRDFLHKLSTRLINENQVIAIESLAVSNMQKNRCLSKSISDAGWSEFVRQLEYKAHWYGRELIGIDKWYPSSKRCSGCGHTAKAMSLKVREWTCPECGSVHDRDINAARNVLAAGLAVSAHGETVSPVCM

SEQ ID NO: 42021 - protein, 204 aa, Nitrospiraceae sp.
LRTRSPRYDGLVDNLRDYLENEINRCLNRFVFLYRPAEIVVERLDFTSPGLSRRMNRLLSNFGKKQVKKKLLALSEEFKIEIKITEVNPAYTSQECSECGYIDKKNRKNTRLFVCRCCNKKIDANVNGARNIRDRSSEEDISAGITLSTNKEQVLRILTCQFLSGLERCSQRLDRKAEGLLSDNPYFGGYSPQSKGIYNGQRDI

SEQ ID NO: 42022 - protein, 362 aa, unknown
  TnpB Polypeptide
MNGVRINIRGRGITMSGSLMLAKKMIKAKILELRAGKRILLEQECANHQRYLHGDKSALLYSATKQQADRFLNRLKKQNGGKLDPAKEYPMILRNDIYDVHKADTKLTQYWIRIPVAGKRGGINVPIGVSSQIPEGAETREAKLIRRGSDWYVYITIEKEVEERKPSSVLAVDLGIRNIATTVNSNDVGPKFYGKDLRINQAHFYKLRRALQKKRAYGAVKKISNHERRRTDSILHTISRRIVNEADRNNSVIAIGDLGIRADGKGRIFNRKLSNFPSYRLYRFIEYKADWLGIPVLKISEAYTSQTCHNCGARGLRVGGFFRCSNCGHEYNADYNGAYNIMKRAIGYISMAGAALTQPITR

SEQ ID NO: 42023 - protein, 399 aa, unknown
  TnpB Polypeptide
VQLTYKFRLYPREVHEERLVETLELCRQIYNYFLAQWNGKEKIPSRFELQAQLPRLKDEKPELSKVYSKVLQMVLHQLYSNLKALLQLKKNGKKVGRLRFKGRGLFKTLCYNQSGFKLIRTGKRLDLLHLSKIGDVPVRVHREIKGKTKQVMIKRHNSGKWFACIYVEEEMRVEKRGIQRAIGIDMGIKHFLTDSDGKQIENPGFYEKTLKRIKVVQHWLSRKCEGSKNWERQKIKLAKLYERLVNQRDDFLHKLSKFYVDNYGVIAVEDLNIKNMVRNHNLAGKILDASWGKFLQLLELKAERAGALVVRVNPRGTSEGLSYDNPLRDYISANRIKMRGWDDPNAPAEMRPLRELIEVPASLVVEAGSPFRQGGVVHMLRGYQRGHCWRITSTASRSP

SEQ ID NO: 42024 - protein, 409 aa, unknown
  TnpB Polypeptide
MSYGYRFPAEFVNRTSSEVYFTWSAAQALVYNVKVQEAHYHYRFYQVFGGDIPKADQKYSHLLTDPYTKKRNIEWLEDVPGEVLRNGAVLYIKAVSGAKSGLTKKPKTKRIKAADRSLWLTSELFTIKDLGGRWYELILVVGKYRRQVARIRFKAHRSFEMPNSVHVKTKGSRLFVSFSSPEASDENRFPETEDEIRARLRMQTPEELLARTIGCDRGIVTPLQTQTEGFGLKRIEKKRMCAKDKRIKRLQKKLSRQERDSKGSRKTSRKINDAHTYGRNVRENFAHQTSHALVSNSDADVIAFEDLKIKNMMAAPKPKYDEAGKPLPNGRAAAAGLHKAIQYEGMWGRTLTYAQYKALRHGKLVVTVPAAYSSQQCPKCGHTHSSNRPEQALFACTNPDCRFNEDHQL

SEQ ID NO: 42025 - protein, 235 aa, Enterococcus sp.
MWQSYTTNNQKGTIYLEDKYLKLPKQKELIQVRLHRPVEGVIRSATISARYNESFYVSLLCEVQIAGVPTTNRWLGVAYDPQKLVETSSPVEVQMPLFRQTRDKMKVAKRKLVIKSKAAQKRKARLENARNYQKQKRKVMDLYQKQKLQKEDYLERVSGNLIRNYDYLFVEAVPSELSSADFQLQDWYKLITKLRYKAQWYNKTLLFINVNEQLNEPPDKKSMELEKIGKQVIFE

SEQ ID NO: 42026 - protein, 378 aa, unknown
  TnpB Polypeptide
MNMYKSYRFRLYPNDSQIIQLQKTFGCTRLVYNHYLEKRRKEHLTCFDTVKDLPNLYLEYPFLKEVDSCGLRCSLFDLEDGFKRFIKHQNNYPKFKGKYSSKRSYRTNYITSTYKGRNYENIKVDLKRKVITLPKLKEVKIRGYRNLESLPGRIINATISEYSSGKYYVSVLVEVNHLVAKIIPKRIVGIDLGIKDIVITSDGEKIKNEKIIEKYEKRIKRKQRELARREKGSSNYYKTKKRIAVLFQKLKNARKHFIHQITKKLVLENDIVVSETLKVKEMIEEKKFSKSLTDVRLSEICRVLEYKAKYYGKRYIQIDSYYPSSQECSKCGYKNEKVKELSVRNWVCPECGSYHDRDINASQNILFEGIKKYVKELI

SEQ ID NO: 42027 - protein, 198 aa, unknown
  TnpB Polypeptide
MEVVYQIEVPETKDIESLSIAAIDLGVDNLMTITTNCGVKPIIINGKPLKSINQYYNKKISEMRSALKLRNDSDWSNEMQRFTTKRNNQVDDYIQKSTKMVVNFCKGNNIDTLVCGYNSGWKQETDMGKKVNQKFVSIPYLSIVQRLEYKCENEGIKFIKTNESYTSGTSFLDGEEPIEKNYNKDRRIYRGLFQSEKG

SEQ ID NO: 42028 - protein, 367 aa, unknown
  TnpB Polypeptide
MLVAYKYRLYPNKEQQEYFTKCFGCIRFIYNRMLSDKIEYYKETKQKLNNTPAQYKKEFEWLKEVDSLALANAQINLQTAYNNFFKRPEVGFPKFKSKKNHNYSYTTNNQGGNIYVSDRHIKLPKIGLVRVKKHRDFDGLIKSVTISQTPSGKYFVSVLVNQNNKEKLPKSNNEIGIDLGIKEFCITSDGEMIKNPKYLKKSEKRLRKLQKDLSRCKKDSKNKEKCRTKLAKQHERITNQRKDFLHKLSIGIIRENQTIVLEDLRVKNMMSNHKLAKSIADVSWSEFVRQLEYKADWYGREVVKIDTWYPSSQICSNCGYKDGKKALSIREWTCPICGTYHERDINAAINILNEGLRMRTAGTVEIA

SEQ ID NO: 42029 - protein, 396 aa, unknown
  TnpB Polypeptide
MQLVERHIIKKSNPLYKELDNMSFLSKNLYNQALYRIKQEFFETGKYLNYLNLVKQLTKKQQIDYIALPRKVSQWVLKQVDNNFVSFFKSLKSEKVKHKVRIPKYLKKNGRNLLTFTNQAISTKELKRGYLKLSGCNNKLKVLHTNIQQVRVVPQNSVYVIEIIYNQQEPELITNNNYVGMDIGLNNLATVGGNNIKPVIINGKPVKAINQYYNKKLAKLKSRQDKCKNKKVNSKKIEILTRKRNNKVKDYMHKTSRMLVNHLVSNNVSKVVVGHNKEWKQDINIGKQNNQNFVQIPFNQFIQMLTYKARLKGVDVVTREESYTSKCSFLDGETIEKHDTYMGKRVKRGLFKSNNGVLINADLNGALNILRKEIPNAFEQGYGIEVCSTPTVLTVK

SEQ ID NO: 42030 - protein, 421 aa, Microcoleus sp.
MLTLTYSYKINPTSEQTASIDQTLDVCRKVWNYALRERRDWINSRKCRVDACSIHLEYIIPADAPYPGKSFQEKALTVAKKTNQELKSINAQVLQQVLRKLDTAFEDMKRKGHGFPRFKKFGQMRSFVYPQMLKDPLGLGWVKLPQLGKVEVIMHRSIPSGFELKQAQIVKKASGYYIMLSLQLDVNIPDAPPSGRPLGIDLGLEKFLATSDGELIKKPKFFKALASKLKLLQRRLKHKKKGSKNKAKLARKIALVHEQIHDTRKDFQYKLAHHLCDQAGMIFAEQLNLKGMAKGMLGKHTLDAGWGQFLQLLSWVCWKRGVYFAKVAATGTSQTCPECDAHVSKNLSVRVHECPECGYKTDRDVAAAQVVRNRGVSAVGQTVEEIACGRDASGAGSSSLDGTERDRKILEAILGSPSHNR

SEQ ID NO: 42031 - protein, 405 aa, Microcoleus sp.
MKRRVAKVRLYPTNEQQQSLAKAFGCSRWWWNFALNKTIQTYQETGKGLSDKALNALLPSLKKEYEWLKETYSQVYQSTTRNLSRAFLNFFEKHAAFPRFKSRKARQSIQYPQSIKIEGNCLKVPFIGLIEAKIHRLFEGGIKTVTISKDPSGKYFASILFEVEGDEPEVSTEGKVAGIDLGIKDFAIVHNGEKTSKFANPKHLAKYERNLARKQANLARKQKGSKSREKARRLAARVYERVRNVRQDFLHKLSRKLVDENQVIVVENLNVKGMVRNHNLAKAISDVGWGMFVNFLDYKLERKGGKLIEIDRWFPSSKLCSKCLYQMSEMPLDVRSWTCPNCGTHHDRDENAARNIRAEGIRLLWALGTSAPAAGGDVRPKLGRKPKQRHSLVIVEAPTIFGTPT

SEQ ID NO: 42032 - protein, 102 aa, unknown
  TnpB Polypeptide
VENLNLKGIAGGLHFGKGIQDNGYGQFLSMLGYKLEEREKYLIKVDRYFASSKICSVCGNRKKELALSERTYICECGNRMDRDVNAAVNILKEGKKIYKKCA

SEQ ID NO: 42033 - protein, 417 aa, Halobacterium sp.
MKEPMTLTLRFRAYLSDAVASEAWRHIDILRQIRNHAVRDYYTADYTDKPSEYDQHKKFTDWKQHWSVFSDPSAHAAQQAISQIHDDLDGLEEKQNNGYDVGRLRWQGSGEFRSISYNQSSRFNVDHNTGDDQFVRLRLEKLGWFKIRANRRVPPADDINEAILKKQPTGEWYVSLVVDDATQPSEKPALTEIDPDDCIGVDVGITSYIHTSENLTVDTLDLSDEYDRYARKQRGLARKEHGSSNWEAQRQKVAKAKRKIKRKVLDFQHKLTTWLVKAYDVVAVEDLDVKPMLEGSHSAKNKQDAAWARFRELLEYKAEVHGTHVISVEPAGTTKECASCGVSTDKPLWVREHSCPACGHTDDRDLNAAKNILNRGLRQLGAGRSESTPVQTALPTFTPQREAVDAKRVVEAGSPEA

SEQ ID NO: 42034 - protein, 390 aa, unknown
  TnpB Polypeptide
MEKAYSYRFYPTSDQENLLRRTLGCVRLVYNKALYERTQGWYERQEKIGYAQTSSMLTAWKKDDDLTFLNEVSCVPLQQGLRHLQTAFANFFDGRARYPNFKKKHQGGSAEFTKSAFKYRDGQLYLAKSKEPLDIRWSRQIPKGCDPSSVTVKLHPSGRWHISIRFDDPTIQPLPVNDNAIGIDLGVTSLIATSNADKVANPKQFRKHHRRLRLVQKRLARKQKGSKNREKARQQVAKIHLKITDSRKDFLHKLTTQLVRENQTIAVETLSVKNMVKNYKLALSISDSGWGEFVRQLDYKCRWYGRKLVKIDRWFPSSKRCSSCGHIVNKMPLNIRSWICPECGTDQDRDINASKNILAAGLAVSVCGATVRPEQIKSVKAGAMKQKPRS

SEQ ID NO: 42035 - protein, 389 aa, unknown
  TnpB Polypeptide
MQRTFKFRLYPSRSQEKQMKEHLRMAKDLQNKLLTYSIENYSKTGKFPSKFDLQRLAKGEGLYSQTQQTIAHKVSDSIFRVFKLRKKGIKCGFPRFKSIDRVKSLLYPQFGFKLGNKLKVTPFGEISIKQHRNIEGKVKTLTLKREPSGKWFAIFCVEPERKEPKTNHREKIGLDLGLKTFATLSNGDRIGNPRHLKRYENRLASYQQILSKKKKGSNNRNKAKLNVARIYEKISNARSDFLHKVSTQLVNDYSFIALEKLASREMSKKRFGKQINDAGWNMFANMLRYKAEEAGCKVIFVDPKNTTQMCSCCHQMVEKDLLDRIHDCPSCGLVIDRDHNAAINILNRGLRQIGQELPEFKPLREGTDTDKKLCQQVPLMKEEATCLSW

SEQ ID NO: 42036 - protein, 353 aa, unknown
  TnpB Polypeptide
MIITHEYRILPSDDQAALMTEWLELLRRQWNDALGQRLDWLTATRCPIDRCSLVSCPLPVSEAPLEPNYYRQAGSLKQIKQLFPAYRGIYAEVLQQNLMRLDKAWKAWREPDSTGKRRGRPRFKKAGELRSFTFPRINCPKAGAHLEGETLRLSKIGSMPVVLHRPLPEGFVPKTCTVVRKADGWYVCITLEDKSVPSPEPVPIKRAVGIDVGLDRFLTTSDGEVVPIPRYYRQAQKHLARQQRQLSRKVKGSANWKRQATKVACLQLHVARQRKAFHYQVAHWLVGQYDLLVVEDLNVRGLARTRLAKSILDAAWGRFLDILTAVAVKRGKQVLRVDPRGTSQNCCVCELCL

SEQ ID NO: 42037 - protein, 425 aa, unknown
  TnpB Polypeptide
MKRAYKYRIYPTEEQMVLLAKTFGCCRVVWNWALDMKSTAYKERGESISTNTLINRMKSELKAEKEWLNEVNSQSLQMSVRNLGTAYDNFFRGTARYPNFKGKYDRQSFQCPQHCSVDFGHGTISIPKAKDIPAVLHRRFRGDIKTVTISKTPTGKYFASILVENHAPLPEAPKSVPAEKVIGIDAGLKTFAVVSDGEEIKPPHEAKKEKRKLKLLQRRLSKKTKGSCAYRRTKQRIARLHEKVANRRAHFIGQTTYRLTHESQVQAICVEDLNVKGMMRNHHLAYSFADASIGEFMRQLEYKCQWQGIRFVKIGRFDPSSQLCHVCGHRYRGLRLEEREWTCPECGTHHDRDHNAAVNIKKFGLALMEALPPVRGKVKPVEQPPVDDRTHRVPKKQCCASVSAGEAGKERSNPCSEAALSLAAR

SEQ ID NO: 42038 - protein, 417 aa, unknown
  TnpB Polypeptide
MMYLTVKQQIKHLSKTDYLTLRELCHIAKNLMNEAIYAVRQHFFEEQTYLNYYKVYDLLKHSENYKLLNSNMSQQILKEVDGSFASFFGLLKLAKEGKYNTRDCKLPKYLPKDGFTTLVIGFVRLKDNTLLLPFSRAFRKTHQAITIHVPPILADKKIKEIRIIPKAHARFFEIQYTYEAECVQRNRNKNHALAIDLGVDNLITAVTNSGRAFIIDGKRLKSINQWFNKRNARLQRIKDKQSFGKAPTNAQRALARRRNNKVNDYLSKAAKMVINYCVEHDIGTLVVGYHKEFQRKYKLGKVNNQNFVNLPLGKLVDKFRYLCELNGISLVLQEESYTSKASFWDRDDMPVYGADNDRPHVFSGKRVARGLYRTAHGKCFNADVNGELNILRKSNVVSLEALYTRGDVDTPVRIRVA

SEQ ID NO: 42039 - protein, 568 aa, unknown
  TnpB Polypeptide
VQADALRLLDVSREVINQVIMALWSHLDDFGVRGDGPAYKQVEAMTAPPAFHGSRLWRCQAEMVGRLLRTQGERKKQFVLILPILKQGMIQPKTEARRAGKNRKAIREALADVRKANEDGGNTVELQSLIEQACNFYLEHGSFPDTYEEMQTVPVLKVGQLPYAGDDGAEKGQAYRLSLDLDQKQVTLALRFPDEDGTWSRSWRENTRKLSLPDPVISRLKSGEALAPTLREMQEIDGTRYAVLDFIVTVPVTVPAEWSDMQYVLGFDWGVRTLVTAATVDLDGHYVGRPWFLDTGCFDGRQARTRRQIDRLKAKIAALEAQRDRFPVGDQKREPSLRKRAILRRELDRCWRKYEARNRDLAHLAANILLLLATAQGCELIAGESLKSLKSTGRGRDAKGRWRNWRNNSQVRGELWRILRYKCHMVGIRLEWQHPRKTSHTCPHCGEAANTYRSPEHLSKVEDWGAWLKCSHCGWSGSRDYAAALNIARLGATFITHYRTTGRFYHASIAEKVVNPVSYIGTGPVLRLPPGTIRGRLLDAGRIYINGWKRSVTLRSSYPTETMLRLCG

SEQ ID NO: 42040 - protein, 262 aa, unknown
  TnpB Polypeptide
LSRKLGSVRIRKRDRLRYPVESLSSWTVKRENGKYYLVLLFNVDIQPKKPVEGKIGIDVGVKDFITLSTGEKINYPNRMKVLEERVKREQRKLSHRRKGSNNYLKQKQNVAKAYAKLRHYREDFQHQTSHRLIEENQFIGMETLMVRNMTRKAKKKLDANGKPMRNGQSRKRAMNRSILRDGWSGLVDKLACKAEWYGRTLIRVDRFYPSSKLCHECGRKYKELRLSEREWVCEHCGRKHDRDVNAALNIRDEALRLNQTGQ

SEQ ID NO: 42041 - protein, 422 aa, unknown
  TnpB Polypeptide
MWAYKVPLDPGDSHEESMEFLRDLTRQLYNHTRYLYTTAPDGEKPTYTDVQNRLPEWKRNGFWPALTDVHSKVLQMAVRRFFTNLSNLSKQKEAGRSVGMLRWKPPREYRSFTYNQTGFKLKNKSGQPVLWLSGIGDIPVRHYRDIPEDATIKQVTVKKNPTGDWTASFNLEFPDGYFPERPALDNIDELDVVGIDCGITKQTHDTNGLKVEPLDLSEEYERLEREQRSLSRKQHGSANWEKQRCCVAEVHEEIVAKREDYLRKIAYYYTTQFDVVAVEDLNVIGMMESPRNARSMASASWRKFLTFLDHAAEKHACHVVQVDPRGTTKECASCSVESEKPLWVREHSCPACGYTVDRDFNAAVNILYEGLEELGVVHSEATPVETATAASTDGGRESVAVDASRVVEAGSHVLKETVSTVE

SEQ ID NO: 42042 - protein, 413 aa, unknown
  TnpB Polypeptide
MEKRRTVPVKLDVDSDDTALLRKTVDEFLWAANYTTRHAFEGEYVTTSKTTLHEDTYEDVRDQTALHSNHVQAARNKAADACKSVVEKWKQGKKASMPYFTSPHLVYDHRTATFYDEYVSLATVDGRIEAEYVLPDKARNTPHAEYFFSDEYETTGAELHYSNGNWMLHIHCKRDVESDTSEQDATENGTVLGVDLGVNNLAVASTGTFWTGDEFDHWRREYEKRRSSLQQCGTRWAHQNMQSVGRKKEGGFKQTLHRISNELVAEAREYGCSIIAFEDLTDIRERTGGSWGHKWAFNRLYEYVEYKAEEYGISVEQVDPENTSRRCSHCGFTHPDNRDGEVFECLKCGYENHADYNAAKNIGLRYLRRNQTGSGGGAPVGVRLNSGMVNTNGGYSPAEESARVGVHAESPRL

SEQ ID NO: 42043 - protein, 431 aa, unknown
  TnpB Polypeptide
MCSYEAVKVRLDPTPRQERRMASHAGAARFAYNAGLAHVKEALDSGEPADWSHYGLRRWWNANKDALAVNHTTGEVWWSQNSKEAYSVAFRSLAQGLSNWSKSRKGQRKGKRVGFPKFKSKNTVMRFAYSTGFTAPNAGDPYGLKLPRIGRVHCMENVYERVNGARLIRVSVSRRAGRWYASLTVEREPTTGPAPRGGAVGVDLGVKSLATLSDGVVIPNPRALNTKLRALRKAQKALSRKVKGSARREKARERVARLYARVTDVRMDAINKATTMIADTYGTVCIEDLNVAGMVKNRSLARSLADAALGEFRRQLEYKTARNGAALRVVDRWYPSSKTCSNCGTVKAKLPLSERVFHCDACGLSMDRDLNAAINIEVAGSAPETLNAHGGDVRRTVGNADPVEVRTKRACQSAVRLGAGLGNETMQPSVS

SEQ ID NO: 42044 - protein, 395 aa, unknown
  TnpB Polypeptide
MQLTKTIILKLDTPDNDLAELLKAFSQGMNYASQIVFDIGKPIGSGQIQKATYKHLRNSLNLKSQMACNVARRVSGVYKTLQSQIDKKESEWQLLDFDPTSATFSFGRDFGISGDTLSITTLAGRKRYKFLNYQYAQRYLDGSWKYLASNLCLHKDGAYYFHLACEKDIPDKDMVDASNFMGVDVGINCLAVASTTDKQCKFFAGGEIKNYRNIRSKERQRLQKAGGRYLGTQSSMRLLRNLAGRETRFMTAINHKVSKDLIEFAIDNGVSVIGMEDLTGIRKRTENKISKEFRYEHSSWAFRQLQGFVEYKAKEAGITVVYVNPEFTSQTCPRCNHISRNNRNGIAFRCEKCSYETHADRVGAMNIEHRTRDLRYILESQGGNVSPPDATRLFT

SEQ ID NO: 42045 - protein, 416 aa, unknown
  TnpB Polypeptide
MLRRQAYKFRIEPTGEQQRKLRQFAGACRFVFNKALAVQQVNREEGGKYIGYVAMAKYLTAWRNGDETPWLKDAPVHPLQHALKDLDRAYQNFFAQRADFPRFKKRGQRDSFRYPDPKQIKLDQGNSRINLPKLGWLRYRNSRQVLGTVKNVSVSLSAGHWCVSIQTEREVDVQRHSSPLAVGIDLGVVRFATLWDGRQETVLQPLNSFKRHQHRLAKAQRQMSHKTKFSNNWKKAKARVQRINRQIADARNDYLHKATHAISQSHALVCVEDLKVGNMSRSAKGTVEQPGQSVRQKSGLNRAILDQGWGEFRRQLDYKAQWAGGWLVAVPPQQTSQQCPECGHTHAGNRQTQALFLCLACGHSDNADRVGSRNIRERGLKTLEGQGHAPIACEVNGAVWPSAAGTRRSEEAAFAA

SEQ ID NO: 42046 - protein, 360 aa, Kurthia sp.
MEQLKAYKFRIYPTEEQEIFFAKTFGCVRKVYNLMLDERMKNYEESKLDVSKKQKFPTPAKYKTEFPFLKEVDSLALANAQRNLEKAYKNFFRDQSVGFPRFKSKKNPIQSYTTNNQKGTVTLIDGKFLKIPKLKSLVRIKLHRQLKGEIRSATITRHASGVYKISLLVKEEIIALPKTNSAIGIDLGITDFAILSNGQKVDNHRFTLKMAQKLKREQRKLAKRRLVAKKKGIDLIDSLNYQKQKRKVAKLYDKIVNQREDFLHKLSTDIIKNHDVICLEKLNTKGMMKNHKLAKSIADVSWSSFVQKLHINVNTNMYISACIKMYRFTHFLYLNNLLFGKSLQQSELLLRDVKYDPISH

SEQ ID NO: 42047 - protein, 390 aa, Frankia sp.
MTIACCILPVMGSRVSKRAYRYRFYPNPEQVDNLARTFGCVRYVYSRALAERHRVWTQEKRRVGHAETDRMLTAWKREPDARWLAEPSKGPLQATLRHLQTAYVNFWAKRAGYPTFKRKGKTTDSATYFRGCFTFRDGQIALAKQTSPLDIVWSRPLPAGAVPSQVTVSRNSRGQYHVSILVEESVSALPASAGRVGVDAGVTSLVTLSTGEKVANPGHERRDRERLARAQRTLSRKAKGSANRAKARLRVARVHGRIADRRRDHLHKLSTRIIRENQTVVIEDLAVRNMVRNRSLARAISDASWSELRRMLEYKADWYGREVIAVDRWYPSSKTCSSCGARVEVLPLNVREWACRCGVVHDRDVNTARNLLAVGLTVSACEDGVRPSRS

SEQ ID NO: 42048 - protein, 541 aa, Moorea sp.
MQTMGRSDAKKPQGELDFLTQKAYLVLGGDNQDSQPQSVIAELVLPSKETTSHAKSPTYTPSSQERKSSKISGRDSTTKGKDLKPYWSELCAEISSQLLLPVETDLPDLGLNSLSTWSVSTVEKSWFSTNLKAVPSRNLPQIFSPLFTSSLAASTDSESTVRKSKKIRVFLNPEQRLTARKWFGVSRYVFNKTVKILSDGETKANWKAIKTGILTDLPEWCKAVPYQIKSIAIKDACTAVREAKKKYKKTSQINRVRFRSRKNPVQSCYIPKSAVSSKGIYHTKLGEITFAETLPDNICDCRLTSTNGNYYLVVPHEATNTRAENQGRVVALDPGVRTFLTFFSETSVGKIGDGDFSQIQRICSHLDNLLSRISKAKKGQKRRMRKAARRMIIRLQNLVNELHHKAARFLVDNFDVILLPTFETSQMSKKTTRKIRSKTVRNMLSFAHYRFKEFLKHKAQETGKVVVDVCEAYTSKTVSWTGELVNIGGSKIIKSKVDGRSMDRDINGARGIFLRALGDTPWLRNQLALVSQDLPLVDFGS

SEQ ID NO: 42049 - protein, 358 aa, unknown
  TnpB Polypeptide
MFVDGGGALAHIGVHQQGRKLRMVRRTQTQEDLGWPVLLGFKSRHRGLGFVCWRNASRSGNAIFHKTGRKSGVVVITGMNPKRWVKPGEKAHWRVVIHVRVSQPIRPYTSVHVDWTHRTLVFVNMPLPSSRTGDGKVGIDRGCVHTLALSDGTFMDMPKPSKAELKRLKHLQRRMARQDRVNEARGGRTAKFASKRRRKTLNQFNALQGHIVRRRNDWIEKTTTRLAQENILVALEDLDVQAMTKRPKPRPDPDNPGRYLHNGAKAKAGLDRSILSNNWSRLMKRLQDKMDANGGNLVIVPAAYTSRTCHQCGNVASENRESQAVFHCVKCGYDANADVNAAMNILSRALAKTGGGTA

SEQ ID NO: 42050 - protein, 354 aa, unknown
  TnpB Polypeptide
MAGIPNPILSSTDRIENTEWSAGLKRKKTIGGRVPGFKSRHRGLNFVCWRNKDKAGNAIFHKTGRKSGVVVITGMNPTRWRKPGEKAHWRIVVHVRVGQEIRPYTSVHVDWTHRTLVFVNMPLPLPRTGDGVIGIDRGCVHTLASSDGTFMDMPKPSRAELKRLKYLQRKMARQDRANEAKGGRTAKLASKRRQKTLSQFNVLQGRIVHRRNDWIEKTTTKLARENFLVAMEDLDVKAMTKRPKPKPDPNRSGHYLPNGAKAKARLNRSILSNNWSRLMKRLNDKMNANGGKLVIVPAAYTSQTCHQCGHVAKENRDSQAVFKCIECGYQVNADINAAMNILGRALIQTGGGTA

SEQ ID NO: 42051 - protein, 370 aa, unknown
  TnpB Polypeptide
MSMYRRYNYRAYPTRGQREALSCLYGACRYAYNWTLDQRELMRRRHGRMQSYTQLSGMFTQWKTNPGMEWLLAVSSTPLQQSIRQADVAYRNFLRLYKAGRTHIVTNHRTGKRHRTGLPRYKSRRDGEQSAEFTKSARFKVGHADGCKWGFLTLPKIGRVKLRWTRELPSTPNTVNIMLHADGSYEASFTVQVDDESDAPRPLHEACGIDMGLDSLMSIVYTDGTREKIPHPRTLNRKARRLRRLDKQLAREKKGSANHAKTRILKGQDLRSDTEPAQGHGVQAGVQGGGREPSRRLGDPERQGTCPHLHGEEPVGCELDAYHRPHPTTGRPLRQNRQTRRPVVSQQPDLLRMRVSRWPETARRAHLGMP

SEQ ID NO: 42052 - protein, 382 aa, Escherichia sp.
MRRFAGACRFVFNRALARQNENHEAGNKYIPYGKMASWLVEWKNATETQWLKDSPSQPLQQSLKDLERAYKNFFRKRAAFPRFKKRGQNDAFRYPQGVKLDQENSRIFLPKLGWMRYRNSRQVTGVVKNVTVSQSCGKWYISIQTESEVSTPVHPSASMVGLDAGVAKLATLSDGTVFEPVNSFQKNQKTLARLQRQLSRKVKFSNNWQKQKRKIQRLHSCIANIRRDYLHKVTTAVSKNHAMIVIEDLKVSNMSKSAAGTVSQPGRNVRAKSGLNRSILDQGWYEMRRQLEYKQLWSGGQVLAVPPAYTSQRCACCGHTAKENRLSQSQFRCQVCGYTANADVNGARNILAAGHAVLACGEMVQSGRSLKQEPTEMIQATA

SEQ ID NO: 42053 - protein, 470 aa, Nocardia sp.
VGRIHPWHLGGQRRIDVGAVWEAWRVMARHTTFRFCLDPTVEQSGVLSRHAGAARFAFNHCLQVVKTSLSQRSSDPKIVVPWTGFDLINEFNKWKKSVDAGRIFAVDGEGVAEVVVTGLAWRNQVCQQVFEEAAVDCGRALTAWSASRSGKRRGRRVGFPRFKRKATAVRSFRLRNKRSTSGRPLIRVGECDRPRSVVLPGIGSIAVLDDTRRLRRMIAKQRAKILFAALSHRAGRWWISLTVEAADLHPDLHHSALSETDRSGWVGVDRGLSAFVVAATSDGTEVARITDPPRALAARIHRQRRLAKSVSRKRKGSNRYNEAHARLRRHHRHVADIRRHFLHSVSNKLVKTHDRLVLEDLDVAGMLRNHRLARAISDASWAEFARLLEYKQRWRHGRVEIADRWFPSSRLCAACGRRNAELTLADRVFTCGCGYRLDRDLNAAINLARWAAAQHEPPDPQAGGRVINAR

SEQ ID NO: 42054 - protein, 213 aa, Megasphaera sp.
MRGAAPPLLSIINTRLFNRDYSFVDSGQVLSINTLGKRTKCTFEGEHFAEYLDGAYDLGTAKLVELNGLWYLHIPVTQAVEDFQKENVRHVVGIDRGLRFLTVSYDEQGKTEFVSGKKMATKRHKFQEVRRQLQSKGTKSAKRRLKAISGRENRWMSDVNHRISKTLVEKYGKDTLFVLEDLTGVSFEASHLSKTAKQNYDLRAGRSISWNNS

SEQ ID NO: 42055 - protein, 428 aa, Streptomyces sp.
MKLRYNVRVYPSASQCGSLARAFGSARVVWNDALRLCCDAYAKGLPRPTAAELSKQVITQAKKTPQRAWLAEVSAVVLQQSLRDLERAYSNFFASRNGARKGPRMGPPRMKKKTARQTVRFTSNARWCITDGGKLRLPKIGDIEARWSRQLPSKPSSVTIIKDASGRYFASFAVEVEDTPLPVLDAEETDTGIDLGLTMYAVLRGRKIASPKFFRRQERKLRRAQRALSRKRKGSNNRRKAQQAVARIHARIADRRRDFIEQETTRIVRESQAVYVEDLNVKGMAIRRGRLGKSVHDQSLGRFIRTLAAKCARYGRTFVTIDRWFPSTQLCSHPGCGRLTGPRGREDLHVRVWACAECGTRHDRDENAEANIRAAGRKRAAEMGYGAERRNACGEHVRPRKPGQRSVKREPTRSLAATRGEAGGNHPR

SEQ ID NO: 42056 - protein, 425 aa, Halonotius sp.
MEVRRTVPVKLDVDSADAVLLRETVAEFLCAANYVVDHAWQGDYKTTSKAQLQEETYDEVRDRTQLHANLVQNARNKAADAVQGVVGRWKQGEYAGKPHFSQPTVVYDKRCATFHDEYVSLATVDGRIEIEYVLPDANRDTPHSRYLDDDDYEVTGAELHNKDGEWFLHLRTKAEMESDTSEQATTGHSTVLGVDLGVNHLAVTSTGTFWSGDEFDHWRREYEKRRASLQQCGTRAAYENIQSVGRKETGRFKLLLHRIANGIIEEATENGCTVIAFEELTGIRDRLSGASWGHKWAFERLYEYVEYKAELHSIDVEQVAPENTSRRCSTCGFTHPDNRDGEDFECLKCGYENHADYNAAKNIGLRYLRRNQTGDGGGAPVGVRLNRGTLNVNGEYEPPAGESGQSGSPRESPTRNEANGEAVSE

SEQ ID NO: 42057 - protein, 366 aa, Halonotius sp.
  misc_feature (303)..(319): Xaa can be any naturally occurring amino acid
LRQTVRHGGRSSEPKTSSTILTTSKSQTTRNRRGSAATTTRRVLKGVVRKDAYTVEWGDRSRLEFVVGEELRDKHNSPKSRFRLELVGDPNWPEYDDQGRLELWYDETAGTFRASQPVTVSEQATPLAEESAALDIGANNLVACTTTTGQQYLYEGRNLFDRFRSTTREIARLQSKLKEGRYSSQRIRRLYRKRTRRRDHAQAALCRNLIERLYDEGVDTVYIGGLTDVLDTHWSVETNAKTHNFWAFKQFTERLATTAEEYGIAVEVRSEAWTSQECPQCGSTDRTTRQQDTLTCPCGFEGXXXXXXXXXXXXXXXXXSAAANSSASLREISRPSPSHSWARTIPSPSTASPIGWLVPPRATLKG

SEQ ID NO: 42058 - protein, 398 aa, Goodfellowiella sp.
VQLRYNYRVYLTPAQRDALGRAFGCARVVFNDGLRARQTVREQGLPYLSDGELSKQVITHAKTMPERAWLGEVSAVVLQQALADLNTAYRNFFASVSGKRKGRRLAPPRFRSRKDNRQAIRFTANARFRVLDNGRLRLPKIGDVPVRWSRSLPSAPSSVTVIQDAAGRHFASFVVQTEDAPLPELDTEVGIDLGLTTFAVLSDGKTITSPKFLRRAERALRKAQQNLSRKRKGSANRAKARVQVARVHARVRNARADWAHKHTTAIIRDNQAVYVEDLCVTGLARTRLAKSVHDAGWGLFTRLLQEKATRYGRTFGKVDRFFPSSQTCSACGAVDGKKPLHVRVWTCRCGVTHDRDLNAAKNILAAGRADRPTPVELMSDGTPVPQSAVKQEPAGTAA

SEQ ID NO: 42059 - protein, 327 aa, Natrialba sp.
MRTHRTFEASITNPKQVSGDLDQLGRAASKLWNVGRYYAQEQWDETGEIPDDGELKSELKGHERYTDLHSQSSQRVLEELAEAFNGWFTKRRNGDSRARAPGYRKRGDSHPRSTVSFKAAGFKHDGQFNRVRLSKGRNLKAHRSDFVLCEYELRPDVDLSEWDIQQVRAVHKYDEWRLHFVCRKVIDPEPPGDEIAGIDLGISNVAALSFGGESILFPGNALKENEYYFGRKKAKCDDSRSNERLRLDRKRTERRTHFLHTLSKHIVAECVERGVGTIVIGDLGGIRDDENGDPRNWGAHGNLDLHGWAFDRFTSMLEYKAETEGSR

SEQ ID NO: 42060 - protein, 177 aa, unknown
  TnpB Polypeptide
MYNFCWKEIRKSKNHQKIRKETGETAKAVSHKEKRSQNYYKTKKKIAICHEKITNTRKDYLHKMSHEIISENQVIVSEDLQIKNMVKNHRLAKSISDVSWYELTRQLEYKAKWNGRKYVKIDTFYASSQLCSVCGYQNTETKNLSVREWTCPVCGTNHDRDINAAKNILEEGLRQIA

SEQ ID NO: 42061 - protein, 395 aa, Paramecium sp.
MRCHEISWPSGKLDQHLRNKFSIGKHNDIEQYISIHGNNIEPEQIIETTKMNTETRKKEPSRRYINPFFLGKLWLSECPKDFRARATFKAADAYKTSLTLWRKGLIRSFEMKFSTKRRELDRGYCFGIEKKVKFEDTGLKKRDGKLIITGIDGDIRFFEKPPINKEPVAGCELSKDSCGDYYLHVPIFRKKKERKGDNFVAIDPGGVVPWAFYASKGESGCLGTEMNERMSNVSKKISTIDKKLSGQPKGDKNSNDVIERRKLFRKKKRIRDHEHYRVINFLTDRYDGIILPKLKTKNISKALKSKANHDMFDISHYTFLRRVGERCIESDTILEHPGEQWTSKTCGRCGKSNLPGRERRGTFREYKCLYCGLHAHRDVHAARNIFMKWYIELKK

SEQ ID NO: 42062 - protein, 380 aa, unknown
  TnpB Polypeptide
MIKAFKYRIYPNRSQEILFSKTFGCVRLIWNANVASFNSYDKEDNPKPSIIQKSDLIEDRPWLSEVSAAAIQQKVADFKETVKQYFSKNRGKKIGRPSFKKKGNTQSYRLPNQKFRIEGDRIRLEKIGWVKVVIDRNIPENGKILSCTISKNPANQYFVSITVDCEITKKPKTGKEVGIDLGIKEFATLSDGIVIDNPKYLRENQSKISRIQKYMSRKTKGSNRWHKNRLKIARLHNKVSNRRLWFLHNLTTYLVNNYDTICIEDLNVSGMVKNHKLASSISDASFSLFRTLLEYKCEWYGKTLSVIDRFYPSSKTCSNCGWKKDDLSLSDRTFACGNCGIKIDRDLNAAINIKRMGVDILYNRTSRDEVTSPGEAFKIK

SEQ ID NO: 42063 - protein, 378 aa, unknown
  TnpB Polypeptide
MQILKAFKFELMPNGEQVRKMKQFCGCSRFVFNRALAYQNEQYEADKSFKFNYNKIANLLPEWKRELTWLKDCHSQVLQQSLKDLESSFKNFFAKRSNFPKFKRKGEKNSFRFPQDCKLEQHNNRIYLPKIGWVRYRNSRDVQGEVKNVTVSQKCGKWYISIQTKWETEKPTPNGGEVGIDMGIVRFATLSNGEYFEPINAFKNLKGKLAKLQKQFKHKTKFSKNWQKLKAKIAKLHHKISNIRKNYLHQISSQISQNHAIVYVEDLQVANMSKSAKGDIEQHGKNVRQKSGLNRAILDQSWAEFRRQLAYKLVWNGGFLFAVPPQNTSRCCPSCGYTAKDNRQTQANFECVECGYQNNADVVGAINVLKRGQTIQAV

SEQ ID NO: 42064 - protein, 425 aa, unknown
  TnpB Polypeptide
MERRKATFKLYPNAREAERLTAWTRLHCELYNAALQERIDAYRRFGKSISYFDQQNVLPEIKAARPEFIELGSHALQQTLRRLDLSFQAFFRRVKGGQTPGFPRFKAAARFSGFAYPDLAGWKLIKHGSRGGTLRIGTGKDAMMIRLRGKHRFGDGAAPNDLTISRKNGEWFASVTLRVSEGVCSRERTDHQHRGADFGVNDWVTFDNGETIENPRWIRNELPRLADLQRQRARKKQGSLRYKRLSEQTARLYERIGNLRRDFVHKQTTALVQTCAVIATEELQPKNMSRSARGTIDKPGRMVKQKAGLNREILSAGLGMAYQMLAYKAVEAGTRLHLADTRQLKPSQRCSACWEITPKTLAQREHVCGHCGHTMPRDQNSALVVLIDAHTPGTGVAARPKPLARQRTKSKSLTCETPATTPKGV

SEQ ID NO: 42065 - protein, 407 aa, unknown
  TnpB Polypeptide
MKRLQAYKFELRPTGEQQRQMRRFAGSCRFVYNKALAMQKDNHAAGNKYIGYVAMAKHLTAWRNSAETAWLADAPVHPLQQTLKDLERAYSNFFAKRADFPRFKKKGVSESFRYPDPKQFKFDRPNGRVFLPKLGWMRLRLSREVVGEIRNITVSHSCGKWFVSIQTEREVEQPLPAATTAIGIDVGIARFATISDGNFVAPINSFKKHQQCLARYQRRMSRKVRFSNNWKKARARVQKIHSRIANARRDFLHKTSTTISKNHALVCIEDLQVRNMSRSAKGNVEQPGKRVAQKSGLNKAILDQGWAEFRRQLDYKLNWAGGTLLTVPAHHTSQTCPCCGHVSKDNRLTQAKFVCVDCGYENHADVVGAINILERGHRLLACGEPVQSDRSGKQEPTEATMREVAHA

SEQ ID NO: 42066 - protein, 264 aa, unknown
  TnpB Polypeptide
MQIVSSYGVEIKKKNIPLRSTLDIFRKAVSYLIPVYAETWEELSEIKNLQKRFNEAEHLVHETKKNHARFPFDRHFPKMPSYLRRAAIQHALGAVSSYQSRLSLWEKGELRGKPKLVCENHAMPVFYRDVMYKEAEPGEDAAHLKLFDGREWKWFQVKLLHTDMEYLRKKWSGKEASAPTLERKHHKYFLRFSYTEEVTLSKTAVKEQVICSVDLGINTDAVCSIMRADGTILGRKFINFSSDKDHLYHVLGRIRRFQREHSSR

SEQ ID NO: 42067 - protein, 455 aa, Moorea sp.
MKYTYQYKAFITTEQKLEFNFWLRVCRYWYNRQLGERFDWWERHRTPVNSCPLICHLPELRDRPSYYSQKKLLPGLKHSEIRVNWSGENLEFSRVPANTLQEVCKRVDKAFERFISGDKNNKRSGKPRFKSHARYRSFIVEGAGLSLHSCSVGGKFIYLKIPKIGLVKIRSHRHIPDGAILKQVQFINKNDGWFVNRKLDDPTVPNTPSEKIIPNWDNSMGMDAVLQWDHYLATSEGVKLPSVKYLRRNQAKLSKISRKKNERKRGSKARRKLAKREGRVHQQIARARKDFQYKTAHSLMRTGKKVFFHEKLNLKGLTRRNSPKPDKSGKYLPNGQSAKSGLNLSWADAAFGEFFLILGHIAEKAGAIVISKNPAYTSLVLSYRDQVIFTDCSIREYWDEIENLWVDRDINAAINIKRVGLDVFPTIKRRKGAIVVVGSTTDDTSKEVLRILRSV

SEQ ID NO: 42068 - protein, 528 aa, Moorea sp.
MAPSNAKKHQAAPDSLTQKACSVLGDDNQDSQQLFVTAGSVAANKKMTLFDKSLICTPSSRKQKSSKTSAQDLTTKDLVFEPYWNDLCAEINSQLLLPVETDLPDLGLNSLSTWSVSTVEKSWFSTNLKVVQNPSLPQIFSPSFTSSLAASTDSENTAKKSKKIRVFLNPEQRTMVRQWFGVSRYVFNKTVKILKNGEVKANWLAIKTGILNDLPEWCKTVPYQIKSIAIKDACTAVREAKKKYKKTAQINRVKFRSRKNPVQSCYIPKSAVSSKGIYHTKLDELTFAETLPDNICDCRLTSTNGDYYLVVPYKTTHTKTENQGRVVALDPGVRTFLTFFSETSVGKIGHGDFSRVQRLCQHLDNLISKVSKAKGKQKRRMRKAARRMVIKIQNLVNELHHKAARFLVDNFDVILLPTFETSQMSKKRNRKLKSKTVRNMLSFAHYRFKEFLKHKATENEKIVVDVCEAYTSKTVSWTGELINIGGSKIIKSKIDGQVMDRDINGARGIFLRALGDTPWLRNQLALAG

SEQ ID NO: 42069 - protein, 557 aa, Moorea sp.
MSRPKRQPTTTGFQSQLLDDGTQKGDSTASEHKASKDDLALKEQTRKISPLSAMQESLSTPKEMTLIDKLNFYGQNTQTQKLLQKLDHDSILNGESPSKYWNGYTALISVHLSSPTQTEPSDSDSLYLNGCASKVGSNSWFSMNANYPQNKNWSKISSPASTVSVLGFTDSENTKNKSAKRYKSKPRNQTVKLTPNSVKKIRVFPSKELHKVWKTWLNAYRWIYNWSIATIKNGYQGSAYDLQKLARKADRPEWVKTLPGHQLQEAVADAIDAVKQALANKGFAKFKSCRQTRQVIKFKAGNFQKGCWYPTKVKGLSFRSPQGFPDQCIYGTQLVWIKGKWYGIFPEYIEPTPTKQDQVIALDPGIRRFLTGFDGRNYIEIGCGDMGRIQRLCQHLDRLISRIDLSSAKRQRREMRKAAHRLRQKIQDLIKDCHNKSASFLVSNYKLIFLPTFDTSEMVVKSARKLHKKTARNLLTWSHYKFRQHLIQMADRHDVKVILVNESYTSKTCPECGHIHERLGGNKKFQCPKCGFSLPRDWNGARNIMIRALSASAFRWL

SEQ ID NO: 42070 - protein, 407 aa, Moorea sp.
MEFKAILKKSQQEAVDEAIRTSKFVRNKVLRYWIDNKGIGKKELYRYNTKLRDEFKFVKDLNSHACQASVENVERAIKHFFDNCKKKTPGKKGFPKFKKHCRSVEYKQSGWKLFPDKKSIKFTDKKGIGKVKLKGTWDLWWFGQKLIKRVRIVKRADGYYIQFCVKVDNFEKLENTGCAVGFDVGLKEFYTDSDGNTEPNPRFYRKSEKRVKFCQRRVSRKKKGSANRRKARNRLGRAHLKISRQRKEHAKRLARCVIRSNDLVAYEDLKVKNLVKNHCLAKSINDAGWRQFREWLEHFGQRFSRITVAVNPAYTSQNCSECGEVVKKSLSTRTHICKCGCQLDRDHNAAKNILNRALSTVGHTETYQNAWGDLASTFPDSVRVRAASPTANLVKQVSSLNQESPDF

SEQ ID NO: 42071 - protein, 360 aa, Moorea sp.
LKTLAFLDNALLHRWVRKEYQRGHSWVRNQIVYQQGGYKCKRLSRNTYQLELAGLVRGKRNKVVVRSNRKIKGQIRLIYNLELERFEVHFLVGHGVVDIPSERRSIGVDKGYTEAFYDSDGQAHGKGLGKAATKKSDRIYAKNRNRGKLWALHRKLEKIDPAKSARILENNLTRKTENRRYRQNQAELAAIIGAACKSLFNGEALKIFAEDLTQPIRNKRQSKTMSRKLNSWMKGEMRDSLQKWANWTGSVVTEVQPSYTSQIDSRNGTLLGHRTGDNFTGFDGVVLQADHNAAKNILDRGTDKDITRYMSRAEVQAVLLRRTARFLEGLELDLLDAVAIGILDSKHSRSQAFKQLLNGI

SEQ ID NO: 42072 - protein, 373 aa, Moorea sp.
MLLTYCYRIKPSDEQIAIMERWLELLRRHWNYALGQRLDWLKRTRTPIDRCSLVSEPIGEIPEPVNYYTQQAALKETKQLFPEYKQIYTETQQVNLQRLNKAWDRWRKPDVNGQRGGRPRFKKTGDLRSFVFPRVNNSRAGAHLKDRVLKLSRIGERPVVMHRPIPDGFSLKQCTIVKKADGWYCCISMKDDTLPEFLAVDSVKSSVGIDVGLEKFLTTSDGEAIAIPQFYRKAQDKLAKAQRVLSRRVKGSQNWEKAKNQVALLHLHLTRCRKEFHYQVAHWLCSNYDHYAHEDLNIKGLARTKLAKSILGALSVGELNSPRVAPHDAAWGAFLEILQAVAVKRGLLLQKVDPRRTSIECFNCGSRALEKFK

SEQ ID NO: 42073 - protein, 377 aa, Moorea sp.
MYALKRELKVNHKQSGFLAGCAGFSRFVYNYGLSIMMSSWDFDGVKASDAKRLTAIKKIFTNVTKKNPDFAWCNQYSSRIYQNSLRDLKKAFSRWRDPKLCSGIPKFKKKRHQCSFTVDDGHGKRLVKAGKLLRIPTLGTFRIKEAIPFNCGSQTFTISREAGKWFVSFKIEACPLPSMKHTHKKVGVDLGVKCFATLSDHTKIETPSSIKKAKIKLSKLQWRNRKKVLGNGPRKQKPSKNAHKYYQKLRQQHQHIVNSREDFLQKETTRLAQTYQEIKIEDLNVSGMLANHKLAEAISLLGFYRFRELLTYKQEFHGFKLTLVDRWFPSSKTCHKCGHKQDMPLQKRIYVCGGCGLIVDRDINAAINIEGWEPGFT

SEQ ID NO: 42074 - protein, 135 aa, Moorea sp.
LTFFSETSIGKIGHGDFSRIQRLCHHLDNLISKISKAKGKQKRRRRKAARRMIIRIQNLVNELHHKAARFLVDNFDVILLPTFETSEMSKKQNRKLRSKTVRNMLSFAHYRFKEFLKHKAAENRKIVVDESASLY

SEQ ID NO: 42075 - protein, 287 aa, Moorea sp.
MLVGLRLDWLNRTRSPIDRCNLISEPIGVIPEAVNYYTQQAALKETKQLFPEYKQIYAETQQVNLQRLKKAWDRWRKPVKHGLRGGRPRFKKQGQLRSFVFPRVNNPRAGAHLKDGFLLLSRIGEIPVVMHRPIPDGFTLKQCTVVKKAVRVAWPFGHGWYCCISMKDDTVPELLPVDSVRSAVGIDVGLEKFLTTSDGEAIPIPQFYRKAQNKLALAQQVMSRRVKGSKNWEKAKKKVALLHLHLTRCRKEFHYQVAHWLCSKYDHYAHENLNIKGLARTKLAKSI

SEQ ID NO: 42076 - protein, 415 aa, Moorea sp.
MIILEVKAKGKPSQYLAIDEAIRTVKFIRNSCLRYWMDNKGLNKFDLNKYSAVLAKKFPFANELNSTARQSSAERAWSSVVRFFDNCKKKVPGKKGFPRFQKHCRSVEYKQSGWKLSPDKKSIVFSDKKGIGKLKLKGNWDLWRFDKKQIKRVRIVKRADGYYVQFCVSVDVVEDLEPSKSTVGLDVGLKEFYTDSDGNSEPNPRFYRTGEKRLKFYQRRVSRKKKGSANRKKAINRLGRQHLKISRQREEHAKRLARCVVRSNDLVAYEDLRVKNLVKNHCLAKSINDAGWYQFRKWLEHFGAKFGRVTVAVNPAYTSQNCSECGEVVKKSLSTRTHVCKCGCKLDRDHNAAINILKRALGTVGHTGTWILDPVNASGDLTSTVLGSGQEQQVGSLSEESPRLKTGECQFPLKR

SEQ ID NO: 42077 - protein, 319 aa, Moorea sp.
MTTVRSVYQYRLRLTKSQEAEIEKWLDLLRHQYNYLLADRFNWYEQNRCSVNSCPLVCYLPELRNNPDYFSQKKTLPQLKKDRPWYGAVQSQVLQDCVKRVDLAFKGFLKGDSNGKKSGRPRFKGKNRYRSFTFTSLSKTPINGNILTLPKFGKVKMIYHRPIPEGFKIKTATITRKADGYYVTLSIQDDTVPDIMLVDSVTNPIGIDMGLKSFLIKSDGTEVPIPQYYRKAQKRLKKIHKAVSRSKKGSNNRKKAVTKLGKAHKKVADTRKDFHFKTAKELLNSHDLVAHEKLNIKGLAKTKMAKSVLDAGWGVRFVG

SEQ ID NO: 42078 - protein, 285 aa, Moorea sp.
MIILEFKAKGKESQYSAIDEAIRTVKFIRNSCIRLWLDNKGTGKSDLSRYSKILAKEFPFANELNSTARQAASERAWSSIVRFYDNCKKKVRDKKGFPKFQKRARSVEYKKSGWKLSPDNKSITFTDKKGIGKLKLKGTWDLWRFDKKQINRVRIVKRADGYYVQFCVAVNVKEETEHTGEMIGLDVGLKEFYTDSNGHSEPNPRFYRKGEKRLKFYQRRVYRKKKGSSNRRVRLVLSRSLLRKEGYNSGNRGVKIPKILTVCWMVVKTHPIKRYVTPYLATPSR

SEQ ID NO: 42079 - protein, 414 aa, Moorea sp.
MRHQAVKIRIYPTQEQVHILAQHFGCARWWWNYALNQCIETYKETGKGLSRSALNAMLPKLKKEEKTVWLKDCYSQILQSVSLNLSRAYQNFFEGRAKYPKFKSYHHRQSIQYPQYVKQVGDCLKFPGKLGVVKAIIHRPLDGEIKTVTVSKTPSGKYYASVLMEYDSNDVKPSIVRAAWPTATGKVIGIDLGIKDFAITYDGEKTSKFGNPKHLAKYENKLAKKQRIAARKNKRSNGRKKAKKIVAKVYERIGNVRQDYLHKLSRKIVDNNQVVVVENLNVKGMVHNHKLAKAISDISWGTFVNFLSYKCEKEGKVLVEIDRWFPSSKTCSNCHYRIKELPLHVRSWVCPSCGTHHDRDGNAAKNIRAEGIRMLSSSGTGEVNASGEEVRPRRGRPSKLRHSSVKLEATTSKK

SEQ ID NO: 42080 - protein, 382 aa, Moorea sp.
VEKSWDPTNLKVAQNQNLPQIFSPSFTSSPVGLTDSESTVRKSKKIRLFLNPKQRTLIRQWFGVSRYVFNKTVKILQIGVVKANWKAIKTGILNDLPEWCKAVPYQIKSIAIKDACTAIREAKKKYKKTSVIQRVKFRSRKNPTQSCYIPKSAVSVMGIYHTKLGVITYSESLPDNVCDCRLTSNNGNYYLVVPHKVTNLKAENQGRVVALDPGVRTFITFFSETSVGKIGNGDFSRIQRLCHHLDNLISKISKAKPGQKRRMRKAARRIVIRIQNLINELHHKAARFMLDNFDVILLPTFETAQMSKRGNRKIRSLTVRNLLNFAHYRFKEFLKHKAQETGKTVVDVCEAYTSKTVSWTGELINIGGSKVIKSKVDGRTMD

SEQ ID NO: 42081 - protein, 229 aa, Moorea sp.
MDLKYYNEEPYDAKVSRTVLKTSQGRRLLGLVQQNVERAIKHFFDNCKKKVPGKKGYPKFKKHCRSVEYKQSGWKLSPDKKSIKFTDKKGIGSIKLKGTWDLWWFDQKLIKRVRIVKKVDGYYVQFCVKVNRTEEIKDTGCAIGLDVGLKEFYTDSDGYSEPNPRFYRKSEKRVKFCQRRLSRKKKGKAVGHASRTANRRKARNRLGRAHLKISRQRKEHAKRLGTKLP

SEQ ID NO: 42082 - protein, 467 aa, Moorea sp.
LYKTIPIKATFTDEEKAFWIFQCEQANSLINCAIYYTKQKHYNWLEQQKESFTTYWKGDDLRYGWKTYKCSTKYPELDQALKLNPHYKAMAAQSAQQTLLTVGESIASYNQLVGLYYKEKVDRPKLLRYRKKGGLAAVTFPRQALSYKNGYFAPSISRETKPHLITEIALEPPGFIDPDWVKEVTIRPYLGELWIDWVIDDGFEPVSHNPNLDYSQAWSFDHGGDNWLTGVSTHGKSLIIDGRKLKSMNQGHCRLVAKYKEGKPDFYWDANLDSPKATLRERVQRKRNNQMRDGINKAARFIINRCLNDHIGNLIIGWNEGQKNRSTMGKRGNHNFVVIPTKRLIERLKQLCLEYGIKLTITEEAYTSKASYLDEDPLPKYGEKPNGWKPSGCRVKRGLYKSSEGWLINADCNGAANIARKVAAQLGLDLTRVGRGALTLPNRYDLFTCLSKLYRTRSDEVRFQPAS

SEQ ID NO: 42083 - protein, 427 aa, Moorea sp.
MSAKTVKHQAVKVRIYPTQEQVQILAQHFGCARWWWNYALNQCIETYKETGKGLSRSALNSMLPKLKKDEKTVWLKDCYSQVLQSVSLNLSRAYQNFFVRVSVAYGQGRAKYPRFKSFHHRQSIQYPQYVKQVGDCLKFPGKLGVIKAKIHRELDGEIKTVTVSKTPSGKYYASVLMEYDSDDIKPSTDGKVIGIDLGIKDFAITYDGKKTSKFGNPRHLAKYERKLAKKQRIAARKKKGSNGRKKAIKIVAKVYERIGNVRQDYLHKLSRKIVNQNQVVVVENLNVKGMLCATRTLRERNHKLAKAISDLSWGTFVNFLSYKSEKEGKVLVEIDRWFPSSKTCSNCHYRIKELPLDVRTWTCPSCGTHHDRDANAAKNIRAEGIRMLSSSGTGEVNASGEEVRPKLGRPSKLRHSSVKLEAPTSKK

SEQ ID NO: 42084 - protein, 255 aa, Moorea sp.
VAIGQGRAKYPRFKSYHHRQSIQYPQKVKQVGDCLKFPGKLGVVKAVIHRPLDGEIKTVTVSKTPSGKYYASVLMEYDSDGVQPSVKGKVIGIDLGIKDFAITYDGEKTSKFVNPKHLAKYEKKLAKKQRIAARKKKGSNGRKKARKIVAKVYERIGNVRQDYLHKLSRKIVDDNQVVVVENLKVRFPLANEIRHGSHLNVKGMVRNHKLAKAISDLGWKTFVNFLSYKCESDAARSWGFPPLAIASRQRRKNFD

SEQ ID NO: 42085 - protein, 412 aa, Moorea sp.
MRAAYQYRLRLTKSQEAEVERWLDMLRHQYNYLLADRFNWYEHNRCSINSCPLVCHLPDLRNNPDYFSQKKTLPKLKKDRPWYGVVQSQVLQDCVKRVDLAFKRFLKGDSKGRKSGRPRFKSKNRYKSFTFPSLSKSPINGNILTLPKFGKVKMIYHRPIPEGFKVKTATITRKADGYYVTLSIQDDTVPDVIPVNSVKNPIGIDMGLKSFLVKSDGSEVPIPQYYRKAQKRLKKIQKAVSRSKKGSNNRKKAVTKLGKAHKKVADTRKDFHFKTARSLLINHDLVAHEKLNIKGLARTKLAKSLLDAGWGQFLCILSSKAVRVAWPTALNAGLVTVAVNPRNTSQNCSNCGTKVPKKLKDRIHSCPSCGYTEDRDVNAAINILKLAVGHPVGNKAYRVSEPVGGVGKKPTL

SEQ ID NO: 42086 - protein, 364 aa, Moorea sp.
MDLKYYNEEPYDAKVSRTVLKTSQGRRLLGLVQQNVERAIHSFYDNCKKKIPGKKGFPRFKKSSRSVEYKTSGWKLCPDKKSVNFTDKKGIGKLKLKGTWDLWRFDVKLIKRVRIVSRADGYYVQFCVKVDNSETVETTGKIIGLDVGLKDFYTDSNGYREPSPRFYRKGEKRLKFYQRRVSRKKKGSANRKKAINKLGKTHLKISRQRKEHAKRLARCVVRSNDLVAYEDLRVKNLVKNHCLAKSINDAGWYQFRNWLEYFGTKFGKVTVAVNPAYTSQNCSNCGEEVKKSLSTRTHICQCGCSLDRDHNAAINILNRALSTVGHTGTWTIISPNAGGDRASTVLGQNQVQQAGSLNQESPGL

SEQ ID NO: 42087 - protein, 455 aa, Moorea sp.
VKYTYQYKALPTTEQKLELNLWLRICQYWYNRQLGDRFDWWDNNRSPVNACPLLVSLPKLRDRPNYYNQKKYLPNLKKKFVTVVWSGEELDFSRVPANTLQEVCKRVDKAFERFIAGDNKGTRSGRPRFKSQSRYRSFVIEGAGLKLHSCSIGGKYLYVKVPKIGLVKIRSHRHLPDGAILKQVQFIKKNDGWFVNLRLEDPTVPAVTPDSILPTWENSLGMDAVLHEDDYLATSEGVKLPSRKVLRKSQHKLTRISQKKNARKRGSRARRKLARREGRQHQKIARCRKDFQYKTAHELLRTGKKVFFHENLNLKGLTRRNAPKQDKTGSFIPNGQSAKSGLNLSWADAAFGQFFQILGHIAEKAGASVIAKNPAYTSQLLAYRVMVIFTNTSIREYWDDIETMQVDRDINAAINIIIVGLDVFPTIKRSQGKVVVVGSTTDDTSKEVLHILRSV

SEQ ID NO: 42088 - protein, 468 aa, Moorea sp.
VIVILLNYQYRADPTTQQKLQLNDWLRICRYWYNWQLGDRWRWWNENRTGVNSCPLITYLPELRDNPSYFSQKKLLPIWKKDLVTVVQSWELLDFTRVPANTLQDVCKRADLAFNRFIKGDKTGTRSGKPRFKNQARYRTLKIEGKGSFTVARIENKWIWLKITKLKGWVKVRLHRPLPDGFKLKNILITKKADGWYTTLYLEDPTVPTFKPESVTPTWNNTMGLDAVLYGDDYLATSENTKLPSLKSYRKNQAVIKKVETKKNARKKGSKARRKLQSREGRIHQRIARSRKDHAYKTAHLLVRTGKKVFYYENLNLSALKKRNKPKPDTNGGYLPNGQSAKSGLNKSWSDAGFGQFFEILAYIAGKAGAVTKTCNPVYTSQLLSYRDEFVFTDCSIREYWDEQEMLMVDRDINAAINLKRVGLGVFPTIKRRRGNPVVDSSLTNSTLKQVLVALRSARSLHSPVRRV

SEQ ID NO: 42089 - protein, 411 aa, Moorea sp.
VIILEFKAKGKESQYSAIDEAIRTVKFIRNSCIRLWLDNKGTGKSDLSRYSKILANEFPFANELNSTARQAASERAWSSIVRFYDNCQKKVPGKKGFPKFHKRARSVEYKKSGWKLSPDKKSITFTDKKGIGKLKLKGTWDLWRFDKKQINRVRIVRRADGYYVQFCVAVVAREDLNSTGRTIGLDVGLKEFYTDSDDHTEPNPRFYRKGEERLKFYQRRVSRKNKGSSNRRKAVNRLGRQHLKISRQREEHAKKLARCVIRSNDLVAYEDLRVKNLVKNHCLAKSINDAGWYQFRKWLEHFGEKFGRVTVAVNPAYTSQNCSECGEVVKKSLSTRTHVCKCGCKLDRDHNAAVNILNRALGTVGHTGTWIDRRSRYANIDPNSSGDLASTVLGSGQVQQVESLIEESLRL

SEQ ID NO: 42090 - protein, 316 aa, Moorea sp.
MRSAYQYRLRLTKSQEMEIERWLDMLRHQYNYLLADRFNWYEQNRCSINSCPLVCHLPNLRNNPDYFSQKKTLPQLKKDRPWYSAVQSQVLQDCVKRVDLAFKRYLKGDSNGRKSGRPRFKGKNRYKSFTFPSLGTNPIDGNNLTLPKFGKVKLIYHRPIPEGFKIKTATVTRKADGYYVTLSIQDDTVPDVIPVDSVKNPIGIDMGLKSFLVKSNGSEVPIPQYYRKAQKRLKKVQKAVSRSKKGSNNRKKAVTKLGKAHKKVADTRKDFHFKTAKGLLDEHDLVAHEKLNIKGLAKTKLAKSILDAGWGVRFVG

SEQ ID NO: 42091 - protein, 411 aa, Moorea sp.
MITLTYEYNLIPSQQQIAVIEDMLTVCRKVWNYALRERKDWYKSRKCAVNYCSLQQEYIIPTDAPYPNYRLQAANLTKAKKTNPELKRTNAQVLQQILKTLERAFNNMKEQGYGLPRFKNKYRMRSFVFPQFKTNPFVNDWIKLPQIGWVKMRLSRPIPEGFQLKQVRIVRRSSGYFAMLSLQSEVSVPDTPAWGHPLGVDVGLDKFLATSDNELIERPRFLSELHGKLKLLQRRLKLKKKGSANRHKLNHKIAILHQKISDTRKDFHFKLAHHLCDQAGMIFVEDLDFRTWAKGMLSKHTLDAGFGQFFNILAWVCWKRGVYFGKVDYRFTSQICPSCGTHTGKKDLSERIHFCPECQHEINRDIAAAKVICQRGITAVGQIVEKIDCVGGLSGVGYNLDKCLRSSKPKL

SEQ ID NO: 42092 - protein, 427 aa, Moorea sp.
MLMMNYTYRIYPSQDQQQIIKEWLETCRRVYNYSLRELKDWIASRKCPVDRCSLQSEYIIPADTPFPSYHRQQNNLPKAKKTNLFMSRVHSQVLQTTIRRLHDSWEAMSKRGFGFPRFKKKGQYKSFLFPQFKSNPVQNEHIKLPKIGLVPIRLHREIPEGFQVKQVRVLAKARQTQWYVVISIALDVDIPDHPAVGRAIGIDLGLEKFLTTSDNFTVERPKFFKSMQSKLKLLQRRAARKKKRSNNREKAELKVARLHQKIANSRKDFHLKTAHLLCDQAQTIFAEDLNTIGLNRGMLRKDCIDASFGQFLDLLKWVAFKRGCYFQRVDPRGTSQTCPECQITVKKDLRVREHFCPKCGYRTHRDHAAAQMVRWRGLELVPVDNSGNGNSLSSSRSVGGEILDKWLWAGIPICENGNPTLYASLSV

SEQ ID NO: 42093 - protein, 450 aa, Moorea sp.
MQLGYTNKLKPSRQQEATMSNWLDMLRSQYNYLLRDRIDSYDQAKAPRLGNYCDLKSKGEVCPLTCSVSKSHSIGYPWKNHKNNPRRNAYEAQSSNLPILKKERPWYKAINSTVLQQTLRQLDVAFSKFFKGETGYPKPKRRSRFRSFKYSPGQVKLDGDRIYLPGIGWMGFHNSRPIPEGFVLKSVTVRRKARGWFVSLQIEDKTVPTPPVKTKEEISPDRVKGCDLGIKKLVSISDGEIVSNQAQGLPFKRRERRLKIRQRSASKKKKGSKNRRKAYSRVASLYDRITDKRNAYHWETAKKIVNEADALVFEDLNVKGMKARCKPKPNNNGEYDRNGQSAKKGLNRAISNAAWGELVKKIEVVAAKSGIPVVKINPKHTSQRCPKCHHTSKENRKKEKFVCTNCGHYDDADINGAVNIKIRGLEKLGINPIQLPPVRGKVTPMERTAT

SEQ ID NO: 42094 - protein, 432 aa, Moorea sp.
  misc_feature (432)..(432): Xaa can be any naturally occurring amino acid
MYGCQQHLITTSPENQAVIELICSEANKLTNCGIYYCRQILFKAHKYLNNAELDKIMKTNVHFKAMRSACAQQTLHGVIESFKSYKALKKLYDKGKSTDKPRVPKYRKKGGLAVVSYPARWVKLVKGQLKFTLGKQIKVWFGIDHFLLPMPSNIDYKSIKEYRFVPRNGCFYLEFVYERPNPEPVTPTSNVIGIDPGLNNWLTCVSNLGKSFIIDGKKVKSQNQWYNKRVAAIKKGKSQDYWDERLAFLTEKRNRQMRDNVNKVARFTVNWCLRNQISTVVFGWNKRNKDSINIGKKNNQQFVQIPTAKLKNRIEQLCVEHGIKFVETEESYTSKASFLDQDFLPVLGGKPEGWKESGKRVKRGQYLSAKGKLINADCNGASNILRKVATQLGFPLAEVGRAALNLPQRYRSDSLSRSYREASWSSVSTRVX

SEQ ID NO: 42095 - protein, 403 aa, Moorea sp.
MIILEFKAYGKKQQYQSIDEAIRTVKFVRNSCLRLWIDNKGLTKYDLNKYCKTLAKDFSFANELNSTARQAAAERAWSSIARFYDNCKKKVPGKKGFPRFQKHCRSVEYKQSGWKLSPDKKSITFTDKKGIGKLKLKGTWDLWRFDKKQIKRVRIVKRADGYYVQFCVSVNNNEEIEPSRRTIGLDVGLKELYTDSDGNSEALPRFYRTGEKRLKFYQRRVSRKKKGSANRKKAINRLGRQHLKISRQREEHAKRLARCVIRSNDLVAYEDLRVKNLLKNHCLAKSISDAGWYQFRKWLEHFGKKFGRVTVAVNPAYTSQNCSSCGEVVKKSLSTRTHACKCGCRMDRDYNAAVNILNRALGTVGHTGTWIIDPNASGDLTSTVLGSGQVQQVGSLIEESPRL

SEQ ID NO: 42096 - protein, 467 aa, Moorea sp.
LYRTIPVKASFTDEDKAFWVFQCEQANSLINCAIYYTKQKHYSWLEQQEESFTTYWKDDELRYGWKTYKCSTKYPELDKTLKLTPHYKAMAAQSAQQTLKTVGESIASYNQLVSLYYKGKVDRPRLLRYRKKGGLAAVTFPRQALNYKKGLFYPSISKETKPHLITEIALEPPDFIDPDWVKEVTVRPYLGELWIDWVIDNGKEAIASNPNLDYTQAWSFDHGGTNWLTGVSTCGKSLIIDGRKLKSMNQGYCRLVAKYKQGKPEFYWDSNLDRVQRKRNNQIRDAINKAARLIINRCLNDCIGNLVIGWNEGQKNRSNMGKRGNQNFAVIPTGRLIERLKQLCYEYGIKLTITEEAYTSKASYLDDDSLPKHGEKPKGWIPSGKRVKRGLYKTSEGWLINADCNGAANIARKVATQLGLNLTKVGRGALALPKRYDLFTSLSKSYRTRSVRVRVASAKAESVGESR

SEQ ID NO: 42097 - protein, 404 aa, Moorea sp.
VFNLTYEFKLKPTAKQVSLFENWLEQCRKVYNYALAERKDWYKSRSCQVNACSVRSEYIIPAEQTRPTYASQCRGLTAARKAIEELRAVQVHVLQQTLKRLEKAFVSMWEQGHGFPRFKKQGQMRSFVFPQLGVKPVESGKVKLPKIGWVKMRQSREIPSDAVVKQARVVRRATGWYVMLTLQWDVDVPQIMPHGEPLGIDVGISHFVAVSNGKLFPNPRPFKGLERKLKLLQKRVSRKRKGSSNRCKAQAKVSKLHERIVNIRKNYYWKLAHNLCDWAGMIFVEDLNLKGLAKGMLGKHCLDAGWGQFFKILEQCCAYRGVYFQKVDSKKTSQICPNCLTETGKKTLAERIHHCEHCGYTTDRDVAAAQIIAIRGLAAVGHTVKMLSEGKFIGIPGKKESSSL

SEQ ID NO: 42098 - protein, 221 aa, Moorea sp.
MDLKYYNEEPYDAKVSRTVLKTSQGRRLLGLVQQNVERAIKRFFDNCKNKIPGKKGYPRFKKHSRSVEYKQSGWKLSPDKKSIKFTDKKGIGKVKLKGTWDLWRFEQKLIKRVRIVQKADGYYVQFCVKVDNSEQLEATGFTVGLDVGLKEFYTDSDGYSEPNPRFYKKGEKRAIFYQRRVSRKKKGSANRKKAINRLGRTHLKISRQREEHAKRLGTKLP

SEQ ID NO: 42099 - protein, 406 aa, Moorea sp.
MLFKAGKYLNNAELDKILKTNVHFKAMRSACAQQALHGVIESFNSYKALSKLYLKGQLTDKPRVPKYRKKGGMAVVSYPARWVKLVKGQLKFTLGKQVKAWFGIDHFLLPMPSNLDYKSIKEFRFVPRNGYFYLEFVYEQPDIEPVPLTNNVLGIDPGLNNWLTCVSTTGKSFIIDGRKVKSQNQWYNKQVSKIKKGKPQDYWDEPLAFLTEKRNRQMRDNINKVARFVVNWCLRHQVSTVVFGWNQRNKDSINIGKKNNQEFVQIPTARLKNCIEQLCIQHGIKFVETEESYTSLASFLDNDFLPTLGAKPKGWKPSGKRIRRGLYRSANNELINADCNGACNILRKVATQLGVDLAEVGRAALNLPQRYRLDSLSSQYCKHHAEVRPRNLIRHRKAHQARFQPA

SEQ ID NO: 42100 - protein, 224 aa, Moorea sp.
MISACQYRLRLTKSQEVEIEKWLDMLRHQYNYLLADRFDWYEQNRCSINSCPLVCHLPNLRNNPDYFSQKKTLPQLKKDRPWYGAVQSQVLQDCVKRVDLAFKRFIKGDSNGKKSGRPRFKGKNRYRSFTFPSLSKNPINGNILTLPKFGKVKMIYHRPIPEGFKIKTATITRKADGYYVTLSIQDDTVPEIIPVDSATNPIGIDMGVRFVGYKPYIKGGLAAS

SEQ ID NO: 42101 - protein, 492 aa, Moorea sp.
MPKPRKTVKTKKLSTQVVPVIGMTASVKTELLSTMKKLGVVRSESWNKLGSISHWGIDWKKSFREVRTFRSPESLGLPSKLMDWAVCDVAKAITAQQAACIDVVVKKIHRKFLGAENKTKRKELCRQLKTLTFLDNTLLHRWVRKEYQRGHSWVKNQIVYQSPGYKCKRLSRNTYQLELAGLNRGKRNKVIVKSNRKIKGQIRLIYNHYRERFEVHFLVDHGTVEVPSERRSIGVDKGYTEAFYDSDGYAHGKGLGKATTKKSDRICAKNRNRGKLWALHRKLEKIDPVKSARILENNLTRKVENRRYRQNQAELVAIIGAASKSLFNGEALKVFAEDLTQPIKNKRQSKAVSRKLNSWMKGKMRDSLQKWADWTGSVVTEVQPSYTSQVDSVTGTLLGKRSGDNFTRFNGVVLQADHNAAKNILDRGTDKDVTRYMSRTEVQAVLLRRTARFLEGMGLSLVDGVELGWLDPKHSKTKAFKQLLHVTGGTSR

SEQ ID NO: 42102 - protein, 458 aa, Moorea sp.
MTQTFAAQVNRLPEDRQLGAGLEYLCRESNNLYNCTLYLARQLYFKEKKFSNGRWLSTQMKRNSHMKALYTSAAQQVCISVGEAFKGFKELLKLHKRGDLHLKPLPPNYRKSGGMYQISYPKRWLKLVDGQVRVPMGTACKVWFNLPEIWLPFPTNLNWDWVKELQIVPRAGYFDAVWISSDEYQVVGNLDPDLFLSIDPGLDNWLTCVSNAGTSFIIDGKHLKALNQWYNKRVSTIKGNKPQSFWCNLLDRTTEKRNRQMRDAVNKVAKTVVEHCIANGIGSVIFGWNKSQKQECNMGRRNNQKFVQVPTARLKERIRQLSEIYGMRFVETEESYTSKADALALDAIPVYGEKPDCWKPSGTRVNRGLYRSATGLEFNADINGALNIARKVTRSLGIDFNPSDLARGVLTSPKRLKIWDSIGSLPNATGSFAVLKDSPALCLTAGYANSRGSSQSRR

SEQ ID NO: 42103 - protein, 305 aa, Moorea sp.
VKTPTKVIRTDKWQLNVTSVQRTLFRETIKVYRQACRYLVGIIYTHWSELGCLTADQLTPAVERLMHKTAKRPNIKYAQFNKSFYKFPSYYRRAAISFAAGQVSSYVTRYREWQSGTRKRRDSKPPKLNADTGCYPALYKGQCYKLHGFDQAEIKVFDGSDWVWTTVQIAGLRERHACASNKMMSPSLIFNERACHLSVPFTCKPEKRKPESNVTAVDLGINTAATIAVVTHSGTVIHREVRFVSYKPNPIRVRGTNCLVHLNHDNLITMEVKDLPSRNPSDSLTLIHELNKLMDWCKGRTVKHY

SEQ ID NO: 42104 - protein, 421 aa, Moorea sp.
MGEEQMRVAYQYRLKPTKEQKVKIDHWLSMLCAQYNYLLADRFSWYEQNRCSINACTLVCHLPQLRDNPGYYSQKKTLPNLKKTHPWYKGIHSQVLQDLVKRVKLAFDRFIKGDSNGKRSGRPRFKKLHRYRTFTYPQMKEGCLEGNLINLPKIGKIKVVLHRPIPAGFKIKTASITKKCDGYYLVLSLEDKTVPEVKPDINPDSIIGIDVGLKDFLTTSQGETIEIPQYYRKSQKRLKVIQKRVSRRKKGGSNRFQAIKQLGKQHKKVADKRKDFHFKTANYLLSKYDVIAHEKLNVKGLVKSRLAKSVLDAGWSSFLTILTSKAVRVAWPTALNAGLLAVPVSPKNTSQDCSNCGNKVPKKLHVRWHDCHHCGCSLDRDHNAAINIKNRAAGQSVLKAQRLLRDTRIGWEAYTEPVRSV

SEQ ID NO: 42105 - protein, 286 aa, Moorea sp.
MIILEFKAKGKKRQYSAIDEAIRTVQFIRNSCLRYWMDNKGVSKFDLNKYSAVLAKRFPFANALNSTARQSSAERAWSSIARFFDNCKKKVPGKKGFPKFQKNCRSVEYKQSGWKLSPDKKSITFRDKKGIGKLKLKGTWDLWRFDKKQIKRVRIVRRADGYYVQFCVSVDVKEQLEPADANIGLDVGLKDFYTDSRGNTELNPRFYRTGEKRLKFYQRRVYRKKKGSANRKKAINRLGRTHLKISRQREEHAKRLARSYRKKSAAFIVGRLCIKGDRFCCKAALF

SEQ ID NO: 42106 - protein, 199 aa, Moorea sp.
MGKGGKLHKGFCSKTYQKCRRINTQIGHIVSKRIVEIAEKFNSVRVAWPTALAIVFENLKGWKPKGGRKRSNLRQRFHGWLKAKIRDFTEMKWAELGGKIVEVVAAYSSKLAYDGSGKVKRNSKNYALATFSSGKQFNAVRVAWPTANLNGAYNIGARGVIKLTHRNGGEGRFSKNSGRPPRSWVCLCDLWAKVSPRLA

SEQ ID NO: 42107 - protein, 415 aa, Moorea sp.
MRSISVGIHGLPLKGLIPSMGIRPAFTISSGLWQTRVMLRMNYTYRIYPDSTQQTELLEWLEICRGIYNYALRELKDWIASRKCMTDRCSLQKEYIIAAVKPFPSYHRQQNNLPKAKKQFPHLSKVHSQVLQTTIRRLHDTWDSFQKRGYGFPRFKKLGQFKSFVFHQFKNNPLNGFTIKLPKIGLVPINLHRPIPDRFKIKQVRVLSKVRGTQWYVVVTIESDVSVPDAPLHGRAIGIDLGLERFLTASDGSFQQRPKFFKSMQRKLKSLQRRVARKQKRSQNWEKAQIQVARIHHRIANRRKDFHLKTAHQLCEQAQTIFAEDLNPKGLTRGMLRKDCVDAAFGQFLSLTEWVWLVPLGLTLAKYTPTALARPAPSAWALCPRDWKLESIIALIVDIEPIGIMLRQKWFCIMD

SEQ ID NO: 42108 - protein, 430 aa, Moorea sp.
MYGCQQHLITTTPANQAVIEFICSEANKLTNCGLYYCRQMLFKNGKYLNNAELDKIMKTNVHFKAMRSACAQQSLHGIIESFKSYKALKKKYDKGQLVDRPRVPKYRKKGGLAVVSYPARWVKLVKGQLKFTLGKQIKAWFGIDHFLLPMPSNIDFKSIKKYRFVPRNGYFYLEFVYERPTPEAVEPTNNVLGIDPGLNNWLTCVSNVGKSFIIDGRKVKSQNQWYNKRVAAIKKGKVQDYWDERLASETEKRNRQMRDNVNKAAKFVVNWCLKHQVSTVVFGWNKRNKDSINIGKRNNQQFVQIPTAKLKSRIEQLCLEHGIKFVQTEESYTSKASFLDQDFLPVIGEKPDGWKPSGKRVKRGLYRSGNGELINADANGACNIIRKVATQLDIDLTKVGRAVLNLPQRYKLDSLSSKYCKRRGARFQPA

SEQ ID NO: 42109 - protein, 453 aa, Moorea sp.
MKKLGVVRSESYNKLGSINHWGIDSKKSFREVRTFRSPESLGLPSKLMDWTVCDVAKAIAAQQAACIDAVVKKVYRKFPGKENQARRKEYATQLKTLSFLDNPLLHRWIRKEYQRGHSWVRNQIVYQQPGYKCKRLSRNTYQLELAGLTRGKRNKVVVRSNRKIKGQIRVIYNQDLQRFEVHFLVDHGTVEIPSERRSIGVDKGYTEAFYDSDGQAHGKGLGRSATKKSDRICAKNRNRGKLWALHRKLETIDPAKSARILENNLTRKTERRRYRQNQAELTAIIGAASKSLFNGEALKVFAEDLTQPIRNKRQSKVMSRRLTSWMKGKMRDSLQKWANWTGSVVIEVQPSYTSQIDSRNGTLLGHRTGDNFTGYDGVVLQADHNAALNILARGTDFEITRHMSRVEVHAVLLRRTARCLEGLGLDLLDAVAIGILDSKHSRSQAFKQLLNVI

SEQ ID NO: 42110 - protein, 420 aa, Moorea sp.
VEKSWFSANLKAAQSPNLPQILCPSFTSSPAGFTDSESTVKKSKKIRLFLNPDQRSLIRQWFGVSRYVFNKTVKILQAGVVKANWKAIKTGILNDLPEWCKEVPYQIKSIAIKDACTAVSEAKKKYKKTSQINRVRFRSRKNPIQSCYIPKSAVSETGIYHTKLGKLTYAEDLPVDICDCRLTSNNGDYYLVVPHKVAVSYTENQGRVVALDPGVRTFITFFSETSVGKIGHGDFSRIQRLCQHLDNLLSKISKAKRGQKRRMRKAARRMVIKIQNLINELHHKTARFLVDNFDVILLPTFETSKMSEKRNRKIRSKTVRNMLSFAHYRFKEFLKHKACITGKTVVDVCEAYTSKTVSWTGELVNIGGSKTIKSKVDGKVMDRDINGARGIFLRALGDTPWLRDQLALVSQNPPLVDFGS

SEQ ID NO: 42111 - protein, 401 aa, Moorea sp.
MLVLEYKVKAKQAQYQAIDEAIMTVQFIRNKCLRYWMDAPREANILRFDLNKYSTELRNEFIFVKDLNSMACQASAERAWLAISRFYDNCKYHKPGKKGYPRFQKDNRSVEYKTTGWKLHHTKRRITITDQKGIGELKLLGKWDIHIYPVKSIKRVRLVRRADGYYCQFCVDIECVDAQPKTGLEIGLDVGLEFFYTDSNGYQEPNPRFLRIAESDIKQAQRRIYKKQKGSIRRRQARARYSRKHLRVSRQRNEHAKRVARNVCKSNDLVAYEDLRVSNMLKNHCLAKSIADASWYQFRQWIEYFAGKFEKLAVAVPPHYTSQQCNQCKRVVNKSLSTRTHVCQCGCQLHRDTNAAINILQKAKSRVGHTRSNAKGVATSTLLGATLVEQVATVNLESPSL

SEQ ID NO: 42112 - protein, 399 aa, Moorea sp.
VEKSWFSTNLKAVPSRNLPQIFSPLFTSSLAASTDSESTVRKSKKIRVFLNPEQRLTARKWFGVSRYVFNKTVKILSDGETKANWKAIKTGILTDLPEWCKAVPYQIKSIAIKDACTAVREAKKKYKKTSQINRVRFRSRKNPVQSCYIPKSAVSSKGIYHTKLGEITFAETLPDNICDCRLTSTNGNYYLVVPHEATNTRAENQGRVVALDPGVRTVLMQSLMGETPKTALHRFLTFFSETSVGKIGDGDFSQIQRICSHLDNLLSRISKAKKGQKRRMIKAARRMIIRLQNLVNELHHKAARFLVDNFDVILLPTFETSQMSKKTTRKIRSKTVRNMLSFAHYRFKESLKHKAQETGKVVVDVCEAYTSKTVSWTGELVNIGGSKIIKSKVDGRSMD

SEQ ID NO: 42113 - protein, 290 aa, Moorea sp.
MIILEFKAYGKKPQYLAIDEAIRTARFIRNSCLRYWMDNKGVNKYDLSKYSKVLAHQFPFANELNSTARQASSERAWSSISRFFDNCKKKVPEKKGFPKFQKRGRSVEYKQSGWKLSPDKKSFAKRRLCRIVFRDKKGIGKLKLKGNWDLWCFDKKQIKRVRIVRRADGYYVQFCVSVDITEALEPTGTAIGLDVGLKDFYTDSVGKTEPNPRFYRIGEKRLKFYQRRVSRKNKGSSNRKVRLVLSRSLLRKEGYNSGNRGVKIPKILTVCWMVVKTHPIKRYVTVRFVD

SEQ ID NO: 42114 - protein, 411 aa, Moorea sp.
MIILEFKAKGKKSQYSAIDEAIRTVKFIRNSCIRLWLDNKGTGKSDLSRYSKILAKEFPFANELNSTARQAASERAWSSIVRFYDNCKKKVPGKKGFPRFQKRARSVEYKKSGWKLSPDKKSITFTDKKGIGKLKLKGTWDLWRFDKKQINRVRIVKRADGYYVQFCVAVNVKEEVEHTGEMIGLDVGLKEFYTDSNGHSEPNPQFYRKGERRLKFYQRRVSRKKKGSSNRRKAVNILGRQHLKISRQREEHAKRLARCVIRSNDLVAYVREACRRQDLRVKNLVKNHCLAKSINDAGWYQFRKWLEHFGIKFGRMTVAVNPAYTSQNCSECGETVKKSLSTRTHVCECGCELDRDHNAAINIRNRAISTTGHVGTWIINPNASGDLASTVLDSGQVQQAESLSEESPSRD

SEQ ID NO: 42115 - protein, 261 aa, Moorea sp.
LFYPSVSKESKPELLTEITLSPPEFIDSDWVKEVTIRPCYGQLWIDWVIDDGKSPIETNPELDYSHALGIDHGGDNWLTCVSTLGKSFIIDGKKLLAMNQGYARLVAKHKTGKPEKYWDSTLDRIQLKRNNQMRDAVNKAARFIINRCLKDGIGNIVIGWNEDQKNCSNMGRKGNQKFVPIPTKKLIERLKQLCNEHGIKLIVTEESYTSKASFLDGDSLPTYGEKLSGWIPSGKRVRRGLYQTASGKLINADSNGAANIL

SEQ ID NO: 42116 - protein, 456 aa, Moorea sp.
MKTPTKIIRTDKWTLNPTPEQRVLLGETVEVYRRACRYLVGIIYTHWGELGELTADQLTPAVEKLMHKTAKRPSIKYPQFNKTFYKFPSYLRRAAIAFSAGQVSSLVTRYRDWQSGSRKRKDAKAPRLNANTGCYPSLYKGQCYKLHGFDQVEIKVFNGSDWIWTTVQITGLRERHLVATNKMMSPSLVFNDRFCHLSVPFTCKPEKRKPEANVTAVDLGINTTATIAVVTHSGTVIYREFIHPGRDIDRRDKRLKSVSMRGSKTMGKGGKLHKGFCSSTYDKCRRINHQIGHIVSKRIVEIAERFNSVRVAWPTALAIVFEDLKGWKPRGGRKRSNLRQRFHGWLKAKIRDFTEMKWAELGGKVIEVLAAYTSKLAYDGSGTVRRDSNNYALATFSSAKRFNADLNGAYNIGARGVFKLVRRNSNEGRSSKRSGRPPRSWACLCDLWTLRSSKLA

SEQ ID NO: 42117 - protein, 510 aa, Moorea sp.
MPKKVGVTKKISTQIVPVVGMTESVELELLQTMKKLGIVRSESYNKLGSISHWGIDWKKAYPEVRSFRTPESLELPSKLMEWTVSDTAKAIAAQQAACIEAVIKKIYKRFSGKDNQKTRKEYATQLKTLAFLDNSLLHRLVRKEFQRGHSWVNNQIVYQQGGYRCKRLSRNTYQLELAGLKRGKRNKIVVRSNRKIKGQIRLIYNQLVKKFEIYFLVDHGTVEIPADRRAIGIDKGYTEAFYDSDGQAHGKSLGKLTTQKSDRICAKNRNRGKLWALHRKLEKIDPVKSARILQNNLTRKTENRRYRKNQSELTAIIGAASKSLFNGESLKVFAEDLTQPIQNKRQSKAMSRKLNSWMKGQMRDSLQKWANWTGSVVTEVQPSYTSQVDSRNGTLLGKRTGDNFTGFDGVVLQADYNAAKNVLARGTDKGITRYMNKTEVQAVLLRRTARFLKGMGLSLLDAVELGWLDCKHELCSGFQATPGRDARNAQIDKWEAQLRLPYNHFSLGQQ

SEQ ID NO: 42118 - protein, 410 aa, Moorea sp.
MRLAYQYRLKPTKYQQTNIEHWLSMLCAQYNYLLAARFRWYEENRCSINACPLVCHLPELRDNPDYYSQKKTLPDLKKTHPWYKDIHSQVLQDVVKRVKLAFDRFIKGDSNGKRSGRPRFKKQHRYRTFTYPQMKEGCLEDNLINLPKIGKIKVILHRPIPDGFKIKTASITKKCDGYYLVLSLEDKTVPEIKPDINPDSIVGIDVGLKDFLTTSEGETIKIPQYYRKAQKRLRVIQKRVSRRKKGGSNRLKAIKQLGRQHKKVSDKRKDFHFKTANYLLSKHDVIAHEKLNVKGMAKSRLALSVLDAGWSSFLTILASKAVRVAWPTALNAGLLTIPVSPKNTSQNCSNCGNKVPKKLHIRWHDCPHCRCSLDRDHNAAINIKNRAEGQSVLKAQRLLSDSRIGACCLH

SEQ ID NO: 42119 - protein, 440 aa, Moorea sp.
MEFKAVLKEPQRLAINEAIRTARFVRNKVLRYWMDNRGTGKKELYRYNTQIRDEFPFVKDLNSHACQASVENVERAIKRFYDNCKKKVPGKKGYPRFKKHSRSVEYKQSGWKLSPDKKSIKFTDKKSIGKVKLKGTWDLWRFDQKLIKRVRILQRADGYYVQFCVKVDNQEKLEATGFTVGLDVGLKEFYTDSDGYSEPNPRFYRKGEKRLKFYQRRVSRKKKGSANRNKAINKLGRQHLKISRQREEHAKRLVRSYRKKSAAFIVGRLCIKGTDFVVRLHSSKVSSPARCVIRSNDLVAYEDLRGKNLVKNHCLAKSINDAGWYQFREWLEYFGKKFGRITVAVNPAYTSQNCSSCGEVVKKSLSTRTHVCQCGCQLDRDSAKPTLREHNAAKNILTRALSTVGHTGTFINARGEDASTLLGSGLGEQVTSLNRESPAF

SEQ ID NO: 42120 - protein, 410 aa, Moorea sp.
VEKSWFSTSLRAVPNPNLQQIFSPSFTCSPAGFTDSGNTVKKSKKIRLFLSREQRTLVRKWFGVSRHVFNKTVKILQNGEVKANWKAIKTGILNDLPEWCKEVPYQIKSIAIKDACTAVREAKKKYKKTSQINKVRFRSRKNPVQSCYIPKSAVSEAGIYHTKLGELTYSEGLPPEVCDCRLTSNNGDYYLVVPHKVAVSHTENQGRVVALDPGVRTFITFFSETSVGKIGHGDFSRIQRLCQHLDNLLSKISKAKSGQKRRMRKATRRMFVKVQNLINELHHKTAKFLVDNFDVILLPTFETYQMSKKGNRKIRSKTVRNMLTFAHYRFKEFLKHKAQETGKVVVDVCEAYTSKTVSWTGELINIGGSKIIRSKVDGKVMDRDINGARGIFLRALGDTPWLREQLALVG

SEQ ID NO: 42121 - protein, 490 aa, Moorea sp.
MAKKIGATKKISTQIVPVVGMTESVEFELLQVMKKLGIVRAESYNKLGSINHWGLDWKKAYPEIRSFRTNESLGLPSKLMEWTVSDVAKAITASQAACTEAVIKKIYKRFPGKGNQKIRKELCKQLKTLAFLDSPLLHRLIRKEFQRGHSWVKNQIVYQQGGYKCQRLSRNTYQLELAGLRRGKRNKIVVKSNRQISGQIRLIHNQLLQRFEIHFLVDYGTVEIPAERRSVGVDKGYTEAFYDSEGQAHGKGLGKLATKKSDRICSKNRHRGKLWSLHKKLEKIDPGKSARILKNNLTRKTENKRYRQNQSEIAAVIGAASKSLFNGESLKVFAEDLTQPIKGKRQPLAMSRKLNSWMKGQMRDSLQKWADWTGSVVTEVQPSYTSQVDSVTGTLLGKRSGDNFTRFNGVVLQADHNAAKNILARGTDKEISRYMNKTEVQAVLLRRTARFLEGMGLSLLDAVELGYLDCKHSRTQAFKQLLGGIPGTSK

SEQ ID NO: 42122 - protein, 441 aa, Moorea sp.
MAKTKKQMGVQQILLHPDKETEAILTYICQQSGKLYNMGVYFSRQIFFKTGKFLTGKFDLVYEKSIGKSIIAKSLPSTPAQQTLLSVTEAFKSYKGLRDLWFKGQLTDKPSPPKYLKGSKLFKVAYPNSGGQKPKIKDGRLVFSLGLTVRRWFGVKSFSLPFPSNLEGRKIKEWTILPKNGAFYLEVSYDIPSQIPVNQEANEALSIDLGTSSNLAACVDTLGNSFLIDSRAMKSYNQYWNKQVATRKEGKPQGYWDKWLDRVTRKRNHRVRDGINKAARLIINHCLKNGIKTVVLGWNEGFKTNSRMGRVNNQQFVQIPLGKLKDRLSQLCDLYNIKLVLTEEAYTSKASYLDGDTLPSFGNKPAEWKASGRRIKRGLYRSANNSIVNADLNGSANILRKVARNLDLDLGRLGRRPLTTAARIRLWGLPQSNLSAESPRP

SEQ ID NO: 42123 - protein, 206 aa, Moorea sp.
MGKGGRLHKGFCSKTYQKCQRINTQIGHIVSKRIVEIAEQFNSEAVVFENLKGWKPKGGRKRSNLRQRFHGWLKAKIRDFTQMKWTELGGKVIEVVAAYTSKLAYDGSGTVRRDSRNYALATFPSAKLFNAVRVAWPTANLNGAYNIGARGVLKLVRRNDNEGRSSKSSGRPPRSWACLCDLWTLRSSKVCIGHSHLAIATLRERR

SEQ ID NO: 42124 - protein, 407 aa, Moorea sp.
MEWAVSDVAKVITAQQAACTDAVEKKISKKFPGKDNEKKRKKLCQQVKTLAFLESSLLHRLVRKEYQRGHSWVKNQIVYQQGGYKCKRLSRNTYQLELAGLTRIKRNKIVVKSNRKVKGQIRLIYTQLSRQFEIHFLVEHGRVETPSRRREVGIDKGYTEAFYDSEGQAHGKGLGQLATKKSDRICAKNRKRGKLWALHRKLEKIDPAKSARILENNLTRKAENRRYRQDQSELTKIIGAASKSVFNGEALKVFAEDLTKPIRNKRQSKAVSRKLNSWMKGVMRDSLQKWANWTGSVVTEVQPSYTSQVDSRNGTLLGRRTGDNFTGWDGVVLQADHNAAKNILARGTDFEITRFMTRAEVQAVLLRRTARYLEDILGLDLLDAIAVDYLDSKHSKSKAFKQLLSGI

SEQ ID NO: 42125 - protein, 232 aa, Moorea sp.
MIILEFKAKGKESQYSAIDEAIRTVKFIRNSCIRLWLDNKGTGKSDLSRYSKILAKEFPFANELNSTARQAASERAWSSIVRFYDNCKKKVRDKKGFPKFQKRARSVEYKKSGWKLSPDNKSITFTDKKGIGKLKLKGTWDLWRFDKKQINRVRIVKRADGYYVQFCVAVNVKEETEHTGEMIGLDVGLKEFYTDSNGHSEPNPRFYRKGEKRLKFYQRRVYRKKKGSSNRR

SEQ ID NO: 42126 - protein, 234 aa, Moorea sp.
MWKDAYNQGLKPNTKTLKRLFTNYVKPEYPWMRELSSKVYQYAFINLGEAFKRFFKGWGKYPRFKCKGRNDRFTIDNSGRPIRLGGLIHNLPFLKRVRTFEALPDCLTKKVTIYKKAGEWYISFSMEKTFEPTLKERERVGVDFGIKTLAVLSSGVEFEGLKPYRNAQRKLARVQRKLSKKVKGSQNYSKALLEVQKLHRRVADIRKDYLQVRPVANLILNAESAPIQDDHLYS

SEQ ID NO: 42127 - protein, 490 aa, Moorea sp.
MAMPKPKKVGTTKKLSTQIVPVTGMTKSVEAELLSTMKKLGVVRAESYNKLGSINHWGIDWKKSFREVRTFRSPESLGLPSKLMDWAVCDVAKAISAQQAACIDAVVKKIYRKFPGVDNKAKRKELCKQLKTLAFLDNSLLHRWVRKKYQRGHSWVRNQIVYQQPGYKCKRLSRNTYQLELAGLIRGKRNKVVVKSNRKIKGQIRLIFNLDLGRFEVHFLVDHGTVEIPSERRSIGVDKGYTEAFYDSSGQAHGKGLGKVTTKKSDRICAKNRNRGKLWALHRKLEKIDPAKSARILENNLTRKTENRRYRQNQAELAAIIGAASKSLFNGEALKVFAEDLTQPIRNKRQSKAMSRRLTSWMKGKMRDSLQKWANWTGSVVTEVQPSYTSQIDSRNGTLLGHRTGDNFTGYDGVVLQADHNAAKNILARGTDKDITRHMNRVEVQAVLLRRTARYLRDIVGLDLLDAVAINLLDSKHSKSKAFKQLLSVI

SEQ ID NO: 42128 - protein, 427 aa, Moorea sp.
MFPPPVKLEKNILLKAKVVKPWNSRPGCAMIARRMSNPGVLTISSKPHQRLANMYKALQTKLKLNNHQKTLMAKHAGYSRWVYNWGLALWQQAYSEGLKPSASKLRKLFTNHVKPQYPWMNQLSSKVYQYAFIDLGEAIARFFKGNGGYPRFKKKGAHDSFTIDNSGAPIKLSGCKHKLPLLGWVRTYEPLPEVTTKKITISRQADGWYLSFHYGHEPNPTPKQIDVVGVDLGVKALAVLSTGEIICGSKPYRQAKKQLARCQRDLSRKVKGSQNWYKAVNRLAKKHQRVANIRKDTLHKLTAYLAKNHGTVAIEDLNVSGMMANHRLAGSVADQGFYEFKRQLEYKCEWYGSKLVIVDRFYPSSQLCSSCGHRQKMTLKIRTYNCPKCGLSLDRDLNAAINLKNAVGSMVSACGRSAADSSGRSRK

SEQ ID NO: 42129 - protein, 391 aa, Moorea sp.
MEIKNTVLTIVCKIQPTPDQAKKIEATLKGFADACNYTNAVVKSSITSKNTIQAQVYQYIRETYSLSANLAVRVCGRVAANRKTARHKNKPVLEFSPTSADYDARIFSYREKDQTVSLTLVGGRERFLLHIGSYQIGKLKDKKPTSAKLCKHRDGNYYIHIQVKDKAPKPQKVKKVIGVDLGRTDIAVTSENQSFSGNQITQVRDKFARVRSQIQHKASKGTRSSRRRCRQLQRRLSGKERRFQAWVNHNVSKSIVELAKSQGAVIALEDLTGIRERTNLQPRSKKERRRSNNWAFYQLREFIRYKALEAGVKVVFVDPRYTSQTCHKCLHIHPVKGKSYRSRKRYKCGACGWNGDADFNGSKMIQLLGQSVTLPGGSYLSCSLTDIVQGY

SEQ ID NO: 42130 - protein, 483 aa, Moorea sp.
MYKTIPVKATFSDEEKAFWLFQCENANSLWNCAIYYSKQKHYSWLEQQPEAFTTYWKEDVLRYGWKTYKCSVKYAELCKELKNNPHYKAMAAQSAQQTLKSVAESITSYNQLVPLYYKGQVDRPKLLRYRNKGGLAAVTFPRQALTYRKGLFYPSISKESKPELLGEIVLEAPEFLDPDWVKEVTIRPYYGQLWIDWVIDDGKQPVEQDPNLDYSQAWSFDHGGDNWLTGVSTQGKSLIIDGRKLKSMNQGYARLVAKYKAGKPEFYWDANLDRVQRKRNNQMRDAVNKAARFIINRCLSDSAKPTLRERIGNLIIGWNEGQKNRTNMGRRGNQKFVVIPTKRLIERLKQLCREYGIKLTITEEAYTSKASYLDDDSLPKHGEKPTGWTPSGKRMKRGLYKSSNGHLVNADCNGAANIARKVTVQLGLDLTKAGRGALTLPHRYDLFTSLSRSYRKRSEVARFQPATSHPLRIPRALAGGDVN

SEQ ID NO: 42131 - protein, 460 aa, Moorea sp.
MYGCQQHLITTTPENQAVIEFICSEANKLTNCGLYYGRQMLFKNGKYLNNAELDKVMKSNVHFKAMRSACAQQTLHGVVESFKSYKALKKKYDKGQLTDKPRVPKYRKKGGLAIVSYPARWVKRCLGQLKFTLGKQVKAWFGIEHFLLPMPSNIDYKLIKEYRFVPRNGCFYLEFVYERENVEPIAPTNNVLGIDPGLSNWLTCVSNVGKSFIIDGKKVKSQNQWYNKRVAAIKKGKAQDYWDDQLASLTEKRNRQMRDNVNKVARFIVNWCQRNEVSTVVFGWNKRNKDSINIGKRNNQQFVQIPTAKLKNRIEQLCLEHGIKFVQTEESYTSKASFLDRDFLPVLGAKPEGWKPSGKRVKRGLYKSGKGALINADCNGACNILRKVATQLGFPLAEVGRADLNLPQRYKLDSLSRSYREASCSAVLTRVTTRLLESTRFQPVESSKLEQKTEINTEAF

SEQ ID NO: 42132 - protein, 363 aa, Moorea sp.
VFLNSEQRAIIRHWFGVSRYVFNKTVKILENGEKKANWFAIKTEIVNNLPEWCKTVPYQIKSIAIKEACTAVREAKKKYKKTGQINRVRFRSRKNPVQSCYIPKSAVSAKGIYHTKLGELTFTETIPGNIGDCRLTSTNGDYYLTVPHKSTQIKAESQGRVVALDPGVRTFLTFFSENSVGKIGEGDFSRIQRLCAHLDRLLSRTSKAKGKQKYRMKRAARRIIIKIKNLINELHHKAARLLVDHFDVILLPTFETSQMSNRKTRKIRSLTVRNMLSFAHYRFKEFLKHKASETGKIVLDVCEAYTSKTVSWTGELVNIGGSKTIKSKIDGRLMDRDINGARGIFLRALVDTPWLKNQLALAG

SEQ ID NO: 42133 - protein, 448 aa, Moorea sp.
VKTPTQIIRTDKWRLNATSEQRLLFTETVKVYRRACRYLVGIIYTHWSKFGNLTADQLTPAVEKLMHQTAKRPSVKYPQFNKAFYKFPSYYRRSALAFAAGQVSSFVTRYREWQAGTRKLPNASPPKLNADTGCYPALYKGQCYKLHRFNQVEIKVFNGSDWVWTTVQITGLRERHQVATNKMLSPSLIFNERACHLSVPFSCKPEKRKPEANVTAVDLGINTTATISVVTHSGTVIHRDFIHPGRDIDRRDKRLKSVSMRASKTMGKGGRLHKGFCSKTYQKCQRINNQISHVVSRRIVEIAEKFNSEAIVFENLKAWKPKGGRKRSNLRQRFHGWLKAKIRDFTLEKWAELGGKVIEVVAAYTSKLAYDGSGIVKRDSGNYALATFSSGKQFNADLNGAYNIGARGVLKLVRRNDNEGRFSKSSGRPPRSWACLCDLWAAASPRLA

SEQ ID NO: 42134 - protein, 459 aa, Moorea sp.
MYKTVPLKANFTDEEQAFWVFQCQQANSLWNCAVYYSKQKHYSWLEQQKEAFTTYWCGDELRYGWKTYKCSIKYAELCKSLKENPHYRAMAAQSAQQTLKSVAESVTTYNQLVGLYYKGNVNKPKLLRYRQKGGLAAVTFPRQALIYKKGLFYPSISKETKPELITDIALDPPDFIDPDWVKEVTVRPYLGELWIDWVIDDGKQSVEYNPNLDYSQAWSFDHGGDNWLTGVSTHGKSLIIDGRKLKSLNQGYSRLVAKYKEGKPDFYWDANLDRVQRKRNNQMRDAVNKAARFIINRCLNDRVGNLIVGWNEGQKNCSNMGKRGNQNFVVIPTKRLINRLKQLCPEYGIKLTITEESYTSKASFLDDDSLPTIGEKPKGWKPSGKRVRRGLYRTAKGYLINADCNGAANIARKVDRQLGLDLTKLSREALTLPHRYSLFNSLSKLYRTKSEKARFQPAL

SEQ ID NO: 42135 - protein, 366 aa, Moorea sp.
VYRTVPVKSTFSDEEKAFWVFQCEQANNLTNCAIYYAKKKHYDWLREQVEAYTTYWRSDTLRFGWKTYKCAVRYPEIDKALNRSPHYKAMAAQSAQQTLKSVGESLKSYNQLVGKYYKGEVDRPRLPRYRKKGGLAAVTFPRQALTYKQGLFWPSISKESKPELLCDITLSPPDFIDPDWVKEVTIRPYLGQLWIDWVIDDGKQPIDTNPNLDYSQAWSFDHGGDNWLTGVSTHGKSLILDGRKLKSMNQGYARLVAKYKAGKPDFYWDANLYKVQRKRNNQMRDAVNKAARFIVNRCLSERIGNIVIGWNERQKNSINIGRRGNQNFVVIPTKRLIERLKQMCPEYGIKLTVTEESYTSKACAIR

SEQ ID NO: 42136 - protein, 492 aa, Moorea sp.
MKKLGIVRSESYNKLGSISHWGLNWKKAIPVVKSFRTPDTLGLPAKLMDWTINDVAKAITAQQAACIDAVVKNVYKRFPGKENQNKRKELCKQLKSLAFLDNSLLHRLVRKEFQRGHSWVKNQIVYQQVGYRCKRLSRNTYQLELAGLRRGKRNKIVVRSNRKIKGQIRLIHNQILQRFEIHFLVDHGTVEIPADRRTIGVDKGYTEAFYDSDGQAHGKNLGKVATKKSDRICAKNRNRGKLWALHRKLEKIDPAKSARILEKNLTRKTENRRYRQNQSELTAIIGAASKSLFNGEALKVFAEDLTQPIRNKRQSKAVSRKLNSWMKGVMRDSLQKWANWTGSVVTEVQPSYTSQIDSRTGTLLGKRTGDNFTGFDGVVLQADYNAALNILARGTDFEITRYMKKTEVQAVLLRRTARCLEGMGLSLLDAVELGWLDLKHSKTQAFKQLLVEMPGTPRQTSGRFNSNYCMTTPHSGDNKVNLDRFIPDYSDL

SEQ ID NO: 42137 - protein, 397 aa, Moorea sp.
MEFKAILTEGQQEAVDEAIRTSKFVRNKVLRYWMDNKGIGKKELYRYNTQLRDEFGFVKDLNSHACQASVENVERAIKRFFDNCKKKIPGKKGYPKFKKYCRSVEYKQSGWKLSPDKKSIRFTDQKSIGKVKLKGTWDLWWFDHKLIKRVRIVKKADGYYVQFCIKVCRNEETESTGSVVGLDVGLKEFYTDSNGFSEPNPRFYRKSEKHLKFCQRRLSRKKKGSSNRNKARNRLSRAHLRISRQRKEHAKRLARCVIRSNDLVAYEDLRVKNLVKNHCLAKSINDAGWYQFREWLERFGQVFGKVTIAVNPAYTSQNCSQCGKVVKKSLSTRTHTCQCGCTLDRDHNAAKNILNRALSTVGHTETLSNAWGDLSSTLLGHGLVEQDNSMNQESPGL

SEQ ID NO: 42138 - protein, 432 aa, Moorea sp.
MRTAYQYRLKPTKAQKAIIDNWLSMLCAQYNYLLADRFSWYEQNRCSIYACSLVCHLPELRDNPDYYSQKKTLPDLKKARPWYKEIHSQVLQDAVKRVKLAFDRFIKGDKNGNRSGRPRFKKRHRYRTFTYPQMKEGCLQGELIDLPKIGKVKIVLHRPIPVREASATPNGFKIKTASVTKKCDGYYLVLSLEDKTIPETKADINPRSIIGIDVGLKEFLTTSEGETIKTPQYYRKAQKRLKVIQKRVSRRKKGGKNRLKAIKQLGIQHKKVADKRKDFHFKTANYLLSKYDVIAHEKLNVKGLTKTRLAKSVLDAGWSSFLTILSSKADNAGLLTIPVSARNTSQNCSSCRKKVPKKLHIRWHDCPHCGCSLVRVAWPTANRDSAKPTLREHNAAINIKNRAEGQSVLKAQRLLRDTRIGWEAYTEPVRSV

SEQ ID NO: 42139 - protein, 307 aa, Moorea sp.
MVLLTYCYRIKPNAEQIATMERWLELLRRHWNYALGQRLDWLNRTRCRVDRCSIVSEAIGDIAEPVTYYSQQAALKETKKLFPKYKQIYAETQQVNLQRLNKAWDRWRKPDASGKRGGRPRFKKPGDLRSFVFPRVNNTRAGAHLIDGVLKLSRIGSMPVVMHRPLPSGFTLKQCTIIKKADGWYCCISIKDDTVPELLPVDSVKSAVGIDVGLEKFLTTSDGEAVPIPQFYRKAQNKLAQAQRLMSRRVKGSKNWQKAKQKVALLHLHLTRCRKEFHYQVAHWLCSSYDLIAHEDLNIKGLGRVIN

SEQ ID NO: 42140 - protein, 362 aa, Moorea sp.
MIITEFKAYGKLIQYQAIDEAIRTVKFVRNSCLRLWMDNKGLNKYDLNKYCKILAKEFPFASELNSTARQSAAERAWSSISRFFENCKKKVPGKKGYPRFQKHCRSVEYKQSGWKLSPDNKSITFSDKKGIGKLKLKGTWDLWRFDKKQIKRVRIVKRADGYYVQFCISVDVNEQLSPVDATVGLDVGLKEFYTDSRGNTEPNPRFYRKGEKRLKFYQRRVSRKKKGSTNRNKAINRLGRHHLKISRQRVGEACATRIEHAKRLARCVIRSNDLVAYEDLRVKNLVKNHCLAKSINDAGWYQFRKWLEHFGQRFGRVTVAVNPAYTSQKCSECGEVVKKSLSTRTHVCECGCELDRDVRFVG

SEQ ID NO: 42141 - protein, 446 aa, Moorea sp.
MQLGYSYKLKPNQQQKSKMNRWLDMLRLQYNYLLRDRNDSYDQAKTPRLGNYCELKSGGEACPLTCSVSKNYSIGYPWKKSHKNPRRSAYEAQSSSLPILKKERPWYKSIHSTVLQQTLRQLDVAFAKFFKGETGYPKPKRRSRFRSFKYAPGQVKLNGNKIYLPGIGWMGFYNSRPIPEGFTLKSVTVRRKARGWFVSLQIEDKSVPPTPVKDNTEIDPLRVKGCDLGINKLISLSNGKTIANPAKQKSFRRRERRLKLRQKAASRKNKGSRNRGKSYEAVASLHERITNNRSAYHWGIANQLVDGTDALVFEDLNIKAMKSRCKPRPNESGSYDSAKPTFYERNGQSAKKGLNRSISNAAWGELVKKVEVVAAKSGIPVVKVNPKHTSVECPKCHHVSKSNRKKEKFVCTNCGHYDDADINGAINIKLRGLKKLGIDPLDARLR

SEQ ID NO: 42142 - protein, 370 aa, Moorea sp.
MRSACAQQTLHGVIESFKSYKALKKLYDKGKSTDKPRVPKYRKKGGLAVVSYPARWVKLVKGQLKFTLGKQIKVWFGIDHFLLPMPSNIDYKSIKEYRFVPRNGCFYLEFVYERPNPEPVTPTSNVIGIDPGLNNWLTCVSNLGKSFIIDGKKVKSQNQWYNKRVAAIKKGKSQDYWDERLAFLTEKRNRQMRDNVNKVARFTVNWCLRNQISTVVFGWNKRNKDSINIGKKNNQQFVQIPTAKLKNRIEQLCVEHGIKFVETEESYTSKASFLDQDFLPVLGGKPEGWKESGKRVKRGQYLSAKGKLINADCNGASNILRKVATQLGFPLAEVGRAALNLPQRYRSDSLSRSYREASWSSVSTRVTTSA

SEQ ID NO: 42143 - protein, 381 aa, Moorea sp.
MVRQWFGVSRYVFNKTVKILENGEVKANWKAIKTGILNDLPQWCKTVPYQIKSIAIKDACTAVREAKKKYKKTSQINRVRFRSRKNPVQSCYIPKSAVSDQGIYHTKLGVVTFTETLPENICDCRLTSTNGDYYLVIPHKVTSIKAENQGRVVALDPGVRTVLMQSLMGETPKTALHRFLTFFSETSVGKIGNGDFSRIQRLCQHLDNLISKISKALGGQKRRTRKAARRMIIRIQNLVNELHHKAARFLVDNFDVILLPTFETSQMSKRSLRKLLSKTVRNMLCFAHYRFKEFLKHKAQETGKIVVDVCEAYTSKTVSWTGELVNIGGSKVIKSKVDGRTMDRDINGARGIFLRALGDTPWLRNQLALVSQDLLLVDSGS

SEQ ID NO: 42144 - protein, 419 aa, Moorea sp.
MLLTYCYRIKPSDEQIAIMERWLELLRRHWNYALGQRLDWLNRTRCPIDRCSIVREAIGEVPEPVNYYTQQSALKETKKLFPEYKLIYAETQQVNLQRLNIAWERWRKPDATGKRGGRPRFKKQGQLRSFIFPRVNNSRAGAHIKHGVLKLSRIGEISVVMHRPLPSGFTLKQCTIVKKADGWYCCISMKDDTVPECIPVESVKSAVGIDVGLEKFLTTSDGEAVGIPQFYRKATNRLASAQRVMSRRVKGSKNWQKAKQKVALLHLHLTRCRKEFHYQVAHWLCSKYDLIGFEDLNIKGLARTRLAKSIHDAGWGSFLEILQAVAVKRGLLVEEVNPRGTSIECFNCGARVEKNLADRVHHCSDCGVKIDRDWNSGINILNRALMAVGLPLNGCGKSIQDIEEQQVSFVNLRSLHHNL

SEQ ID NO: 42145 - protein, 382 aa, Moorea sp.
VENSWFSTTLKVVEKQNSQQIFSPSFTSSLVEYTNFENTEQKSKKIRVFLNSEQRAIVRHWFGVSRYVFNKTVKILENGEIKANWKAIKTDILNDLPDWCKAVPYQIKSIAIKDACTAVREAKKKYKKTRQINRVRFRSRKNPVQSCYIPKSAVSVKGIYHTKLGALTFAETLPDNICDCRLTSTNGNYYLVVPYKTAHIKTENQGRVVALDPGVRTFLTFFSQTSVGKIGHGDFSGIQRLCQHLDNLISKISKAKGKQKYRMRKAARRMVIRIQSLVNELHHKAARFLVDNFDVILLPTFETSQMSKKRNRKLRSKTVRNMLSFGHYRFKEFLKQKASETGKIVVDVCEAYTSKTVSWTGEIVNIGGSKTIKSKIDGQVMD

SEQ ID NO: 42146 - protein, 411 aa, Moorea sp.
VRVAYQYRLRLTKAQKALIDNWLSMLCAQYNYLLADRFNWYEQNRCPINACPLVCHFPELRENPDYYSQKKTLPNLKKTHPWYKKIHSQVLQDVVKRVKLAFDRFIKGDSNGKRSGRPRFKKRCRYRTFTYPQMKEGCLEGNLINLPKLGTLKVILHRPIPVREASATPNGFKIKTASITKKCDGYYLVLSLEDKTVPEVKPDINPESIVGIDVGLKEFLTTSEGETIEIPQYYRKSQKRLKVIQKRVSRRKKGGNNRLKAITQLARQHKKVADKRKDFHFKTANYLLSKYDVIAHEKLNVKGLAKSRLAKSVLDAGWVSFLTILASKAVRVAWPTALNAGLLAIPVSAMNTSQNCSNCGKKVPKKLHIRWHNCSHCGCSLVRVAWPKANRDHNAAINIRNRAAGFEVTVI

SEQ ID NO: 42147 - protein, 414 aa, Moorea sp.
MRAAYQYRLRLTKAQESEIEKWLDLLRCQYNYLLADRFNWYEQNRCSINSCPLICHLPSLRANPDYFSQKKTLPQLKKDRPWYKVVQSQVLQDCVKRVDLAFKRFLKGDSNGKRSGKPRFKGKNRYRSFTFPSLSKTPINGNTLTLPKFGKVRMIYHRPIPEGFKIKTATITRKADGYYVTLSIQDDTVPDVIPVDSVKNPIGIDMGLKSFLVKSEGSEVPIPQYYRKAQERLKKIQKAVSRSKKGSNNRKKVVNQLGKAHKKVADTRKDFHFKTTKSLLDDYDLVAHEKLNIKGLARTRMAKSVLDAGWGQFLSILSTKAVRVAWPTALNAGLVTVAVNPRNTSQNCSNCGTKVPKKLKDRIHSCPSCGYTEDRDVNAAKNILKLAVGHPVSSKAFRVSEALAGVGKKPTLNF

SEQ ID NO: 42148 - protein, 431 aa, Moorea sp.
VSKVFNLTYEFKLKPNAKQVSLFENWLEQCRKVYNYGLGERKDWYKSRSCVINACSVRSEYIISADTKRPTYASQCRGLTAARKAIEELRAVQVHVLQQTLKRLEKAFVNIWEQGHGFPRFKKQGQMRSFVFPQLGVKPVESGRVKLPKIGWVKMWQSREIPADAVIKQARVVRRATGWYVMLTLQWDVDIPQIMPHGEPLGVDVGITHFAAVSNGKLFPNPRPFKRLERKLKLLQMKVSRKRIGSSNRRKAQAKVSKLHERIANVRKNYHWELAHNLCDWAGMIFVVGEACPKDIDLSLKGLARGMLGKHCLDAGWGQFFQILEQCCFKRGVYFQKVDSKKTSQICPNCLTETGKKTLAERVHHCENCGYTTDRDVAAAQVVCLRGLAAVGHTVKMLSEGKFVGIPGKKESPRLKARGVSTTEKGRSDEA

SEQ ID NO: 42149 - protein, 443 aa, Moorea sp.
MYGCQQHLITTTPENQAVIEFICSEANKLTNCGIYYCRQMLFKVGKYLNNAELDKIMKSNVHFKAMRSACAQQTLHGVIESFKSYKVLNKLYDKGQLTDKPRVPKYRKKGGLAVVSYPARWVKLVKGQLKFPLGKQMKAWFGIDHFLLPMPSNIDFNTIKEYRFVPRNSCFYLEFVYDRPSPDPVIPTSNVLGIDPGLNNWLTCVSNVGKSFIIDGRKVKSQNQWYNKRVTAIKKGRPQDYWDKRLASLTEKRNRQMRDNVNKAARFIVNWCQRHQINTVVFGWNKRNKDSINIGKKNNQQFVQIPTAKLKNRIEQLCIEYGIKFVETEESYTSKASFLDNDFLPVLGAKPVRVACAKAQGWEASGKRVKRGLYRSGKSELINADCNGAGNILRKVVTQLGFPLAEVSRAALNLPQRYRLNYLSRSYREASRSVVLTREATSA

SEQ ID NO: 42150 - protein, 414 aa, Moorea sp.
VYKTIPLKAKFSDEENAFWLFQCEQANSLWNCATYYSKQKHYGWLEQQPEAFTTYWKGDDLRYGWKTYKCSVKYAELCKSLKDSSHYKAMAAQSAQQTLKSVAESITSYNQLVSLYYKGQVDRPRLLRYRQKGGLAAVTFPRQALTYKNGLFYPSISKESKPELLTEITLEPPGFIDPDWVKEVTVRPYLGQLWIDWVIDDEKQLIENNPNLDYSQAWSFDHGGDNWLTGVSTQGKSLIIDGRKLKSMNQGYARLVAKYKTGKPEFYWDANLARVQRKRNNQIRDAINKAARFIINRCLCDRIGNLIIGWNERQKDSLNMGRLGNQNFVVIPTKRLIERLKQLCSEYGIKLTITEESYTSKASFLDDDPLPKHGEKPSGWKASGRRMRRGLYKTSFGHLINADCKCGSFLGGTS

SEQ ID NO: 42151 - protein, 196 aa, Moorea sp.
VCGVKYPEIDKALKMSPHYKAMAAQSAQQTLKTAGEAIKSYNQLVGLYYKGEVDRPRFPRYRKSGGLFSVTFPRQALTYKQGLFYPSVSKESKPELLTEIILTPPSFIDPDWVKEVTIRPCYGQLWIDWVIDDGKQPVKSNSSLDYSQAMGIDHGGDNWLTCVSTIGKSFIIDGKKLKSMNQGYSRLVANYKAGKS

SEQ ID NO: 42152 - protein, 120 aa, Moorea sp.
MRKAARRMVIKIQNLVNELHHKAARFLVDNFDVILLPTFETSEMAKKGNRKIRSKTVRNLLSFAHYRFKEFLKHKAQETGKVVVDVCEAYTSKTVSWTGELINIGGSKTIKSKIDGRSMD

SEQ ID NO: 42153 - protein, 292 aa, Moorea sp.
VIKVLVMEFKAVLKESQKKAVDEAIRTSKFVRNKVLRYWIDNKGIGKKELYRYNTQLRDEFKFVKDLNSHACQASVENVERAVARFFENCKKNVPGKKGFPKFKKHYRSVEYKQSGWKLSPDKKSLKFTDKKGIGKVKLKGTWDLWWFDQKLIKRVRIVKRADGYYVQFCVKVDNYENLEVTGYALGLDVGLKEFYTDSEGRTEPNPRFYRKSEKRVKFCQRRVSRKKKGKAVGHASRTANRRKARNRLGRAHLKISRQRKEHAKRLVRSYRKNKEAFMVSRLCIKGLNLCY

SEQ ID NO: 42154 - protein, 418 aa, Moorea sp.
MRIAYQYRLKPTKHQQTKIDDWLSMLCAQYNYLLADSAKPTLRERFNWYEANRCSINACPLVCYLPELRDNPDYYSQKKTLPSLKKTHPWYKEVHSQVLQDAVKRVKLAFDRFIKGDKNGNRSGRPRFKKRHRYRTFTYPQMKEGCLQGDLIDLPKIGKIKVVLHRPIPDGFKIKTASITKKCDGYYLVLSLEDKTVPEIKPDINPDSIVGIDVGLKEFLTTSEGETVKTPQYYRRSQKRLRVIQKRVSRREKGGKNRLKAIKQLGKQHKKVADKRRYFHFKTANYLLSKYDVIAYEKLNIKGLAKSRLAKSVLDAGWSSFLTILASKAVRVAWPTALNAGLLAVPVSAQNTSQNCSSCGKKVPKKLHVRWHECPHCGCSLDRDHNAAINIKNRAEGQSVLKAQRLLRDTRIGACCLH

SEQ ID NO: 42155 - protein, 490 aa, Moorea sp.
MPNKVDATKKISTQIVLVVGMTKSVEIELLSTMKKLGTVRSESYNKLGSISHWKLDWKKAYPEVRSFRTPESLGLPSKLMEWTVSDVAKAITAQQAACTEAVIKKIYKKFPGKDGQKTRKELCKQLKTLAFLDNPLLHRLVRKEFQRGHSWAKNQIVYQQGGYKCKRLSRNTYQLELAGLKRGKRNKIVVRSNRKIKGQIRLIYNQLMKRFEIHFLVDHGTVEIPADRRAIGVDKGYTEAFYDSDGQAHGKNLGKVTTQKSDRICSKNRNRGKLCALHRKLEKIDPAKSARILENNLTRKTENRRYRKNQSELKAIIGAASKSLFKGESLKVFAEDLTQSIKNKRQSKAMSRKLNSWMKGEIRDSLQKWADWTGSVVTEVQPSYTSQVDSVTGTLLGKRSGDSFTRFNGVVLQADHNAAKNILDRGTDKEITRYMNKTEVQAVLLRRTARFLKGMGLSLVDAVELGWLDYKHSKTQAFKELLAGMPETSR

SEQ ID NO: 42156 - protein, 403 aa, Moorea sp.
MIIIEFKAYGKRNQYLAIDEAIKTVKFIRNSCIRYWMDNKGVNKFDLSKYSKILAKQFPFANELNSTARQASSDRAWSSIARFYDNCKKKAPGKKGFPRFQKHCRSVEYKQSGWKLSPDKKWIIFSDNKGVGKLKLKGKWDLWRFDNKQIKRVRIVKRADGYYVQFCVQVDINEQLEPSDSNIGLDVGLKDFYTDSKGKAEPNPRFYRTGEKRLKFYQSRVSRKKKGSSNRRKAINKLGRIHLKISRQREEHAKRLARCVVRSNDLVAYEDLRVKNLVKNHCLAKSINDAGWYQFRNWIEHFGTKFGRVTVAVNPAYTSQNCSDCGEVVNKSLSTRTHVCKCGCKLDRDHNAAINILKRALGTVGHTGTWIIDPNAGGDLSSTVPDSGQVEQDESLIQESPRL

SEQ ID NO: 42157 - protein, 465 aa, Moorea sp.
MTELVKAELLSTMKKLGIVRSESYNKLGSISHWGLDWKKAYPEVRSFRTPESLGLPSKIMEWTVSDVAKAITASQAACTDAVVKKIYKKLPGKDNQKARKELCRQLNTLALLENPLLHRLVRKEYQRGHSWVYNQIVYQQGGYKCKRLSRNTYQVELAGLKRGKRNNIIVKSNRQIKGQIRLIYNQLAQRFEIHFLVDHGNVKIPTDRRAIGVDKGYTEAFYDSEGQAHGKKLGKVATKKSNRICAKNRNRGKLWAFHRKLEKLDPAKSARILKNNLTRKTENKRYRQNQSELTAIIGAASKSLFNGESLKVFTVRGAWPTALDLTQPIKNKRQSKAMSRKLNSWMKGKMRDSLQKWANWTGSVVTEVQPSYTSQIDSVTGTLLGKRSGDNFTRFNGVVLQADYNAAKNILARGTDREITRYMSKTEVQAVLLRRTACFLVRSYRQNKAAFMVCRLWVKGLKLYD

SEQ ID NO: 42158 - protein, 446 aa, Moorea sp.
MNQWLNMLLAQYNYLLRDRNESYEQVKAPKMGEYCNLQTKGSACPLTCSVNKSTSVGYPWKKGKNPKRNPYEVQSSSLPTLKKERPWYKGIHSTVLQQMLRQLDRAFSKFFKEGAGYPKPKRRSRFRSFNYAPKQVKIKGHHIYLPGIGWMQFYNSRPIPCGFQIKSVTVRRKAKGWFVSVQIEDKSVPVAPTKTKDEINPDRVKGCDLGIKKLISTSEGEFIPNPVKGLKHKRLSRRLKIRQRAASRKKKGSKNRKKAFGKVAYLHQQLENKRSGYHWEVANQLTDNVDALVFEDLNIKGMKSRCKPKPNQNGGYDHNGQSAKRGLNRAISDAAWGELLNKVEVVAAKSGIPVVKVPPQNTSRECPKCHHISKDNRKGEKFVCTECGYHDDADANGAVNIKIKGLKKLGFDPTELPTGRGKVTPTELSTVKVEPRKESPSLYRVG

SEQ ID NO: 42159 - protein, 330 aa, Mycobacterium sp.
VWRWCSRSTTPRRAWRNFFDSTSGKRRGRRVGPAAVQIPQGSPAVVSAYPQRVQPESQRPAVRGQSRRGAGALVTRATQHAVVGHDHSGTRWPFLRQFRCRRWGLTAARGGPGGRCGCRGRSVGHDRHHRWPSGRCRQSEAFGSQAAEAAAVGAEKSRRQKGSASRDKSRRKVAVAHNKVARARRDYHHKQALALVRENQVIHVEDLNIVGMVRNRRLARAISDAGWGQFVRIIDEKADRYGRTVHTVSRWLASSKTCSDCGHRLDELPLQIRSWTCPKCRVVHDRDHNAAKTILAAGRAERRNAGGASVSPPTTREARGDEAGSTPTAA

SEQ ID NO: 42160 - protein, 353 aa, unknown
  TnpB Polypeptide
  misc_feature (162)..(165): Xaa can be any naturally occurring amino acid
MRILLKAYKTEINLTEQQTQKINQSIGICRWLYNSYLAKNNELYKQYREGVIDKKQAFMSANDFDKYINNEIKVLEEYNWINNCGSKARKKAICNAETSYKRFFKGKSKFPKFKKKSKSDVKLYFPRNNKTDWKVERNKINIPSLKWVHLKEKGYIPTNADXXXXVLIEAKEKYQENINEGIGIDLGLKDFAICSNEMTFKNINKTNAVRKIEKKLKREQRKLSRKYESLKIRNKNNKKEGGIATRQNIQKQIVKVQKIHQRLTNIRTDYINQVVNKVVKTKPQYITIEDLSIRGMMKNRHLSKAISKQGFNMFRNKLLIVVLYLQDLNFLTESGYVLNVEQFMIEIKMLVLI

SEQ ID NO: 42161 - protein, 438 aa, unknown
  TnpB Polypeptide
MKVTSSYGVEIRHMNRIFKDTVTIYRKALAFLVDVYDEEWNNLEVIANKQKRFNEAERLIHSTKSNTAVYDFDTRFYKIPSYLRRDLVNTALGIASSYRSNIKNWEESGRAGSRPKLQKEHFQMPVFFRDNMYQETESDARCRLKLFHKNDWIWVTVTLKKTDVDYLKKHWSYAAASAPRLEKRYGKYFLRFSYEEDVKLSTSKVKDQKVCSVDLGINTDAVCSIVYADGTVAARKFINLAAEKDHLHHVLNRIRKFQRQHGSRNSGSFWAYAKRLNMELAKKTANEIVSFAAAHSVDVIVFEYLDMSGKKHGTGKQKLHMWRKNYIQEVVKHKAHRIGIRISRVCARYTSWLSFDGSGEVDRDVHDHRFCTFKNGKRYNCDLSASYNIGARYFIRELLKPVSAKRQSLLLAKVPEAGRRTTCTLDTLRKVSDFLSVS

SEQ ID NO: 42162 - protein, 420 aa, Natronobacterium sp.
MTVVRNLEIKLDVADEDYPVLDETFEQFQQAAQHAADYGWSDDPTQIIDSKNKLHDATYSDVREQTELTANHVQAARSLAANALSNCKDRLLEDEKNASKPEFRGTVVVYDGRTITYNDDHCTLSTVDSRVSAEYIIPDDTRGTPFEEYWGHSKWGCGEATLHKRDGTYYLHVSMKKEREKDEASATEYGAVLGVDLNVDGYLAVTSTGAFLGNTDYLNHKRKEYERRRGKLQQTGTRSAHLTLKSIGDRFSNWSEDYLHRVALALVLEARRHECDAIAFENLKHIRERISSASKFQQWAFNKLQSLVEYKAEEYGILVDDVKPQYTSQRCSHSECGFTHEDNRDGDEFECLNCGKELHADYNAARNIAWRLVQHWLKSGAGRADCQVALKSGTVNANGEFSPTTGSSGQSGSPLTSPPL

SEQ ID NO: 42163 - protein, 403 aa, unknown
  TnpB Polypeptide
MKMFGIIKNGIKKRLQRFIIPNQIAKVIAKMTKSIITKSFKFRICNPSKIVQERLEQTLYLCRSLYNASLQERRDAYQINRISINYQAQQNQLPDIKTTNPEYKDVHSQVLQNVLKRCERAFDGFFRRIKAKQTAGFPRFKGQNRYNSFCYPQTGFSLTGDKLQLSKIGKVKIKLSRSVVGKIKTCTIKKEINKWFVIFTVETLPEPLPKTGQSVGLDAGISAFMTLSDGTQIDNFKYYESTQKKLRVVQRSVSRKRKGSNRRHKAVLQLKKKHQKIRHQRNDFQHKVSTYLVKTYDLIAIEKLNILGMSRGILSKQVNDAAWNSFFQKLRYKVENTGKKLIEVNPNGTSQICSSCGEIVKKDLSVRVHHCHHCNLTIDRDENAALNILRLGLSLKDVTYSVG

SEQ ID NO: 42164 - protein, 361 aa, Clostridioides sp.
MYPNKKQQELINKTFGCCRFVYNKYLAKRIDVYKNDKETFTYKQCSSDLTNLKKELKWLKEPDKFSLQNALKDLDNAYKKFFKEKAGFPKFKSKKINRFSYKTNFTNGNIMYCGQHIKLPKLGMVKIRDKQVPKGRILNATISKEPSGRYYVSLCCIDVDIEVFENTNNHIGLDLGIKEFCISSCGEFIENPKYLKKSLNKLAKLQRELSRKTIGSLNRNKARLKVARLQEHIANQRNDFLQKLSTKLIKENDIICIEDLQVKNMIRNRKLSRLISDVSWSEFIRQLEYKANWYGRQIVKVGKFFASSQICNKCGYKNEEVKNLNIREWICPSCNETHDRDINASINILKEGLRLITIQNK

SEQ ID NO: 42165 - protein, 394 aa, unknown
  TnpB Polypeptide
MLKNFQYRIYPTKKQLKSLESTLEECRWLYNHLLENRKNAYEQEGKSLTCYRQQVTYPILREQRPSLNSVHSQVLQNVAVRIDLAMKAFYRRVKAGEKPGYPRFKGYGRYESFCFPQSGFSITHDNRVSLSKIGAVKMVYHRPIKGIMKTCTIHRSSTDKWYVTFSCETEPERLEPTATQVGIDVGLKTFATLSNAGAIDNPRFFHQEEKALAKAQRRLSKAEKETFRSDCLSEAKTKFVGNRNTESPQRKKRREVVARVHERTRFKRDNFTHQESRQIVDRFGVICVEDLHVNRMVHNYCLAKSISDAAWSAFFSHLSCKAEEAGRQFIKVNPAYTSLTCSACGHRQKMPLSERVYHCPCCHLSLDRDVNASKNILRLGLESLGIQSVEAPAF

SEQ ID NO: 42166 - protein, 374 aa, unknown
  TnpB Polypeptide
MRTRTTAKIRIEPRQEIIDTIIVYKRGLQFCIDKAWEMKIRNNIKLHPFVYQELKTLGLPAQLSVACIKQACGMIKKAKTKPFINFCSLRYNSPRSFSFKNNILSISTIKGRIKVPFTIPNCFKDYFSWEVDESLLRIDSKGRCFFLFTFAKEVDVKSSGSHRVLGIDLGVNNLAVTSDRQFFNSSQVKQIKRKFKFLRSKLQAKGTRSSRRLLKKISGKEKHFMAWINHNISKSIVSSFDGGKIVMENLKGIRKTNLGRRMNYWISNWSFFQLQSFIQYKAERKGIEFFKVKPNYTSQICSKCGKLGSRSGCSFVCIHCGYSLNADLNSALNLASPMLEKRQASITKPSSEPMNIKGLSNPIDCEVMGKYPAL

SEQ ID NO: 42167 - protein, 470 aa, unknown
  TnpB Polypeptide
VKDNVNKQHTMYRSYNHQVMDLTNNKKQLLVKLLFEYRRIAKIILNKQINSLHKTGYLSTKSKDFYVDIPTFLSERYKDTIKRQVDGMLKSYISNRKNDYKKIVYKSSLSDETKKELYIVNKLNGWFKKENKLANKIFKHVLSKNRFPSTKRINMHLSNKVYKLEENKTTKSCTYHILLNTCSGIRGDKTVFSLKTNTRFDEIIKNEKGDKKDLKIHNSIQVNFKNNCLTNIVLGISFSKKENLSELSVNKIGLDFGIKNLLTLDNGSIYGQNFIKKLLYYDKRITCLQKELQIRGKIKLSENKRYCSLTNSLRAFIKNEVCRVVNRIIKINKPSEMVFEELDFSDSLLSKKMNRILRNCGLAILKNKLISVNEELGIKITYVNPAYTSQECSSCKYVDNNFLCQCCGLKLPADVNSARCIVGRSNDTYLMNNKYLTRVAVKRHLMCKSRKVFSECVLSSTHGRVNPSKS

SEQ ID NO: 42168 - protein, 367 aa, Escherichia sp.
VKRLQAFKFQLRPGGQQECEMRRFAGACRFVFNRALALQNENHEAGNKYIPYGKMASWLVEWKNATETQWLKDSPSQPLQQSLKDLERAYKNFFQNRAAFPRFKKRGQNDAFRYPQGVKLDQENSRIFLPKLGWMRYRNSRQVTGVVKNVTVSQSCGKWYISIQTESEVSTPVHPSASMVGLDAGVAKLATLSDGTVFEPVNSFQKNQKKLARLQRQLSRRVKFSNNWQKQKRKIQRLHSRIANIRRDYLHKVTTTVSKNHAMIVIEDLKVSNMSKSAAGTLSQPGRNVRAKSGLNRSILDQGWYEMRRQLEYKQLWSGGQLLAVPPAYTSQRCACCGHTAKENRLSQSQFRCRMWIYSERRCKWRS

SEQ ID NO: 42169 - protein, 382 aa, Hadesarchaea sp.
MELAKTVVCKLKPTDEEREKLLRTVQAFKDACNHISKVAFDKRVFNPVALHHLVYRETRAKFGLPANLAIRARDRVAKAYKQRRDKLLRFDRSSLDLDARLFRLIDKPDGVCASISTVQKRVKPPLAVGEHQRKLLRGAKPTHAVLTYKNGCFYLHLTVERKVPEPNGSNPVGVDVGMNNLLVASNGFRAEGKSIAKRREHFRRLRSSLQAKGTKSAKRRLKRLGGREKRWANTVLHQVSKRFVDSLKPGDIVVLEDLNGIRNRVKLRKSRRAGFHSWAFARLQSYIRYKALERGIPVISVDARNTSITCPRCGHAHRNNRRSQSLFRCMNCGFQHNADWVASLNLARRAGSPGTGRVVNRPDVRGVLFNHFGSPRGQAHAL

SEQ ID NO: 42170 - protein, 357 aa, Clostridium sp.
MLKAYKYRIYPNSEQKEYLAKTFGCTRFIYNKMLNDKIEYYKQTGEMLKNTPAQYKKEFEWLKEVDSLALANVQQNLEKAYKNFFRDKSVGFPKFKSKKTNYHSFTTNNQKRTVSIDNGYIKIPKLKTRIKIKYHRKFIGKIKSCTISKTPSNKYFISILVDTENMTLIKTDKKLGVDVGLKEFVVCSDGYRVDNPKYLRKLEKRLIKLQRDLSRKQKGSNNRYKARLKVAKLHDKIANQRKDFLHKLSIKLIRENQSIAIEDLKVSNMMKNHKLARVISEASWYEFRVMLEYKAKWYGRNIIVAPSNYASSQLCSECGYKNSDVKSLALRNWTCPKCGAEHDRDINAAKNLEKLIV

SEQ ID NO: 42171 - protein, 394 aa, Cricetibacter sp.
MLIRKAFKFEIRPSGEQQRKINQFCGCSRFVFNKALDWQKQAYEQEPKTKFSYTKLANFLLQWKKEFEWLKKCHSQVLQQSLKDLENAYRHFFSKRSGFPKFKKKGVKDSFRYPQGCKIEQENNRLWLPKIGWVRYRNSREVVGEIKNVTVSKKCGRFFVSIQTEFEQSIPQHQGSEIGIDMGVARFVTLSNGDYFESLNSFKKHQNALRKAQQSLSRKVKFSQNWLKQKAKIGKIHHNISNARKDYLHKISTLISKNHAMIFVEDLQVANMSKSAKGTLERHGKNVAQKSGLNRSILDQSWYEFRRQLEYKSAWLGGYLILVNPKNTSRTCPCCGYTDKENRQTQANFECVECGYQNNADVVGAMNVLRAGHAQLACEVNGISRQQQELIEVS

SEQ ID NO: 42172 - protein, 361 aa, Desulfosporosinus sp.
LDKEHFQKNGSWIDRGTLHLATKGQYQVHSQSIQAVYEKYIDARENAHKARALGFTQIRYPYKEKKHFNTKWKKDGFRVGENGKIELSLGLFRGKRQKPIVVRVKDLPTGKIKEIELVYDRGLRLAIAYDDGITPKENDHLGIAAIDLGEIHTIASVCDNGQGVIITGRKIRSLKRLRNKKMKELQKKIAKCQKGSRQWKKYRRALYYVLGKSDAQLTDALHKTTRKFANWCLENKAKRVVVGNMEGVQRNTSPKKKKNKHKRSCKHNQKMSQWQFGRITTYLQYKLAAEGISLQKVDESYTTQTCPVCGRRKKPTSRNYSCTCGYQEHRDIHGAKNILSNYKYGKFRELSLDQQKYLRIA

SEQ ID NO: 42173 - protein, 403 aa, Bacillus sp.
MRTNVPSGEVKIMQVKKAFKFRIFPNRKQVDLINKTIGCSRFVYNFFHGKQKEKDAYWYIVEEMKQKGQLPTNEWKGSFFNKYETVKAVRQLKEHYPFLKEVDSISLQKSVENLADSYQRYYKKQTKAPRFKSKKNKVQSYTTKQTNGNIAVFDKHIQLPKLGKVRFAKSREVTGRIINATIRRNPSGKYFVSILAETEVEEWSKTNTAVGVDLGLKDFATLSDGKVFGNPKWFRILEEKLVKAQRILSRRKTGGENWDKQRKKVARIHEAITNARKDYLDKISTDLVKNHDVIGLEDLSVSGMLKNSHLSKAISEVAWSQFKQMLEYKANWYGKKVVVVAKNFASSQLCSCCGYKNKDVKNLALREWTCPSCGSHHQRDINAGLNLRNEAIRLVTVGTAGIA

SEQ ID NO: 42174 - protein, 281 aa, Escherichia sp.
VKRLQAFKFQLRPGGQQEREMRRFAGACRFVFNRALARQNENHEVGNKYIPYGKMAFWLVEWKNATETQWLKDAPSQPLQQSLKDLERAYKNFFQNRAAFPRFKKRGQNDVFRYPQGVKLDQENSRIFLPKLGWMRYRNSRQVTGVVKNVTVSQSCGKWYISIQTESEVSTPVHPSASMVGLDAGVAKLATLSDGTVFEPVNSFQKNQKTLARLQRQLSRKVKFSNNGQKQKRKIQRLHSCIANIRRDYLHKVSSGYGQPAGAQCPGKIRFKPFDTGSGLV

SEQ ID NO: 42175 - protein, 378 aa, unknown
  TnpB Polypeptide
MVELKTYKYKLYNRDALKYLDNILVIAGRIYNHCIALHRRYYGIYHKTLNKYQLQKHLTKLKKQYPEWNDVPSQAIQDITDRIDRAYQLFFSNLKAKKKTNPPHFQKTAKYHSFTTKQYGYKFHGSNRVKIGKKDFPYWNSREFNGKVKTLTVKRKSNGFYIYVVVEQEFVQTELAKSGEIVGFDFSLHDFLVSSNGDDCSMPKLLRKNLNSLRNLSEKYRKSKGKRGSLRTLQKLHEKVANQRSDMQWKLARKFCRDYDVMVFETLDLVNLSKKYKKSMYDFGFNAFLNILEYVAHKMGKTVMYADKWYPSSQLCSECGYQNHELKDAFIRHWICPSCGAEHDRDRNAAINLCKVGTSTFGTCCPSVAAPRIPRLKS

SEQ ID NO: 42176 - protein, 442 aa, Burkholderiales sp.
MPQRVERIIINRNHPNWAACARLCSLAKKLGNCASYILRHRLFDKKAPYTRAELDRALREQYPQDYRAMPSAASAQRQGQIVAKQFKSFAKASAEYKKHPEKFLGKPKLPGYRNKYRTFCVGRNGYKIENHRLIITGGDTVGFNPIIVRSCSNQSFNAKATGSLAGDLRIIPKGNSFVVELTYQIKENERTVSLNRQEAVCIDLGVNNFAAIVSTKPGTRPILVKGGFLKMLNQSYNKRAAQLRSKGHLKHLASVSFKRQRRIDDALHKISRTIIDFCVQQEVGRIVIGKNKFWKQLSNMGRRNNQNFVNLPHSKLIEQLIYKSQEYGIEVSVVSESYTSKASALDFDDIPDYEKGVKKTFSGKRIKRGLYLTKQGKQINADTNSAANIGRKELGDEWLKTLLGLDEGVFVNTPTVLRTPYGMRRSLEAGACSGEAADFSLR

SEQ ID NO: 42177 - protein, 298 aa, Burkholderiales sp.
VANQQFNEKKDRSVLQEVRIIPRNGIYVVHLAYKEANRYDARTVGLDSARILGIDLGVTNFATMTAVGPDTENLYPLIAKGGRLKALNQYWNKQCAELKSRKKYGHLGAKANRRAFRIKDYLHKLSHFVIEYCLNHGIGRICIGRNKDWKQEVNTGKRNNQSFVQIPHAQFVGYLRYKAESVGIEVIEVEEAYTSKASALDLDPIPEYGKGKEVKFQGKRVKRGLYRTLSGRLLNADVNGSINVIRKLFDKEVRDALLGEPAVGGRLFRPKVLDANSGTFRIRESQCSIETARRSPRL

SEQ ID NO: 42178 - protein, 376 aa, Burkholderiales sp.
MLQATKVRLYPTNEQKEFLSGQFGAVRFCFNRSVALKKRFYEKKGISLSIIKELKPLLSIAKKSRKYAWLAQYDSISLQEAVRHADKAFKNFFAKRAKYPKFKSKNGKQSSYHCTSVSVGGNWIKVPKCNPIKAVIHRLILGVVRSITVTKDRVGDYYASVLCETGEKEPEPIKVLKESAIKGIDAGIKVFLTDSDNQEIENPKGLTRHLKALRKLSKAVSRKQKGSHRRKKAVAKLSKFHRKVSRKREDFQHKVSKRMVDESQAVIPESLRIKNMLRNKRISRLIADAAWGNFYIKLAYKCRKAGKLFVPIDTFYPSSKTCPRCLHKFEGLTLARRRWICPHCGQLNQRDYAAALNIKRQGIVQLKAAGHTVLRQ

SEQ ID NO: 42179 - protein, 398 aa, Burkholderiales sp.
MQIRRAFRFELCPSGAQARLMSQFAGSCRYVYNRTLATEKSLYGKDKAHRFNYVECANRLVLWKKKHSFLKDCHSQVLQQALKDLEKGYKNFFAKRSNFPRFKKKFQHDSFRFPQGFKIDEDKQRIYLPKIGTVGYRKSRSIIGKPKNITVSREGLKWFVSIQTEFEIEPKRMINSEIGIDMGVKKFVTFSNGTFVEPVNSLKNNLKQLAKLQKKLSRQQKGSSNSKKTKAKTAKLHRRIADIRRDFLHKISTSIAKNHGIVFMEDLKVSNMSASASGTVEQPGKKVRQKSGLNRSILDQGWYSFKTMLAYKLEERGGLLVLVPPKNTSRTCPNCGYISAKNRQTQAHFECTKCGYKENADVVGAINVLRAGHARLACEMNGAVRPLSAGTQRDLLQQ

SEQ ID NO: 42180 - protein, 398 aa, Actinoplanes sp.
VKRAFKFRFIPTPEQADLLIRTFGCVRKVYNLALEARTAAWCQRQERVSYNATSAMLTAWKRTEHLAFLNEVSSVPLQQCLRHLQKAFTGFWEKRSRYPRFKARHRSRASAEFTASAFTFENGQLTLAKMTAPLDIVWSRPLPEGRSPSTVTVSRDSAGRWFVSLLCQDTPAPMPATTQAVGIDAGLDHLITLSTGEKIANPRHERADRKRLARAQRELARKDKGSANRAKARLKVARVHARITDRRRDHLHKLTTRLVRENQTIVIEDLAVRNMVRNHTLARAISDAAWTTFREQLEYKAGWYGRDLVVIDRWYPSSKVCSACGAVADRMPLNVRTWTCPCGATHDRDVNAANNILAAGLAVSACGAGVRTQRGNLRPGQRVGKQETRRATAGIPVP

SEQ ID NO: 42181 - protein, 162 aa, unknown
  TnpB Polypeptide
VKLLGDSRAQIGKRVYKMCRDRTLVGDVKTVTIKRDALYDLYLCFSVEVDDPKVRPTSGKMAGFDFGLKSFLTVHDGFESYEIASPELFKQSLKSVKALSRCLSRKAEGSNNRRKARARLARAHRAIANKRLGWFFKLSHDLTERYDYLFFETLNLKGMQRL

SEQ ID NO: 42182 - protein, 162 aa, unknown; identical to SEQ ID NO: 42181
  TnpB Polypeptide

SEQ ID NO: 42183 - protein, 450 aa, Gammaproteobacteria sp.
MKKAKKVTRIAYSDDLNQVKYDALNEIAKRCGSVRTEVWRNYGSIGGLGARFRSVRDGWMAEKHITNLPNAIWRVTLNDTLDDIKANREAAKEKVVRHIFRNIDDKEKRKELFKKLKNDSVWVNDPYLRRLMRKYWKHGKNHTFNQIVLEPGSYKCFSHNGKNYIEVSSLVSRKRIAIPIGTNYPISGRIRLNLRDAGVEIHYTIDNTDDRACGSQKIGIDKGYTEAFVDSDGDFHGKGLGEVLSKESDYLKKKYQRRNKIKAVLNKVEHPKKAKRIIKHNLGRKKLNRRKQRHQTKVKNIVFTAVNRVVDKAKTIVCEDLTKTFKSKSYGKNANRRLSGWVKGLMASAIDTVASRRGSRVVQVNAAYTSQICSQCGCLGKRTGDKFHCAFGCGAEGGADQNAAVNIFARADDKELHRWLPFQKVKQILRKRCRQSDETAHPGLQLQLGL

SEQ ID NO: 42184 - protein, 460 aa, unknown
  TnpB Polypeptide
MGVAQSTPFITMRIIIHSFGKWYIKGAGLYCKGTTHPTMCYKVLKMRIEPNSKQRDIIDYTINYNRYIFNFLITANKQFYNREGRLLSEFEMNDLCTKLRQRWPCFRRMHSMTHSDVSRRVHQSCAKCRENSIRKRNKAVAKGILPDGSPVHMSWPRYRKQGRYDSYAHLSNRDFEMVESVNENGKKVRKLRLGKVKGPIRCYNQSTPISGEPKTCVVSRKDMGTHTEYYACISYESPDARVEEPSEPKAIGVDMGIRHIAATSDGKLYGHCNDMQKDLGRLKRLSMRLSKDRCDPLKEKKARSKLNHHHRNMVNKRKENIERISKEIVDSNDIIVIEKLNVRRLWGRSLSKSMTRGFVNSSLGLLRDRIQSKAEWAGKRIIEVNPRGTSQMCSQCGAEVKKGLNIRIHNCHCCGYAADRDINAAINILHRGWTGHPVPARDESPTACMGGEARTETVTD

SEQ ID NO: 42185 - protein, 396 aa, unknown
  TnpB Polypeptide
MKQTEQIQLKKTAQLSNLCHLSKNLYNLANYYVRQEFIYFGNWLRFYDLWFMLRNKAPYKKLPSQTAQQTLRLVDFIWGSFFKSIRDWKDYPKKYLGCPRPPRYKKKEGEFTVIFTNQQCRIKEGFLYFPKKVNLPPVKTRIKNRLKHIRIIPKGFYYILEIVYENNNDNLALDKKRMVGIDLGLNNVVTIVNNVGLKPFVIKGGVVKSINQFYNKQLSKYKSIKDKQGYTFGTKKLQKLIRRRNNKINDIFHKISRKLINYCIENDFGTIILGYNRTWKQKIRMGAVNNQNFVQVPFLKLLNQIQYKSELVGINIIKEDESYTSKCSFLDQEMVRKCKYYAGKRFTRGLFKTKKGIIINADVNAGYNLIKKAFPNAILADEIEGVGLHPYSIAIT

SEQ ID NO: 42186 - protein, 400 aa, unknown
  TnpB Polypeptide
MFKAYKYRIYPNIEQQAALAKSFGCCRWFWNYSLNLCQKTYKTTRKGLSRSKIQGLLPNLKKEDPWLKEDVYSQCLQVVALNLSTAYKNFFEKRSKLPRFKSKHGKQSLSYSQNVKFEGDYLKLPKIGLVYGVLHRKFEGNIKTVTVSKNPDGKYYASVLVDDGKENPQLSAEGKAIGIYLGLTYFAITSNGFKYDNPRHIKKHEHNLKRKQKKLSRKQKGSNNRNKARQKVAKVHSKISRCREDFLHKLSRKVVNENQVIVLENLAVKNMVKNHNLASAISDCGWGMFGTMLNYKAEREGKIYLEIDRFFPSSKTCNVCQLQVGSLLLDVRTWTCEHCQTTHDRDVNAAINIRDEGLRILSLGTSDTALGREVRQPGKTSVLSDALPDELGSLHHNMQI

SEQ ID NO: 42187 - protein, 485 aa, Streptomyces sp.
VKKFQPQPGFVVQAFRFALDPNATQEAALRSHCGAARAAYNWAVGWVEASWWQRRAEETYGVLDEDLTEWRPWSLPALRKAFNQAKQTDPRFTSWWEENSKEAYSTGLANASAAFDNYAKSKNGKRKGRRMGAPRFKSKRKARLSCRFTTGTIRVEADGRHVTLPRLGRIRAHEPTVKLLTRVQAGTARILSATVRHERGRWCVSFQVEVERDLQRVARPDVAVGIDLGIKTLAVMADSTGEIRTVPNPGHYDRARKQLRRASRIVSRRRGPDRRTGQKPSKRWEKANAARNKVHHRVANLREDALHKFTTSVAAEYGTVVVEDLNVAGMLRNRRLARRIADAGFGEIRRQLTYKTRQRHATRLVVADRWYPSSKSCSGCGAVKAKLPLHIRTYECDACHLVIDRDDNAALNLAALAAVVVTGTGVAGDQDTAPAVSKPRGADQKTRATRPRRKASAGRAGGATLPHQRQTETRDRTQAEPLTLW

SEQ ID NO: 42188 - protein, 403 aa, Actinocorallia sp.
VRLRYSFRLYPTLGQQQALARAFGCARVVFNDGLRARQDAHAAGQSYISDVELSKRVITAAKRTEERAWLGEVSAVVLQQALADLNTAYRNFFASLSGRRKGRKVAPPRYRSRKDNRQTIRFTKNARFALLDNGRLRLPKIGDIEVRWSRDLPSEPSSVTVVKDACGRYYASFVVQTTDTPLPEVEPEVGIDLGLTSFAVCSDGTVIGNPRVLRRAERRLKKAQKALSRKAKGSRNRVKARVRVAKLHAKVADARRDFAHKLSTRIVRDNQAVYVEDLCVSGLARTRLAKSVHDAGWSAFVNMLEYKAARYGRYFARIGRFEPTSQVCSACGVKDGPKPLHIREWTCPACRAVHDRDVNAARNILAAGRVDRLNACGAQVRPGLVPAPRGEAGTHSKLTPAQV

SEQ ID NO: 42189 - protein, 411 aa, unknown
  TnpB Polypeptide
MRKVIHGEIYSSDFNNLNQLVRDWSSAYRFAFCRFQKNKLSFNEVRNQTKIKYQSLNTRQISDAVKQSQGLCLRVKDRTVIFGGKKNWNSLIKGNLSNQEWKNKRDNQIYARGDITKKGNPNIRLLNKKGDFYLRVTVGNKQFKEYKLFVPAKFEKRLLFLFGSGSSYNVRLLKKGMQYYRVVIDYEVENSQTVIDFSNGIIGIDINPDRVAVSDITSDGNLVKSFSIVNNRMFFSSTNKRNYEIGCIVKQIINYTLENNKGIVFENLKFKKEFENQGRKFNRVKSNFVWKKLLTLLERKCIENGIMYKKVNPAFTSVIGKFKYQKMYGLSIHEAASYVIGRRGLGFNERLSLYKYPSEIVKSYVLDLAGDRAKRIHSWNLWRKLRDNYKASLTAIQSRMSNLKELDGNLC

SEQ ID NO: 42190 - protein, 360 aa, unknown
  TnpB Polypeptide
MEYTYKFRIYPNDEQKIQLAKTFGCTRFVYNNLLDDFYNNGYISKYDKNNKCNQELKKEFIWLKEVDKFALTNSIYNLDNACVRYRKNLGGKPKFKKKNRVQSYQTNYTNNNIEVLDSYIKLPKLGKVKAKVHRTLEGRIINATIKKYGDNKYKVMITVEKEITKKDKNSYITGIDMGISNFVTDSANNVYDSPKSLLNNYNKIGKLQKKLALKKKGSNNYIKITNKINKLYDKSNNVRDDFLHKLSTSIINENQVIVIEDLDVKSMFQTKKIAKVLGDISISKFINMLEYKAKWYGRTLIKVNRYYPSSQQCNSCGYQNKELKDYSIRTWTCPKCKSNHNRDYNAANNILDKGLEMLFA

SEQ ID NO: 42191 - protein, 523 aa, unknown
  TnpB Polypeptide
MFVSLQFKLELKREDKEKLIKLMRKQSSAIRTAYNMLKELEKEKTRNPHAQIYHRLRQLFPELPTKYIDSAMDKAKQYPTDKPVVFGGKRLFEKLCRNHLTGKAREKFKKQWRELRQGTLIGIGSKHKTAQGNLLLRFMELNGKLHLRITTGNREFIYAKVLREPSNSKDKWLTFMAMLLESWQTKNYFAYTVELKLRDGEIYGSVSFEIPTPEVKYTKEDGVIAIDTNASPIHLAIAEVPKTGELLSYQTISLHHLLGLSQNSKDHQEWILAHKIVDLAIEKGKAIAVENLKKLRKGKRGDGKAELRKRLHQWNAKKFLQKLKRVAMLKGVEVVEVNPAYTSVIGMLKYAPQLNIDKDIAGAYVIGRRALGFKEDIPENYEKLLKDRTYLEFALKRYEEREKEFRELIEKENNEYKRNALKSELRSVEDAKELLTHLIQSLQSEPSGCEGANGRNPEQGEIEKVSHVAWQVLKVALLFPILGKVLPRDLSPLKPVLVEGVWDRVRSRLVPLEAGGTVPIRDF

SEQ ID NO: 42192 - protein, 388 aa, Trichococcus sp.
MLVNKAFKFRIYPTKEQQILIAKTIGCSRFVFNHFLSEWNKVYKDTGKGLSYGTCSAELPSLKKDPATAWLKEVDSIALQSAVRNLSDAYDRFFKKQNDVPRFKSKRNPVQSYTTRQTNGNIAVLGNRLKLPKLGLVRFAKSKEVDSRILSATVRRNPSGNYSVSLLVETEVHLLPKTGSVCGVDVGLKDFAVVSDETVYGNPRVFRKLERKLTKEQRILSKRMKQAQKDGRKLSESKNYQKQRVKVARIHERISNARTDYLQKISTEIVKNHDVIGIEDLQVSGMLKNKKLSKGIAEASWAQFRTMLEYKAKWYGKQVVAVARNFPSSQLCSCCGYQNKDVKNLAVREWDCPQCNAHHDRDLNASINLKNEAMRLLTAGSCGDSLLR

SEQ ID NO: 42193 - protein, 284 aa, Lactobacillus sp.
  misc_feature (274)..(277): Xaa can be any naturally occurring amino acid
MAELEYHYGIKMRIYPNNKQKDIINVNSNISRTVYNKLVGIDKEIYRLKQIGVSLKIAQDRISELTKRKNIRELSNHYQYMEDKRVDSLAKANANMSYLRAWKMFREVHKSGIPKFHKKNYSEKYQTTCQYSKKSKMNVYSGSVRFLDDKHIKIPKLGTLRIKGYNKVIFRDKKDIRIGTVTISKDPCNRYFISLQLGSDTPFVDQKIKTGSNIGIDLNTENFLTTSNNVVVDNPRFYRKMKKRLSKERRTLSRRMNRAKKEHRKLRESKNYQXXXXHKNTKST

SEQ ID NO: 42194 - protein, 315 aa, Gammaproteobacteria sp.
MDIKKDLLKQLPKWCDDVPFQVKAIAVKESHQAFWKAKGHPSFRSRKAPTQSCYIPKSAVKDTGIYPRVSGKELRYGESLPELPLDSRLIYQYNEWFLSVPHKIITHVAENQGRVVALDPGVRTFQSFYSENLAGHIGYDDFGRIQRLCFYLDDLISRTTKATGKAKREMKKAQGRIRAKIKNLVKEIHFKTARFLVDNFDVILLPTFETSLLVGKSHRKLRSKTVRAMLTWAHYQFKVRLKNKALEFGKKVIDVCEAYTSKTVSWTGEVKNVGGSRVIRSGGITLDRDLNGARGIFIRSLVDSPTLMSAIVNVC

SEQ ID NO: 42195 - protein, 375 aa, Euryarchaeota sp.
MNMLLTIKAKLNPTDGQRQALLATMERFNEACNYVSSISFQEGIFGKRTLQKQHYRYIRENYGLSAQLAVRAIAKVSESYKGKGHRQELHTFKPHSAVVYDQRILSFKSLDSVSILTLEGRQLIPFSIGVYAQLEQRRIRGQADLILQKGTFYLCVVVEVEAETQYSAEGCLGVDLGLVNIATTSDGQHFSGEKSDSVRLRYTKLTAALQSKGTKSAKRHLKRTSGKERTFKTNFNHCISKIIVRIAKDTKRAMALEDLTHIHSQVTVRKAQRGRLGKWAFGQLRQFIDYKAQLNGVPLAIVDPKNTSKQCSCCGHTDKANRKTQADFVCVACGHTENADINAAKNIASRAAVNQPIVSLKKSKEIQARRFSASN

SEQ ID NO: 42196 - protein, 381 aa, Lysinibacillus sp.
MKIKLNPTKEQERLFWKSAGTARWAYNFFLAESERHYSEYLNGKHEKKTIKESDVRKYINNVLKKTTHQWLKEVGSNVMKQAVKDADKARKRWFDGVSGKPKFKSKVSFYVNYESLKRTKEGFRGEKMGVVKTYQPLPKLPKGENYSNPRISYDGRNWFLTVGYEIEYEKVELTGESLGIDVGIKELAVCSDGSFKKNINKTKEVRRLERKLKREQKKLSRKIQANIVAHTKNRKPIYKAPLKNMKNIQKQNDKIRMIYKRLTNIRRNHLHQSSNEIVKTKPSRIVMETLNIKGMMKNKHVSKAIAKQCLHEFKRQIQYKCEKYGIEFVEADKWYPSSKMCSCCGNIKKDLKLSNRVFKCSCGHEMDRDLNASINLANYPI

SEQ ID NO: 42197 - protein, 443 aa, unknown
  TnpB Polypeptide
MKLISTYRVKIKHYNHIFKDTVSLYRRAVDFFLTVALEHWDKLSQEKGAKARLSMMERFTIKTKENPEPIHDFGKDFYKFPSLLRRAAINEANGKVSSYKSNLANWEDDPKGKAPSLPKAGYIYPALYRGNMFRQTGTYHAQVKVWVRNTWDWIDVELRKSDMDYIQHHCNGRAACVPTLQKRGKEWYLDFVFTESQTLNDTGIYERRILAVDLGLNSPCVCSVMDSRGTIYGRYFCKLPKETDSLQHAINRIKKAQQHGARKMPRLWARAKGINQDIAVKTAAFIMDIAILYSTDVIVFEHLELNGKKRGSKKQKLHLWKARSIQRMVSDKAHRLAMRISHVNAWNTSALAFDGSGSVERGTYMQDGKEKYNYSICVFPNGKTYHCDLNASYNIGARYFIREILKSLPERERLVIEAKVPQCIKRSTCTLSSLISLNAVLEA

SEQ ID NO: 42198 - protein, 396 aa, unknown
  TnpB Polypeptide
MMVKKMIKTIRVMLIPNNKQKTKLFRYANTARFAYNWALGRVKENYKNGGKFLSDGDLRKEFTQLKKTEEYSWLNEVSNNVTKQAIKDACNAYKRFFKGYSKFPKFKSRKFSTPSFYQDNVKIQFSDTHVKVEGFATSKKKNKQKINWIRLAENNRIPTDCKYRNPHIKYDGINWWITVGIEYEDSTAIPSNDGIGIDLGVKDLAICSDSNKYKNINKTQKVRKLEKQKRRLQRSISRSYEKNKKGESYCKTNNIIKKEKLLLTLNHRLTNIRKNYLNQTTSEIVNRKPRFICIEDLNVSGMMKNRHLSKVVQQQGFYEFRRQIEYKSAWNNIPVIIADRFFPSSKLCSCCGSIKKDLKLSDRIYKCECGNVIDRDFQAALNLKRYGENVLKESVA

SEQ ID NO: 42199 - protein, 156 aa, Bacillus sp.
VEYENPTFLREKEKQLKKAQRKLSKRKKGFANYIKQVHRVRHLHEKVANQRRDFLHKLGYHLSKDYCVIVVEKLNIRNMVKNRKLSKSISDAGGGMFRNMLDDKCEKNGGRLIKVEPHFTSQDCSSCGERVKRSLSIRTHICTKCGTVLNRDYNAR

SEQ ID NO: 42200 - protein, 269 aa, Boseongicola sp.
VHETIRDETCRSDRIKSGNYTASRRQARLRRAQACRGKWTAVVCLAVEIEEPADYGHMLGFDRNCGQVADSDGELHEMPDMSRLEGRARRLQRKLSRQEQRSKRRERTKRHLAKTRRRIANRRRRGQGKPQTFGFLGMTHFCDQSRNDRFRVGRMPSRKRVNRTFRRIKEELRRRRRDDRNETAAWLVRVMNGWLNHYAVPGSGRCLGRFMRLCQRVLWRALRRRSRRDRTAWEKIDLLAAIHWPKARIRHPWPDQRLVVNTQGRSPVR

SEQ ID NO: 42201 - protein, 399 aa, unknown
  TnpB Polypeptide
MVKGFRYRVYPNKEQEQQLNQMLGNARFVYNWALDRRIKEYQSEKKSISAFTLMTELTQLKKNPEYEWLKLSVAQSLQQSIVNMDKAFTRFFKQKKGFPKFKSKHKGTHSVGFPQNTKVDFENNKVSVNKIGWIKTKISRTFDGKIKTAAIEKKPTGKFFVSITVELPDVKVKQKPISKVNAVGIDTGIKTFATLSDGTEIENPKHLKNSIQRLKVLQRRASKKQKGSSNRKKANLKVALLHEKISNQRLDFLHKITTAIAKQYNTVACENLNIYGMMRNHKLAQSISDLGLGRFYTLLQYKMQEQGGNYLEIGRFEPSSKMCGCGEINKELKLSDRVWTCSKCGIENNRDFLAANNILKFGLQKQNLLTAGTVGRASGDVGISRIYEGGTVYGRSLRP

SEQ ID NO: 42202 - protein, 397 aa, unknown
  TnpB Polypeptide
MLKAFKYRLNPTAPQAELINKHIGCARFVYNNALAFKQSEYAKDKTNHSWYSLVKRLPDLKKENEWLKEVNSQSLQQSIVNMNTAFENFFKGRTDFPKFKKKGRGKQSFNIPQSIKIDNDKLIIPKFKKGVDIVLHRQIKGEIKQATISRTPTGKYFVSILCETGEVEKQSKPVNEETTVGVDLGIKSFLVASNGKEYDNPKYLRKSIDRLKYQQRQFSRHKSNKRKHRLAILHEKVANQRKDFLHKVSTELIRENQSIALEDLNISGMLKNHCLAGSISDVSWGMFVAMLEYKAKWNGVNILRIGRFEPSSKTCSACGYINKELTLKDREWVCPECGSVFNRDLNASVNIKNFALNKLCTEHTLKNHGTLPSLEGALTHEAHPIALAWVGSSQNGA

SEQ ID NO: 42203 - protein, 374 aa, unknown
  TnpB Polypeptide
MKLIRSTKCSLKFATKSKIEELQTILTEYGKVCNVFIKHFWENGNLPSKSELLKDIVDLPKDTWLSARLRKVCAREAIDMIKATRERWKDKPNKMVMPVHKGKRMYVSCTIADLIDSKESVEFDAWLHVASVGGKHIMDLPIRYHKHFNKLSLQGKRLNSYIITDRYVQFSFEIETLPKKEGNKVLGIDTGINALASLSNRTQLGTDIKSCIERVKRCKHGSNGQKQARRALKQRIDEVVQEIIKLDPDMIVVEKLKDLGKNTKVKRLLTKNIRRSIGIWNWKYWLKRLEMACELNRVKFRTVAPFYTSTTCPKCGYSDRMNRNLEIFRCLKCSHEDNADLNASLNILLRFITGLYGACCKPEEVMEFNLGKIS

SEQ ID NO: 42204 - protein, 384 aa, unknown
  TnpB Polypeptide
MKLTLKIKLLPADEQANLLLDTMKEANAVCNAISDVACEKRIFNNFKLHHEVYHKYKATFKLSSQILVRCIAKVADSYKLDKKTKRQFRPLGSIGYDSRIMTYKSNDIVSLWAIGGRIKVPFVCHNRNYLPYIKGEADLVYKKGKFYLFQTVDVPEEDVKDIEEFIGCDFGLTTIIATSDGINHSAEWLNTYREHRQKVRSSIQAKADTSKRSTKRNCRKLSKRLSGKERTTANLINHTISKSIVASAKEQGKGISIEDLTNIRFTSKRRNKKFRTKLNKWNFADLRVKLEYKALLNGIKLVVVNPAYSSQTCCECKHIGKRTNKVFKCTNTNCNVDTIDADYNASKVISLLGQTVNSAEKSTMYCSLHSLSGLKPIPSLCVGG

SEQ ID NO: 42205 - protein, 392 aa, unknown
  TnpB Polypeptide
MLRAYKYKISPTAPQAELINKHIGCARFVYNNALAFKQTEYAKDKTNHSLFALHKRLTNLKNEYEWLKEVNSQSLQQSITNLDKAYTAFFKAQNDFPKFKKKGRGKQSFNIPQSVRLDGDRIFIPKFKKGIKVILHRPIKGDIKQATISRTPTGKYFVSILCETGEVEKQSQPIKEETTVGLDLGIKSYIVSSNGEEYDNPKYLRKAQDKLKYNQRQYSKNKGKRRKHKVALLHEKVANQRNDFLHKVSTELIRENQSIALEDLNIKGMVKNHRLAGSISDASWGMFVTMLEYKAKWSGVNILRIGRFEPSSKTCSGCGYINKELTLKDREWSCPECGSVLDRDLNASINIKNFALNNHLCTEHTLKNHGTLPSVEGALTHEAHPIAFGVGG

SEQ ID NO: 42206 - protein, 423 aa, unknown
  TnpB Polypeptide
MQLTERHLIKPNHELYPVLNDLTFKAKNLYNHGLYLYRQSYFEHKEKPETPILSWADIDKNLRTQGHADVRALPSKVANTVLKNLGENISSFWKLVRLKNKGGLAQKPKLPHYLHKTEGRYPVSFNYQTFGKKRGANGELFLCPKGINLPIPTKVANPKQVRIVPSHNNFIIEVVYDAQARAPKSTSKYAGIDLGVDNFATITFSTQNNPLIIKGLELKSINQGYNRLISKAQELLPAPLKTSKPIHRLWSRRSWILKTKIHQMTAFLATLFDEMQIEKVFIGKNNNWKQNLPFGKKVKQRFAYLPYETFIEQLRYKCQLRGITVVMQEESYTSKASFLDNDDIPVYSEVENPKFSGGRIKRGLYRSGNGQLINADVNGSYNILRKGLVNNNLLLQVDNPIIHPLVVEGIGKEPNDKLVQLYM

SEQ ID NO: 42207 - protein, 465 aa, unknown
  TnpB Polypeptide
LAALDIPPAECAKSIKTSLFQQMPVRRATFRLYPNKKQSAILRYHRKLHKDLYNAAVSNRFTQYQRFAHRVDYIEQQNSLPAFKEVWPEYKECNCMTLQATLKRVDYAFQRWFKGLGKRPRYKSIRHYSGWTYPSKTGWKVHTTGDNGYLELAKIGSIQMRGKARNWGTPTTCTIVYRNGKWYASITVNLTELQAAARQTDFGAVGIDFGCKSALAITDGENHSFVEAPKFLRNAEKKIKHLSKDKRRKVAPLRKKKQKGSSRWKKAQARISKVTRKVANQRANWVHQVATEIVRCNSFVATEKLEVSKMTRKAKKGKRKKQKAGLNKSILDVGFGMLRSAIEYKVVEAGGVFVEVPTRKVKPSQTCPNCGHQHKKTLDQRVHKCSECNFEMDRDLAAALVMLLWAQGKLPGFETSLVDADATSSTSGTRKRKQAGSQKQLGQLKRQKSATKLTGLDAKTSPSTK

SEQ ID NO: 42208 - protein, 406 aa, unknown
  TnpB Polypeptide
MIVSRVERHIVDVNQPLIDLSYASKNLSNCATFIMRQNFIKNHKIINYSMMDKIIKRDYPEVYKGLPAQSSQQVLRLVEKNWKSFFKSLKEYKKNPEKFKGRPKLPKYKDKEKGLNIVIFTNQQCQLRDNQIRFPKKAELPVLKTTVNNLQQVRIIPKYKHFVIEVVYKKEVKNRELNPKNVLGVDLGLNNLATLVSNQPDIAPMLINGKPLKSINQYFNQKKAKLMSFIGEKGTSHSIGHLSQKRAQKINDYLHKASCCLIDYAVETKSGLIIIGENKHWKQKINTGKKNNQNFVSIPYDKFKAMIAYKAFDKGIDVVFTEESYTSKSSHLDNDPLPVYKKEQSYSFTGKRISRGLYRWSKGLINADLNGAIGIIKKVVPETLDLLIEILHSGAGFAPFKIVNTF

SEQ ID NO: 42209 - protein, 411 aa, unknown
  TnpB Polypeptide
MIVQRVEKRLIKQNNLYYPMLSDFTHKSKNLYNHANFLVRDEFIRNNKWLRYGEIDKILKADLEFDDYKQMPTAQSAQQILRLLEKDWKSFFTAIKDWSKNKDKYLGRPKLPKYKAKDGKHILILTNQNVKLKDGVLVFPKTFCGFTIQPQFIKYDNFVSFQQVRFIPNYKSFTVELVYNIEVPDEALSDNGRYLSVDIGLDNLATIVNNAGLKPVVINGKGLKSINKYYNKKISYYQEIAKRMNSRDYTNRMDNLTMKRNHKIDDYMHKASKYLIDYAIANDFNTIVIGNNKEWKQKSTMSRIENQSFVGIPHMKFIEMVQYKAQNVGINVILTEESYTSGTSFLDNEDPVKANYNKARRIHRGMFVSNKGMKINADVNGAYQIMKKVFPNAYANGIKGVALHPVRVSVA

SEQ ID NO: 42210 - protein, 287 aa, unknown
  TnpB Polypeptide
MPIKPGYYYHIALNAYVRQILSDPTLRPRSFTIAANNTVSICYSKEVEKRDYTNIKGIDRNLGNLSVGDTVNVIQYDMSGVVQIGENTRSIMRSVKRNDHRVRKTLCAKYGKRSKNRINAILHRVSKTVVKEAEKQRAAIAFEDIRYIRRLYQRGNGQARGYRAKMHMWPFAEIKRQIEYKAEWDGIPTIQLTARDTRGTSKLCPQCGKKITQVDRKTRQLWCSHCTRWMDRDIVAAMNISMKAGWSRVDHSKGVVYEAMKGNSGRVDPIILRVDAAKLGLRRRLEI

SEQ ID NO: 42211 - protein, 466 aa, unknown
  TnpB Polypeptide
VDKKTYKILRTLTHLSKDLYNLTLHVTRQYYELNDSFLPFTKAYHLVKDGEPYKLLPSQVAQQTMKIVERNYRSFFRLLKERKKGNYNRPTHPPRFLPKDGHFVLIFPYQSFKVKEDKVILTLGKNFAKKFGVMHLEIPLPKNVKGHRIKEVRILPKYNALWFEVEYVYEIQPEKKDLDYSKYLSIDLGVDNFATCVSSTGTAFIIEGRWLKSFNRWWNKEKAKLQSQYDKQGVKFGKKMALLLRKRKNVMNNFMNQAVNYIIEYCLENKIGSIVIGELEEAKQRASLGKVNNQNFQYIPYGLFKQKLKAKCERYGVNFIEVDEAYTSKADALALEPIGKKEEYWGRRVKRGLYQSSTGVLINADVNGALNILRKVAGDSPVRGIAGSGRVNRPVRVRLLATGCRMNSHEASPIRGQFTYLQKFSINCIFLSFFIVYAIFSDLDSIVPPTYWFYVDFFEFLGAFNF

SEQ ID NO: 42212 - protein, 362 aa, unknown
  TnpB Polypeptide
MNTLSTKTLKVRVRDGHIFSLNQQGKNVNFVWNFLNETSHRFIKERGKFMSAFDLQKYTDGAGKELGLHSHTVQEIGKEYVIRRKQFKKAKLKWRKSHGVKRSLGWIPFKSGALKWKNGSIYFNGQYFRVWDSYGLAHYTFKSGSFNEDSRGRWYLNIVVSFEAKQGQGKHAVGIDLGCKQSATDSNGHKVIGREYRKLETKLGLAQRANNKKRVKAIHAKIKSRRADTLHKYSRKLVNENAAIFVGNVSSQKLVKTNMAKSVLDASWGTLKAMLEYKCAHANIVFEEVNEAYTTQTCSCCGEIPISSPKGRAGLGIREWTCSVCRTTHDRDINSGKNILAVGLHRLAEGKVVGRPTLVLEP

SEQ ID NO: 42213 - protein, 536 aa, Moorea sp.
MMERSGAKKLQEEQDSLIPKACSLSDVDLQMIELFGLQAQFATAESAPASKKTTLSDKSPICIPFSHKPKSSKTSAQVSTTKGRDLRPYWSGLCEEISSRLLLPVETDLPDSGLNSLSTWSVSTVEKSWFSTNLKVVFDQNLQQIFSPSFTSSIVASTGSENTGQKSKKIRIFLNAEQRSIVRQWFGVSRYVFNKTVKILQNGEVKANWKAIKTGILNDLPEWCKAVPYQIKSIAIKDACTAVREAKKKYKKTKQINRVRFRSRKNPVQSCYIPKSAVSDKGIYHTKLGELTFAESLPDNICDCRLTSTNGDYYLVVPHKVTNVKAENQGRVVALDPGVRTFLTFFSETSVGKIGNGDFSQIQRLCQHLDNLISKISKAKGGQKRRMRKASRRMVIRIQNLVNEIHHKAARFIVDNFDVILLPTFETSQMSRKSDRKLRSKTVRNMLSFAHYRFKEFLKHKAQESGKMVIDVCEAYTSKTVSWTGELVNIGGSKIIKSKIDGRSMDRDINGARGIFLRALGDTPWLRNQLALVSQD

SEQ ID NO: 42214 - protein, 421 aa, Moorea sp.
MRAAYQYQLRLTKSQVTKIEKWLDLLRCQYNYLLADRFNWHEQNRCSLSSCPLVCHLPELRDNPDYFSQKRTLPQLKKDRPWYSDIQSQVLQDCVKRVDLAFKRFLKGDSNGKRSGRPRFKSQSRYKSLTFPSLSKTPINGNILTLPKFGKVKMIYHRPIPDGFKVKTATITRKADGYYVTLSIQDDTTPEILPVESVTNPIGIDMGLKSFLVKSDGSEIPIPQYYRKAQKRLKKIQKAVSRSKKGSKNRNKAISKLGKAHKKVADTRKDFHFKTAKNLLDNHDLVAHEKLNIKGLARTKLAKSVLDAGWGQFLSILSNKAVRVAWPTALNAGLITKAVNPRPQATLRERNTSQNCSNCGQKVPKELKDRIHSCPHCGYTADRDVNAAKNILNLAVGHPVGNKAYRVTEPLGGVGVRLVLR

SEQ ID NO: 42215 - protein, 413 aa, unknown
  TnpB Polypeptide
MKKVKQETDIILSERHIISSSHPYFSECDHLTFLGKNLYNATLFYQRASFFKKDFQNYYAVNRIFTHENQTDYRALPAKVSKQVQMLVDKSFKSYFALVKKKVKGEYNSPVRIPRYLHKTKGRCTLPYPKDALSLKEYGLVKFSKTGIKIQTKVEREKIQGARIVPKGNHFIIEILYKKPMKKLVSEKIQNVVFIDPGLNNLMTVTSNVFSPLLYSGKNLKSMNQLANKKIAQVKSSLNKRGLYSSPLLISIYNKRNRRIKDCLHKLSTHLVNQFVSHKIDTVIFGHNLGQKQDIKLGRVTNQNFVQIPFSQLISLLQYKCELQGIRFITTEESYTSKCSFLDLEKISKRKEYLGKRVKRGLFQSKDGIKINADVNGSLNIGRKYLTKLGLYTDTLHKELIFHMVNPKRICLT

SEQ ID NO: 42216 - protein, 442 aa, unknown
  TnpB Polypeptide
MKPRKFTVVAQLHEKQNGDLIEYINSCFATYSKAKRKTFHVLKRDDNFHKSSFNTYLQNKYNILKRTANSIISDVQGTLNALIELKKYEKFQLKRKIASLETTIDKFEMKVADNKTLLRLNDKTVSLSKHRNLKRKVVSKKNQLNNKKQRLKNLQYQIEHGIYKLCFGTKYLLKRNYDKFVTHRDSQLSFVGTKTEKAGNQLLQLSYNHQNNQFNIKLRKDIGGFKNQRGFYVKGKVHFNHHKQELISILTNHNSPLSYRIIKKNGRYYLYCTFEIQRDKSSFVTRSSNGVIGLDFNKGFVTLTETNQYGHMIDRDLIRYRFKKGDATQTDLEFIANKVKERALTTGKDVVIENLNFKNTKAKTVSKKGKKYNNMLHSLAYRKFTNIMENVCYRNCIWLKKVNPAWTSWIAKQKYCPKMKLNIHMGASFVIARRGQGYTDKV

SEQ ID NO: 42217 - protein, 125 aa, unknown
  TnpB Polypeptide
MRSNRKKGIKYPKSSKHIQRLYRKKQNAVKDYLHKVTRWIAEYCRKEDIRCVVVGDICNIRNGKDMGHKTNQKFHGLPYNRLYIMLEYKLKTVWNTIDKTGRKLYQSVQSVITRSIKKICRSIKS

SEQ ID NO: 42218 - protein, 511 aa, Scytonema sp.
VGRVKGHIEVQKTVILRAKSETAYREEIVKHIITTKQLYADTTEFYVLVFLENLELLNLKSDDLYSVVEKLTLITKQRPSPEIPLQINTVQDMRRSCIKTAFGIAKSWDSNYKKWELRRDKHEEKQAKKLAISEAKGQKYTPKKFTDKPPLPPRNYTNIHPTFYRGMYKEFDGSSIILKLWTGNRWVFMKQPINLEGRELPYGYEWGSPTLVLKDRLHLHVPVIKQVKSNGKLAQQALNPDGLTTCNVDLNLDGDIAVATILHSDVTGSVTEIATLFVKGNDTIQHRRKRELGLIAVASSKTNKGFGVKKIGDNSQRFEKIKNRDNYESHRISKRIADFAHQYGATVIVFECLTNLRPDRAKFSRRSNQKRAYWLSSKIRKRTKYKAFQSYGIITAQVSPKDTSRHCALCNGNEEEDSLVSRIEAQFSTDVARLFQIIMNKSLEKVDYSTGAPNYICSDTVEHRGNADLNAARNIGLRFFARYYQKPRLKVEKQGLLATQAARKAFGMVAV

SEQ ID NO: 42219 - protein, 471 aa, Scytonema sp.
MSKRKRKNKGKRKKGLSEIIRTDVWDLATKPEEKQQLIMTIEEYRRFLKPLVLIINAQWIELAELSAKERVAAVEKIIHKTTDNPEPKHNYYQKVIYKYPSFRKFPSYLRRAAIADALGIVSSFQTRYREWQSGIRSRRDAKPPVLTAMCNSYPSLYKGQQVRYGLNYSSVDIKVWNGKDWVWINKIPVKGCGDNRHLVVGNEMQSPALVVNKKTCQLSMPVKILKVNKEDSDDVLGVDLGINNAATCSIVGRDGTVKGRLFINPARDIDRRNQRRMMIAHKSKQTKARIGKDKKLPKGFCKGLYRKSSKINLEIARKISKRIIDFANLHKVKVIVIENLEGWKAKAGRKKSLTKQKFHLWCHRKIVETLTQRWTELGGIVQTINPKYTSAYAYDGSGKVKRNKNNYSLARFTTGKIYQADLSASYNIAARYWYCSLIGDKTFSRVFEDRSSTNKSRTPITLGTLWNLSVS

SEQ ID NO: 42220 - protein, 496 aa, Scytonema sp.
MTTLTYVKGLPTRAEELNSLGLTEFEMFLAAYSPVFHKAACETANHLLNSKSFNKSSWNTHLQVTYGISKRHANGVIASAQGAVDASKEHRKRHIKTLEGKRKSINSWISKSEKKLADSLKFYSKNNWEQSKTGCKLPLFTDLQSRQTNWKSLHFQIHSKKRRAFQLTKQIEHLKTAPIQTVIPKNQAFVVGSKDESFGNQVCQWDGEFLKFRVPACLETRFGKYVQTRLGDFERNINRLPKDGSKTWHFYRKDGKWNAAAQFTPAPVKRVSRHYTYGCIGIDINPGSIGWAYVDHDGNLKAHGQIPLQMGLPSGQQDAQIVDACLQLAILANTWACPIVCEELDFSTKKEQLRERGRKYARMLSSWAYSRFYELLESILSNRGIYLMKVNPAYTSVIGLVKYARQYGLASDEAAAMAIARRGMHLKEKMHDPITASTSVKDGKHVWSQWSQLNKILKSRTAIKSRHSFYSISNWGLVVKEPELRSDGTKRQRTSN

SEQ ID NO: 42221 - protein, 310 aa, Scytonema sp.
MDIKKLYAEDMHQLDYIWLPYPTNIKNSQDIVEVTISPQNGDLYAIFVYKVSTSTKLELNKELALGIDHGVNNWLTCLPNTGEKGFIIDGKQLKSLNQFYHKQVANYKEGKSEGFWNGHLDRLTGKRNRQMHDATNKAAKYIINYCLSRGIGNIVFGWNKGQSQNMSMGRKNNQSFASIPTGKLKERLKQLCDFYGIVFHETEESYTSVSSFFDNDDLHVFGERPESWKASGKRITRGTYITAKKHFISADANGACNILKKIALKIEISLDKITINCCQFLDRVYLWKRSKEQKHNVKVQQLAAKAIGAH

SEQ ID NO: 42222 - protein, 454 aa, Scytonema sp.
MMVTRRYVFRLYPNKEQEIKLFQARRDHAYLYNACIAHRRYEWKANQKSVTYLEQQNCLPEFKKEWVEFDYLHSQAMQATVKRVDLAYNAFFKGLRKRPLFKSIHKYLGWTYPAKSGWKANTEGKHGNVTLNDLGITIRMRGKAKDWGIPTTLTISYKPGKNQWFASFTVDIEVEEPKFGSESDLKYEKIVAFDLGTATALTLYDGKEFAEVENPQFTKKSEARIKHLSKALRRKRAPNHQKKIKSSRRWKKARKQVSKLQAKIANQRKNWQHKVTSDIASRYDIGVTEELNTKGMTRKAKKGSKRKKQKAGLNKSILSVGFGALNQMIAYKIEQKGGLMIVLPTKQVKPSQRCPNCGKVNKEWAKLANRYHICECGFEVARDRGSAMVMYNVATNQQKGFGTSLSDCGCFSSTSSSKKRKRTGGMKQLGQAKRQKLSQVGGGVLETPSAYAAE

SEQ ID NO: 42223 - protein, 560 aa, Scytonema sp.
MPCGLAGHLTQNQSCDFSGKALTLFLYIDITIYSNILRVKSMAKSKKQRQTEYVYTQIVPVVFCSDEAQVNEIMHLCGIPRSITYNKLGSLQGWGVDWKKADSIVRRIITPDEIGLPAKIWEWSVCDAMKAISAQQEAAKVFLIREIWRKYPISANQRQRLEWIKENKGKKKGDELKAVKQKALELFPLCSVEIARNRLFELLNTDPTRDHWLHRQFRIQYQRGHTFVRNQIVYQNAGYSCRRINRHFVELQIQGLERGKRITLRLRCRHIIKGQIRVIRNELGLLEVHCTRSRSLILPSGKPTQKFGIDKGYTEGFYTSFGKRIAPGLGKLMTEKTERIAKTNRNRYRIRAFGESIAPHDPQKAARILKNNLGYKVKSRKLKREKETIKNFIRSDLRRNITTPVDIICEDLTQPIKGKRQAKRINRKLNSWMKGELQASLEKISVETGSTISVVNPAYTSQIDCVTGTLLGQRLGDRFTRFTGDVLHADVVAAINICNREQDNQITRSMKSLEVEAILIDRTVQYLHSIGCSVSDALDRGWLPTKFKVKALNYESEYYL

SEQ ID NO: 42224 - protein, 496 aa, Scytonema sp.
MATLTYVKGLPTPVEELNNLGLTKFEMFLTAYSPVFHSSACETANYLLSGQSFNQSSWNTYLQKTYKISKRHAAGAISYAQGAVDASKENRLKHIKTVEGKLKSINGWIAKSEKKLKNASSFYAKKNWHQSKTGCKFPLSCSIKYKNTNWQHLRFQIHNKKRRADRLSKQIEHLKAAPIHTAIPKNQVFVVGSRNESFGNQACQWDGTTLKFRVPACLESKFGKYVQTKLGNFDRKVNRLPKDGAKTWHFFRKADKWNAAVQFTPSPVEQVSRHSVYGCIGIDLNPGSIGWAYVDANGNLKAHGKIPLQMGLPSGKQNPQIVEACLQLVKLALKYACPIVCEQLEFSAKKEQLREHGRKSARMLSGWAYSRFYELLESISRNRGIYLMKVNPAYTSIIGLVKYARQYGLASDEAAAFAIARRGMRLTENIPDSITAYLDVKSGKHVWSLWNQLNKKIKSRAVISSRHDYYSISNWELVVKEPSSQGNGTKQRCASS

SEQ ID NO: 42225 - protein, 398 aa, Scytonema sp.
MEQVLTIVCKLNPTSKQVEEIELVLKAFADACNYANEKVKPQVTSKTTIQNMVYNEIRSLFGLSANLAVRACARVGANRKTAKQKGKPVIAFKPTSVDYDARIFAFREKDLTVSLTLLNGREHIKIDVGNYQRGKLKGKKPTSAQLCKHRDGNYYIHIQIKDEPPTTIQFDNVIGVDFGRRDIAVTSNGDQWDGQQINKVRDKFSRVRASLQKKASKGTRSTRRRTRQILKRLSGKERRYQQWLNHNISKHIIENALTASAAVAIEDLTGIRERTNQKPRNKTERRRSNSWAFYQLRSFLEYKGIQAGVEVIAVPPAYTSQTCHCCMRIGIRSDKRFKCTNDACSWSGDADLNGAKNIAAIGAVFVNPPRGSNGLYCELSTDSSGLLKAHTVPQGQCG

SEQ ID NO: 42226 - protein, 209 aa, Scytonema sp.
LSQNLKKHDSVKAARILERNLTRKTENKRYRQDQGAIASLIGRASKSLFREGLLKVYAEDLTEPIRNKRQSKAMSRKLNSWVKGYLRDSLEKWASWSNSTISEVAASYTSQVDSVTGTLLGKRHGDCFTRFNGVVLQADLNAAKNILVRGQDKEIHRYMKAAEVQAVLLRRTARFLQGYGQNLRDAVELGWLDSKHTKSPAFKSLVSGS

SEQ ID NO: 42227 - protein, 491 aa, Scytonema sp.
MANKKQRRKKGYIESQKTIKLWVVDNVQYKDNVANYIIPTREKYAEVTNFYADILLADLDLLETKAEDLYAVLEGLTIINKNRVEVQFPLQGDVPSDMRRACIKKAFGVVKSWYSNYKKWEVKKQKKLALGKKFSDQPPVPPRDYSQMHPVLYSGMYKDFDGTSIILKLWTGTSWAWIKQPINLRGQSLPDGWDWGSPTLILKDKLHLHFPIIKQISNPGKIKEQAQNSDGITICSIDLNLDGTIAVASIISSDGTGSVQELATLFVNRNDTIQHRRKRELGRIARAYSRTNKGFGTSKKGDCSKRFKKIKNRDDYESHRISKRLVEFAHKHGATVIVFECLTNLRPEQAKYSRRSNQKRAYWLKSKIVKRTRYKAFQLYGILTSLVSPKNTSKECAYCQSNVSRISVTISDVFAEIVNLAIINSDGKVFYNIGTPNYLCSSNIKHKGNADLNGSRNVGLKFLRRYFENPKIMTKSLVNGTSGQGTVPSVV

SEQ ID NO: 42228 - protein, 558 aa, Scytonema sp.
LSIVTIQTTAAKNIQNQTALDYLEEYGVIFGQAVRTAFALRNRIGKTHSLESELEKLICKELERRFGLSNTEAKNAYNKAVATYSSQSELVDLYIDDNYDRIKAVRRTIKKLEFKLDKAVKSGQESTAKKLRKKIHFKRQKINKLEAKISRLFESKATGQFKVTFGSSKLFEKQYRLEENGYQSKWEWLEDWRRERSARSFFIGSKNYQSGNQLVRYNLLLHTLTITCTPSLRAKYGDTVTLFDIGFSYAQQWLEAAIEPVRHTSTRKGNNGEKKETSRNGSKQPVTYEIVNRDGKFYVNATLETVDPAVQTSLENGAVGIDFNPGSIDWTLIDRHGNLKRHGTIKINVQDKRSHQTKDIIGKAVAEVVSVALKYNVPIASEDLDFTQKKASMTEIGAKYARMLSNMAYSQFTQMIESRCIKSGVELIKVDAAYTSVIGVTKYMAAYGLNSGCAAALVIARRAQNRTERLPRHLDSYFNSPEDKLKSGAWKKVAKRINICGGFNRHRWYSLGIKKANPNRVLYSRLRQTKARCGRDTVQVLVTPHIRKNHRAMGSLKP

SEQ ID NO: 42229 - protein, 360 aa, Scytonema sp.
VQKILINQWFGVSRFVFNQTIELLKDGVVKANWKAIKGGILSGLPDWCKDTPYQIKSIAIKDACKAVSNAKSKYKNGGGISRVNFRSRKDPKQSCYIPKSAVSEKGIYHTILGEVCYREFLPKNFGDCRLVLAYGDYYLTIPVESPQLETENQGRVVALDPGIRTFFTFLSESSFGWLGKNANVKIQKLCFKLDELCSGISKTRGQLKRRLKKAANRLRGKIKNLVDELQKKSIRFLVDNFDIILLPTFETSQMSKKARRRIRSKSVRQMLTLSHYKFKQFIKHKAFEHNKVVLDVNEAYTSKTVSWSGEIVKNLGGAKIIKSSSTGQTMDRDLNGARGIFLRAMVDTPWLRENLSLSIC

SEQ ID NO: 42230 - protein, 491 aa, Scytonema sp.
MTKRKKKPKNEIHQMSTQIVNVVLINDAVKSELLDLMERLGVVRSEAYNKLGSIRHWGMNWRSAYPEVRSFRTPESLGLPSKLMEWTVSDVAKAILAQQAATIANLRGKIWARYPGKENEETRKLAYQKLNSTEFLSDSFLSRIVRDEFERGHTRVDNQVVYQPEAYTCTRLSRYVYRLNVSGLNRGKRIQFNIRSNRKPSGQIRLIYNSELDHFELHFVVNFGIYTKSPDEERTPIGIDKGYTEALIDSNEKVHGDGLGKLLTKKSNRMTNKNRQRGKLFAIFRKHEEHDPVKAARILENNLSRKTENKRYKKDQAAISSLLGTASKSLFASRKLKVFAEDLTQPIKNKRQSKSLSRKLNSWVKGKLRDSLQKWADWSDSVITEVNAAYTSQTDSITLTLLGKRVGDSFTRHTGVVVQSDCNAAKTVLHRGTDRDITRYMGASQVQAVLLRRTAMFLKLEGKSLEDAVKLGWLDPKHRKNPEFQKLVSGS

SEQ ID NO: 42231 - protein, 557 aa, Scytonema sp.
VPELEANIKGLEYLDEYNAVFGQAIRKGFSLRNQIGKTTLKESSLEKLICKELETRFGLSNSEAKNAYNKAEGVYSSQAELVDTYIDDNYNRIKGIRKSIGKLRGKIKKASEMGHALAVKSLTRKIHFKSQKLNKLLAKIERLKESKKSGKFTVTFGSSKLFKAQYNLEQNGYSSHKEWLEDWRKSRSGRSFFVGSKNFTAGNQLVRYSPELETLTITVSPCLQAKYGTHVVLYEITFQREEKWLTDAIKPTVIKSTRKGKDGEKKETARQGSEQPVTYEIVDKDGRFYINATVNVQPAKKESSLEAGALGVDFNPGSIDWTVVDRHGNLKRHGSIKINIQDKRSKQTKDIIGKAVAEIVRIASNHGVPVVIEDLDFAKKKASMIEIGAKYARMLSNMAYSQFNQMIETRCSRFGVELILVDPAYTSIIGVTKYMKMYALSSGCAAALVIARRGQGRLEKVPSSLRSYFRKPEDMLRSGAWSQVAKKSNTIGGFNRNKFYFSGSHKKVPTNCRMHGKLRQTSTFRLRKYSIVQVLEAPHIRQKPRAIGFPALKHINA

SEQ ID NO: 42232 - protein, 440 aa, Scytonema sp.
MEKQLLLFLLEQANKLANCAIYALRQSVIWFGRSNFNLEMVKNELQIELKENVHYAVLHSQAGQSVMHKIAENFYAYQESLQAFYAGENPLRPKLPSYRKKGGMHEITYPEQALKKKYDENACPLLGFPLGWDIKKLYGEDMHQIDYIWMPYPTNIKNSQDIVEVTISPQNGDIYAIFVYKVSTSIKPELNKELALGIDHGVNNWLTCLPNTGEKGFIIDGKQLKSLNQFYHKQVANYKEGKSEGFWNSHLDRLTGKRNRQMHDATNKAARYIINYCLSKRIGNIVFGWNKGQSQNMEMGRQNNQSFAGIPTGKLKERLKQLCNFHGIIFHETEESYTSRSSFFDNDDLHVFGERPESWKASGKRITRGMYITGKKHSISADANGACNILKKIASKIEISLDNITINCCQFLDRVYLWKRSKSQKNVKVQQLAAKAIGAH

SEQ ID NO: 42233 - protein, 504 aa, Scytonema sp.
VARKKTPSFITEIPLIVDSAQEKELLSRFEASRQLYNACLNEAMVRMELVRNSEAFKAAKKIPKSKKKERTDAFSAARSTYRYSDYDLQAYATIVANSSKWIADKIDSNTQQTIAKRAFKASERVIFVRAKKVRFKVSSRFRSVEGKTNKQGLRWLHNQLVWGSLKLRPIIDESNPVIIHGLQSPVKYVRILWRELNGKRRWYAQLINEGLPYQKEKNYVSNGLIGLDLNISNIAFVGDEKAGLLPFAEKVPTYEKEITVFQRKMQRSQRVNNPDNYEPDFEINKGHRTVRKKGKVRKGKREWKRSNNYKKAAQKKRELQRKKAAYAKSQNRKIVNEILRHGNLIKTEKVSVRSWQKRYGKALAAKSPGFVKSELQRKVEKTGGQFITFSTQKTALSQTHLDGSRVKKSLSQRVHYDATGIKMHRDLMSAYLSRFVNQDDKLSLQDARDGYRGAESLLTEAWQESLSREQVSLSESGLIAPERFSDKLGKIDQIAVSGGVRAKS

SEQ ID NO: 42234 - protein, 535 aa, Scytonema sp.
MPQVYQTYVTQIDNNLTNETHTLEMLEQFSPVAAQMSLVALEGLQSDMKKEKLNSLIQNTFKVNKRHANSVINFVTGELESAKESHKRHLNTLDAKIKSVKSEIERLNKRLKNHREYAQAVEKHNLAIKYPQKTQARKLKKVPVLKKFPEFDNACPINGKPHGKTYLQLAKQQLHQKKRQLKMYLDRRAKVIQRGVKVNLGNVGKVTFVGSTNETNSNQICQLTPDVIPSLRIRVPYFLEATYGEYLTLPLYKINKQGYNNIVTAWALNNALTYVFSKNKKGKWVVAITCLVDFSITSHDKYAGCIGLDINPGSIGWCATNRHGNPVAWGKVNLDLHSCSTEQTEARLADAITELTSRALATKKPIVIEKLDFSQKKKQLHSGRKYNRMLSGFAYAKFKELLKARCLKLGIKIIEVSPKYSSQIGVVKYMKRYGMGSDSAAGLVLARRGMNIYYEKLPARYAFQSSIQTEPRQHVFAHWQRFHKHYLKLGSRNAWFGLPTLTGSAGDGLVNTGFLGFPKLQHKHGSPTPHPSVKV

SEQ ID NO: 42235 - protein, 569 aa, Scytonema sp.
VIGLPKVTIQTTIPEIEVNTKGLEYLDEYNTLFGQAIRKGFSLRNQIGQTTKKESSLEKLICKELETEFGLSNSEAKNAYNKASSVYSSQAELVDTYIDDNYHRIKGIRKSIGKLKGKIRKASEMGYTLTVKSLTRKIHFKSQHINQLLAKIERLKESKELGKLTVNFGSSKLFKAQYNLEENGYSSHEEWLEDWRKTRSGRSFFVGSKNFLSGNQLVRYNPELETLTITVSPCRQTKYGTHVVLHEIKFQRESQWLTDAIKPTVIKSTRKGLDGEKKETARQGSEQPVTYEIVDKDGRFYVNATVNVQPAKKESSLANGALGVDFNPGSIDWTVVDRHGNLLRHGSIKINVQDKRSNQTKDVIGKAVAQIVRIASNHGVPLSIENLDFAKKKASMKEKGAKYARMLSNMAYSQFNQMIETRCSRFGVELILVDPAYTSIIGVTKYLKMYALSSGCAAALVIARRAQGRVEKVPKSLRSYFRKPEDMLRSGAWSKVAKKSNTIGGFHRNKFYFLGSNKKVPTNCRMHGTLRQTSTSRSRRYGIVQVLMAPHIRQKPRALGFPPLKHINA

SEQ ID NO: 42236 - protein, 548 aa, Scytonema sp.
MTKRTIKDARATRICVVKDVIQDTTQDVSNILINILTDTANRLGHLRSDIWNQYGSLKAWGISKITLDPIHRNEHPVKYGIPAKLWEATFYDCIDNIHAVQAAAITFALRELGLHPRSVEGNRIKSILESRDWFEYPEGTAQDELKELKRLHRLMRHHYKRGHTYKRNQIILKQYKSYVDKDGDVCVKFVYAKLPNQNSKSCLKIGFKTTANQPFTGQIRLLICDSIIEIHKPEKYDTIRETEKLSPIKVKAQLPSDKIIGVDRGYTEVYATSDKRLLGEDFGKLQSTETEHRSHKGRKRNKLRALAQKAKSKGNNAKHDRILANNLGKKKWNAREKSFTGRIRTYVYTATLQLFADAGKVVYEDLSTPIKGGDKKYSKRNRNKLNQYTKGVVVKALETVPQRFGKVSVAVNAAYTSQIDSSLNLLLGKREGDRFYQFWGGVVQSDINAGQNVLAREQDSEIGVYTKHKEVLRILIERTVKYLVVTVQSGKLQLTDVKSSNLIRPDVKKRFLKVWANLQPDANTGMGIPKTLDSIKPRKSLRGRKGEP

SEQ ID NO: 42237 - protein, 475 aa, Scytonema sp.
MSKRRNQSKSKKKSAVLIRTDVWDLKATPEQKSLMILTIDEYRKFLNPLVIIVNAQWINLVDLTSKERINAVEKMIHKTADNPDPRHKYFQSVIKKYPSFQKFPSYLRRAAVADAIGIVSSFQTRYSQWQSGDRKHRLALPPSLTAMCNTYPALYKGQQVKYRNNYQLIDLKVWNGTDWVWINCIPVKKHGLNRHLVDGNKIKSPSLVVNKHTCQLSMPVEVKTVYLDESDFVCSVDMGINNAATASIVGRDGTVKARKFINSARDIDRRNKRRMMIARKSRQTKNMTKSDLPLGFCKGHYRKSSHINLQISKTVARGIVEFAKFHNVKVIVFENLEGWKAKAGKKGTLQKQKFHLWCHRKIVEIVTNRWTELGGKIVFINPKYTSAYAYDGSGKVKRDQTNYSLCRFKTGKKYHSDLNASYNIAARYWYAVIMGDDNYSRVFDSQSSDDTSRTPIILGTLRSLCAERTLRERAA

SEQ ID NO: 42238 - protein, 275 aa, Scytonema sp.
MLVLEYKAVVDNKEQRDAIEDAIRTTQFIRNKALRFWLDSPREANINKRSLSTISTTLRKEYSFVEELNSMACQAATERAWAAISRFYENCKIGKPGKKGFPKFQHDNRSVEYKTSGWSLHPTKRRITFTDKKGIGEVKLLGKWDIHKHPAESIKRVRIVRRADGYYVQFCLKLDVEQEKRMGDGEIGIDVGIEYFYSDSNGHHEENPKFAKKAEKSIKHAQRRIYRKKKGSSNRRKARQRYARKHLKVRCDSLWMNHGNQSVNNSTNPAADYCQ

SEQ ID NO: 42239 - protein, 564 aa, Scytonema sp.
VISLPKVTIQTTIPKIEVNTKGLQYLDEYHTIFGQAIRKGFSLRNQIGKTTKKESSLEKLICKELETEFGLSNSEAKNAYNKASAVYSSQAELVDRYIDDNYARIKGIRKSIGKLRGKLKKAVEIRHSLTAKYLTKQIHFKEQHINKLLAKIERLKESKDSGKFTVTFGSSKLFKAQYNLEANGYSSHEDWLEDWQKSRSSRSFFVGSKNFHFGNQLARYNPELGTLTITVSPSLQSKYGDRVTLHEIKFHREGQWLTDAIKPTVIKSTRKGKDGEKFEIARNGSEQPVTYEIVDKDGSLYINATVNVQPAKIESSLANGAFGVDFNPGSIDWTVIDRHGNLKRHGSIKINVQDKRSKQTKDVIGKAVAEIVRIASHHGVPVVIENLDFTKKKASMKELGVKYARMLSNMAYSQFHQMIETRCSRFGVELILVDPAYTSIIGVTKYLKMYALSSGCAAALVIARRSQGRAEKVPSSVRSYFRKPEDMLRSGAWAKVAKKSNTVGGFNRNKFYFCGSNKKVPTNGRMHGLATANKYLSFAKIRYRASLNDSSYPSKTLRSWFSSP

SEQ ID NO: 42240 - protein, 452 aa, Scytonema sp.
VLKKKKGFNIATKSVKCKLERNGFDLTETKTAFNEVVSFYFALVNTHPEGIDLPREEDGGWRFYEKLTIGEKAVYPLPFDGYPVQFRRAAIRKAIGVWESWNSNYQRWLNRPKKQKHHRPPVQPRSFNFSPSFDAGVWKDDDGQSIILKILVNGQWKWVKFQYFAPLVDADWVKGSLSVVVKGNAAYIVFPLQKYVPATGGIKTVMAQDSLRVLGVDMDLDRHIAICSVLEVDAKGEVFEVARHFIKQTSHTKRRKFQLGRIAQKMQQTGTVDKGFGSKMWENLHNREIEASRAYARLIVELAKTWDASAIVFEHLGNLKPIRGRYSRRSNQKRAYWLKSKVYQQVSRIAYQDYSILTTRVNPRHTSRFDLWGNPVWRSNEFPKTLFDFQSYKPGANFVGTVNGYIAHSGLNAARNIGLKAILRHRTNLVPRIGTLYSSRSRYKRKPRTVMF

SEQ ID NO: 42241 - protein, 475 aa, Scytonema sp.
MSFKSKEQKALDQDKNKDTYISTVVQHLKLSSLGSAVVSDILSHANSLYNTLTFNLRQGFFVHKTLNFQSLTIDLQTDFKENYHYKMLHSQAAQSVCHKVAENFKSFKQLLDKYFSEGTKKPKLPGYRQKGGMFEVTYPSQSVNISQEHGIIFATVSTGILFKKQHKEDVMETSLNERLKFRIPDDVDPKRLVELVITSKHREIYLHWVCRKKKEIITELDKSSVLGIDIGLNNFITCIPNTGKEGFIINGRPLKAINQFYNKTVSKLKKGKDENFWSGSLARATQSRNNQVRDFIKKSARTIINKCLESGIGKIVFGWNEGIKNGIDNGRVNNQNFVQVPFTALRDTLKYLCERSGIEFVIVEESYTSKMSFFDGDELPVFGKETESQKEQKPSGRRTKRGEYKTASGTVVNADAQGACNILRKAKIDTSKITFRVCQILKRINIWIGKKFLSCKGTAASLSCCTTIGVTEPTR

SEQ ID NO: 42242 - protein, 521 aa, Scytonema sp.
MALSKKQRQTEYTYTQVVPVVFCSDELQVDRIMHLCGIPRSLTYNKLGSLQGWGLDWKKADSIIRTIIKPEQVNLPSKLWEWSVNDTMKAISAQQSAAKVFLIREIWRKYPITSNTRQRLKWVEENKDKKKGDELKALKQKALELFPPCSVEIDRNRLFELLNTDPTQDNWLHRKFRAQYQRGHTFVRNQIVYQNLGYSCHRINRHAVELQIQGLERGKRIILKLRCRHIIKGQIRVIRNEFRLLEVHCTRSLWLILPSGKPTQKLGIDKGYTEGFYTSLGKTIAPGLGKLMTEKTERIAKTNRNRYRIRAFGESIASHAPQKADRILKNNLGYKVKSRKLKREKETIKNFIRSDLRRNITTPVDIICEDLTQPIKGKAQAKHINRKLNSWMKGELQASLEKISVETGSTISVVNPAYTSQTDSVTGTLLGSRSGDRFTRFTGDVIQADLNAALNLCVRATDNNITRYMKSSHVESELLTRTVGYLASIGKSVTDALNLGWLKPKFKAKALKLEEKYHSQG

SEQ ID NO: 42243 - protein, 472 aa, Scytonema sp.
MGYNGKRSKQSSKIMALKRKKGYSIESKTARFTLKRDGIDLDETKEAFNELVSFYFAVVATHPEGTDKANEYYKVYEGLTLGEKPQYPLPFDAPSVFRRAAIKKAIGAYKSWKTHYDKWSSRPPRHRKHRPPVQPRSFNFNPVFYSGMWKEDTGNSIMLKVRRNHAWIWMKFQYQSYDFGAAWSKVSPTVTLKGGQAYLDFTIEKYVPATGGLKTVIGQSDLRICCVDLDLDGNIATCTVLETDDNGVVHEISRMTVSGHAAHVSRRKRDLGRIARKMNQTGSFDKGFASTLFAKISRRERNEGFRIANEIVEFAHRHGCKVIVFEHLGNLKPKRGKYSKRSNQKRAYWLKGKVVDRVRRIAYQRYGILTARVNPKDTSRLCAVNGVEVWRGNHYLPTLLEFCQPYQYGGKCFATVTGQRGSSALNAARNVGLRFLSRRFDKPTLAVEKAGIVRKAMPVKAGCDKVASKVGG

SEQ ID NO: 42244 - protein, 490 aa, Scytonema sp.
VKGLPTRAEELNSLGLTEFEMFLAAYSSVFYKAACETANHLLANKNFNKSNWNTYLQVTYGISKRHANGVISHAQGAVDASIDHRKRHIKILEGKLKSINSWITKSEKKLADSFKFYEKKNWKESKTGCRLPIASDLKTRETNWHNLHFQIHNKKRRAHQLSKQIEHLKVAPIQTVIPKDQAFVVGSKDESFGNQVCQWDGDLLKFRVPACLELRFGKYVQTQLGNFDRNINRLPKDGCKTWHFYRKDGKWNAAVQFTPSPVKRVSRHSAYGCIGIDLNPGSIGWAYVDHDGNLKAHGQIPLQMGLPSGQQDAQIVDACLQLVVLADTYACPIVCEELDFSTKKEQLRERGSKYARMLSGWAYSRFYKLLESILSNRGIYLMKVNPAYTSVIGLVKYARQYGLASDEAAALAIARRGMRLKEKMHGSITASTSVKDGKHVWSFWYQLNKILKSRVVISSRHDYYNISNWGLVVKEPESRGSCSKQQCTSN

SEQ ID NO: 42245 - protein, 505 aa, Scytonema sp.
MARKKVVQTTEYTVTRIAYSVGDVPDKLSNLAQALGDLRSELWNKYGSLQAWGIDKNTIIKNIRNAPELRALYGSERFNLSSEIWERTVQAVIDDIHTVQEAAIVQVIRKIYSTFKPEKKQVIKGKKTRLVDNPETSFRDELTKSLNSQEWRQYPLISRWVRQYYKRGHTWVDNQIVINALGSNMKGKVSHKGKVTTYQIPGFMNGKKVSWISISVLTGRVTPSSGRLRFIINDSGNVELHYPKTTKIEVNPSKDNLGVDKGVTEGFYGSNGIAYAKGLGSVINDASDRRTKKNKKRQKLFAISKKVDPAKSARILENNLGRKKANRLDIRKRQTITQIIRTDTKKIFDNFGEVVAEDLSKYIKGKKRSKAVNRKLNEWSKGELQKALDEISIRKGGVVKLVNPAYTSQVDHRNGTLLGKRLGDQFLTFDGVVLQADQNAATNIKTRGSDLQITKFMKKEQIHRILLERTALFLSELGHSLESAVSMGWLDEKHLGRGKPLRRRR

SEQ ID NO: 42246 - protein, 496 aa, Scytonema sp.
MITLTYVKGLPTPAEELNSLGFTEFEMFLTAYSPVFHKAACETANYLLSGQSFDKSSWNTYLQKTYYISKRHANGVISYVQGAVDASKKNRLNHIKTLEGNLKSINTWIAKSEKKLKNASSFYAKKNWHKSKAGCKFPLSCSIKYKNTNWQYLRFQLHNKKRRAYQLSKQIEHLKAAPIHTVISKNQVFIVGSKDESFGNQVCQWNGTTLKFRVPACLESKFGKYVQTNLGNFERKINRLPKDSAKTWHFYRKNGKWNVGIQFTPSPVEQVSRHSVYGCIGIDLNPGSIGWAYVDRDGNLKAHGQIPLQMGLPSGLQDAQIVEACLKLVKLALKYACPIVCEELEFSAKKEQLREGGRKYARMLSSWAYSRFYELLESILSNRGIYLMKVNPAYTSIIGLVKYARQYGLASDEAAALAIARRGMRLTEKLPRSVSAYLSVKEGKHVWSFWYQLNKLLKSRAGISSRHDYFSISNWELVVKQWSEQFGHSKQKRTSS

SEQ ID NO: 42247 - protein, 424 aa, Scytonema sp.
MQNVEQHTIKHEHEWFPYCEEITKVSRQLYNTAQFTQRQGFFYGWGTQSQAKLDVMFKSNSSYSMMPAKVAQLVFKQNADAWTAYFRAMEAYKLEPKKFTGCPKPPSYIESHLNIVKFNYQAISKKEFKNGYIVPSMSPIKLPVKPRLKFDDLCEVRIIPKTGCFVIEVVYDVPDNAEFFCSLNPELAASIDIGLDNLATIVFSDPTIQPIVINGKPLKSANQLYNKQLARFRGFLPDGRGTSSRIQNIVRNRNNFVNSYLHQSTKMIVDELVKNGVLIVAIGKNEQWKTSLNIGKRNNQNFTQIPHAIFIEMLTYKLEKVGITVKVGEESYTSKASLIDWDIIPTFNPNNKVKHTFSGKRTQRAWYVSKDGLRIQADVNGAFNIGRKVIPNSFNCLQEIVERDRGCLVVHPLAFNTFVLSSSR

SEQ ID NO: 42248 - protein, 490 aa, Scytonema sp.
MSKRQSKKKGKNKPAEIIRTDVWDLKATPEQKSQMVGTIEEYRKFLHPLVIIVNSQWVNLVDLTSKERINAVEKMIHKTADNPDPKHKYFQSVVNRHPSFRKFPSYLRRAAIADTIGIVSSFQTRHFQWQSGDRKHRHAKPPSLSAWCNTYPALYQGQQVKYRNNFQLVDIKVWSGTDWVWLECIPVKKHGLNRHLVDGNKIKSPALVVNKHTCQLSMPVEVKIVDLPESDMVCSVDMGINNAATASIVGRDGTVKARVFINPIQDIDRRNKRRMMIAHKSKQTRNITKLRQRGLGVSPSGATAVDLPKGFCKGLQRKSSNINLQISKTVARAIVEFAKTHNVKVIVFENLEGWKAKGGRRKSLQKQKFHLWCHRKIVALVTDRWTEMGGKIVFINPKYTSAYAFDGSGKVKRDKVNYSLCRFTSGKRYHSDLNASYNIAARYWYAVIMGDNSYSRVFEGKSSHGTLRTPVTLGTLRCMAASASRCTATS

SEQ ID NO: 42249 - protein, 386 aa, Actinomadura sp.
VKLVVQVKLLPTPEQAAALTDTLHQVNTAANQVAVVAFAQFGLRGRELPLRTLCYGDLKAGGLGAQAAQHVIKRVVDAYTTLRAGIRNGNLGGPASKRRRKAESKPIAFRLDAAHTFDDRCLSWQLDAGTVSLWTVAGRCKNLRFACSPDQAKTLAAHRKGESDLVHRDGKWFLLATCDVPEPQVYEPADWVGVDRGIVNLATTSDGDNHQGRRLDRYRHWQARKRAEIQAKRTRSAARLLKKRARREARHARHVNHKIAKQVVAVAARTGRGIALEELSGIRGRVTVPRDQRARLSCWPFHQLGAFIAYKARRHGVPYIEVDPAYTSQRCPRCGHSARNNRSARDHFQCRRCGLAGPADVVAGVNVRDRARSAWVFVNMPQPAPT

SEQ ID NO: 42250 - protein, 421 aa, unknown
  TnpB Polypeptide
MLLAYKYRIYPTKADKILLAKHFGCCRFLYNYFLAYRKSEYEKGNKVSYHVTQKELTKMKALEEYSWLNEVASQTLQMAIQQLDDAYKRFFRHQGGYPNYKSKHDSIQSCSFPQNVRIKNSKVYVPKFLKNGIRAKFHRDIPEGASIKQATITKKNNKYYVSISFDDNLPTPKPVVAQSSIGLDVGINSLVATSKDVKIANPRYTKKYARMLKLASRHLDRKQHSRKKGDTTPKSKRYLKQQLKVAKIHEKIANSRSDYIHKITNEITNQYDVICIEDLNVKGMIKNHKLSKHIADVAWGELRRQLEYKSERKGKILIKVDRWLPSSQTCSSCLSPTGKKPLNIRKFTCPVCGTVHDRDNNAAKVIEYYGLLIFFPLGYKHNLSAGTVDYTRGGPSGGDGDSITIVAPSSYGSVKRGALIS

SEQ ID NO: 42251 - protein, 381 aa, unknown
  TnpB Polypeptide
MKVKKTVKAKIVYLTKIKRQLLEEEYENLQRFLHGEDVELYSASKQQAKRFYKKIKLDREYPLSIRKDLLRIERRNTKIARYWARIPVKGRRGGVWVAIKPHCPIEPGMEICESKLFRRNGDFYLYIVVQREVDVPNPELTGKAVIIACDIGEANPIVAVELWNYGTKRGNVKFLGKEIRGIRTLYSRIRKMIGRKKVKHGAKGLDRIDRESRKVNDILHKASRKIVDRARELREEGLKPIIVYGDLKNVRKPRVKWKKRCRKNNRKVHTMPSHKIKHMLTYKALWEGIPIIGINESYTSRMCWRCRSLNTMIRKRLFKCENCGLEYNRDLNGAVNIGNRLLGYMLNSRGSCEPPITSPMYNAPRGDILAISVCEGGSPLR

SEQ ID NO: 42252 - protein, 407 aa, unknown
  TnpB Polypeptide
VEINRTAVVKLSVPSDRHDDLKRTMNTFRDATQRFADRGWDGDDDEYVITSGNHLQRLVYDDIREDTDLHADLCVGAANHAADVLTSVVEKMKDGERVSQPEFTSNTTVYNTNAITYFDGYCSLAAYGGSRVHAEYVYPENSIQAEYMERDEWQKQGAKLRYDRQSDTYYLHVSVKQEREERSEEAENQTVLGVDRNVDGYLAVTSTGAFIGNADLLNHKRREYERRRARLQQQGTRSAHLTIQSIGDTFANWSEDYLHQASKELVNEADLRGCTTIVFEDLENIRDRISNSSKFQQWAFNELKRQVTYKANAEGITVETVHPAYTSQRCSETGCGFTHEDNRDGDVFVCQKSECGKELQSDYNAARNITHKYIQNRRKSGSGGATYHLALKSGTVNGNGDYSPSTV

SEQ ID NO: 42253 - protein, 262 aa, unknown
  TnpB Polypeptide
MRDQTRLQANLVQSARNRAAEAIKSVVARWQNGKKASQPHFTPPSVRYDKQSATFHDNHVSLSTVNWRIEAEYVLPPEGDNPQTKSLRNDEYEVTGATLQYRDATDTFDLHIGTKADVESEISNEGDAEHSTVLGVGLGIEQIAVTSTGQFWSGTYLNHRRREYERGRGDLQWTGTESAHRTIGTPSRRSRSRYSCISGPPSPQPCTIGPKFARNSRCSGRGGHGMQPVRRTPQRRSSAWRRSFLLLWASHRTRCSKKSSPR

SEQ ID NO: 42254 - protein, 392 aa, unknown
  TnpB Polypeptide
MIKSIKVRLNPNNKQSTKLFQYAGCARFAYNWAISREQDNYKQGNKFLSDSELRKEFTQLKKQSEYQWLNEVSNNVTKQAIKDACNTYKRFFKGQCKYPEFKSKKHSTPSFYQDNIKIQFTDTHVKVESFSMSKKQNKQKLNWIKLCEKGRIPTGCKYMNPRFTYDGLYWYVSIGIEVNDNTTLPSNEGIGIDLGIKHLAICSDGNTYKNINKTQTVKKLEKKKRRLQRSISRKYEKNKKGANYCKTSNIIKREKELLKLNHRLTNVRQNYLHQTTSEIVKREPSFICIEDLNVSGMMKNKHLSKAVQQQGFYEFRRQIEYKAMWNNIPVVIADRFFPSSKLCSCCGSIKKDLKLSDRIYKCECGNVIDRDYQAALNLKQYGENVLKQQSVA

SEQ ID NO: 42255 - protein, 499 aa, unknown
  TnpB Polypeptide
MKIYHKILLYQNKLLQPYVRILLRMMAVLTYMASLLLIVGVVYEHGFPLSATDISHLKILYKAVWIIFLIDVTLHIFLEYKGTKKNFRKLAWILSWLLYLTLVPVIFHRPDEEGAILYVWDFLGSKLYHIPLLLLFSFLNLSNGLVRLLGRRTNPSLILAVSFFVIILIGTGLLLLPRCTVEGVVLSWVDALFTSTSAVCVTGLVPVDVSATFTPMGLQENSRIFLPKLGWMRYRNSRQVTGVVKNVTVSQSCGKWYISIQTESEVSTPVHPSASMVGLDAGVAKLATLSDGTVFEPVNSFQKNQKTLARLQRQLSRKVKFSNNWQKQKRKIQRLHSCIANIRRDYLHKVTTTVSKNHAMIVIEDLKVSNMSKSAAGTVSQPGRNVRAKSGLNRTILDQGWYEMRRQLEYKQLWRGGQVLAVPPAYTSQRCACCGHTAKENRLSQSQFRCQVCGYTANADVNGARNILAAGHAVLACGEMVQSGRPLKQEPTEMIQATA

SEQ ID NO: 42256 - protein, 375 aa, unknown
  TnpB Polypeptide
LIKTYTFKLYRSKRNRHLHDDIYLAGKIYNHCIALHKRYYKIFGKYLPKATLQRHITKLKKTAKFSSWKALNSQAIQDITDRIDRGYNLFFRNLKRKVRTNPPIFRKLVKYKSFTLKQTGYKLYGNTIEIKGVKYKFSKSREIDGTVKTITVKRSTTGSIHIFIVCNQDMPSEVLARTGKMVGFDFGLKTFLTASDKCDIVSPLFFKQNSNLIAKLNRELSRKKKGSNNRKKARLKLAKAHEHIANLRKDFHFKLANHLCGEYAFIFIEDLNIKAMQRLWGKKISDLSHSKFVQILKVQAVKFGTTVVEIPRFYPSSKTCSNCDHRLEELPLSQRSWVCPNCGVEHDRDFNAATNILRVGASTLGKDTVRQAFAC

SEQ ID NO: 42257 - protein, 281 aa, Sulfolobus sp.
VYKPTVWLTPKASYSVNFERMTVRIASVGELPILGYPRNLKEYMGWRIKEARLVVKDGKTFLKVVFEKPFEKVEPKESIAVDINMSEIVVGKDDRNYVRIPTRLEEVHHWKSLAENLQKKYPRRWRENKRILNRIHSFHLKARRVMEDFARKVGKWVVEIAKDFGSNIIKLESLRNLLKNVNKLPKGFHDKLYLMQYRRLQYWISWQAKKQGMLVQYVNPSYSSVSCPKCGQRMVEVSHRWFKCLCGYENDRDVIAIMNLNGRGSLSLSTAPQMRDVRANR

SEQ ID NO: 42258 - protein, 345 aa, unknown
  TnpB Polypeptide
VVLHNKVYRKVRKEHPHITSQVVIRGIHSCLAAYRSANSNKRVLTKPFEKKRLSMRLDHNLYAKRSVRFAKANETSIRIRRKTFAFVLYPKLQSLLSQSRYRDPVVFERDGELHIALTFDTPFVEPSKQQLALGVDLGCHVAAATSDGRLIMDKKFAKEKRRLRFLKSQLRSASMRSENPSKSAKRHLKKLRRKEADKNRNQTHLVANEVLKTDADTIVLENLKGIKSKRYTKSYQNRLSQVPLAALRITITYKAEHMGKHVLLVRPYMTSQTDCLTGKREGERRGRRFYAKSGLIYDSDINAACNIVKLSKLPFSGPCKRLLDGQALVSEPIVGARSPQVLTDN

SEQ ID NO: 42259 - protein, 421 aa, unknown
  TnpB Polypeptide
MKTFRYRLYPTQEQAGAIRRTAGCVRYVYNGLLNDYKAQYNEWKKNGKPKESAPKLKEVTFLKETAPFLSEVDSLALANSKLNLKAAFKNFFDSCSGKRKGAKMKFPKPHKKGKSKAIYKTNNQSNSIRIEGDTIRLPKIGNVKVHFHRPCVGAIRSVCVEAAKNGRFYVAILTDCPSETIRNEVSLDNLNIVGLDMSYSKFCVDSDSTEDDTKPKYVRWYRTAERKRRRLARRLSKKEKGSSNKEKARRRLASFDAHTANRRKDFCHKMSHHYVTHYDALVLEDISMQDLAKRHMKGHGKSVYDLGFGMFKQFLAYKCQRFDTLLVYADKWFPSSKTCNHCGEKNSLLKLNDREWVCPHCGAVIDRDYNAACNLRDYFVKIINTAGTAGIHACGDGTSTLRSRAGQALSAKQEAPSFRWG

SEQ ID NO: 42260 - protein, 368 aa, Blautia sp.
VRKINRAVKIRIYPNAEQRVQIEKTIGCSRFIYNCMLADKMEHYKKEKKMLRNTPASYKKEYPWLKEVDSLALANVQLHLESAFHKFFREPSAGFPRFKSKKSSRKSYTTNVVNGNIFLEGKYLKLPKMTAVRMKLHRPISEKWKLKSVTVSREPSGKYFASLLFCCENQTAEKRPAEKFIGIDFAMQGMCVFSTGKRAEYPMFYQNTEKKLAREQRKLSRCQKGSQNYKKQKKRVALCHEKIRNQRKDFQHKLSASLAGSFDAVCVEDLNLKGMAGGLHFGKGVHDNGYGLFLSMLEYKLEERGKYLIKVDRYFASSKICSVCRKKKEELSLSDRIYYCECGNRMDRDVNAAVNIMNEGKRIFAECA

SEQ ID NO: 42261 - protein, 409 aa, Aphanocapsa sp.
MRVAYQYRLRLTRQQQATVDDWLELCRRQYNYRLAERFNWYEQNRCDINACALICHLPELKDRPDFYSQKRDLVNSKKLFPEYKELPSHTLQDVVARVEKTFDRWLSGDSNGKRSGKPRFKGQGRFRSIAFPDPVKPEHIDGRFIQIPKIGKLKMILHRPLPDGFKVKTAAIIKKVDGYYITLSLQDSTVPMLSPDTPEMENTIGIDMGLKSFLMDDSGEEVAIPQHYRKAEKRLKRLQRSLSRKKKGSNRRKKSIKRVAKVHLKVSNTRKDFHYKTAKQLLSQGKHIAHEKLNVKGLAKSRLAKSVNDAGWSQFLQILAIKAERAGLLTIAVNPNGTSQNCSGCGTKVPKMLSDRLHACPECGLTIDRDHNAAINIKHLAVGHSVNKAQATSDAIAGVTEKPALYASA

SEQ ID NO: 42262 - protein, 442 aa, unknown
  TnpB Polypeptide
MQIISSYGVELRKQNIPIRQTLEIYRSAVSYLIGIYVQVWEGLAEIPDAKRCFNAAEHLVHTTKKNHACFDFDIRFPKMPSYLRRSAIQHALGTVSSYKTRLDLWEKTDGKSGKPKLVYENHAMPVFYRDVMYREGAQGKDEAYLKLYDGHDWKWSCVRLDHTDMEYLRKCWSGKKASAPTLEKRRQKYFLRFSYKEEVTLTKTPVKEQIICSVDLGINTDAVCTIMRADGTVLGRRFIDHPSEKDRMYRTLGRIRRFQREHGSAQTQGRWAYTKRLNTELGKKTAGAIVRYAEENHADVIVFEYLEMQGKISGKKKQKLHLWRKRDIQKCCEHQAHRKGMRVSRICAWNTSRLAYDGSGAVTRDWENHSLCTFQTGKRYNCDLSASCNIGARYFIRELLKPLPATERSLLEAKVPPVKRRTSCVYADLRKLHSEMELLKVA

SEQ ID NO: 42263 - protein, 497 aa, Nocardia sp.
MCGCLASWDSTWVGWPLEISGVRCADGLEHDRDRWAIRKRALTAESSSRWAGAITKATNDQWALARRAQHAHLRSLERGVEMLRRRLALPLGEPGRDGNPGGYANRREWFNKSRRLAVLQGRLTVVRGDYEAGRVHVVRGGRKLLKKRHNPTDGDLGREQWRAQWEARRQFLSADGESGKKFGNETLRVTPNGEISLRLPAPLIELANAPHGRYVLSARIGFAHRGREWFERVSSHRAVAYRIHYEVNRDRWYLTASWQPPTRAEIPLAAARASGVIAVDFNADHFAAYRIDRHGNPISGPRRFDFDMTGPASRRDAGLRHALSGILSWAKHVQVSSIAVEDLNFDAEKTREKHGHRKGFRRLLSGMPTRAFGSRLVSMAVRTGIAVIAVDPAYTSKWGAQHWRAPLSTDRRVLTRHDAAAIAIGRRALGHGIRRRTSPPHTHRSDGYGHRKVQAGPVARAHEGSRPPDPERVRDTCRRSDSVRGKPVCPKPFGTCA

SEQ ID NO: 42264 - protein, 229 aa, Rhizobiales sp.
MPDSAVGIDVGIEHLAYLSDGTVFENPKIGVKHERAVRIVQRALARCMRGSKRRRKVREKLALLKRKAANCRSTRLHQVSAKIAENYAFIGVEKLNIQNMTASARGMVDEPGTKVRQKAGLNRAILDASVSRLISFIDYKAERAGGQMVKVSARNTSQECFSCGEIVKKKLSERQHRCKCGADLPRDLNSAIVILERALVAQGRAMPPWDGNAGDCSTRRPGKRVAEAA

SEQ ID NO: 42265 - protein, 387 aa, Escherichia sp.
VKRLQAFKFQLRPGGQQECEMRRFAGACRFVFNRALARQNENHEAGNKYIPYGKMASWLVEWKNATETQWLKDSPSQPLQQSLKDLERAYKNFFQNRAAFPRFKKRGQNDVFRYPQGVKLDQENSRIFLPKLGWMRYRNSRQVTGVVKNVTVSQSCGKWYISIQTESEVSTPVHPSASMVGLDAGVAKLATLSDGTVFEPVNSFQKNQKKLARLQRQLSRKVKFSNNWQKQKRKIQRLHSCIANIRRDYLHKVTTAVSKNHAMIVIEDLKVSNMSKSAAGTVSQPGRNVRAKSGLNRSILDQGWYEMRRQLEYKQLWRGGQVLAVPPAYTSQRCACCGHTAKENRLSQSKFRCQVCGYTANADVNGARNILAAGHAVLACGGCQQTG

SEQ ID NO: 42266 - protein, 411 aa, Rhodococcus sp.
MSDRDGSVWFVIVRYRYRAYPTGDQQMMLARTLGCVRVVFNDALQARQDARTAGVKITDTEVQRLVVTLAKATPERAWLGEVASVALVQACQDARRAYRNFFDSVAGKRKGRRVGEPRFRSRKDNRQSIRLTRNGFGVTDRGVRLAKIGDVKLEWSRNLPSAPSSATVVREADGRYFVSFVVEVLETPLTPSSTVAGIDLGLTDLAVIVRSDGTREKIPAPRHLRAAERRIARGQRALARKEKGSKNRGKARHRLAVLHRKVRETRLDHHHKLAHRLVHDNQVIAVEDLAVSGLARTRLAKSVHDAGWATLVRLLEEKADRCGRTVTKIDRWFPSTRACSQCGVVGDKKPLHVRAWTCGCGAHLDRDYNAAVNILDAAGLAESLNACGADVRLRLAGAVSVEAGTHRTEAV

SEQ ID NO: 42267 - protein, 487 aa, unknown
  TnpB Polypeptide
VEFPGLLARVHRWLDPRRSGHHPPSRLTLPTSRVFAERSRTWCPRSLGARRLPSDAINVTSEVNDEDVNSCQNGAPLSHTGQVLSRAVTFQFALDPNAEQRVLLAKCAGARRFTVNHHLARVKANLDVRSAERKVLGEHGVPSEPSTPSLSWSGFSFINDFNAWKNGQSDDSPLNDDGSRGLSWRHELPSDVFECASVDAARALENFTASRRGERSGKPVGFPRFQAKGKVAPSFRLRNRATSGTTPSSQPIRFTGPSHLRLPRFGPVKLFGRTRKVRRMIEAGRFHIYSATVTQRAGRWIVSLTGVAAELHQVKRSRFQRHGVPIGVDRGIISLAVAADANGTLIQCFEGVKTLKQAQQSLKAANQALARTTPGSKGRQQARSRLAKRHRKVANTRRHLVHQASKSLVDRAQVLVIEDLNVAGMVKNRHLSRSISDAAMAELSRQILYKAMRLPRKSRHLLVRLEGRLKGCSYGSHQEKIHAGVSN

SEQ ID NO: 42268 - protein, 418 aa, unknown
  TnpB Polypeptide
MLETTRTYVAKITNHQQVRDDLDACGFAASKLWNVGRYYIQGRWDNDGEIPDEKELKSELKDHERYSDLHSQSSQRVLEELAEAFTGWYNSDDGNNPPGYRKRGDRHPRSTVTWKQKGIRHDDKHGQVRLSKGWNLKEGRSDFILAEYETRPDVQVENIQQVRAVWNGGRWELHLVCKTQIPVEDAPGDNTAGIDLGISNYLAIDYEDGPCELYPGNRLKEDKHYFTREEYQTEGENGPSKRARRARRKLSRRKDHFLHTLSKHIVQRCVEEGVETIAVGDLSDIREDEDGNSRDWGQRGNKKLHGWEFDRFTDLLEYKAEVHGILVDRVDEQNTSKTCSCCGQIRDANRVERGLYVCDSCKTTMNADVNGAVNIRRKITQTPPTGDMSNGCLAQPGVFLFNTTTGAFHPQEQANCKP

SEQ ID NO: 42269 - protein, 419 aa, unknown
  TnpB Polypeptide
LKLVEQHIIKKSNSNWKTIDNLCFLSKNLYNYSIYHIKKHYTETGKFIRYNDLQKEFYNIQQKDFLALPTDTSKQILMLIDKSYTSFFKLISKWKNNKKSLNGYPKPPKYKDKIKGRNIIIFTCPNQIRIKNNYIHFPKKVNLKPIKTKININENKIKQVRIIPKSSCYTIEIVYEQIINNKIQLEKNNNYLSIDLGLNNLMACYNNINNDMFIINGKPLKSINQYYNSKKGEIQSQLKKNHNKNNSKRLDILTLKRNNKIKDYLHKSSRFIINYCIKNNISNIVIGYNKEWKQNINIGKYNNQNFVNIPYYNLINMIKYKGEMHNINIILNEESYTSKCSALDMEEICKHDIYLGNRIKRGLYQSNKKILINADINGSINILRKVSGDKVVNYFYLQYTQTSRDQVVWPLKIKSLYIK

SEQ ID NO: 42270 - protein, 374 aa, Boseongicola sp.
MVRQQRRAYNLAVACFREADDGHVDPKGPDLKQTALRATIRECVRDEVSERGGTFRSADCDEAVNAAFRTRDAVIRKREAGRKARLNFRSRKHVRQRMMVQKLSGAFVAQNFGLAEPMPDEAWKKLTTIVLERGRWFICAQLHIVTVGQDEIQVRSAVALDPGVRSFMTAYAMDHAASYGDRFHSDKVFPLLLRLDRLVGQRAKAKHDEWKRHFQKRIDKLFIRVRNLVDDLHRRVAYDLVQTFDVILLPSFETKQMSAKDDRKIRSKTVRSMLGLAHHRFRQKLEWMCRKHGKRLVVCNEAYTSRTRSWDGFVNEHLGGAKTVSDGRIVVDRDMNGARGIMLRALYGNLGRLRAAGDDVALVAEPAKKRLTKP

SEQ ID NO: 42271 - protein, 362 aa, Methanotorris sp.
MWLTIVYLTTIVKTSELEKKFKSDFWYKNLHSQSAQATLQKLKIAWDNFFKKRTKRPRYQPKDGHFPVRWKKDGFRIIDNKLRLSLSKQTKQYLKEKFGIESKFLWVELPRTLPHDSMNVKEVEIVPHDLYGQSFYVLHLIYRKVVNPGKFSKDKVMAIDLGVRNLATVVIQNERQSFIFDGRILLSKLRWFAKKKASIVSEIANQGLKNCKRLARLTVKEKNYVKDYMHKISRWIVELAKEKSVLRIVVGDLTKNFSDLDIGRRNNEKFHRIPFGKLINMITYKAEELGISVDKVDESYTSQKCSACGIIKKSNRKYRGLYVCSNCGTVINADVNGARNILFSVVPNPIRDRDSGLGNPWG

SEQ ID NO: 42272 - protein, 488 aa, unknown
  TnpB Polypeptide
MQQACFIKQDYDRTVKPFWNDVCHNLSDNLFLPFTDNNIPNFKSHYLSSLIRKITPVYTFHFPLTFKSYTLSVPDVIVKAVKKIRFYFNSPEQKIKYEQMMIVARRAYNLTVDMCNNGKYIDEKGKPVDLRIPIRAIVRKECIESGTVFDVNVCDQAVRIAKSKFISLCKDNKKKKNNLTGKTSFSQLGFRSRKDKKQTFSHPRMGKDGAVCIKSLGKIRLTEKLPDECYGKNVDVTMDHGRWFICVQKNIVVKGNHLGCAESQGQNKMVAEKEVKVIALDPGSRTFVTGFNEHEVMVYGKDYSVKCLLPLAKNMRKLYSLREKLSQHKLYKTNLSDNPKWIKDTLRYIEKNLNRLACKRQDRVNHLHRTVAYDIVRNYDVIYLPEYETKPMVKTKGRKIGRKAVHDMLSLSHYKFKEFLLWTAKKYGKNVIIVNESYTSKTQSWNGIVNEKLRSSRAMKDGTRIIDRDINGARNIYLKHISLLLMNT

SEQ ID NO: 42273 - protein, 371 aa, unknown
  TnpB Polypeptide
MILTYKFHHNRNFDTELAQAFKIADYVVAPVVGFSRYSFPGGRFVVKKMIQRNVCRSSKVVKNFDLPSSISNQILKKYGNQKKIKNVHSVNLIVPGQGIKVYKETNSIWVPCLKLHLDNMIPVDFEKINHMEIDETYAYISVTVPEKAEMIPYETIIGVDRNTTGHIVVTANIDTGQVRMMGKKAQHIHTKYRSIRKTLQKNGQYRKIKKMKNRENRIVKDLNHKISKELVKMALVQHAVLVFEDLSGIRNTKKQSRSFKPSLHSWSYYQLQTFVEYKAKLLGVPYLYVDPAYTSQDCSRCGTLGIRNRKAFKCPACGYVNHADVNAAFNIALRQKNMIARTQTMMCTMGVLMPHDDALLEREKRLEPHEL

SEQ ID NO: 42274 - protein, 393 aa, Cyanobacteria sp.
LQPTKEQASQIDAFLNAFADACNYTNQDVAPKITSKTTIQSLTYQSVRETFGLSANQAVRVAARVGANRKTAKQKGKPVNSFAPTSADFDARIFSFREQDWTVSLTLLGTRERIKFAASTYQRGKLTSRVPTSAQLCKHKDGQYYIHIQIKDEPPKPIKSDKVIGVDFGRRDIAVTSVGDKWDGKQIQNVRDRYARVRASLQEKASKGTRSTRRRARRILKRLSGRERRYQTWLNHNISKLIILSALQHNAIIAIEDLTGIREHTNEQPRSKIERRRSNSWAFFQLRMFLNYKAVQYGVEVVAINPAYTSQTCSECLHIHPVKGKSYRSGKSFKCGHCGNHCDADENGSKMISIVGADFVNPLGGSVLCCNLADHICAAILQTTSGLLKAPGF

SEQ ID NO: 42275 - protein, 321 aa, Lactobacillus sp.
LPRFLFPSRIKRLKKWKAIHRDQHLNPSPNWCLVRDRMIEQKNDWQYAYSARTLQLAVQDLGKAWESFFNQAQPDWGKPKFRSKRNPRQGFKTDRAKIKDGRLWLEMPRETPYKDDWTGIKLSEKPLPGKIGVVSIVRINDKYYACVPYKLETPVSKAKTGKEAGIDVNVGHFNYQDGQCLILPDSLKHLYLKIKFYQKRLAKKRTVNGRIKGTQSNKYLKTKAKLQACYQRATNIQRDLMHKFTTKMADEYDQIVIESLDVKAMLMSHVASKGMQRSMFGLFRQLLAYKCAWYGKELILADQHYPSTQRCAVCGTVKKRR

SEQ ID NO: 42276 - protein, 398 aa, unknown
  TnpB Polypeptide
MSRYRLLPTPTQEAVLRDHCGHARYVWNLAVEQHSHWHPGRTSAPGYLEQCRQLTAARAEHPWLAAGSQTVQQQALRDFARAMAAFVDPANPAGRPSWRKAGRDEGFRITGRRGRQWDVRRVSRKVGEVWVPKAGWMRFRWSRAVPPGVRSYRVTMDRAGRWHVAFAAIPGPVPAPGNAQIVGVDRGVAVSAALSTGELLHVPGLTARERKRLLRLERTLARARRGSGRRGRVRLAIARLRARETDRRKDWAEKTSTGLARRFDIIRVENLDVTGMTRSARGTAGAPGRNVRAKAGLNRGILRSGWGLLVRRLEEKAPGRVEKIKPALTSQRCSACGQVDRNSRESQAVFRCTACGLADNADVNAAKNIAAGHAVTARGGDGAARPVNREPHLLLPSA

SEQ ID NO: 42277 - protein, 372 aa, Lactococcus sp.
MVIRKIAQKIPFKPTKKQIQFFADCFGARRFVYNSQVAVFNTYFEENKKLVYPKITDLKHENEWLRGSVVPAHSLSNALMDFGKARSAYFKKKKYSKNRPRFQSRHDYIQSFRNGMPLKTIRENGRYQLSKKLGYIKIRKRDNLRYPIEQMTQWTVKREGDKYYIVFLFTVEVETQSETTGAVGIDLGIKDFAITSDGEKIDLPEQIGKLEAKVIKEQRKLSRKQKGKGKQSNNFYKQKAKLQKAHAKVRHVRENFHHHVSKQLVEENQFIALETLRPSNMIKNHKLARSIARAGWRQFTNQLEYKAQWYGRTVQHVGQYYASSKTCGNCGIIYHGLKLSEREWTCSECGTHHDRDLNASQNILKEAQRLAS

SEQ ID NO: 42278 - protein, 331 aa, Alicyclobacillus sp.
MMRWHNSNKLHAHSADAVVQSFYSSLRSWRVRRKDNPDAKPPFRRKRFYKVQWKSSAIRLRNGKLILSNGKGNDPLIVPWRWDCPKLVELGWNDGYELRAVYDIHSNEQPQGDKVVGIDLGEIHPAVAHDGEKAIILNGRLLRSKRQYQNKLKAKLSSILDRKKKGSRRWRRLQWSKQRQLAKINNQIRDILHKQTTRLVSMLHERGVQTLVVGDVRDIRQRVDYGHSANQRIHQMVTGKTRWMLTYKAKAKGMDVVLQDEKYTSQTCPSCGTCHKPNGRQYVCKCGFRYHRDAVGAWNIRQKYLGYGPVVGAMASPIGVRYWPHMWCSSH

SEQ ID NO: 42279 - protein, 540 aa, unknown
  TnpB Polypeptide
MIVVMPTTKQAQKAAAATGGALVLTDDGRPTRRVHLPGDFEAHREAVEAVSVLFQLFADTGEPVPSGWVLRGATFEVEWPTDSERCQRIRSHFGARRKAYNWALARVKADLEATNTDPAHQSVAWTLPALRQAWNREKATVAPWWAENSKECYASGIADLVTALKNFSGSKQGKRRGRRVGFPRFESRRRAHNRVRFSTGAMRLEADHRHITLPVIGTLRSKENTRRLQRHLAKGNAHILSMTLSERWGRLFVSVQYAVRVRVVNPTRERRRKDRAGVDLGLRTYATVADSNGAITEVPNPAPLRATLAERRTVGRQMSRRIPGSRGHRAAKAKLARLDRKAVHLRRNSVHQLTRWLVGNYRQVVIEDLDLAAMKRSMGRRAFRRSASDAALGMFRPILTYKAETAETQVAVAGRFFPSSKTHHGCGGPLAGRSKLDKHLTCEACGEIVDRDVNAALNLRDWPEATENATASPGPVGASAPYDPGPPVGGTDGGSDTWEPSAGRGSVRPELVGPLPVRREPNPTTVWGEEPREGCIPVTC

SEQ ID NO: 42280 - protein, 496 aa, unknown
  TnpB Polypeptide
MAKATTTIRQVLNYQAEYGAWFAANQALFNQIAAFYFDVIQAHIKVLDLGNKDALTALEKLTHTTQSNPNPVMALEDLAEDIPAMFRRAAINAALGSARSFFSNLSKWYKRKEKAEAKGKKFTERPPVPPRCWNKSAILYAGQWKERTGSSILIKVWTGTCWSWIKVRITGRDVPDGVEMGSPQLIRRGNQWWLHTPVERQFKSPSKIEKQVTQNAQTKICAVDLNINEHIAICTIRTVEGSILATTFIGGGRRVHGFRKQQLGRIARNRSKTGIIAEGEQDNADLWRKINHVDEQVAHLISARIVLFARQHGATVLVFEYLGNLKPAKGKYSHRGNSKRAFWMKGRILKYSKYKAYNAGILTSRVNPRNTSRECARCYNLVARYEEGQPAEGYTYGAPLVLCHQCGMKGNSDRNASLVIGQRLIERYQEPLKEKPLTPLKAGRAEQSAGVVISQVAKSVGTRPSPGSARHGDHNEHGTAQGVLSGMERHTSDIPY

SEQ ID NO: 42281 - protein, 314 aa, unknown
  TnpB Polypeptide
MTISWRSGRRIRGSRKGDGATVFAFRRAPNLIRLMAASFCPRLAGCAIAVPGEVGNATVSFGAGKWFVSIQTAREAAQPVPCSAGAIGIDLGVARFATLSDGTVYKPLRSFKRHQQRLAHYQRMMSRRCKFGKNWQKARRKVQKVYARIGNCRRDYLHKISTAISKSHAMVCVEDLRVRNMSKSASGTVANPGTRVRAKSGLNRSILDQGWFEFRRQLDYKLAWNGGILIAVPPQNTSRECPACGHSEAANRRTQTQFRCVKCGFSANADLVGAINVLARGHRVAACGETSPAQGASAQEPIEANLREIAHAAR

SEQ ID NO: 42282 - protein, 358 aa, Exiguobacterium sp.
MSQTLTVNIKLHPTKAQQATFEAMSRTYIATVNRIVSDMVAAQTMLDLTSRHVVADLPSAVKNQAIQDAKSVFRKAKKKDFRVVPFLKKPYCTWNNQNYSFDFESIAFPVIIDGKVAKAAIQADMVDPDNRNAELLAHKLGTLRITMKSNKWIAQIAVTIDTIEKTGTRVLGVDLGLKVPAVAVAEGGKTKFFGNGRQNKYVKRQFRTKRKELGQKKKPNVIKSLNNKEQRWMKDKDHKVSRKIVDFAKENKTSVIRLEKLANIRQTARTSRKHNKNLHTWSFYRLATFIMYKAKLEGIKVEYVDPAYTSQTCPSCGERNKAKDRTYTCACGFTKHRDVVGAMNIRYASVVDGHSPSA

SEQ ID NO: 42283 - protein, 398 aa, unknown
  TnpB Polypeptide
MIRTYKYRLYPTNAQDRALDFLLWQGRNLYNAALEQRINTYRETGQGVTYTQQWAHFRDERHAKPDTLGMLNATCVQQMLRRLDKAFAAFFRRLKAGEKAGFPRFKGRNRFHSLEYRYADGCKLRFDAQGRARLYIQNVGEIKIEYHRPLSDEAEIRHVVIKRNNRKWYVCLMLELSDPEPVAAGGPAVGIDMGLENLLAFSDGDLIENPRWLRQSLAKLRIAQRRLARRQKGSARRRKAAAQVARLHERIVNQRRDFWHKLTSQMVKTYGFIGLEDLSLGFMTHNPHLALSAHDAGLGEFRQLLAYKAEEAGVQVVTVNPAYTSQACSGCGAIVEKSLSVRIHRCPHCELILNRDLNAARNVLALALATARTGRSALNVDQAGQRPDVMRAPRSSPL

SEQ ID NO: 42284 - protein, 436 aa, unknown
  TnpB Polypeptide
MITKSEQIKQSLNATRERRKSQTCKTYELKFDKSKMSFKKEHFFKMLFVEAKWLYNDILSTDDVFNYDDKAKVTHNLDKNKQPVEHKLTCLSSQMKQSLVNRTKDSIKALSKSKAKGNKAGKLKFKSSVSSIPLKQFGRTYRINDDKTISIQGLRKNFKVHGLSQIPADAEFANATLVKRYNDYYLYVTVYQKIEKRILSGEVGLDFGIKNSITTSDGDVYNYNFKETKSIKKAQKSLSRKKLGSQNRYKQKDIVAKRHGKLNNIKKDAKNKFVSKLKDKKLIAVQNEQLSKWHSDRKFSRKVQHDIMGVIISDLKKLSQTIIIDKFEPTTKKCFVCNEVADITLSDRIFHCQNCNFVMDRDVKSAIYILLKGIQISTGRRNIMPVEYESSVFNRSVKGKTRTLKQEATDFWKIYFQKESKKATNFWLTPEATCFS

SEQ ID NO: 42285 - protein, 195 aa, unknown
  TnpB Polypeptide
LQTFQNLKYDGINGWITVGMEYEESAAPSSNEGIGIDLGIKDLAACSDEHKYLNINKTQKVKKLEKQKRRLQRSISRRYEKNKKGECYCKTRNIIKSEKKLLELNHRLANKRQNYLHQTTSSIIKREPRFISLEDLNVSGMMKNKHLSKAVQRQGFYEFRRQIEYECGNVIDRDYQGALNLKKYGEMFLKQQSVA

SEQ ID NO: 42286 - protein, 373 aa, unknown
  TnpB Polypeptide
MMEYSYKFRLYPNKEQEDLIQRTFGCARFVFNHYLAERIEMYKATGKSLNFFDQNKNLTSLKRQEETIWLKEVDKWALQNALRDLDAAYRNFFRRVKNGEKPGFPKFKSKHNHRQSYRSQFSNGNIKVFDKSVQLPKLGKVKCRVSKQVKGRILSATVSQNPSGKYFVAICCTDVEMKPLPKTGATVGLDMGIKSFAVTSDGVEYLNHKYLAQSEKKLAKLQRQLSRKTKGSNRWNKVRIKVARAHEHVANQRQDTMQKLSTQLIRENDVICIEDLAPKNMVRNHHLAKAVSDAGWGEFRRQLQYKADWYGKKVVAIDRFYPSSQLCSCCGTQWVGTKDLSARNWVCPVCGARHDRDVNAARNILNEGLRLLA

SEQ ID NO: 42287 - protein, 453 aa, unknown
  TnpB Polypeptide
MNITSSYGMKLTGDLKALENTITIYRDSLCFIIPIVDAHWDEVKDFEFSNQRMTYVEKLVHSTAKSQARYNFDEEFPKFPSYLRRAVLSRALGIVSSYRSNLANWEEKKAELEEKGEKVPQRPRLSTRHFGCPAYYKRDLFRNFDPVRQTIELKVFKNGDWVFETYKLKTSDCTYYQNHLTGKKQNVPIIQKKGRRFYATFSYEENVPLIPEGSINKICAVDLGWGTDATCCIMDQDGTVYARKFISFNEEHDRLHTQLGRIKRNQKRGSRHNKTLWRKVSGISQDIADKTVKAILDFGNEHGVDVFVLEYLDFKGKNAVKRAHFWRYKRICKVLAQRAHQYGLRIARVNARNTSRLAFDGSGWSKRGREITPETPYALMEFSNGKTYNADLNASYNIGARYFIGHLLKTVTATQRLALEAKVPQVAKRSTCTLSDLINLRSEFVALASKTQA

SEQ ID NO: 42288 - protein, 394 aa, unknown
  TnpB Polypeptide
MKKVLDSLCDYRRYCWNQGLELWGTLYEARLIGLPVELRTKIKASLKDKTIEFSEEEQALRILFLSPSERLVRNELVAQKADWQLALSTRVLQLAIKDLASAWKFFFNNSKTANKPGFQSRKKSKQGFKTDEARIKEGRLVLDQPRAYKGEWSSIRFKGANIPDGKLKLCAVTRVKGKYIATITMDVETVAFPKTGQKTAVDANVDHFDTTEGQTSLKPELLDPLYAKVRTYQRQLTRKRKVNKDYQNSKSYQATRTKLQATYERICNVQNDLLHKFTTDLYRKYDTIVIEDLDVKGMQMQKKAKNLHRSLFGRFRQFMEYKAEKFGKTLIIADRYYPSTQRCSNCGYIKTGDEKITLSGNQKHGTKHNEYVCYNCGYEDDRDHNAVLNLLALA

SEQ ID NO: 42289 - protein, 445 aa, unknown
  TnpB Polypeptide
MHKRKFTVFTQLHEENNADLIEYFDDRRKRQSKIVRKTFHLIKNADEFDKSSYNTHLQNEYGITKRTANSIISDAQGRLNALKELKVFEKRQLEQKIEHLENKVLPKLIQKRDDCIAQLKANPKGSPVRLRNVRRKIVAKKNKLNRLKQKLDNVTYQIETGRLKLCFGTKYLLKRDYKHFVAQRDSQMSFVGSKSEKAQNQMLQLSYNPKNNQFDIKLRKDFDGYKNANKDDKYVYGRVYFRHHKSELISILRQGYSPLSYKIIKKRNRFYLYCTFEIHVEDDDFLTRSSYGTIGLDFNKGFVALSETNNHGHLLQTQVLPYRFKSGSKTTTDLQKLVNDVVDIALQTGKDICIEDLDFKKKKAKTESRQGPKYNEMLHSLAYRQFSNFVEGIAFRNLVYVRKVNPAWTSWLAKERYCPRMKLNVHVGASFVIARRGQGFKDAFK

SEQ ID NO: 42290 - protein, 530 aa, unknown
  TnpB Polypeptide
MWYNIVKKKIRKRVVFMRAQTPSYVISVKLHLPKQIENRLEKSFRISNSVYNEGISFGLKRFEAMKRNPYYQELLKARRLAKAGIDKLKKAKKKIKGLTQQVKLYDKALFELRKAYGLTEFDLSAYLGQQRRKDDSPYKQLNAGEIQVIAHYVMRTLEKVLFYKIKPHKVRFRSKFDLDVSFRNRVNTTGTRLEPSDKTGIAYRLYIHKKSTFVDIPIKAFNTYQQMSLLRSEKIKYVQIIRKTIRGKKVYILQIVCQGYPPSKVTKGDEVVGIDPGISTVAFASQKEVALIDLVPKNITQKEKLLKRLDQAIERSRRVNNPECYKENGTIKKGVRFKRSSNRQMCLRNRRCRVYRSLSEERKKLQGQLINRLVSQASIIKIEDLNVKSLQKRSRDIRINPKTNRPFSKKRFGKAVFRAAPSAFRTALETRASQLGVDFEIISPKNVKPSQYNHITQTFEKKSLSTRIYDLSDEYPDVQRDLYSAFLIGHIENGHYQQEQLEQDFPVFYQQMKNFLHQSIETERLAWYLT

SEQ ID NO: 42291 - protein, 431 aa, Thermogladius sp.
VSELTRTVVVKSTPLPRKLFRVFVELEGMYRNMVEQLTLYAVRSGIASFTKLKALKYRELRSQYPQLPSHYAYTACQDVSTRVKSFLRLKKRGLAKRGYPEVNKVSIWLDDHLWKMRSLTDIEIATHRGWIAVELEPHKQFWKYVGSGWRLSSETKVKLDKRSRQLIVYLTFKKSVEVYRPSGFIAVDVNENHVAVLVDDKAFLFDTGFRDIVLGYYYRRKRVQERYDKTYGVNCRVKRRIFRKLKERRKKSDLKWKLANVVVRVAREKQYAIALEELGEEPAREMINRVSDDQLRHRIYQASFKGVQKAVEEKAKEYGVPVTYVNPRNTSRMCPVHNARIIYSNGSRVGKCSKGGELWHRDVVACYNLLLRACLGNGSVAPSLGGLRVDGSPVPLGSTATHDPTEIPKSLWARWKSLDATNKHKLVRMSI

SEQ ID NO: 42292 - protein, 306 aa, Mycolicibacterium sp.
VAGASVGLCCHRWPLGSVGVQMRYRYRMEPTPAQQQMLARVFGCTRVVFNDALRVRDEAYRAGVKLSDSEIQRQVITAAKTTEERGWLAEVPSVALVQSVNDSRRAWRNFFGSASGKSKGRKVGRPRFKSRKDHRQSFRLTRNGFLIRDNGRLFVAKVGEVAVRWSRELPSTPSSVTIIREPDGHFYASFVVDVPASPLPVTHQEVGVDVGIARLATVATTDGRRIDIDNPNHLGRKLRKLRRLEREKSRRQKGSANRAKTQRKVAIAHGEVARARRDYHHKQALALVRENQVIHVEESPAGTCHQ

SEQ ID NO: 42293 - protein, 430 aa, Burkholderia sp.
VNGPSSSVVPMSTDGGGTPSHVLMRPPVRRACAATCASGARQDNGIRWLSSAFAPRNPVIHGDEERSAVDRRRSTVKVTSMILVYRYRVKSLNGLLNKQSRAVNYVWNFCNDTQKHAIKWSKRWPTGFDLNVLTTGSSKELGIHSGTVNATCEQYAKSRSQNRRPYLRYRGRKSLGWVPLKGRDLKREGDAFRFAGNTFRVFSSRPLPDGKIKDGTNFAQDARGNWFLNIVIEIPDVQARPIRTGVGIDLGLKDFATLSTGEKLPNDRFGRRAAAKLAKAQRARKHKRHIAKLHAKVANARADFQHKLALDLVRRFDYLAVGNVSAAKLARTRMARSVYDASWSSFRDKLRYKAIAHGVTFEEVDERGSTQSCSACGSKDSTTRPKGIAGLRIREWTCSECGVLHDRDTNAALNILRCGRASPSVGIPCL

SEQ ID NO: 42294 - protein, 377 aa, Burkholderia sp.
MDIKRAYRFRFYPTPEQAAMLARTFGCARFAYNHMLKMRTDAWQQRQARVGYHETSAALTALKKTPEHAWLNEVSSVPLQQALRHLQTAFANFFAKRAKYPNFRRKDGAQSAEYTGSAFRWDGTSLKLAKMDAPLAIRWSRTIPEGAKVTTVTVSRDAAGRYHVSMLCDDVVSAKSEASGQIGIDFGLTDFVVLSTGEKIAAPNALRKNETRLAKLQRRLAKKQIGSANFRKARLKVARMHARIADCRRDFQHKLSTRLINKNQVIAIESLAVSHMLKNRKLAKSIDDAGWSEFVRQLAYKAEWYGRVLIGIDRWYPSSKRCSDCGHTVAKLPLKVRAWVCPRCVATHDRDINAACNVLAAGLAVSAHGESVIPMSL

SEQ ID NO: 42295 - protein, 402 aa, Escherichia sp.
VKRLQAFKFQLRPGGQQECEMRRFAGACRFVFNRALARQNENHEAGNKYIPYGKMASWLVEWKNATETQWLKDSPSQPLQQSLKDLERAYKNFFRKRAAFPRFKKRGQNDAFRYPQGVKLDQENSRIFLPKLGWMRYRNSRQVTGVVKNVTVSQSCGKWYISIQTESEVSTPVHPSASMIGLDAGVAKLATLSDGTVFGPVNSFQKNQKTLARLQRQLSRKVKFSNNWQKQKRKIQRLHSRIANIRRDYLHKVTTTVSKNHAMIVIEDLKVSNMSKSAAGTVSQPGRNVRAKSGLNRSILDQGLYEMRRQLEYKQLWSGGQVLAVPPAYTSQRCACCGHTAKENRLSQSQFRCQVCGYTANADVNGARNILAAGHAVLACGEMVQSGRSLKQEPTEMIQATA

SEQ ID NO: 42296 - protein, 334 aa, unknown
  TnpB Polypeptide
LNIAYRFRIYPTEEQKILLGKTFGCCRFLYNQMLNDKIREYEKTKKMLKNTPAMYKKEYPFLKEIDSLALANVQLHLEKAYKNFFRDPKIGFPRFKSKHHSKNSYTTNVVNGNILVESKRIRLPKLKWIAMKKHREPAEGLRLKSVTVSMESSGKYFASLLYEGYSCENQAAGPDYSTAKILGIDYAMQGMAVFSEKVETEEAGFFRKNEKRLAREQRKLSRCVRGSHNYELQKKKVARCHEKIRNQRRDHLHKLSRKIADGYDAAAVEDIDMKAMGQCLHFGKSVQDNGYGMFREMLDYKLAWKGKKMVKGNVWMVSYGDAPPKGFTFYLSFS

SEQ ID NO: 42297 - protein, 380 aa, unknown
  TnpB Polypeptide
VRRTFRYRVYPNRLQSEALDAQLGEACRLYNGALQERRDAWRQARRSVSYYEQANQLKAIRADGSLALANFSACQDVLRRVDKTFRAFFSRVKAGRKAGYPRFRSRRRYDTLTFPAYGDGCRLRPNGRLYLQGAGEIKVKLHRPVDGVIKTVSVKREAGRWYALFSCEVEPAALPPSDEAVGIDLGLTTFAVLSDGSEIANPRYARKAAAAVRRAQRKVARRKRRSNGRRKAVVLLQKAHAHVVHQRNDFHHKAARALVDRFGLIVVEALNVKSLAGSMLARSVHDAAWGMFLDRLDEKAESAARQVVRVNPNGTTQRCSGCQTVVPKTLSLRWHDCPACGLSLSRDENAAREILRLGLSLDARTWPVAASVASEAVCFS

SEQ ID NO: 42298 - protein, 281 aa, unknown
  TnpB Polypeptide
MKITRAWKYRLYPSKSQEKLLNQYFYECKTLWNSLLEFSKKYYSETGRFPSRKELYLQSKGTVLFSQVAQNVADRLVKSLKGVISRKKAGKRAGFPRFKSVDRIKSFTYPQFGFKFDDKLDLSDIGSIAIKKHRDLQGKIKTLIIKKLPSEKWFAIFTTEIEGSGVIKKEEAKVGIDLGIDNFGYLSDGGIIENPRHLKHAEEKLKDAHRNLSRKKKGSRNRRKARMKIAVAYEKLSNKRRDFLHKTSKRLVDSYSLIAMENLNVLGLARGFLAKHVLDCS

SEQ ID NO: 42299 - protein, 349 aa, Micromonospora sp.
MGCLPTLRVTGRQVRADVAYTHAVPKAQRTGHMVALGVDWGLNTLLCAGALRREADGRITGLGSGGQFRAAGVLAKQHRLRRHSERLRAKADHYQRLIDGRPDEHLQAKHEVLRDEIRHVSERRANLNQALAWAAARWAVDQAIAAAATVIYVEDLRSMEARGMGATLNTRLSQQVRGQISDRMRHLAAEAGVAVVTVPARNTSKHRPHCLTPLRHRKAPDQPTVAGWKWAICPNPSCRWQGDRDNGAWRRIAARGLTHQTTTITDKTSGQMMIRAVVDTLEASAVITRTSRRDRSKTGPTRPNTSRPAPKRRRAPSPTRPHSQAGKRPEGHAPTDRTRLPRAAHGTRA

SEQ ID NO: 42300 - protein, 355 aa, Aphanizomenon sp.
MKLKAKNQLTVTRIAILGTEKLNNWKSNELDLIALSLGKLRSDLWNEFGSLKAWGVSKFEIDKQLRTLKDKYKLPAKLWEATLYDVIDDIHLVQAACVEKVMKSLGQSFQSFPAKKGVLQLTLESREWLEHPKLCTLVRKFWYRGHTKVCNQIIVKAYDTKTDDKGVVWLRFGGLTPCKTLKLPTTLPTEIKCQIRLIKRNGRWEIHYTTDIQKAEKKTDGKIIGCDRGYTEVYATSSNDGARFLGNDFGKIQTQETDYRTAKQVKRNKIRSVFNKSTAKGNSAKADRIKRNNLGKIKWDNRERSFKGRIQTIVFTATHDLMTDAIKVAFEDLTEQIKGKKPMRKRMNPCRLHGC

SEQ ID NO: 42301 - protein, 575 aa, unknown
  TnpB Polypeptide
MLKKDYSTYCTHVSLDASTEAAVHDFMQAWLHYQTHRTVDLKKSGLLGKYDKVDCDRYRKTQTFENKQKQVLETFDARYSRAIDIDIQARAESSLECKALEIEDKQIKLGKMKKEVTKALEKYKNRQSITHDDNRELLNQAYNHYYRLLGKQQKLEGRIETLEKEIEAQTVKITFGGKSFFHQQFKKGVDFKAWQEAWANRGDRFECGGSKSEEFGNKKMHLTFPKDYDPASGKRPRFDIRILLPACLQDDHGPSIMFRNLVFRHGEAIIKQNVIAHHAYRQAKSDYEKAKRQVNKLVDKHEKEQALKALGDSPKADDFGALSFAFQVLRKNKGYYLHVSVPKVPKPKQTTAQNGVIGLDINYDNLSYANVSKQGQLVDSKVLRFNFGSKNSAAHREQMINQHLKTLVNEALTKKKDIVLERLDFTHKKSLQTKGLNKDTNRMLHSLAYRKIKENLRRLCLDHGVSYQEVNPAYTSMLGRFLYTKRYGISIHQAAAYVIARRYLQFEERFSSKTLTFLYKSRTCHLELPVRMFEEQAKLKPFQFWGKLYRWIAAEFKAPSRFYQPTLRSDSSPAC

SEQ ID NO: 42302 - protein, 399 aa, unknown
  TnpB Polypeptide
VKTYEFRLYPTQSQRQRLENYLDACCSIYNWALEDRQNHYRYAKCSTGFYDQSKFLSEMRKKSEYLTDIHVHALQTTLKRVDLAFQSFFRRVKNGENPGYPRFKGRYLFNSFSFKENGNGFTLEKKKLKLSKIGRVRIRKHREIEGEIKTCTIKRRADGWYVLFCVETEPAKPNSIVNPIGVDVGLNSFAVLSNGEKIRNPRFLKKGLEEIKRNQKILSRKKKRSNRSKKARKILAKKHLKVQRQRKDFHCKVASDLVRRFNPIFVEKLNILQLIKKATEDKKNHKKIAAKSENILDVGWGMFLQRLGSKAENAGSATKAVKPRGTSQECSGCKMIVKKGLDERIHSCPHCGLVLDRDENAAKNILQRGLLVLEEERTVPSGREQVVELLPMNREATPL

SEQ ID NO: 42303 - protein, 402 aa, Escherichia sp.
VKRLQAFKFQLRPGGQQEREMRRFAGACRFVFNRALARQNENHEAGNKHIPYGKMASWLVEWKNATETQWLKDSPSQPLQQSLKDLERAYKNFFQKRAAFPRFKKRGQNDAFRYQQGVKLDQENSRIFLPKLGWMRYRNSRQVTGVVKNVTVSQSCGKWYISIQTESEVSTPVHPSASMVGLDAGVAKLATLSDGTVFEPVNSFQKNQKTLARLQRQLSRKVKFSNNWQKQKRKIQRLHSCTANIRRDYLHKVTTTVSKNHAMIVIEDLKVSNMSKSAAGTVSQPGRNVRAKSGLNRSILDQGWYEMRRQLEYKQLWRGGQVLAVPPAYTSQRCACCGHTAKENRLSQSKFRCQVCGYTASADVNGARNILAAGDAGLACGEMVQSGHSLKQEPTEMIQATA

SEQ ID NO: 42304 - protein, 428 aa, Paenibacillus sp.
MENVCGQYGTSIEIIDHTEKTEEQELVEDLIQIFTVFSRLLQGKLANIAKKMLRELMKMILAKKVRIKPTPEQQQALLRSAGAARWVYNWTLARQEENYRRGGKFIPDGELRKELTKLKQTEEYAWLGEISAQTTKQAVIDACNAYKKMFKGQSGKPKFKTKKRSKPAFYSRYDRFKTDGTTVYLEKIGWVQTNEPIPESDKYSNPRISYDGKYWYVSVSVRQEQEKPELSGEVIGIDVGLKELAVCSNGMRFKNINKSHAVRKTVKRLRRLQRKASRKYEMNKEGTRFVKTRNLIKVEQSIRLLHRRLTNIRTNHIHLATSAIAKTKPSVVVMEHLNVSGMMKNRHLSKALAGQKLYEFIRQMKYKCERIGATFIQADKWFPSSKMCSSCGEIKSNLKLSERTYACNCGHVIDRDMNAAINLSKLAI

SEQ ID NO: 42305 - protein, 400 aa, unknown
  TnpB Polypeptide
MTQRAYRYRFYPTPEQEQLLRRTLGCVRLVYNKALHTRTEGWYERQERIDYKQTSAMLTDWKKQEDLQFLNEVSCVPLQQGLRNLQKAFTNFWAGRAKYPNFKKKRNGGSAEFTRSAFKWKDGQLWLAKCREPLPIRWSRTLPENCEPSTVTVRLDASGRWFVSLLVEDHRVKTLPQLDKAIGIDAGVTSLIATSNGEKIANPKHFKRLKRKLRQAQKALSRKVKGSNNREKARQQVARIHAQIADARKDFLHKLTTRLVRENQTIVVEDLAVKNMMKNHKLAQAIADASWSELVRQLEYKCQWYGRLLVKIDRWFPSSKRCGHCGHVVDKLPLNVREWNCPECGTHHDRDINAANNILAAGLAVIVCGANIRPDGHKSKGQLRKTPERSLRGRKQKLKS

SEQ ID NO: 42306 - protein, 432 aa, Pseudoscardovia sp.
MTAYEAVKVRLDPTPRQERMLASHAGAARFAYNLMLSHVRRQLSLGERPDWTMYAMRRWWNEWKDGIAPWWRQNSKEAYNSAFEWLSQALKNWSDSRKGRRRGRRVGWPRYKSKRTSVPRFAYTTGSFGLVDGDPKALRLPRIGRVHCMENAARLVRGRRIVRMTVSRRAGAWHAALTVERQPGTHPTAKARRRDYPVGVDLGVKTLATLSDGTVFPNPHAYARSQRKLRRAQQTLSRRDRDANHGRGSNRRRKALDRVRRIHARIAAQRADRVGKLTAWLAATYPSISIEDLNVQGMTHNHRLAKHVLDAGFAEFRRQLEYKTARTGARLHVIDRWHPSSKTCHRCGTVKAKLPLSERVYHCDKCGLTMDRDLNAAINIMVAGSAPETLNARGGDARRPGSSEATQTPVKREPSGRANAVRLGAVPGNRGM

SEQ ID NO: 42307 - protein, 385 aa, unknown
  TnpB Polypeptide
VKTIYKTYLFALRPTKEQEDLLNKHLGCARFVFNHFLNERIEQYKEEKKSSNYYQQAASMTQLKKKVETQWLKEVNSQSLQAALRNLDTAFLNFFRGHARFPRFKSKRKRNSFAVPQFVVVHDHKVYFPKFKEGIRLIEHREIKGEVKHCTISKTPTGKFFVSILCEVLYIPIQPTSKHVGIDLGVKDFAITSDGIRFKNNHHLKQYESALATAQKHLSRKVKGSNSRNRQRLKVAAIHEKITNTRLDLLHKVSTQITNAYDTICIEDLNVKGMMANHKLAKHIADASWGTFVRLLEYKSDWNNKRIIKIGRFYPSSKTCNQCGYIHHKLKLSERSWTCPNGHTLNRDINASKNILEQGLRIMGAELSHYTDGDLNQTSVKEAQV

SEQ ID NO: 42308 - protein, 389 aa, unknown
  TnpB Polypeptide
MKILKGFKFRLYLTEKWKAQLLQHGGNTRFLWNYLLKENIDYHKETKKFKFFYEMEMSLPKLKKEKEYDFLRQSYSQSLQTVTRQLDGALRDSFKKKKGFPKFKKKRDNDSFTCPQGWKLKKGIVYIPKIGWMRWRKSRNLQGKPKYITISQDGDRWYCSVACEVNIQERKKKTDNLVGIDLGLKEFATLSDGTVVSNPKHLKKYGDKLSREQRRLSRKQKKSNNRNKQRKKVRRVHQKIRDTRSDFLHKITSDMIAKCNGVVVEDLNVKGMMKNHHLAKSIADVSWSEFVRQLEYKALWNNKYFVKIGRFEPTSKTCSKCGHIQDMPLDKRVYNCEVCDLVLDRDLNAAINIRRLGASQINACGDEELSSSLKQEKEEQDNLLEAYVL

SEQ ID NO: 42309 - protein, 444 aa, unknown
  TnpB Polypeptide
VDILKYTTETRLYIKNNKDIIEYFDEVINQYSYIFRKVYYIIRNNPKIKINLLNTELQNEYSISKRTASSIIKTVQGIINSIRELKKTEIKQKQYKIEKISKKLEKLIPKLLDLKLKAKENNIKDLIKYRNLKTKVAFMKIRKDKLINKINSLNYQIETNKFKITFGTKKLFRQNLEEFLNKRDNQMIFIGSKDEKGCNQNFQLKYVFKINQFIIRIRKDFKYKDKKGEERYAYGKCFFNSHKNLLKETLESQNSPLTYRIIKRSNKYYLQCIFEIDNKNTILTRKDYGTIGIDFNKGFVTVSQTNKYGHLIRTDKMKYRFGSGNKTKNDLLLIINKLTELAINTGKDIVAEDLNFFKTKSKTMKGNSEKGKKYNKMLHSLAYRMFLNRIEQICNRKNVGLIKVNPAWTSWIAKNKFCNKMKLNIHIGAAFVIARRGMNIKDVI

SEQ ID NO: 42310 - protein, 456 aa, unknown
  TnpB Polypeptide
MLKYIQAKTGKDVDILKYTTETRLYIKNNKDIANYFEEVKAQYSYIFRKVYYIIRNNPELKTSSLNTELQNEYSISKRTANSIIKTVQGIISSIRELKKTEIKQKQYKLEKISEKLEKLIPLLLDLKLKAEKNNIKDLIKYRNLKTKIAFMKIRKDKLINKINSLNYQIETNKFKITFGTKKLFKQNLEEFLNKRDNQMVFMGSKHEKACNQTFQLEYISKINQFIIKMRKDFKYKNEKGEERYAYGKCYFNNHSKLLRQILKSKNSPLTYRIIKRNNEYYLQCIFEIDNKNTILTRKDYGVIGIDFNKGFVTISQTNRYGHLVKTDKMTYRFGSGNKTKNDLLLIIDKLTELAIYTGKDIVVEDLNFLKTKSGVMKGKSEKGKQYNKMLHNLAYRMFLNRIEQICNRKNVGLIKVNPAWTSWIAKNKFCERMKLNIHTGASFVIAKRGMNIKDVV

SEQ ID NO: 42311 - protein, 441 aa, unknown
  TnpB Polypeptide
MKVKRTGRFKVKASHPDYEMIKVHTIEAKEIYNYANYIIRQIYFKNSENHEYSMEFIHEYPELNEDFEIYLKENNQFTSTFYRIICSFSRIKEHSLNSKMVQNIVDVLKRDWKSYWKLLKLKKEGKYDKLVSIPRYKKKYSVVEYNPQTISKAKLKNGYIGTALMEEGFAIPNFYKEYSCKSARALWKNDFLYMEIIYEKEVPKARLNEKVASIDLGGKILMAVAYNFNRRGICISANMFRSLNHYYNKMIGTMASLLPKGIKTSRAIQNLWRKRDEQIRNLLGYYANRLVEELALLNVSKLIIGKSKEQKNGIDLHSELENRNFCMNPFNKLIEILRYKCQENGIECIEQEESYTSRASFLDNDFIPVYGTEDREYEFSGWRNRRIYKIKGKNQRIHADLNGAFNIMRKAEHELLEDISFLKKSWIFPIGKYKVKNFKYS

SEQ ID NO: 42312 - protein, 441 aa, unknown
  TnpB Polypeptide
MKVKRTGRFKMKTSHPDYEMIRIHTIEAKEIYNYANYIIRQIFFKNSENHEYSMEFVHEYPELNKDFEIYLKESGQFTSTFYRIICGFSRIKGHSLNSKMVQNVVDTLKRDWKSYWKLLKLKINGKYNNSVSIPRYKKKYSVVEYNPQTISKAKLKNGYIGTALMEEGFAIPNFYKEYTCKSARALWKNDSLYMEIVYEKEIPETKSNEKTASIDLGGKILMAVAYNFNRRGICISANMLRSLNHYYNKIIGAMTSILPKGIKISDAIRNLWRKRDEQIRNLLGFYANRLVEELVSLNVAKLIIGKNKEQKNGINLHSKLENRNFCMIPFNKLIEILKYKCQENGIECIEQEESYTSRASFLDNDYIPVYGKENKEYEFSGWRNGRIYKIKKKNQRIHADLNGALNIMRKAGHELFEDIPSFKKNWIFPIGKFKVKNLSYS

SEQ ID NO: 42313 - protein, 448 aa, unknown
  TnpB Polypeptide
MLKQKYTTVTQLHEINNKDIIEYFENAVADFSKLQRKAFHIFKNENITGNKTEYKKFRQDFMKEHNISRRTADSVLRNVQGRMKALAEFKKFEFSQKERKIKKLKEEIEKLDKKISEFQEKMKSKIKVNHFKYWNLKKSRAFKKMKLNKFQMRLEQLKWEIETEHYKLCFGTKKFLKSDKNKFISQRDSQMTFIGSQDENGRNHMFQMEYNNKINQFKIKIRKDFGFDNKEKYVYGKCYFNHEKNKLIKVLGIKNSTPLTYSIIRKNGKYYAHCTFEYRMEDKSSFLTRKEYGTIGVDFNKGFLTVSEVDKNGNLLNTEKLCYRFGKGSKTKSDLEKIILYIVRKCIETGKDLCIENLNFKNTKADISKAFSEAGKKYNNMLHSLAYSLFDKLVTNIAFRNKVDVKKVNPAWTSWIAKNKFCERMKLNIHNGAAFVIARRGLGIKDTI

SEQ ID NO: 42314 - protein, 385 aa, unknown
  TnpB Polypeptide
VQRTIRLRLTPSPAQALALTETRRLFTAAFNQFVRLGWDAGVSHATKLHYLAYYPVRSSLPTLNSNLINTARAKAAEAIKSAFALRAQQRKVSMPQSDACPPRYNVHTYRMDWASQTVRLSLVAGRQTIRFDVPDYHAHYAGYPVDTADLINRGGVWWLHVVVTVPAPAVEPTDEVVGVDLGVAQPAVTSNNRFLGKPAWKAVEGRLFYLKRQLQRKGSKSAKRHLRKVRGKQARFRRDCDHVLSKQIVRSASPGATLVLENLTDIRTRSKIKKKTRTSRKVHRWSFAQIKGFIAYKAEERGCTVAGVDPRHTSQTCSCCGHVARNNRRSRGRFVCRTCGFELHADLNAARNIAAKYHASAGRPLTGGLPVNQPIVSVLVPRHQE

SEQ ID NO: 42315 - protein, 374 aa, unknown
  TnpB Polypeptide
MRTYKFRIYPSKMQETEMCKHLWIEKELWNNLLEANKRNYLEEKKFLTKKELQKMVKNKGLYSQVAQTLSHRLHKAIWRMVKLRKQGKECGFPRFKNIDRMKSLNYPQFGFSFGNKLKVTPFGEISIKKHREVEGKIKTLSLKKEASGKWFATFCVEQEPKKTMQNKGEKVGIDLGLMTFATLSDGTAIKNPRHLKKYEDRLAWQQRILSRKKRGSTNRKNAKLKVARLHEKVSNARADFLHKLSTQLVRSYSLIALEKLASRNMAEQNFGKSINDAGWNMFANMISYKAESAGCQVVFVDPKNTTQECSRCHDIVKKDISVRIHDCPFCNLVMDRDLNAARNIFIRATAGQVGSKLLENGTIVLSMKEEAHTL

SEQ ID NO: 42316 - protein, 439 aa, unknown
  TnpB Polypeptide
MKITSTYSVRLRNFNRVFDDTVEVYRHAVDYFIELVMANWNTHFANLSRANDCIRVAEGLSVRTKKRPMTPYNFCHDFEKFPCYLRRAAIMAAYGQVSSYQTRLAQWKAKPGQKGRQPGLPKAGRSFPVMYRDNTFIRAGRNSVKLKVRIRNTWDWVDVELDKHDVDYIALHCAARNELSPALRKRGKKWYLDFSFEEKVILDKVSLDTQRVLGVDLGINNACVCSVMDSKGTIIGRRFKKLPVEQDSLERALRRIRKAQSNGAKRTPRLWARANGVNQDIAVKTANFIAGVANEFKVDVIVMEHLDLAGRKRGSKRQRLHHWRAKSVQKMVEHKAHRCGIRIRRVCAWNTSKLAFDGTGVVTRDTNNYSMCTFQTGKRYSCDLSASYNIGARYFLREYEKSISVTKWRRISAKVPGCAKRVTRTLDTLIRVCAELRSM

SEQ ID NO: 42317 - protein, 684 aa, Burkholderia sp.
VSGIACTSYCSQSCAQRTRSTSHEPPSIHHRFAPLGQAKNWAKPHRSRATRFQAPHRHRRQRYAARRDPDRRERQRRHAIAAADRRDSADPRIAWPPIAAAACGLRGSRLRLRATSARVARSRYRASDRQAPYRTWQRPWQISLGRRTHACLAASLPSSPYSFRAPCRHSRRVPQTRLLSDLLEYPSAGRSVFMKPSLREWACSDCGVEHDRDTNAALNIFRCGRASPGVGILPLKEMRASKEEHSEVKRTAHAPVQRHGRNRDGRDDHLGHMRRRELRAAQPFRAEPRRNRGPHRRTHDGRRRPAGRETAERAERGEHGRVVMPRRRRPDMAPIGRAMLLVQQRIEIHLRLRADARSPACGTHRMHDARGVGVDDRPRMLAQREHQVGVLAPRAREALVEAADAFERRAPHEAVRGREFRVREPRRVAFVVGRARPQRHVDPAGRGRRRRLGQQRGGTVAQPGRIGNRVVVGECDQRAARAAPADVARTGRPLRVGRGHVADHRHVGHARAARIDDGARTAGRIVVHDDDLVGGRIEHLHAQRVEAAFEQIGPPVGRHDDRHDRRQVRVAHVHLGFSSRNGPITSASSGDVQKHSIASRGEHTIGSPRVLNDVLTSTGTPVSASNSVNSACSSGCWLSSTVCTRAVPSMWRTAGILSARSGTTSYTNSMNGARSGVPRPPLNQ

SEQ ID NO: 42318 - protein, 411 aa, unknown
  TnpB Polypeptide
MHVIIPATIHQGNFVALKQLMRDWGSCARYAYQRTHKDGLTGNAIKVACKPLYMKKLNQRYIADAVFKTQEIKKDHVIFGGKKRWRNFLSGLLPKKEWQEARDSELYSRGDRSLKGNPNIRVLSTPAGYKLRVGLPGPREFLMFDLYIPEGRKNNKKNYKELLDLYGDCYDVRINNKSGKFQVSIGVEVPDVKPTYLCSNGVLGIDTNPDGLAVVEIGKDGNLIRHEFLKCNRLQFAQHDKRKSDIEALALQVINKAILANKGIVIEDLKFNDGKHGSRKFNRMRHNFIYSQLLKAIERRAIKDGVEIRKTNPAFTSIAGILKYQEQYSLNRHTAAALIIGRRGMGIMEKIKVKVELGENKKLNLAGRGFKIALTVKAYAYFRHLYRVMEMKTPGLTAPCLTPMLGNYGTS

SEQ ID NO: 42319 - protein, 417 aa, unknown
  TnpB Polypeptide
MEVRRTVPVTLDVDSDDDALLHNTVDEFLFAAQYVVDYAFQGEYVTTSKGQLQDETYDDVCDQTPLNTGLVQNARNKAAEACKSVVKHWKNGKKASKPRMTSPHVVYDHRTATFHDDYVSLATTDGRIEADYVLPDKDSDTPHAEYLFSDEYETTGAELHRKHDEWQLHIHCKKDVESDTPEQATTENGTVLGVDLGVNNLAVTSTGTFWTGDEFDHWRREYENRRGDLQECGTRWAHENIQSVGRKEEGRFKQTLHRISNEIVAEARDHGCSVIAFEDLTDIRERTGASWGHKWAFNRLYDYVKYKAAEYGIRVEQVDPENTSQRCSTCGFTHPDNRERELFNCQKCGYENHADYNAAKNIGLRYLRRNQTGGDEGAPLGVRLNSGTLNVNGEYESPADVSARTGVHAESHRFSGG

SEQ ID NO: 42320 - protein, 366 aa, unknown
  TnpB Polypeptide
MKTLKLRIYTKHNNKLNRLASAVNFVWNYVNDLGFKYLQRKGKFLSAYDLNDYTKGSGEYFDLHSQTFQAINEVHAKNRKQHKKAKLNWRTNNPKAKRKSLGWIPFKKSAIKLLKTYQTNKTALKSKLQFSLSKGQKLIITVYDHYNLSNYELNTCDIVQDSRGRWYACITVKDFPKSKCGTGSVGLDLGCKTAVTCSNGNKLETKFTHKYAEKLAKAQRANKKNLVRSIHAKIKNSRLDAIHKFTTNLVKHNAFIALGKLNSSNFTSTNLAKSVYDASWFELKRQLEYKCEYAGCLLEEVDEKYTTQTCSHCLNISSNSPKGRAGLGIREWTCSHCGTTHDRDVNGAKNILRIGRDTLAEGSPLL

SEQ ID NO: 42321 - protein, 448 aa, Rhodococcus sp.
MWSPVESRVSCRTVLRVASLPRSDSPATWRSRPRCGAATAFRSLSITGSSTPTRLLSRTARDRTIFGASPVVHGRGQPIPRAVCVGGRLYGAGVQLRYRYRVYPTPGQQDMLVRSFGCARVVFNDALRARQDAYAAGAKISDTAVQKQVVTDAKKTPQREWLAEVASVVLVQACQDARRAYRNWFDSLSGKRKGRRVGAPRFRSRKDTRQSIRLTRNGFGIRDNGKLYIAKVGELKVAWSRELPSEPSSVTVVKDSAGRYFASFVVETTDVPLPECDAEVGIDLGLTTFAVLSDGKVIESPRFFRQAERRLRKAQQNLSRKAKGSRNRAKARTARRRLTRGWPMPAKIGRTSNPRRSSARTKRCMSRICVSWGWRGRGWRSRCTMPGGGCSLGCSRRRPPAMGGSSSGWTAGSRRRGCARYAASRTVRNRCRCGCGPVRGVVWSTTGI

SEQ ID NO: 42322 - protein, 395 aa, Frankia sp.
VSRYRLYPAVEQIAGLAEHCGHACFVWNLAVEQQGWWSPYRGKAPNHLERCRQLTEVRAEFDWLRAGSQTVQQQALRDFDQALRNFFGGSHRKPGFRKRGQSEGFQIVGRMAKVEKLSRKWSRCWVPKVGWVKFRLSRPVPDFKSYRITRDRAGRWHVAFAVAPNPVEAPGTGEIVGMDRGVKISAALSTGELLRCPGLRPAEAARLRRLQRRLARARRGSNRRGRVKAQIALLRAREADRRKDWAEKTSTDLARRYDLIRVEDLNIRGMTRSARGTVEAPGRNVRQKAGLNRGILANGWGLLVQRLEQKASGRVEKIPAAFTSQRCSACGHVAPGNRESQAVFRCAACGHTANADVNAACNIAAGRAVTARGGAGLPVPANREPQHRAPPMVGV

SEQ ID NO: 42323 - protein, 379 aa, Clostridia sp.
MKTVIKGFKYRIYPNPEQEVMLAKTFGSCRFVYNHILAMRIEAHKNESKSMSKTDCNNFCNREMKKEFEWLKEVDKFALTNAIFNLDSAYQNFFREIKKGNKNQGFPKFKSKRTNYYSYTTNFTNNNIKAFFDDGLVQLPKVGKIKAKLHRKFDGRILFATVSKVPSGKYFVSFNVECEHSESPVNDSSVGIDLGVKEFTIDTNGIHIDNPEYLKQYEDKLAKLQRQHSKKVKGSNNFKKHSKKVAKLHERIVNLRTDFQHKLSSKIINDNQVIVTEDLFIKGMVQNSRLAKSISDVAWGEFTRQLGYKASWNDRLYHKINPWFASSQLCSDCGHKNKEVKCLSIREWMCSECGSTHDRDENAAKNILNEGLRELGLLM

SEQ ID NO: 42324 - protein, 560 aa, Streptomyces sp.
MKQEKRKLRTIAPPFVVLGPSGVAVRDRLKRLASEDEKVLRLVGEHLGVLASMDLKARCADADEHSSDTWAARKKGLTAASSSRWAGAITKATHDQWALSRRCQLAHIQGLEAGVRTLTHRLSLPVGEKGAKRAPGGYRSKGEWFQKTRRLHILEHRLDVARAEREAGVVHVVRGGRKLLHTRHNLDAAQLSEAEWRERWEAARWFFAADGESGKRYGNETIRITPGGEVSIKLPAPLAELANAEHGRYVLASKVAFAHRGTEWADRVEANRAVAYRIHYDTGRGRWYLTASWQRPVAKTIPLETARSHGMAGVDTNADHFAAYQLDADGNPVGDPKRFFYDLTGIAQHRDAQIRHAITQVLHWAKRCGVAAIAIEDLDFTAEKTREKHGREKRFRQLISGIPTGNLKARLVSMAAETGLAIVAVDPAYTSMWGDQHWRKPLTAPRRKMSRHDAAGIAIGRRALGYPIRRRTAPPHDDQSDRRGHRTVQAGPGDRGREETRPPVTERARDARRRAGTQQGTRGTSTSKTVRDARSTGTWTQCSLLDTDSLGTVSATQPER

SEQ ID NO: 42325 - protein, 452 aa, unknown
  TnpB Polypeptide
MGNARPGTALRQHLRRLKMLEAVKVALDPSPTQQRMLQSHAGGARFAFNACLAHVKACIEQNVKPPWSFYDLRRWWNANKNLLAVNTDTGEVWWPRNSKEAYSSGIEALAKGLANYSGSKRGVRRGRRVGFPKFKSKNKSVASFAYTTGSFGLIPGDPKALRLPKIGRVHCFENAAARVGEGRVLRITISYRQGRWWASLCVQRETPSPNKPATLGPVGVDLGVHHLAVLSTGEMIENPRPLKNSLTRLKKAQKSLSRKTKGSTRHKQAKARLSKVHARVTNQRTDCLHKLTTRLASTHRTVCIEDLNVAGMGRNHHLAQAIYDASFGQLRHQLEYKTQKFNTQLRTIDRFYPSSKQCSGCGAVKTKLSLATRAYHCQACGLVIDRDLNAAINILVAGSATETINAHRGDIRPKTTKWLRAHSNEMRTKQPAQTGIRLGADLGNEAIQTKTN

SEQ ID NO: 42326 - protein, 584 aa, unknown
  TnpB Polypeptide
MPQKDVREVSRLTPTAVERRTLESFLLPGNDWRYLRRDHPQVYRTPVKTVLTKGGAMPKARKKKNSSFQTTITKSVFLYGRPNKEKLVILQQMQNSYTALINRDIDLLEKNPDIVLQLVKNDKKDPQMRKLEKAIRPEGINSAFCQNAFDAAVVQVSGRLNNIRLDLLSEGMGIFAQSKVLFAMSVMGCSKQKMEETMRQIEGTFYEDCTKTLHELSEKEFSDLQLEFQERYASKSLEYRVPKLCFVSVPLDLRLMKIEQSTDTKMPYVIIITNPLKTRQRITIPIDTSRHFLHKIQNNKMAGTVLMQVRKGNLRIGWSYDSARQQPATTNCIGVDTGISDCFHTSDGRAIGSMSPVIDFYHEEVEPAFAELAGLRNKKRKIKHFLRKHDLSEDVRRSLIKKMDHLERMIQTAEAPYRKKRCYYAQLDHEIKKSVTTYVDSISKDTLTAIEKLDIKEFNKSRKVNGMFSTFARGKLQRKLMEVLNQKGCDFFEVEPDFTSQVCPVCSNLNAENRHSKGFCCTSCGYQDDADHVGAVNIRKRAGDREILELCKEHQYSHKNLQNAIRIVYEKRHIAYKTKQAASA

SEQ ID NO: 42327 - protein, 367 aa, unknown
  TnpB Polypeptide
MLKAYKYRIYPNSGQKIQIAKTFGCCRFVYNRTLAYRKGIYEKEKKSVSKTDCNNYCNRELKKDYEWLREVDKFALTNAIYNMDCAYQKFFREHAGYPKFKSKHDSHKSYTTNYTNGNITVDFENGKVKLPKLKAVKAKLHREFRGQIKSATVSQAFSGKYYLSILVETEHKELAHTNDSIGIDLGIKDLCITSDGKKYENPKIIRRYEKKLARLQRQLAKKEKRSQNYYKIKKKIAICHEKITNTRKDYLHKMSHEIISENQVIVSEDLQIKNMVKNHHLAKSISDVSWYELTRQLGYKAEWNGRKYIKINTFYASSQLCSVCGYQNTEIKDLSIREWLCPGCGAKHDRDINAAKNILAEGLRQIA

SEQ ID NO: 42328 - protein, 286 aa, Helicobacter sp.
LPKDSVIKQAFISCIADQYFCSLSYETKEPIPKPTIIKKAVGLDMGLRTLIVTSDKIEYPHIRFYQKLEKKLKQAQRRLSKKVKGSNNRKKQAKKVARLHLACSNTREDYLHKISDEITNQYDLIGVETLNVKELMRTYHSKSLANASWGKFLTMLEYKAQRKGKTLLGIDRFFPSSQLCSYCGVNTGKKHEGITKFTCPYCNITHHRDYNASVNIRNYALGMLDERHKIKTDKARVGIIRSDYTHYANGCIKACGASSNGVISKYGNILDLASYGAMKQEKAQSL

SEQ ID NO: 42329 - protein, 327 aa, unknown
  TnpB Polypeptide
VVNLFIDSFWTDCPNKARLHKPIVDSVSSWFSARLRKVAAREAIDMILAARGRYKEKAVKPTHRGNRMCVSSTTAELLPAKRAATFDSWLHLQSIGEKIILDLPVKYHRQFKALAGRGKRLNSYVITRDSVQFAFEIETGPKKRPTAGIGIDTGIKALASDSTGAQYGRDIEGVIERVRRCRHGSKGQARAVRALKQRMAEVAKEVTNRASLVVVEKLTGITQGTKAKRRLGKKARYTVGRWNLRHWLERLQMTCEDRNVSFRQVRAAYTSQTCPSCGLVDRRNRAGEVFLCRNCGLSGNADVTAARNILARFLSGPYGAGCKAMSV

SEQ ID NO: 42330 - protein, 592 aa, unknown
  TnpB Polypeptide
MITTIETRLKLDLTKESDIDSCVVLWSEYYHKVWKLWNNKHLSESDIYHQIMSLNLLTSEQVGSLINKVKTEHSKIKELSKVQLKNHQSKLDNINKFITKESKLISKYQKDIITLKSKKKLDYPKIAKLTNSIYKKSLVISQKKIKVNRLTKSINLIQQRINTNTFKLCFGSSQLLKQRPGNHSDKFRISKEQKVYNNLSDWKKDWDLSRNNIWYSVGRASKPQGNAEIQYYPNEKKLRLRVTEKTYLHRLELISNQTNISVEDLNDHKIIKYGIYRKQARFIEIENVEFCAKNQTKLIQAINNNQPISAKIIKKLSPNGKYIGYYIQLSFEEIIQSSQANLTELTMGIDLNQKGLAYCIVKQDGNKLNHIKSNNIKYKPTGFIQWDLENKTTEQRQWIISNKITELLAIAKSFGIYNIAIENLDFSSTINHMNSGYKSNQKYNKMLTQFAKSQFSEMIHRKTEILGMKLYLVNPTYSSVGGFSKYGFINKIKVDISAALWLARQSIYGSCYKTEKNISFIKKHNEGITFPYLNISKQSKRDNLDKFEWKDISLSLGKERKSWYKNIMNFIQSKVVEAQSKQEFNPFEVNQG

SEQ ID NO: 42331 - protein, 588 aa, unknown
  TnpB Polypeptide
MKKSNTSTLFKSYILEHKSNPGKVDSLFDLYKVYQSEYKFHMTNYWTLFTKNQINNNKFSHLGSTKHIKTQLNSAYLQCLLSQVCASLNNYTANIATKFSDFINHSSIKDKDLLHKLRTINSKHAWLNQNVTYYTNLRMDDYGFLFESNSKHEVLIEKSVLRLARKIFNHIVDKDRVRFPNINKPRLLIDDRLYSLEPSKTSTFDYWLKITTLTPGKRIAIPINKNTYFNLAKGSIGKSIELDFKSYDYSVVQHKYNSLSKGNGKKLIKHKFNKVNKQVRFIFNKKIELDDYFNNLKFDNQVKDKTVAFDLGLCNFIATSDGELYGQYWLYKLKQYDEKLTSLLADRQYCLTNYNKQNPNNKIKIRSKRYDNLINQVRGFIKTETNRILNQYFNKHQDIKTVVIEKLRFSSPELSRRLNRIIQNFGYQLFKSKLEELSLFYGFKIEELNPAYTSQQCSNCGYVAKNNRKSQSEFRCECCGHEKNADVQSSRTNLKRFEDKQGSAYKALYKGTILRKVKLNFSNRIEYLISNGIVGRRNLYKLLLKNSYFNNDIREIVRTTEASGVKPMTVMNYDKYLKEYLSIIPNKI

SEQ ID NO: 42332 - protein, 462 aa, unknown
  TnpB Polypeptide
MSPVSCTHAISLQYQVRTSRTGYREIERLLPLLGEFQNAAVRHRQKLARMGVPTHEILRHQNTGITDLRAHDPNFGNISRRIVESVAKRVNNAYYRAFTVPNAGFPRTRSPHAFRTLEVSEPAIQHIQFRDSGIAEIHIKGLPVLWFRTDHRINVIEQPRAICITKHGRSLTATLVYQFPDYPPQPARLKSCGIDPGVAQRLTVVDNQAHYRQYPGIDTTQHRKTVRRLKRRIQRCRDAALRDGRARWVNYRRGDGKPKRRFRWMTKPSRKYLQTLAQLRKVEHTRIKTMRAEEHRITTQIVQDHALIAIEDTATSNMTRSAKGTLENPSKNVAQKRGLNRSILSQRWGAISSKLEYKARWYGRQFVKVPAAHTSQTCPGCGHVAAENRPTQDNFRCMRCRQGFNADVVAGENIRLRGGNPTAGAGNPAVRSAPVNSRRPSGKKQRIRALQRPLLLFTTTRS

SEQ ID NO: 42333 - protein, 499 aa, unknown
  TnpB Polypeptide
MSHATKTISQQLDYRPEIAGWFEKTKVLFNKVAAFYFDVIEAHQEVLKLDGNGPRDTLEHLTHRTKANPEPRLPLAAVVDNVPALMRRTAIQAALGVAHSFHSNLARWQREKEQASDKGKKFRKRPPVPPRRWNKSVTFYAGMWKQRTATGILLKLWTGTSWCWVKLHVLGRELPEDWKAGSVQVVQHGKRWWLHTFVQKDVSISGTVKEQVMSTPDLRVCSVKLSVNETLAVCTIQTREGTALASRFIGDGRRLNGLRKSLLGRVARHRNDTDLIALGEADNAHLWTRVRNLDDQVAHRISRRIVEFAHAHGAAILVFEHPSPHHPKKGTYSQRENEKRTIWLCDRIYRYTRYKAWAEGIVTCLVSSRQNSRECATCTSPVARYSEGQAISGYSPDTRLVLCEKCGMRGNADRNASLNIGKRLFARYQKQEKPHARPLAGRLSKERGVPVSEVAECGGRPHANPARQGDGGGHGTAQGQRRGVARTGQVFLAEYGPVE

SEQ ID NO: 42334 - protein, 351 aa, unknown
  TnpB Polypeptide
MIQHQIKLRPNVKLEAALDEWLWMLTGVFNFAVRKIQLDAKDGIYYTPNGFQNLLAGHGRKIGIPSHTVQGVLATVHAAWQRCLKKQGGRPKLKGQRNKLNSIPFPDPIRAPDGNYIRLPGLGKVRFHRQDLPDGKIKCGRLVKRASGWYLCVFIDAAPKAIERTGVGEIGIDPGFKDLLALSTGEKIDHPRELEASARRLAQAQRGKDKKLASRLHERIGNQRKDRNHKLSRRLVAENVVIVFSKDNNKAIAKKFGKSVASSGHAQLRSMLAYKSHIGGTRYIEVASRNSTRTCSNCGSLSGPTGLSGLAVRQWACGCGAIHDRDINAARNALIAGAGTALESGGLRHVA

SEQ ID NO: 42335 - protein, 377 aa, unknown
  TnpB Polypeptide
LLKAFKFRLYPNKEQTTSINKHLGSNRFVYNHFLAKRIEMYKDNKQTLTYNQCANSLPQLKKEFEWLKEIDSISLQQTLKNLDLAYQNFFREIKKCNSNQGFPKFKSKKDNHKSYRTNVTNNNIRVEENRVKLPKLGLVKFAKSKEVLGQIKNVTISQVPSGKYFISILCEVMEPIKLPKSDLNIGIDLGIKDFAITSEAEIIDNPKYYRKYEDKLAKLQRKLSKKQKGSKNRNKVRIKVAKLHEKITNTRKDFLQKISTRLINENKIICLEDLNVEGMVKNHKLAKSISDASWSIFITMLTYKANWYGREVVIIDRYFPSSQLCHVCGYKNVEIKDLNVREWTCPECDSHHHRDINAAINIRNEGLRTVRISSVNK

SEQ ID NO: 42336 - protein, 342 aa, Salinibacter sp.
MNLSVLNLSVLNLSVLNLSVRGLFSPSAVRQNAMYLTRKLKLGRTDQLDRLARRAGHLWSTVAKLHWRFVDRQGYWLSKGQAQKMYCKGFDGLHSQSAQAIADSFYDSLQSLRKKRDNGSYEGLRPPYKQKRYFKVQWKSSAIKLRDDGVLRLSNGRGTDPVLIDWPVGKEPKRAEIGWDGSQHELRCQYKVEENEEPKGQKKAGVDLGERHLATVYVENGENISVRGGRLRSLRRQHNRMLSTLRSKIDRKEKGSRRWKRLIRAKNRQLQKIRNRIEDFLHKTATRLVNTLHERRVGSVVVGDLTGIRERISYGSRMNQRLHQWAYSKFEHMLTYKAQLRG

SEQ ID NO: 42337 - protein, 404 aa, Salinibacter sp.
MYLTRKLKLGKTDQLDRLARRAGNLWSTVAKWHWRFVDRQGYWLSKGQAQKMHCKGVDGLHSQSAQAVADSFYDSLQSWRKKRDSGDYEGLRPPYKQKRYFKVQWKSAAIRLRDDGVLRLSNGRGNDPVLIDWPSDTKPKRVEIGWDGSQYELRCQYEVEEDQEPKGTKTAGIDIGEIHLAAVYTGDDSWTFNGRELRSLRRQQNRTAARLDSKIDRKEYGSRRWKRLVQAKDRQLGKIRSQIKDLLHKHSTRLVKTLHERRVGTVVVGDLTGIRNGLDYGSKANQRLHQWAYGEFVRMIEYKARLHGMTVKRVGEAYTSQECPSCGNRHKPHGREYICSCGFEGHRDLVGASNIRKKYLGQDSVRVAGEMASPTGVRYRPHMRCNPASSRKAACQWQGCRPVG

SEQ ID NO: 42338 - protein, 425 aa, Salinibacter sp.
MYLTRKLKLGQTDQLDRLARQAGELWSTLTKWHWRFARRQGYWLSKGQAQKMYCKGFDGLHSQSAQAVADSFYDSLQSWRKKRKNGDYEGLRPPYKQKRYFKVQWKSGAIKLRDDGVLRLSNGRGNNPVLIDWPSEKEPKRVEIGWDGDQYELRCQYNVEEDQEPKGTKKAGVDLGERHLATVYVENGENISVHGGRLRSLRRQHNRMLSTLRSKIDRKEKGSRRWKRLARAKDRQLRKIRNQIEDFLHKVTTRLVNVLHERRTGTVVVGDLTGIRERIKYGDRMNQRLHQWAYSKFEHMLTYKAQLRGMTVERASEAYTSQTCPSCEHRHKSNGRDFNCPQCSFEGHRDVVGARNILNERYPGDEPTGSTQVAGEMASPTGVRYRPHMRTEPTGSEPQRCNPATAGKTCTEPRGSSRQAGRPVG

SEQ ID NO: 42339 - protein, 202 aa, Salinibacter sp.
VPRGLDFGLKDFLVTSDGEKIQAPELLRKSLEEVQDLHKKLSRKERGSNNRKEAKRRLAKKYRQIDNQRKDFHFKLARRLFSRYDVVYIEELNVGAMKELWGRKVSDLGFASFVKILEHVAQKEGKEVRKIDRWFPSSQTCSDCSHRYEDLSLEERTWTCEECGSLHDRDLNAARNVLERALSSAEAGVRPSGAAARDATSK

SEQ ID NO: 42340 - protein, 392 aa, Salinibacter sp.
MHCKGYEGLHSQSAQAVADSFYDSLQSWRKKRDSGNYEGLRPPYKQKRYFKIQWKSSAIKLRDDGVLRLSNGRGNDPALINWPSGQEPKRVEIGWDGDRYELRCQQKVEEDGEPKGSKTAGIDVGEIHLAAVYTEDESWTVNGRELRSLRRQQNRTKKKLDSKIDQKEYGSRKWKRLARAKDRQLRKTRNQIKDLLHKQSTRLLKTLHERRVGTVVVGDLTGIRESIGYGSKANQKLHQWAYGEFARMIEYKARLCGMTVERVGEAYTSQECPSCGNRHKPHGREYICGCGFEGHRDLVGAANIRQKYLGQDEPEGSPLRVAGEGPKRSVMASPTGVRYRPHMRCNPATVGKTSTEPKGSCGQAGRPVGSGQRSPQENLPALAGGEVKASET

SEQ ID NO: 42341 - protein, 368 aa, Salinibacter sp.
MYCKGFDGLHSQSAQAVADSFYDSLQSWRKKQKSGTYEGLRPPYKQKRHFKVQWKSSAIKLRDDGVLRLSNGRGNDPVLIDWPSDMKPKRVEIGWDGDQYELRCQYKVEEDEEPKGTKTAGIDIGEIHLAAVYTGDESWTVNGRELRSLRRQQNHAQARLDSEIDRKEYGSRRWKRLVRAKDQQLEKIRNQIKDLLHKQSTRLIKTLHERRVGTVVVGNLTGIREGLDYGAKANQRLHQWAYSEFVQMLEYKARLHGMTVERVGEAYTSQECPSCGNRHKPHGRDYICGCGFEGHRDIVGASNIRQKYLGQDKPKGSPLRVAGEMASPTGVRYRPHMRTEPTGSDPQRCNPASSRKTSSERQECRPVG

SEQ ID NO: 42342 - protein, 376 aa, Oscillatoriales sp.
VRKIRVYPDSKLSQIWRHWLAGCRFVYNRCIEAFKNGFQGSSYDLEALVLNDLPDWLKTVPRHPKANAVQDAYDAWKQASSNNGEAKFRSCRQSVSTIKFKNGNFIKGTWFPQLSKGCSFESSQPLPQSCNYGTQLVRDRRRWFAIIPEYIPTEPTTKNKAIALDPGVRTFLTGYDGETVLEIGKGDIERIVRLCFHLDKLISRAYQKQVKTKHRRSLLRAASRIRIKIRNLVDELHRQVASYLVGNYKVVFIPTFETSEMVLKSKRRINTKSVRSMLTWSHYRFKQLLTSMSDRYGVIIVETNEAYTSKTCGKCGHAHTKLGGNKLFKCPECGYVADRDANGAFNIMLKALAGTPFTLTGDAIEVFSDVGLVQDI

SEQ ID NO: 42343 - protein, 493 aa, unknown
  TnpB Polypeptide
MLREGEAMAYRAQKQSSKKRKKPVKRSGIRRVEQQVITTSSPLYALVDDYCFRAKNVYNATNYICRQQFFSAKTFPDKGTLLKLVPLEPCYDEFKGLARTFQEIVNLVFLSWKSYEKLEDKYRKDPASLKGEPRIPRYKHKVNGRAPISFTYQQLKESCGYISFPQEFCLDGKPVKIKSCSKGALMQVRIIPKTGYYVLEIIRLLPLPKKKSDNGRYLGIDPGVDNVCAVASNCGLKPLLVSGRALKTINQMYNKLIAEYRAKWDKLNKDSLNRQLMEKGLPYKKSSKRIDALQRNRVRRIDSILHKISRLIADYAEQNNICKIVIGKNVDWKQGTHMGKVSNQNFVCIPIARLIEMIKYKAEEYGIEVITIDEKHTSGTSFWDGEEPVKEFYNKSRRVTRGLFKANDGTLINADINAACQIIRKALPNAFAKHTLRVNGSLGTMCNAGGSVEGICGNPVSLRHYGTYESVKKALLSPVRLEAGETSGAYNLP

SEQ ID NO: 42344 - protein, 397 aa, unknown
  TnpB Polypeptide
MSRVKDGAVIRAYRYRIYPTRAQEARLRETMRLLCELYNAALQERRDAYKKQGRSISEYQQQLELKEVRVVRPEYTGIHVHLLQDAITRLDRAYRAFFRRCKAGETPGFPRFKGRGRYRTFTFRDAINRNGARLVAGGTKVELSCIGKVKVKLHRPIVGTVKQVRVTLAGDGHWYVTFVCDNVRVEHLTATGASVGIDVGVTTFAALSTGETVENPRRYESALQLLKTADRKVTRRKRGSRRRRKAVVLLAKQHDRVRRARLDFHHKAARGIVARFDSVAVENLSIKGLAQMRLAKQVHDAGWAQFIRILAYKAESAGREFIKVEPRGTSQECSGCGATVRKSLSVRVHDCPHCGLVLDRDVNAAKNVQSRGHRDRGGASCKRLVEPRSRSEADNAS

SEQ ID NO: 42345 - protein, 299 aa, Clostridiales sp.
MQKGVKFRIYPNKEQQTIINQTLGCCRLIRHPQFKSKHNRHQSYRTINQGDNIRIVGKYIKLPKLGYVKVRQSMEVGKINNVTIEHTPTGKYFAVLNVDFEPQPMLNQGGSIGIDVGIKEFYSDSNENTVSNPKYLEKSMRKLIREQRKLSRKEKGSSNRNKQRIKVALVHEKITNQRNDFLQKQSTMLIRENQTICIEDLNVKNMMRNHKLAQHIGSASWTKFFDMLSYKATWYGNDIVKIPTMYPSSQTCSYCGYKNPLVKNLAIRNWECPKCQTKHDRDTNASINILNKGLQMQST

SEQ ID NO: 42346 - protein, 339 aa, unknown
  TnpB Polypeptide
MAAGNRKSISAAEGRTTQYTVIKVRLHPTPVQTALIEKTFGCCRYLWNRMLADAREFYAATDLHYIPTPAHYKREAPFLRDVDSQPLCTVHQNLRKAYLNFFRDPSSFQYPKFKRKKDRADSFTVYCRQYRTGPSISLTSGGVRMPKLGCVKAVLHRRPLHWWSLVSASVSKTRSGKYFCSLLFKYSVKEAEPVLPAPERTLGLWASPVHFYLDSLGRAPEPPELAKSREKLRRMQQRLSRMQRGSRNYEDQLRKLRLLHEHAANQRRDFLHKESRRIANAWDAVCTGEGAAGSAPGFGMFRQYLQYKLERQGKRYIVVDGLAETAEDVKRQGLAQICA

SEQ ID NO: 42347 - protein, 400 aa, unknown
  TnpB Polypeptide
MKQTIKYRLNPNFEQEKHLHNLCSIATKLYNTDNYQRRQGWNKTGKIPSVYTQKKLLKDNHWFKLLPSQTAQEIIFNLQRNYNSWFKLRKKDDKANPPMFRKKDMLSVISFYQQFKIINNKIQLSMSRKYKKENNIKLMEMEFDKWRESKGIPKFCQIIFKKGQWYANVVYEIPETEVNLNDKVMAVDLGIINTAVTSDTEGNSKIYSGKQILSIQHYFNKEKAKLQSKLTKQYPNRHSSRALRILQNKQTRQINQALHTHSKAIVTDCVNKGIKTLVAGDVTDIRKDKNFGKKNNQKLHSWSFSKFTQQLEYNCMKVGIRFVRVNEAYSSQTCSHCGQVRKSNRKHRGLYVCKACEYKLNADVNGAVNILKKYLQDFLSRSIGKVALPSVARITNVCPS

SEQ ID NO: 42348 - protein, 380 aa, unknown
  TnpB Polypeptide
MRAYKFRIYPSKKQEEEMQRHLWVSKELWNEMLAFTKDIYNNYQRFPTKRTLREFVKKSGLFSQVGQELVDRLIDALYRKISMKKRGEKGGFPRFKSLDRMKSLHYPQYGFSLDKKLKVTPFGEVSIKKHREIKDSIKTLALKREPTGKWFAIFTVEEEKFLPKQNSGGSVGIDLGLKTFATLSNSLRISNPRHFKKHEDMLAFIQRKFSRKKKGSRNRKGAKHKVSLIHEKIANTRADFLHKTSTQLVNDYSIIALEKLNSKEMSEENYGKQIHDAGWNMFANMLAYKAEGAGCRVVFVDPKNTTQECSNCHQIVKKDLTERTHNCHFCGLSIDRDLNAARNILIRATAGQAGSNACNSLQKERDVAVATSMKQEALIL

SEQ ID NO: 42349 - protein, 397 aa, unknown
  TnpB Polypeptide
MKSYKFRIYPSKKQEELLNKHLWLAKNLWNELLGECKKIYTNFGYFPTKNTLQLMVKNYGLYAQTQQEIAHRVHNSVIRVFKLRNNLVKCGFPRFKSIDRMKSLHYPQYGFCFDKKLKVTPFGEIAIKKHREIKGEIKTLTLKRESSGKWFAIFCAETPKEIPKENNGEAVGIDLGVMRFATLSDGKVIKNPRHLMKYEKELAFIQRKFSRKKKRSKNRKMAKVRVARLYEKISDCRRDFLHKISTELVNDYSFIASERLASQKMAEQNYGKQIHDAGWSMFANMLAYKAEGAGCRVVFVNPENTSKMCSRCGNIRKDLSLRDRTYTCPECGLTIDRDLNAAVNILKRVTPGQGGSNACNSLQKERDVAERSNVCEAGSLRLLIGEACHKATSPEFS

SEQ ID NO: 42350 - protein, 382 aa, unknown
  TnpB Polypeptide
MRAYKFRIYPSKKQEEQMRQHLWLAKNLWNEMLEHSKQTYKDFGYFPTKNTLQLIVKDYGLYSQTQQEVAHRVFNSLMRVFKLRKKGVECGFPRFKSIDRMKSLHYPQYETGFWLDKKLRVTPFGEIAVKKHREITGKIKTLTLKRESSGRWFALFAVETPKEIPKENKGRAVGIDLGLKTFATLSNGEMIKNPRHLMKHEDRLAFIQRKFSKKKKRSKSRKRAKVRIARLHEKVADTRRDFLHKSSTHLVNDYSFIALEKLASKEMSEENYGKQINDAGWNMFANMLAYKAEGAGCRVVFVDPRNTTQECSNCHQIVRKDLTERMHKCPFCGLELDRDINAARNILTKATVGQTGSNACNSLQKERDVALATSVKQEAHIL

SEQ ID NO: 42351 - protein, 190 aa, Lyngbya sp.
VASNRKTAAEKKKPVKGFQPTSVDYDARIFSDREKDQTISLSTVEGRERVDLILGNYQIGKLRGKTPTSATLSKHRDGQLYIHIQIKDTTPTPKKTDNIIGVDLGRRDIAVTSLGESWSGENITKVRDRFTRVRASVQKKGTKGAKRLLKRLSGREKRYQTRVNHNISKQIISRAIDIVANEDARRFNWY

SEQ ID NO: 42352 - protein, 498 aa, unknown
  TnpB Polypeptide
MKKRQVQWKSFNVNIPNELKPIYDFLQNELNFILSNDETRAILDNIDLSKHRGNIWRDLRDNLKFRIKDWPLHNKTWHSYILFENIRRELQSKQEAIIIWNELIKNGFNINEALFDSLHKLKIWPTRSRISNIKRSNSIPELTKNAVFNLDYTISEKQILRMKTNNICEIKVSKKDWIEYEIVFPSSIDSRFTGNIAKPRFIKRKRDNQYIGICSYEYEIRDYELEDKILGIDIGKIKLFSSVVMSKNGEFSEEIINTKRSQETEYKINRLYENKQILYDKIKSYEYLRLTNHPKYEIWKNLYSSISNKIINTKDYQAKLLSSEIVKLALEKRCKTIHIENLSWLNSQGGKWNHSQIHSKIIEKASMYGIKVKKVSAFNTSKEHPITKEVGTVQDRTVEFTTGKIDRDLLAAINISLRSTNIKIKKSLPEKVKTKRIKPKSNKKEIKEKVNKLKGNGQIVSFLTNVLDSTIQVELGVRPLSEVSPCNSLIDFYNKLHL

SEQ ID NO: 42353 - protein, 470 aa, unknown
  TnpB Polypeptide
MSYVFTYTTKIKNKNYNQSLCKYISDWTIVFNKIQRKVWQQLKAEYKATGEVKGKFVTVLSDDEIELTSRAKDSILANMIGRFQAIKELKNYELENIDRRIERIDTDIEEIRVRIEELKYKQKEDIFGLSEKEIEELKNTKHKLYWKLNKRNKLIQRRNNLDKEIKEGNFKLCFGTKYLLKNDYNKFVKQRDSELFFVGRAAEKANNLNFQLVYNPNKNNFSTKVRKEIDLEGSKYEYGEIYFNQKRTKQIRQILKNKSSALTYRIKIKNGEYYLQLIFTLKHTAEDCLTRSSNGVFGIDFNKGFISVSETDKQGNMVQTYNLDYRFGSGNKTKNDLEEIIGKVVKEALEKGKDVVVEKLDFKVKKSEIISKKNKKYNEMLSSLPYSIYGSIVKSKCAKNKVFLHEVNPAWTSYIGNIKYASPRKMNIHTAASFVIARRGMKFIDSLGKKKMKLKRKKRKKYEKRKGIKK

SEQ ID NO: 42354 - protein, 451 aa, unknown
  TnpB Polypeptide
MVLRVLKIRINDNIISSEYKEKMLKSKEFYNSCLYLTRFRYFEYLGHKDKLDYKVRKTYGLEDWFEDKDVFLSNYPSYGNEFINKVGITINSSLSAKERQTILRKVCTDWKIYFKTKEAMKDTDKKVNIPGYKEYSYLVCEFNAQMIKFGGYEKDHKIGLIGLKNRIGLPLWLKRESIQAVRLKYKNTYLYLEVIYNKDEEKQKERMLKRRVAAIDPGLNSIATITYNFLKKPISISGKHLKSVNQLYNKTVAQLNKEKSEHEKVGDKDKVNKIVDKISKVTEKRNLRVENELHHISCEIVRILVRNKVSKLIFGHNNGQKEDINIGRVNNQNFVTIPFNQLITYLEYKCKEKGITFEIQEESYTSKASFLSNDKMPIFNNNSNQEYSFSGKRVKRGKYVDRKHGIVIHSDVNGSYNIMRKNGVNLSQLQKTFIDKKQTIEPLGIRLYMNK

SEQ ID NO: 42355 - protein, 443 aa, unknown
  TnpB Polypeptide
LEEKKIKKKKRVRKDRSKITSLSERHIISEKHPFYKECDELCFLSKNLYNATLFVQRQSFFDRNFRNYHSVNKEFTMDNQVDYRALPAKVSKQVQMLVQQNFSSFFALLEKSEKGEYDKKVQLPRYLKKDGRQVINYEKGALSLKKEGFIKLSKTGIEIKTKIPKEQITNVRIVPKGNHYVIEVLYDVPKIKIKKNDFSRVAFIDPGMNNLMTVTSNVFHPVIYNGRVAKSINQLYNKERAKKQSKLQRRKLTVLASTKSKIDDLLKPKQLKQSKALDNITNRRNLRIHDLFHKITTHLVNYLVANDIRTVIFGHNVGQKQNINMGAKTNQNFVDLPFTKLISMLEYKCELKGIRFIVTEESHTSKCSFIDKEEVCHHENYMGKRVKRGLFKTKNGIVINADINGSLNIGRKYMQSQKKYTNKIHNQLLNYMSNPKIVNVKFD

SEQ ID NO: 42356 - protein, 403 aa, unknown
  TnpB Polypeptide
MRLVEKHQIRRNHNLYKLCDELCFRSKNLYNAALYEYRQSFIDKNRKNLTWVEINKLFNNNNQYDYRKLPAKVSNLVLKKLGNNITSFWGLLQARKDGTVKKVKLPKYLHKTKGRFIVEFTNQTFSKERTKKGYLVICKKDIGLIVPTLRENVKQVRIVPKQGYYVIEVIYEIKEEEKKKNVRVAAIDLGLNNLVTAVTNDGDNPLIVSGRKIKSINQYFNKAAAKKKELLPKSIYTSKALDRLWLKRNNTIDHEIHKISKYLVNYFDERDISKVVIGNNTGWKNEISLGKRQNQNFVNIPYMKLISQLIYKCKIKGIEVIVREESYTSKASFYDYDFIPTFNDGLAREFSGKRVKRGMYQTKDGKKVNADVNGAYNIMVKENPKFVITKREQLSHSPVLVKL

SEQ ID NO: 42357 - protein, 284 aa, unknown
  TnpB Polypeptide
MASETVCKEADVQDGCSEVLPPLLDTLVALQEERTRNDSTTIRRIPAFVPDGQDAQESSVTMTESCIVIAFSKEIAATDPSRRVGYDLNEKSIVGSDGTRHDLSEVARLHTLYGVRRSKFYERHPDDRRVKKKFASSRREKERVSQALHRISTLIAEKARANKEAIVLERLKGIRCAHKRGNGEGTARRRRIALWPFRQLQSYVEYKARWAGVPLEYVSAAYTSKTCHICGYINRSLKLTDRSWLCPQCGAMLDRDLNAAINIERRGKIRCLPMTTVARAEARG

SEQ ID NO: 42358 - protein, 391 aa, unknown
  TnpB Polypeptide
VKAAVKGVKFAYQPTPQIRELLSTFKEMVNDAIRTCLAENIRGRLKLRDRIYEEFRTTYHLVSCFAYSVAEVAWSIVKKHKRWHRRPYAKRLMFKMDAGNFSLSYSILSLPFRKGERVLIPLRYGEYQRSFLMDKTLKRGSVTMTESSITIAFSKQAPMADPSRKVGYDLNEKSIVGSDGKVYDLTEVARLHTLYGVRRSMFYEKHPRDRRLKKKFAGSRREKERVDQVLHRVSVLIVEKARANNEAIVLERLKGIRYAHQRGNGEGKARRRRIALWPFRRLQSYIDYKAAWAGVQVEYVSPAYTSKRCHECGCINRKLKLTDRSWLCPCGTELDRDLNAAINIERRGKIRGLGEVRPGARGTDEAVKGNETTMAPILRAEAPKSSLRQLP

SEQ ID NO: 42359 - protein, 377 aa, unknown
  TnpB Polypeptide
MGTPRTVSQAIKGRLYPSREQAGTLSEMRFLLACIRERVRAESREYYEREEKGCSVGWLQKEVAQPMHRRLGMPCDALSVVNVVAMHHQALRNWWRRPDHYDAPSKRAPERYPVNPYVHNQRLEVADGRVRLFGKKVGWMRWRAGRQPSGKIMSGRVSFRGGHWYLAIQFEGPAPEYAKPRVMAVGVDPGIRAMTAHDGERCMEFCRVPERSKSRRRRLDRKIDRCRKGSRRWRKLTATRARQKEREANARRDRSHKATRKLIDHARIIGYEDPSAKAWQESGMFGEASREAAAGEFCRQIAYKGGWAERDVVVVPESMASTQSCYACGERTQHALGLKVYRCSHCGHTAGRDENAALNVRAAAIQGVRAARPEAAL

SEQ ID NO: 42360 - protein, 422 aa, unknown
  TnpB Polypeptide
MLTLTYEYKLIPDDRQIKVIEHTLNICRSVWNYALRERKDWLKSRKSPVNACSIEQEYIIPPDLPYPNYHNQAKALTEAKKTNEILKSVNAQVLQQVLRTLDRAFADMQSKNLGFPRFKNKYRMRSYVYPQMLKDCLKANQIKLPQVGWVKFRRSRKIPDGFEIKQARIVRKASGYFMMLSLQLDVKIPDVPFQGHPLGIDLGLDKFLATSDGELVERPRFLNHLHRKLKLLQRRLRNKQKGSNNRHKLNQKIARLHQRISDTRKDWHFKLAHHLCDQAQSIFIEDIDFRSWGRGMLSKHCLDAAFGQFVTILKWVGWKRDVYVAEVDKNFTSQICPNCGSHTGKKTLDVRKHNCPECGYKTHRDVAAAQVIRNRGIEKALGHSVLENACGDGLTGAVTPSQESVKQEILNVSLRIPRHSVA

SEQ ID NO: 42361 - protein, 413 aa, Thermoplasmatales sp.
MADMELTRAYKFRIYPDAKRQSEIELQLTLSKEFYNLLLEKSIKSYREGNKKLSMAHLNKFAKEIENDKRFLQIYSQTRCEIKYRVLKAYQNFFRRVNEKKSGKRIKVGFPRFKSKDRYCSITYPQDNGSFAIVKKNKKHILRVSRIGGMQIKLHRSIEGRIKTLTIKKRGGEYFAIFTTVKEVELPKVENTNPVGIDMGLNSFIALSDGTKIEKPKFAKKAEKHIARWQRIIAKRHKGSKRREKAKLNLQRKWEHVANQSNDFAHKLSDKLVNSGYTSFAVEDLHIQNMVKNHNLAQSIYNASWNRFIQMLSYKAESAGMKVIKVVARNTSRQCSNCGNIQDMPLSIRGYNCNRCGMQMDRDINAAINIFNRATLGQRGSHAQGESVRPQRGAVLEELRTDKTHPLLDAVIA

SEQ ID NO: 42362 - protein, 327 aa, Anoxybacillus sp.
VAQSIFQQHHETSDQRRLNRLRKLFEGRTEFPKFKTKKRSRPSFYQDTAKIKITDTHVKLEKLTTSRKKNKQKLNWIRLAERGRIPHGKHVKYTNPRIIFDGLHWYLTIGVEEVEGKQDASTEGIGVDLGVKSLATVSNGMTFHNINKTPKVKKLEKSIKRLQRKLSRKYEMNKVQIKGGEVRYRKTKNIKKLEFLVLKKRRRLKNICFNHTHHITATLVKAKPKYVVIEHLNTSGMLKNKKLSKAIQEQTFHEFKRQMTYKCAWHGIQLIIADRFYPSSKRCSRCGHVKEKFSLSERMYHCEACGMEMDRDLNASINLKNYAQSMG

SEQ ID NO: 42363 - protein, 276 aa, Anoxybacillus sp.
MLFSEKQQNGLDGRTTRIKIPTLGWVRLKEYGYIPKNAIVRSGTVSKKAGRYFVSVLCEVEDVKPTVPLQSTGIGIDLGMKAFAVLSDGRVFQNINHTPKIKKLKKKFKREQRSLSRKYEYLKKRGEEPAAKRGANIDKNIFRVQKLHARLANIRLEYVKFVANEVAKTKPRYVVIEDLNVKGMMKNRHLARSIAEQCFYTFQTWLIHKCKKYGIEVRQVSRFYPSSKMCSRCGHMKKDLQLSDRIYVCDGCGHTMDRDVNAAISLLHAKDYIVLT

SEQ ID NO: 42364 - protein, 366 aa, unknown
  TnpB Polypeptide
MRVFQYRLKPTKAQVTKLNEQLELCRWVYNETLAMRKNSFEQEGKSISYFESKKMLPIWKESKPELRTVHSQVLQDVVLRVNLAFRAFFRRVQSGEEKVGYPRFKGKNRYDSISYPQSGFSIDGNMIWLSKIGDIKFKLHRPIDGVVKRLTIRRSSTKKWYVSFLVGESEKHTLPYSEEIVGIDMGILNFAALSNGDVVTNPRILLADEERLKKAQSKRDKLPKGSPQRRKASKAVSHLYEKVTNRREDFAQQLSRQWINKYGTIVFEDLNIIKMVHNHNLAKSILDASWSKLIQYTSYKAEDAGRKVILVNPANTSQMCSSCGQIVKKDLSIRIHNCPYCGLSIDRDLNAALNIARLGLQSLASA

SEQ ID NO: 42365 - protein, 297 aa, Frankia sp.
MRTLQAYRFALDPNDVQAANLRRHAGAARFAYNWGLARVKAAFAQRDAEKSYGLDGDLLTPVPWTLPALRLAWNAAKREVAPWWDECSKEAYSAGLDQLACGLKNFTDSRKGKRKGRRVGFPRFKKRGKARDSFRYTTGAYGPAGDLHVKLPRIGRVKVHEPMGALTSRLADGRARLGGATVSRTAGRWLVAFTVEADRDVSERPTRRQRTGGTVGVDLGVKHLAVLSSGETVANPKRHAAALRKLRRASRAYARSKPGSAGRRQRAASSRRSMSGSRASAATGCTSSRHGSPGPTT

SEQ ID NO: 42366 - protein, 417 aa, Nostoc sp.
MLRVVKVRLYPDIQQQQSLAQAFGSCRWLWNYCLNLMNQTYKETGKGLSGYEVKKIIPQLKKEYEWLSLTYSQCLQQVCLNLGVAFNNFFEKRAKYPRFKSKHGKQSIQYPQNVKVADNCVTVPKIGDVTAIIHRPIERKIKTVTISKNCSNQYFAAILFDDGKDKPSVNTDGKAIGIDLGLTHFAVTSDESKFDNPRILTKHDKNLKLKQQQLSRKQKGSNNRVKARKKVARVHRKITNCREDFLHKLSRRIVNENQVIVVENLNVKGMMQNHKLAKSIHQVGWGMFCTMLKYKAEMAGKIYQEVDRFFPSSKTCHVCLNQVGSLPLDVRFWTCENCHTKHDRDVNAAINLRDEGLRILTRQSPQVGKPAHGAGSSGTGDKACRPDVSRSKGGRKKSTTALSVGQEAYTDLKVQCR

SEQ ID NO: 42367 - protein, 413 aa, unknown
  TnpB Polypeptide
MLSQSSRPYLDKTRLSCLASLVLAVKTIRQKHQVSPELLRLLDEFRRMVNVCIAVGIEENVSSLKTLSSKSYNRLSRDMLSYYRLCAISKTTGILHNYRKAKKKNPRTRFPNARKLMLTTCYGFKIQNGLLRLPIRPRRYVYVKLNSHTLQVLSGLSVRSVTLTPDSLSLTYSKETVEIKPEGYVGIDRNLDNVTSASTDGTVKTFDLSLATRIKTNYRIVNSQFKRNDARIRTRIFSKCGERQRNRVQPLLHNVSKRIVENAKTKRYGIVMERLTGIRRLYRKGNGQSRNYRARMNSWSYGELQRQIEYKARWEGVKVIYVPARNTSKRCSICGYKTLESTQRQLWCPKCGTILDRDENAARNLAAGGLRFSPDGPPGEAMVEEREPENATPILKVDGGKISHQCDETYQNP

SEQ ID NO: 42368 - protein, 566 aa, unknown
  TnpB Polypeptide
MRKTYFSNRVYKKDNFSPSQVYFISNAMVEFNRAKHKACKLFLTEKNYKVDHDPSVHMQIKKLFGFNDYWTNSAVKEAKAQISSQEELRKIYAAGVENQIKTKKDRVKELNSKIKRLEELLALIIKGKFKTWRGSYIVKRKSGIIGVDSRNKSLVFFNAYDFEHQYLCPEIKRLKNRVKLISFSITRLEKKLKKLQSDFIKGCVFGTKDLFKKQFTVKKYQNDHETWLKEWYSARYSSLIISGRTDAKYGNFVFKYDVKTNILAFDLPNITADPEDNIADDLPNKITISVPVVFKYGQKEVGDALIFQNERRKPIAWSIEDHGDYYIFKITVDIPNNPYVNYCKDNGVVGIDMNFDHAALTEINRHGSLIDWLNINYNLEGKTSDQIIKILEKAAIDIIDFAKEKKKPIIIEDLDTTDSKFKLQYGSKKRNKKISLFAYRILTNAIYARADKEGVAVFKVKPNFTSIMGKLKYMAQKGISIHTAAALVIARRGMRFKEIVPPVLSVFLPEKIRRRHHWSQWNYLQRQVKGVKVHYLYQLSKKFKGSEDTVGLKKVLESSKILPQAG

SEQ ID NO: 42369 - protein, 415 aa, unknown
  TnpB Polypeptide
MQLVEQHVVSKRDPRYAAIDAAAFASKNLYNQATYQIRQAYIQEGKYLPYAEIFHRVKHLECYQALPRKVSNSILILIDMNWRSFRKSLKAYYEYPEKFTGKPKIPGYKHKERGRNILIYDKQALGKRSFKKTSKLVPSGLPIEIETKVEWEALDQVRIIPRGSCYVVEVVYQKAEKQTQVDPLVVAALDLGVNQLAAITSTKAGFQPCLINGRPLKHLNAYYNKQRARHQSRLAKQNRFTSRQLDRITTKRNRRVNTYLHTASRRIIDLLVKEGIGTLVIGLNKLWKQEVDMGKRNNQTFVQIPHSRFIQMLQYKAQLVGITVVVREESYTSKASFLDRDDMPTYDPKRAEKPKFSGKREKRGLYRAKDGRRINADINGSYNILRKEYPKAFSDSFLGGQEIVGAAVHPRRLAV

SEQ ID NO: 42370 - protein, 392 aa, unknown
  TnpB Polypeptide
MSTLMNFKYRIYPSQKQIIKLNKTISDCCFIYNKLLETKINAYKTDKNNLSQFDLNKLTKDIDVPIHSQVKQNISKRINDAFNHFFRRIREKKGKVGFPRFKSLNRYKSITFPQSGFKFISDKRLFVSKIGNIPIILHRVLKGKLKTFTIKKTALGWFAIFSCENIPIEKIEVEDNHIGIDVGIESFAILSNGERIENPKFLIKSEKKLAKLQRRLSRKKKGSSNRRKARIKVARLHQRIFNQRQDFLHKTSFTLIKQFKIISVEKLTIKNMVKNHYLAKSINDASWGYFVQMLSYKVEKTGGQLVKVSPRNTSRTCSQCGNVQDMPLANREFKCLKCGFVCHRDLNASTVIDRAGQVQISSSEENACGETVRPSHQEKARLVEAGTINKSA

SEQ ID NO: 42371 - protein, 402 aa, Escherichia sp.
VKRLQAFKFQLRPGGQQECEMRRFAGACRFVFNRALARQNENHEAGNKYIPYGKMASWLVEWKNATETQWLKDSPSQPLQQSLKDLERAYKNFFRKRAAFPRFKKRGQNDAFRYPQGVKLDQENSRIFLPKLGWMRYRNSRQVTGVVKNVTVSQSCGKWYISIQTESEVSTPAHPSASMVGLDAGVAKLATLSDGTVFEPVNIFQKNQKTLARLQRQLSRKVKFSNNWQKQKRKIQRLHSCIANIRRDYLHKVTTAVSKNHAMIVIEDLKVSNMSKSAAGTVSQPGRNVRAKSGLNRSILDQGWYEMHRQLEYKQLWRGGQVLAVPPAYTSQRCAYCGHTAKENRLSQSKFRCQVCGYTANADVNGARNILAAGHAVLACGEMVQSGRPLKQEPTEMIQATA

SEQ ID NO: 42372 - protein, 214 aa, unknown
  TnpB Polypeptide
LTDYVDTESCQPTTGNSAGFDFGLKRYLTGSDYNDYQSPQFLKRSLNAIKRANRKHSRKIKGSNNREHARLNLARKHRRIANQRADFHWKLAHDLTDRYDWIALEDLNLKGMKSLWGRKVSDLGFSDFVQKLKYIASKKGREIRFIDKWYPSSKTCSVCGAVNQALNLRDRTWQCPNCHTQLDRDRNAAVNIHRVGASTLSEEVVSPSSSGPLR

SEQ ID NO: 42373 - protein, 350 aa, unknown
  TnpB Polypeptide
VEKDGRAYLRFTKNKDLFCIGKASLYIGLRYVKTEIKPQHGCYLILVTFDDGIELPKVPEKPKRVIGIDPGVDNLAAVVNNFGVHPFLIKGGAVKAANQRFNKKRASLFSAVTTGSDSRHSVKNSHSLSALSRKRDDLLRDIFYRAAWYICRFAVRHQVDVIVIGHNKDQKQEINLGKQNNQSFVSIPFVRFEQILTNTAAKCGIPVVVQEESYTSKASVLDGDVIPTYGIDDDHVHFSGKRVKRGLYRSADGTFLNADVNGAANVIRKKYPDAFDGQDLKYLWETTDVVKFTDLYPGAKSTCQEHYNGKRHESSPASKAIHRYRKDTRLKYRILFGKSKYVHTSAKKSA

SEQ ID NO: 42374 - protein, 147 aa, Pyrobaculum sp.
LEERAARETGPVRRRRLEERTRHLKSKRFRKIGGVVTQIAGEIVKLAMEYKAAVVVDKIEDESYWELREGDGDGEKKHLLDGLGQLRKRLQELAQWYGLPYLELYSTVCLRYGAKLQELKNRKTTCPSYSFNDHKDNIPSIWAKRRY

SEQ ID NO: 42375 - protein, 416 aa, Pyrobaculum sp.
VGAEEGEPKKRGGKSGGKSAERGKKKDAEKKRDHVLTRAVVIPSARLSWRKFNALKELEKKYRELRRRHPDLPSHYVYTAAQDAATRVKSFMALKREGKAKTEKPEIRRISIWLDDRLWKPEGYTAIRVSTHRGRITIPLWPTKQFWKHLNGGWRLKSQPRLKLDEKRRAVYVYFVFEKVVEERPAKGIIAVDLNENNVAVKAGGRVYILETGIRNITVGYHSRREVMQSLKGNRYTSRALKRNELNKKSDIRRKAANFVVREAERLGAAIAVENLPKEAPKNMISRVDDPVLRDRIYKAGFRSMLRKIIRKARERGIPVVKVNPRRTSSTCPRCGGGLARGSAPRLLRCPHCGREWGRDVAAVINIERRALEEGRVPPGPMPDDPMPEVAWLPMGAWARRKSLGAISQELSAMTA

SEQ ID NO: 42376 - protein, 477 aa, Pyrobaculum sp.
MTPAGVNTLLATATALVAAEVNNMAGTRLSTSAPWVCLVKLLACPHAPFITNRDFSHSTYKAMYAYRTLRIEIPWKLIEERPDVLDLVTRMYLAVGEYVKRLLKELTGQEEPKLTTEELDRLLTPEKRELACKIIEETFPRYGLGRALVRYSKFLWRDVAFYRAIPLDVQLRAENERDVSTAVFVDLKSGVVRVRKLGIPPFAVELKKSDISWIRRRLEEGARLKLAFLGVEKRNGEKPTYGRLYVALVFAREVTPVEPRGIVVVDVNRLDHGIMVGVVKDGKIVKRKRLPDERAVRKLRKLHEEISRLEERAAKEADPARRGQLEDKVNRLKSKRYRKIRDVVARIAKEIIELARQNNAAVVVDTIEEKTYSARKQSGESGDRKHLYDGLGQLRKRLQALAQWYGLPYMEVRLYSTKCPRCGAKMVEERKRIMRCPSCGFSDTRDNIPLLWAKRRYWEILQKIKQPVFSPIKLLTS

SEQ ID NO: 42377 - protein, 294 aa, Pyrobaculum sp.
MGQVYRTLRVEIPWQLVEERPDVLDPAVRMEEGAELKLAFLGVEKRGGKKEPTFGGLYVALVFAREVTPVEPRAIVVVDVNRLDHYIKVGLVVDGRVVELLKFPKRGRVQKLERIHVHIRQLSRALAKVDEDRDPRRALDLQRQLWKLKTKRYGIIRDIVINATREIIKLAREHQAAIALDTMEDDTYRELKERNGDGVKKHLLDGLGQLRKRLQALAQWYGLPYLEERLYSTICPKCNAKMVEENGRFMRCPACGFKAHRDNVPVIWAEKRYWEILQKTKQPTFSAAVTFLTS

SEQ ID NO: 42378 - protein, 416 aa, Pyrobaculum sp.
MYVYRTLRIEIPWRLVEERPDVLGLAVRMRLAVEEYARRLLKELTGQEEPKLAPEELVCLLTPDRRELARRIIEEVFPKYGLKRYIAEWAKFFWRDVVFHRAVPLNAQLRVGNERDISMAVFVDLKSGIVRVRKLGIPPFAVELKKNNIVWIRERLEEGAKLKLAFLGIERQRGKEPTYGKLYVALVFAREVQQIKPRAVVVVDVNRLDNGVTAGLLVDGKLRQTLRLPDESAVRELRRLHEEISRLDGKAAREADPVRRRRLEDRARYLASKRFRKIRGIVAHIAREIIELAKTYSAAVVVDTMEDETYRELKERNSSGVKKHFLDGLGQLRRRLQHLAQWYGLPYLEERLYSTICPRCGAKMKELNNRRMRCPVCGFNNNRDNVPLIWAKRRYWEILQKTKQPAFSATTTLLTS

SEQ ID NO: 42379 - protein, 355 aa, Pyrobaculum sp.
MKSYRAIALKLPELDCGVERLMALANLAHRGYRVEPPDLPKTVSIMLYRRRHELAFGTEPKRWLARTWFPLTTLRIGNGQKIGDGGAPVVLDFDRGVVKLRFICHAEVPMPKWAYDRVSEGGDVKFALLGLKRGKPHLALVAEREVELIQTNSVLVVDVNSWRHGVVWALIRDGKTTKWARVRPDLGYIERLYSEVVRLEHKYGKLERLGLHEGRDSKKLWRQIKQKRRRLYAYLRDFAQKAAHRLALKAVKRRAEVWIDDMLEESRRELIEEKLPSDLVKLYMLYLRRFINLLTNQLAWYGIPYRFKRLPSTVCPVCGSELTQLPDRTMVCQCGFREKRDLVPIRWALKYTSPP

SEQ ID NO: 42380 - protein, 130 aa, Pyrobaculum sp.
LEERAARETGPVRRRRLEERTRHLKSRRFRKIGGVVTQIAREIIELARANDAAIVVDKIENESYRELKESNWSGGKKYFLDGLGQLKRRLMELALWYGLPYLEVIQHSLPEMRRQNGRREKLHHASPRLH

SEQ ID NO: 42381 - protein, 419 aa, Pyrobaculum sp.
MYAYRTLRVEIPWRLVEERPDVLDLATRMHLAAEEYVRRLLKELTGQEEPKLTTEELDRLLTPDRRELACKIIEETFPRYGLGRALVRYSKFLWRDVAFYRAIPLDVQLRAENERDVSTAVFVDLKSGVLRVRKTGIPPFAIRLEKGNVTWIRERLEEGAKLKLAFLGVDVRRGKDPTYGGLYIALVFAREVTPVEPKALVVIDVNRLDHYVKVGLVVDGRVVELLKFPREERIRKLEKIHAHIRQLSRILARVDEDKDPRRALDLQRQLWKLETKRYGVIRDVVINAACEIIKLARERQAAIVVDTIEDDTYRELREGNWRDDKKHFLDGLGQLRRRLMELAQWYGVPYLEERLYSTVCPKRDAKVVEERGRVMRCPACGFRAHRDNVPMIWAEKRYRELIEKTKQPVFSATLTLLTS

SEQ ID NO: 42382 - protein, 418 aa, Pyrobaculum sp.
MHMNQVYRVLKIKIPWRLVEERPDVLDLVTRMHLAVEEYAKTLLKEITGQGEPKLTTEEIDRLLTPDRRELAVKIIDVAFPKYGLGRYFVKQAKMFWRETAFWRAVPLDAQLRIENERDAGRAVFVGLKSGVLRVRKTGIPPFAVELKKGNVAWIRERLQEGARLKLAFLGIERLKGKKEPTYGKLYIALVFARKVQQVEPKAVVAVDVNRLDHGVMMGLLVDGKLRQTLRLLDEDAVRELRRLHEEISRLDEQAAREADPARRRRLEERARHLKSRRFRKIRGVVKDIVGEIIKLAREHQAAIVVDTMEDETYRELKEGNWSGEKKHLLDGLGQLRRRLQTLARWYGLPYLEERLYSTVCPRCGAKMEELNNRRMQCPVCGFNDNRDNVPLIWAKKRYWELLQKQPAFSATTTLLTS

SEQ ID NO: 42383 - protein, 159 aa, Pyrobaculum sp.
LGTGSIAQRRTTSQLAYIRDVVINAAREIIKLAREHQAAIVVDTMEDESYRELKEGNGNDVRKHFLDGLGQLRRRLKESTQWYGLPYLEERLYSTVCPKCGTKMTKEEGRFIRCPACGFRAHRDNVPMIWAEKRYRELIEKTKQPVFSSVPTAITFLTS

SEQ ID NO: 42384 - protein, 251 aa, Pyrobaculum sp.
VIKAVDIHGDHRLGLYVALVFARDVTPVKPKVLVIVNINRLDHGVVAGVIVDGKIVKWLKLPDVSVVKELKRLHQRVRELEKRAAREIDPAGRARLEEEVGRLKSKRFGVIRDAVVKMAKELVGLAVKYHAAIVVDGIDERTYSARKQSGEGGARKHLYDGLGQLRRRLQRLAQWYGLPYREVRLYSTVCPRCGAKMREAGGRRMQCPACGFSDHRDNIPIYWAKRRYWEILQKQPVFSAITLLTRKFLHL

SEQ ID NO: 42385 - protein, 416 aa, Pyrobaculum sp.
MNQVYRTLKIRIPWRLVEERPDVLDLAVRMHLAVEEYVRRLLKELTGQEEPKLTTEELDRLLTPDRRELAVKIIDEVFPKYGLGRYFVKQVKMFWRDVAFYRAIPLDAQLRVENEKDMGTAIFVNLRDGVLRVRRLQKTFVVSLRRSDISWIRERLQEGARLKLAYLGIEKRKGKKEPTYGKLYVALVFARETAPVEPKAIVAVDVNRLDHGVTVGLLVDGKLRQTLRLIDEDAVRELRRLHEEISRLDERAARETDPARKRRLEDRARHLASRRYRKISGVVKDVVNEIIKLAREHNAAIVVDTMEDVTYLERKQSGESGVKKHLYDGLGQLRRRLQALAQWYGLPYLEERLYSTICPRCGAKMEERKRIMRCPSCGFSDHRDNVPLIWAKRRYWEILQKTKQPTFSVPLILLTS

SEQ ID NO: 42386 - protein, 420 aa, Pyrobaculum sp.
MSQVYRTLKIRIPWRLVEERPDVLDLAVRMHLAVEEYAKKLLKELTGQEELRLTAEELDRLLTPDRRELAVKIIDEVFPKYGLKRYFIDQAKFFWRDTAFWRAIPLNAQLRVENERDTSKAVFVDLESGVVRVRKLGIPPFAVKLKKGNVAWIRERLEEGARLKLAFLGVERRRGKEPTYGKLYVALVFAREATPVEPRALVVVDVNRLDHGVVVGLLVDGKIVKRKRLPDERAVKKLWKLHRKIGRLDARAARETDLTRRSFLESRARYLKSKRYRKIRAIVEQIASEIVKLAREHQAAIVVDTMDYETYIARKQSGESGDKKHLYDGLGQLRRRLKDLAQWYGLPYLEERLYSTVCPRCGAKMKREKKRIMCCPSCGFSDTRDNIPLLWAKRRYWEILQKIKQPVFSSVPAPLTLLTS

SEQ ID NO: 42387 - protein, 456 aa, Pyrobaculum sp.
VVKFYSNRSFPEKRSAANHILLWKTDSIEEGSGRKKRSRRRKKNSAERKDVKKVYVVTHTVAVPSPRLSWRKFNTLKELVEKYRELVVHLVDYGFKHGVTGQISLRKALYEELRRRHPDLPSHYVYTAAQDAAARVKSFMALKREGKAKTEKPEIRRISIWLDDHLWIREGFTAVRVSTHRGWVTIPLWPTRQFWRHINEGWRLKTQPRLKLDEKRRIAYVYFVFEKVVEEKPAKGVVSVDLNENNVAVKAGGRVYILETGIRDITLGYNSRREVMQSLKGNRYVSRALKKNELNKKNDIRRKVANFVVREAERLGAAIAVENLPREVPKNMIKNVDDPKLRDRIYKAGFRSMLREIIQKAREHGIPVIKVDPRGTSSTCPRCGGRLVRGPAPRLLLCPHCGWEGGRDVAAVINIERRALEEGRVPPGPMPNDPTPEVSWIPMTAWARRKSLGAIA

SEQ ID NO: 42388 - protein, 419 aa, Pyrobaculum sp.
MYVYRTLKIEIPWQLVEERPDVLGLAVRMHLAVEEYVRRLLKELTGQEEPKLTTEELDRHLTPDRRELAHRIIEETFPKYGLRKYFANQAKVFWRDVVFHRAVPLNAQLRVEDERDVGRAVFVDLKSGVLRVRKLGIPPFVVKLKKGSISWIRERLQEGAELKLAFLGVDVRRGKDPTYGGLYVALVFAREVTQIEPRALVVVDVNRLDHYIKVGLVVDGRVVELLKFPKRGRVQKLERIHVHIRQLSRALAKVDEDRDPRRALDLQRQLWKLKTKRYGIIRDIVINATREIIKLAREHQAAIALDTMEDDTYRELKERNGDGVKKHLLDGLGQLRKRLQALAQWYGLPYLEERLYSTICPKCNAKMVEENGRFMRCPACGFKAHRDNVPVIWAEKRYWEILQKTKQPTFSAAVTFLTS

SEQ ID NO: 42389 - protein, 413 aa, Pyrobaculum sp.
MYAYRTLRVEIPWRLVEERPDVLDLVTRMHLAVEEYVRRLLKELTGQEEPKLTPEDLDRLLTPDRQELAVKIIDEVFPKYSLKKYFVDKARVFWRDVAFHRAVPLDAQLRVESEKDVSRAVFVDLKSGVVRVRKTGIPPFAVKLKKSNVTWIKKRLEEGARLKLAFVGIDVRRGKDPTYGGLYIALVFAREVTPVEPRAIVVVDVNRLDHGVVVGLVVDGKIVRRMRLPDECAVKKLRRLHERISDLERRAAKEADPARRGQLEDKVNRLKSKRYRKIRDIATRVAKEIIELARQNNATVVVDAMEEKTYSARKQSGESGDRKHLYDGLGQLRRRLKDLAQWYGLPYMEVRLYSTICPRCGAKMVKDKKRIMRCPSCGFSDTRDNIPLLWAKRRYWEILQKQPAFSAITLLTS

SEQ ID NO: 42390 - protein, 137 aa, Pyrobaculum sp.
VVDAAREIIKLAREHQAAVVVDAVEDESYRELKEDNGSGEKKHFLDGLGQLRKMLKELSQWYGIPYLEERLYSIVRPRCGAKMAVENSRFMHCPACGFRAHRDNVPVIWAEKRYWELLQKTKQPTFPTPATTTFLIS

SEQ ID NO: 42391 - protein, 423 aa, Pyrobaculum sp.
MNQVYRTLKVEIPWRLIEERPDVLDTVTRMYLAVGEYVKRLLKELTGKEEPRLTAEELNRLLTPDRREFARRTIEEVFPKYGLKRYFVDQAKVFWRDVVFYRAVPLNAQLRVEDERDMSMAVLVDLKSGVVRVRKLGIPPFAVELEKSNVAWIRRRLEEGARLKLAFVSVDVKRGKDPTYGGLYIALVFAREVTPVEPKALVVVDVNRLDHYIKVGLVADGRVVELWKLPKKERIQKLERIHIHISQLSKALARVDEDIDPRRALDLQRQLWKLETKRYDIIRDIVVDAAREIIKLAREHQAAIVVDTVEDGTYRELKEGNWSGVKKHLLDGLGQLRRRLKESAQWYGLPYLEERLYSAVCPKCGAKMKELNNRRMHCPACGFRAHRDNVPMIWAEKRYQELIEKTKQPVFSSVPTATTFLTL

SEQ ID NO: 42392 - protein, 362 aa, Pyrobaculum sp.
MRTLKFKLKVVETEKLDYLYAEFNRLVRIHLNTIRQSRLYLNPNKNVLHKLTYHWVRSLTDLHSNYVTAARDLALEMVKASAKHRVFPQPGEVPVRLFRNKTYKIEGRRVQIVTRPSEYVVAELLGAEEWFSQWDKAEGALLIRRDGEWYLHVAVEDGAEPAGEPKYYVGIDFGIDRVAVAVVDRERHIVESKLFPLNVSGLRLYLRNARREMQRRGRSFRRERAVLKLLLEETTRALADYIAQFAPAEVRIEYLKGLRRRMLREYGGDWRYVASTAFYRSLYRRLAEKLSRYGIRLVEVSPKDTSTVCHICGKRGIRDGRLFHCLHCNLTTDADINAAINIARRDPALKGEVSSPNNRDWL

SEQ ID NO: 42393 - protein, 407 aa, Pyrobaculum sp.
MYAYRTLKVEIPWRLVEERPDVLDLVTRMHLAAEEYAKTLLKEITGQEEPRLTAEELDRLLTPDRRELAVKIIDEVFPKYGLGRYLVHKAKFFWRDVVFHKAIPLNAQLRVENEKDMSRAVFVDLKSGVLRVRRLGIPPFAIELKKSDVAWIKKRLEEGARLKLGYLGIEKRDDKEEQTYCGLYVALVFAREVTQIEPRALVVVDVNRLDHYIKVGLVADGRVVKLLKFPRKERIRKLEKIHAHISQLSRALARVDEDRDPRRALDLQRQLWKLETKRYGVILDVVINAAREIIKLAREHQAAIVVDTMEDESYRELKERGGNGVRKHLLDGLGQLRKRLQALAQWYGLPYLEERLYSTVCPRCGAKMAVENGRFMRCPACGFRAHRDNVPVIWAERRYWELLQKTK

SEQ ID NO: 42394 - protein, 416 aa, Pyrobaculum sp.
MNQVYRVLKIKIPWKLVEERPDVLDLAVRMRLAVEEYAKTLLKEITGQEEPRLTAEELDRLLTPDRRELARRIIEEVFPKYGLKRYIAEWAKFFWRDVVFHRAVPLNAQLRVGNERDMSMAVFVDLKSCIVRVRKLGIPPFAIELKKGNVAWIRERLEEGAKLKLAFLGVERRKGKELTYGKLYIALVFAREVASVESKAIVAVDVNRLDHGVMMGLLVDGKLRQTLKLPDRRTIKELRKLHEEISSLERRVARETDSARRMLLEERVNRLKSKRYGKIRSVVIQIVKEIIELARQNNAVIVVDTMDDETYQGLKEGNWSGEKKHYLDGLGQLRRRLKELAEWYGLPYLEERLYSTICPRCGAKMAEEKNRIMRCTVCGYSDHRDRVPLLWAKKRYWEILRKKQPVFPQFRRPSYF

SEQ ID NO: 42395 - protein, 347 aa, Pyrobaculum sp.
VFARYGLGKSLANYAKFLWRDVVFHRAVPLDAQLRVENERDVGNAVFVDLKSGVVKVRRLQETLIIHLKRQSAEWIRRRVEEGAKLKLAFLGIERRKSKKPTYGKLYVAPVFAREMTPAEPKTIITVDINRLDHGVMVGLLVDGKLRQTLRLPDKDAIKTLKRLHEEISKLEKQATRETDLARRKRLEERVRYLKSKRYRKIRGVITQIAGEIIKLAREHKAAIVVDTIEDGNYRMLKEGNGSGEKKHFLDGLGQLRRRLQALAHWYDIPYLEERLYSTVCPKCGANMAEERGHIMRCPACGFTDHRDRIPLLWAKRRYWELLQKTKQPRSPHSGDHLTFNRKSAHS

SEQ ID NO: 42396 - protein, 433 aa, Pyrobaculum sp.
MEAGDIEKGSGQRRRSRRRNKSNAEKKDEKKDVLTHAVAVPSPRLSWRKFNALKELEERYKEFVVEFVEYGFKRGVTGQVSLRKALYSELRGRYPDLPSHYVYTAAQDAATRVKSFMALKREGKAKTEKPEIRRISIWLDDRLWKPEGYTAIRVSTHRGRITIPLWPTKQFWKHLNGGWRLKSQPRLKLDEKRRAVYVYFVFEKVVEERPAKGIIAVDLNENNVAVKAGGRVYILETGIRDITLGYHSRREVMQSLKGNRYTSRALKKNELNKKSDIRRKAANFVVREAERLGAAIAVENLPKEVPKNMISRVDDPVLRDRIYKAGFRSMLREIIRKARERGIPVVKVNPRRTSSTCPRCGGGLARGSAPRLLRCPHCGREWGRDVAAVINTERRALEEGRVPPGPMPDDPTPEVSWIPMKAWARRKSLGITA

SEQ ID NO: 42397 - protein, 426 aa, Pyrobaculum sp.
MYAYRTLKVEIPWKLIEERPDVLDLVTRMHLAAEEYVKRLLKELTGQEEPRLTAEELDRHLTPDRRELAHRIIEEIFPKYGLGRALVRYAKFLWHDTVFQQAIPLSTQLRVENEKDMSRAVFVDLKSGVLRVRKLGIPPFAVELKKGSISWIRERLQEGAKLKLAYLGVDVRRGKDPTYGGLYIALVFAREVAPVEPKALVVVDVNRLDHYVKVGLVADGRVVELLKFPKKERIRKLEKIHAHISQLSRALARVDEDRDPRRALDIQRQLWKLETKRYGVIRDVVINAAREIIKLAREHQAAVVVDAVEDDTYRELKERGGNGVKKHFLDGLGQLRRRLQALAQWYGLPYVEERLYSTICPKCGAKMEELRNRRMHCPSCGFGAHRDNVPMIWAEKKYQELIEKTKQPTFPTPNHHTFNLVTTFYS

SEQ ID NO: 42398 - protein, 485 aa, Pyrobaculum sp.
MDNARGGKLLMITIALVAAKVNNMAKSPNAAFTTALWVCLVKLLACPHAPFITNRDFSPTTYKAMYAYRTLRVEIPWKLIEERPDVLDLVTRIHLAAKEYVRRLLKELTGQEEPKLTAEELDRLLTLDKRELARQIIEEVFPKYGLGRYFIDQGKVFWRDVVFHRSIPLNVQLRVEDERDTSKAVFVDLKSGIVRVRKTGIPPFAIRLEKGNVTWIRERLQEGAKLKLAFLDINVRRGKDPTYGGLYIALVFAREVTPVEPKALVVIDVNRLDHYVKVGLVVDGRVVELLKFPRKERIRKLEKIHIHIRQLSRALARVDEDRDQRRALDLQRQLWKLETKRYGIIRDVVINAACEIIKLARERQAAIVVDTIEDDTYRELREGNWRDDKKHFLDGLGQLRRRLKESAQWYGLPYLEERLYSTVCPRCGVKMVEENGRFMRCPACGFRAHRDNVPMIWAERRYRELIEKVKQPTFSTPATVTFLTS

SEQ ID NO: 42399 - protein, 457 aa, Pyrobaculum sp.
VSLDAAFTTAPWVCLVKLLACPHAPFITNRDFSPTTYKAMYAYRTLRVEIPWRLVEERPDVLGLAVRMRLAVEEYARRLLKELTGQEEPKLAPEELVCLLTPDRRELARRIIEEVFPKYGLKRYIAEWAKFFWRDVVFHRAVPLNAQLRVGNERDISMAVFVDLKSCIVRVRKLGIPPFAVKLKKSNVAWIRRRLEEGAKLKLAFLGVEKRDGEKEPTYDKLYVALVFAREVQQIEPKAIVAVDVNRLDHGVVVGLVVDGKIVRRMRLLDENVVRELRRLHEEISRLDEQAAREADPARKRRLEDRARHLASKRFRKIRGVVKYVVSEIIKLAREHQAAIVVDTMEEETYLERKQSGESGDKKHLYDGLGQLRRRLQALAEWYGQPYREVRLYSTICPRCGAKMEELSNRRMRCPSCGFNDNRDNVPLLWAKKRYWELLQKQPVFSSVSTTITLLTS

SEQ ID NO: 42400 - protein, 421 aa, Pyrobaculum sp.
MGQTYRVLKIRIPWRLVEERPDVLDLAVRMRLAAEEYVRRLLKEITGQEEPKLTTEELDRLLTPDRRELARRIIEEVFSKYGLGRCFVKQAKTFWRETAFWRAIPLNAQLRVENEKDVSRAVFVDLRNEILKVRKLGVQPFIIRLRRQTVEWIRERIEEDARLRLAFLGIERQKGKKGPTYGKLYVALVFAREVTPVEPRALVVVDVNRLDHGVAVGLLVDGKLRQTLRLIDRDVIKTLRRLHEEISRLEERAARETDPARRSFLESRARYLKSKRYRKIRGVAEQTAGEIVKLARKHQAAVVVDAMDYETYSARKQSGESGDRKHLYDGLGQLKRRLQTLAQWYGLPYLEERLYSTICPRCGARMVEEKKRIMRCPACGFTDHRDRVPLLWAKRRYWELLQKTKQPAFSSTPTTVTLLTS

SEQ ID NO: 42401 - protein, 422 aa, Pyrobaculum sp.
MYAYRTLKIEIPWRLIEERPDVLDLVTRMHLAAEEYARRLLKEITGQDEPKLAPEELDRLLTPDRRELARRIIEEVFPKYGLGKAFVDYAKFLWRDTVFQRAVPLNTQLRTENERDTSKAVFVDLKSGVVRVRKLGIPPFVVKLKKSDIAWIRERLQEDARLKLAYLGVDVRRGKDPTYGGLYIALVFAREVKPVEPRAIVVVDVNRLDHYIKVGLVADGRVVELLKFPKKERIRKLERIHAHISQLEKALARVDEDRDPRRALDLQRQLWKLETKRYGIIRDVVINAAREIIKLAREHQAAIVVDTIEDDTYRELKECNGNGVRKHFLDGLGQLRRRLQALAQWYGLPYVEERLYSTICPRCGAKMAEEGRRVMHCPACGFGAHRDNVPMIWAEKKYQELIEKTKQPTFSSAPATVTFLTS

SEQ ID NO: 42402 - protein, 421 aa, Pyrobaculum sp.
MSQVYRTLKIRIPWRVVEERPDVLDLATRMHLAVEEYARRLLKELTGQEEPRLTAEELDRLLTPDRRELAHRIIEETFPKYGLKKYFSEWAKFFWRDVAFYRAIPLDVQLRVENERDVSTAVFVDLKSDVVRVRKLGIPPFAVKLKKSDISWIRRRLEEGAKLKLALLGVEKRDGEKDPTYGGLYVALVFAREVTQIEPKALVVVDVNRLDHYIKVGLVADGRVLELWKFPKKERIRKLEKIHAHISQLSRALARIDEDRGPRRALDLQRQLWKLEKKRFGIIRDVVINAAREIIKLAREHQAAIVVDTMEDGTYRELKERGGNGVRKHFLDGLGQLRRRLQALARWYGIPYVEERLYSTICPRCGVKMAMEDGRFMRCPTCGFRAHRDNVPVIWAEKRYWEILQKTKQPTFSATITFLTS

SEQ ID NO: 42403 - protein, 441 aa, Pyrobaculum sp.
LACPHAPFITNRDFSPTTYKAMYAYRTLRIEIPWRLVEERPDVLDLVTRMHLAAEEYARRLLKEIAGQEEPKLAPEELDRLLTPDRRELARRIIDEVFLQYGLGKAFVDYAKFLWRDTVFQRAVPLNTQLRTENERDTGKTVFVDLKSGVLKVRKLGIPPFVVKLKKSDISWIKRRLEEGAKLKLAFLGVEKRNGEKDPTYGGLYIVLVFAREVTQIEPRAIVVVDVNRLDHYIKVGLVVDGRVVELQKFPKRGRIRKLEKVHVHISRLSRALARVDEDRDPRKALDLQRQLWKLKTKRYGIIRDIVINATREIIKLARERQAAIVVDTIEDDTYRELKERNWSGEKKHLLDGLGQLRRRLQALAQWYGLPYLEERLYSTICPKCNAKMVEENGRFMRCPACGFGAHRDNVPMIWAEKRYQELIEKTKQPTFSAAATFLTS

SEQ ID NO: 42404 - protein, 367 aa, unknown
  TnpB Polypeptide
MEKAYKYRIYPNKKQKEIIAKTFGCCRFVYNKYLAKRIEMYKQNQETFSYVQCANDMKKLKSELVWLKEVDSTALQSSLKDLDSAYQKFFKEHSGFPKFKSKKTHKFSYKSKCVNGNIQYCCKHIKLPKIGMVKTKNKLIPQGRILNATVSQDPSGKYYVSLCCTDVNITPFEKTENAVGIDLGIKEFCITSDGEMISNPKYLKKSLGKLAKLQKELSRKPKGSSNRDKARVKVARLQEHIANQRKDFLQKLSAEIVENNDIVCIEDLNVSGMIKNHKLAQSIADVSWSEFVRQLEYKANWYGKQIVKVDRFYASSQTCNVCGYVNKDTKNLSIREWECPCCNTHHDRDVNAAINILNEGLRMIKSA

SEQ ID NO: 42405 - protein, 412 aa, Streptomyces sp.
MVIAMQLRYGFRLYPNGPQLSALARAFGCARVVFNDALRVREDARVTGLPFVTSADLSKRLTASKKTPERAWLGEVSSVILQQSLRDLDSAYRKFFDGLKGKRPKMGPPRFKSKRDTRQAIRFTANAGWKITPGGKLRLPKVGDVPVKWSRTLPSTPTTVTVIKDSAGRCFASFIVETGPEGVLTPVTPQVGIDLGLGHFAVLSDGRKIDSPRFLRRAEKRLKRAQHNLSRKAKGSNNRNKARITLARAHARVADARREFHHQLSTKLIRENQAIAVEDLAVKGLARTRLAKSVHDAGWSQFVAMLAYKADRYGRAFVRIGRFEPPSQVCSACGVKDGPKPLHVREWTCRECGTVLDRDINAAVNIAKAAGLAVTACGARIRPGLVPAQREETGTRPEPHRTIVRQTGIAFL

SEQ ID NO: 42406 - protein, 288 aa, Bacillus sp.
MLQTVTLQVKLLPTKEQIGLLEQSSHEYIRFMNEFVSDMIELKKSTKKSTKDVLASLPSAVKNQAIKDVKSVFSTKVKKSKYKIVCVWNNQNYSYNFTHISFPFMVNGKSARLKIRTLLVAKNNRNYNLLKHKLGTLRITKKSHKWIAQISVTIPTTEKTGTKIMGVDLGIKIPAVAVTDDDKVRFFGNGRRNKYMKRKFRSVCKQLGEGKQLNAIRQHNDKEQRWMKTEDYKTSHKIINFAIYNNISVIRLEQLTNIRQTVRTCRKNEKNLHTWSFYRLERNSSSTK

SEQ ID NO: 42407 - protein, 387 aa, Ruminococcus sp.
MIKTLKVMLCPDNKQRTKLFECAGTARFAYNWALNYQQMNYDIGNDFLSDCDLRKTFTKLKQKDKFKWINDYSNNITKQAIKDACNSYKNFFKGLTKYPKFKSKRKSKPSFYADTCKIQFTDTHIKLEKIADSTRKNRAKANWIRLAEHSRIPLNCKYYNPRVTFDGLNWWISVGIECSANSEKPLNDGIGIDIGIKDLAVCSDKNTYKNINKTEKVRKLKKKKRRLQRKISRKYNKNRKGVRYCKTKNILKSEEQLLKINHRLTNIRHNYLHHVTSEIISRKPKFIVLEDLNVKAMMKNKHLAGAIQEQCFYEFYRQIQYRCNWNNIKFITADRYYPSSKMCSCCGNIKKDLKLKDRTYICAECGNITDRDYQASVNLKRYKELTA

SEQ ID NO: 42408 - protein, 349 aa, unknown
  TnpB Polypeptide
MKEMVTVTAKVQIYLGEQERKQVLATGCLYRMACNEVSKYLFDSDCMNFYEVNGALYHSLREKYGLKSQMSQSVIKTVIAKYRTVKCNGHGKRLIEFKANRYDLVHGRDWSFTNGRVSINTVKGRVKVPFATQGMEKYLDAPDCKYGTATIVVHRDGKAFLHVPVTLEVEKVDSPSTVVGIDRGIRKLAVAYDGKKTTMYSGNVVKNRRAHFSRLRKELQQRQTPSARRRLKAIGNRENSWMRDVNHCVSKALVESNPSGTLFVLEDLKGIRGATERVRVKDRYVSVSWAYYDLEQKLTYKAALAGIPSTPVSGALYVVVSTSIVVTNQIMCTNVRTAAISPTMTALRL

SEQ ID NO: 42409 - protein, 389 aa, unknown
  TnpB Polypeptide
MRVQRTAQIVIEPDEDLKATLQAFIDICNQISPKAWNKGKPLGALPLHKAVYYSVKGKLSSQLTCTAIRLVAGAYVAAKHNGHKLKKPINYKKPFALFLVGKRGRDADFRKDGTLSIWTIAGRKRLNYTVPDYFKPMLAEAKEIDSITVKIRNGKLIGYVSLTTKVPDAPGILPVGVDLNETNVLVAVDPKGRELFISGLERRIANKRTRKTIKRLQKKLATRKAEGKSTRSVARTLKRLQGKQARRTRDFCHVASRRLVEWAPQNCVLVFEDLNFRQGKKGPRFWNRRFHAWPRGMVLAFAKYKVQGKGQVALANPRGTSQTCSRCGLKGNRSRHKFFCPWCGFEVHADLNAAYNVRNRYAVLRDGGVLSATPEASSGGKLMASAVSS

SEQ ID NO: 42410 - protein, 392 aa, unknown
  TnpB Polypeptide
LIETIKVQLRPNNKQLTKLFQYAGCARFAYNWAIAREQENHKQGNKFLSDNELRKEFTQLKKHKEYQWLSKISNNVTKQAIKDACNSYKRFFKGQSDYPKFKSKKHSKQSFYQDNVIIKFTESHVKIEGFAGSKRPNKQQLNWIKLCEKGRMPTNCKYMNPRITYDGLHWFVSVSIDVEDNTDIPSNEGIGIDLGLKDLAVCSDGNTYKNINKSLKVKKLEKKKRRLQRSVSRKYNMNKEGVRYKKTSNIIKREKELLKLSRRLTNIRRNHLHQITSEIVKRKPSFICIEDLNVSGMMKNKHLSKAIQQQGFYEFRRQIQYKSEWNNITVILADRFFPSSKLCSCCGMIKKDLKLSNRIYKCDCGNIIDRDYQASLNLKMYGENVLKQKSVK

SEQ ID NO: 42411 - protein, 414 aa, unknown
  TnpB Polypeptide
MKAPAFASIIPNNFVYLNMLTYEYKLYRSKRNRKLDAMLREACFVWNHALALQKRYYSLTGKYCSCARMKAHFAKRISRCRLHSQTVQEILERLDESYKRFFKHLSARPPKFKRVAEFSSIVWKQGGFKLNANVFVVNSIKQHFRFSYSRPYEGKVKTVRIKRSHLGEYYLYIVTDAVAQPYRKSHDGASVGMDFGLKTYLSMSDGTRVENPLFLKQGIKDLRHKSRDFSRAAYKWDRTNPDGSHPKGAHIVWESNHRKRRRIELERLHEDIRNRRDDWQWKLSHELCRAYDTLCIEDLQLTGMSRLWGRKMADLAFGSFVQKLEHTASKYGCKVVKIDRYYPSSKTCNVCQYVNELLTLSDRSWTCPSCGTHHDRDANAAINILRQGIVSSGSTCKTRLAEQGALVTGESPLL

SEQ ID NO: 42412 - protein, 429 aa, unknown
  TnpB Polypeptide
MTNEERLAKNKQISQTKHDTIERHKNMLVKTFDVKIQENKLSEQQKEALETIFLEQKWYKNYILNWCEQDENNRITKFNTKQNQITKKDKDMNDVPVNIKYLSAQSKQCLISRMYANIKTLHTLKIKGLQKPGRLKYSKEETIIDLKQYGISHKIVSSKRVKLAGLPKTFIVNGLNQFISIPEIEFANARLIHRGTGYFVQFVCYVPKENKSQKKIEKTIGIDFGCSTAFTTNEGRKISASVPESERLKKLQKRQAKKVKGSKNWLRTMKQVKKEYQKITNRRNDLANKIVHEFNQYQTIIIQDEQLRNWHKNGHGRAVQHSVLGRVKSKLLLNPNTVVLGKTVPTTKLCTKCGKWHDELKVWNRTFKCDCGVEMDRDIHAAQNMVWFYENNVGVGRTKFKRLEMKALVDRALAMENQLLSVKDEDFNL

SEQ ID NO: 42413 - protein, 400 aa, unknown
  TnpB Polypeptide
MPAGGEGELTLTVRVRVSPEPESQQALLDLMKRYRDALNYSVRTLIASRALSLTKAHRLLYNDLRERYGLSSRAAQDCYRKAIAIAKSWLKNPRRGAMPTARNLSMWLTYEEGYRIKDNHMELAGGYRLRVIGWDRRYDSFPNREASLVFRDGEFTLYITKKVPRPAKYAPKGVLAVDVNERQIVVGNSRVEQRIETPVERALRYRRLAERLQEKYSSPKYSAWLRRSGVRRRVRHFRRKARNIIEDWARRTSHTIISLAKQSQLAVAREDLMGLIESLRELPKEHRTALIALGYRRLAFWIDWQAEKGGVPLLVVDPADTSSTCPRCGAKLVAVGYRRLRCPRCGLEADRDTIAVLNIEGRALSKMGGSLTTPTAPQVTDVSPNRWGEPSALQGGEEVR

SEQ ID NO: 42414 - protein, 429 aa, unknown
  TnpB Polypeptide
VSRYAVPAGRIVKGFSVRLAPSAEQSARFRRDDGARRFACNWAVGEIRQAFCRGRETGQHDSAVWSYYELRKRWNRTKAEVAPWWTEYSKEAFSNGIADAVAALRNWHASQTGKRQGPRMGFPQFRKKGKDPVRCTYTTGALRVEDSRHVVLPRVGRVETAENIRAIYRHIRRGTGRLMSATVREKNGWWTVSLRLEISAPWQPETRADAVGVDVGIGKDLLIVMRPDGSVVRKVANPRALRASFADLRRASKALSRKTEGSRRWHQAKRRLGRVHAHAAAIRSDALHKATTDLAKTHGRIVIEDLTPGSHMRGVRARRKSWTDAAAGEFRRQLTYKCEWYGSELWLADRWYPSSKTCSACGHANSSMTLADRTWTCPVCNTQHDRDENAGTNLARLPASQAEAQSDSKTALVRRAAMKRVNHPGTVAA

SEQ ID NO: 42415 - protein, 435 aa, unknown
  TnpB Polypeptide
MKRTVTLKLQPSKGQEKILLELAQATAVIWNKINYERLKQFKEFGKIDFGTTEKEAYHTFKDWVGGSTVQQLARKNAEAWRSFFSLLKKKKNGELPDWFKPQPPKFVKEENGGKLFIIPLRNDQYKIENNTIELRRLGKFGRLKIQFKGRTHLKGKQGRLEIIYNEARHKWYAHVSYTVEEKLTSEEWVEVPRQPKGNLTAGIDLGVNNLIAVYVENGEAFLVNGRLLKSIAFYWQKRIADYQSKLNRSGAKTSRRLKRIHQKAKLQARHYINTAVRQTVERLYEMGVSKIVVGYPEGIARNSDKGRKQNFVLSHVWRFNTVIQRLKEVAEEFGISVIVVDEAFTSQTCPLCGQRHSNGRIFRGLFKCRREGVVMNADLVGAFNILKKIKTITPSLPALAGGRGNGGKTLPEGSKTRFNLGLNETPQTSLPMVRG

SEQ ID NO: 42416 - protein, 365 aa, unknown
  TnpB Polypeptide
LNKSFKVRVYPTKEQRVLLEKTFGANRFIYNYFLNLKSKLYEFYKISLSYKNSSKIMTELKKTKTWLKDVDSVSLQQTLRDLDSAYQNFFSGRSEYPKFKKKQDKNSYRTNSNIKIDNRYITIPKIGMLRFRDNYRFEDKHILKIYNITISKTSSGKYFASLSAEVNIKHFEKTNQSCGIDLGLKDFAIFNRGEKINNPRILKHLEVKYRKLAKSLSRKVKGSANYQKVRLKLARFHEYVANVRKDFLHKLSTNIVKSYDIICIETLRVKNMMKNHKLAKSFQDVAHSEFMRQLEYKAKWYGKVLSKVDTFFSSSQLCSSCSYKNKDVKNLNIREWICPECGTYHDRDINSAINILNEGLRLLEV

SEQ ID NO: 42417 - protein, 393 aa, unknown
  TnpB Polypeptide
VWGGVRIVLLKSFKTEISPTEEQIIKINKTIGTCRFIYNFYIAHNKELYENGEKFMTGRHFNVWLNNEYLPNNPDKIWIKDVYTKAVAKSMDSAFIAFTRFFKHRSGFPRFKKKDKSDVKMYFVRNNKTDCLSERHRIKVPTLGWVRLKEKGYIPTSRDGFIVRSGTISHKAGRYYISVLVDIQKQDTKSTNSFGVGVDLGLKSLAICSDGSIYPNINKTYNVRKVEKSLKREQRKLSRKVISIKRGGTTQKNFVKQKLKVQKLYQRLTNIRTDYLNKTIHSIVKTKPAFIVIEDLNISGMMKNRHLSKAVAQQKFFEFKTKLISKCREYNIELRVVDRFYPSSKKCHNCGHINRDLKLSDRIYKCSECGYVEDRDINASLNLRDANTYTVIQ

SEQ ID NO: 42418 - protein, 385 aa, unknown
  TnpB Polypeptide
MLRSFKTEINPTEEQIIKINKTIGACRFIYNFYISHNKRIYGEKQGFMGGREFSVWLNNEYIPNNPDKLWIKEVSTKSVAKSIDNACIAFTRFFKHKSKFPRFKKKNKSDIKMYFVKDYKSGCLSERHRIKVPTLGWVRLKEKGYIPTTKDGFIVRSGTISKKAGRYYVSVLVDVPNKTDTKSNDFGIGIDLGVKEFATCSDGSVYKNINKTHRVRQVENKLKREQRKLSRKVISIKRGESTQKNFAKQELKVQKLYQRLTNIRTDYINKTISKIVKTKPSYIVIEDLNVSGMMKNRHLSKALAQQKFFEFRTKLSQKCKENNIELRVVDRFYPSSKTCHKCGHIKKDLKLSDRTYKCSECGYVGDRDINASLNLRDANTYTIIQ

SEQ ID NO: 42419 - protein, 372 aa, unknown
  TnpB Polypeptide
MGGVTSLNECFKVRIYPNKEQIRVIEDTFNSTRYLYNYMLNLKEKLYKFFGINLSYNSSSKVLTELKKQKTWLKFVDAVALQQCLKDLDNAYQRFFKGQVEYPKFKSKKRSKNSYRTNMNISLNIENRTIKIPKVGSIRFRDMCDFKGITKIYSVTISKTSSGKYYASISAEVYTPCFEKTNQNVGIDLGLKYFAIFSSGEKVDNPKFFIHAQNKLVKMQRKLSKKVFGSNNYHKYKVKVARFHEKIRNKRLDFLHKLSLRLVREYDIICVETLSVKNMIKNHKLTKSFLDTSLCEFIRQLEYKCLWYGKTISKVDRFYPSSQICSNCGFRNRDVKNLNIRDWDCPSCGVHHDRDINASINILHEGLKILSS

SEQ ID NO: 42420 - protein, 398 aa, unknown
  TnpB Polypeptide
MKITRAYKTELDPNNVQRTAMLKHAGVARFAYNWGLARRKEEYAKTGKSSNAIELHKQLNALKKVDFPWMYEVSKCAPQEALRDLDKAFKNFFEGQAEYPKFKSRKRGIGGFRLTGSIKVSRDSIQLPRIGVVRLKEKGYLPADDIHVLSATVSERAGRWFVSLQVEEEIKVPDNAGPVVGVDVGISKLATVSDGTIIENPKALTRFERKKKRLQRSLSRKMKNSKSRFDVKMRLAKCEFRIASIRRDSQHKATTMLARTKSVIGVESLNVAGLLKNHHIAKQLADAGLGEFLRQLEYKAEWYGSKVVEADPFFPSTKRCSSCGAVKEEMPLSERTYRCESCGFEADRDLNAALNLKTVADSWAETLNARERGEVHAERQVLPDEAGTEHHLGGVLDG

SEQ ID NO: 42421 - protein, 336 aa, unknown
  TnpB Polypeptide
MFAHKKCAKNVSMTQKAYKYRFYPTPEQEVLLRKTLGCVRLVYNRALAMRTSAWFERQERVGYAETSAMLTQWKQTEELQFLNEVSCVPLQQGLRHLQSAFSNFFAGRAKYPNFKKKRNGGSAEFTRSAFRWRDGQVYLAKCDQPLEIVWSRELPNGAEPSTITVKLSASGQWFVSLLVDVEMEHLPPSEKQIGLDMGITSLITTSNGDKISNPKTFKAKYKKLRRAQKALSRKQKGSKNREKARRKVARVHTTIANARTDFLHKLTTQLVKENQLIAVEDLAVKNMLKNRRLAQAISDVGWGELVRQLEYKCGWYGRRLINNMCGIPHRLYGGEG

SEQ ID NO: 42422 - protein, 398 aa, unknown
  TnpB Polypeptide
VKQVLTVRCKLEPQPEQLPSLQALCHAFASACNYVHKEVPEQLTNELRMQSLVYRSVRVLFDLSSQLAIHAIRRVSGNRKTAKQKGKPIREFRPTSVTYDARTFSFRESDYTVSLTTLGKRERFRLHIGKYQRKLLEGQKPKTATLVVNAKGEYHLHIQLESEPARPPVTENVLGVDLGRTDIAVTSDGHSFSGEGVTKIRNHYARLRAALQRKATRGTRSSRRRCRQLLQRLSGKERRFQQHTNHVVSTSIVRHAKANSQVIALENLTGIRQRTNQQPRSTTERRLSNSWAFYQLRQFLTYKAIKHGVKLILVHPAYTSQTCHKCLHIHPEAGKSYRQGKKFGCGHCGWAGDADLNGAKNIAILGRSINTPRGSGLACSLSKHVSGLLKTPSAYAVG

SEQ ID NO: 42423 - protein, 424 aa, unknown
  TnpB Polypeptide
VERRKVTFKLYPNARESDRLAGWVRLHCELYNAALAERIDAYRKAGKSISYFDQQNVLPEIKADRPEFVELGSHALQQTLRRLDLAFQAFFRRIRAGQTPGFPRFKASKRFSGFCYPDPVGWKLHQQGQRGGTLRLGSGKGAMMIRLRGRHRFGAQAKPNDLTIIRKNGEWFASVTLRVPEAACARARHDHQHRGVDFGLTDWATFDNGETIANPRWTRNELPRLADLQRQRARKKIGSLRYKRLNLQAAQLHARIGNRRRDFVHQKTSMLVRTCAVIATEELTPKNMSRSARGTVESPGRRVRQKAGLNREILSAAFGMAHQMLSYKAVEAGTRLHLANTRQLKPSQRCAGCWAIIPKTLGQRVHMCSQCGHTMQRDQNSALVVLIDAHTPGTGVAAKPRPLGRKRAKSKSMTREPPATTVKV

SEQ ID NO: 42424 - protein, 402 aa, Escherichia sp.
VKRLQAFKFQLRPGGQQEREMRRFAGACRFVFNRALALQNENHEAGNKYIPYGKMASWLVEWKNATETQWLKDAPSQPLQQSLKDLERAYKNFFRKRAAFPRFKKRGQNDAFRYPQGVKLDQENSRIFLPKLGWMRYRNSRQVTGVVKNVTASQSCGKWYISIQTENEVSTPVHPSALMVGLDAGVAKLATLSDGTVFGPVNSFQKNQKTLARLQRQLSRKVKFSNNWQKQKRKIQRLHSCIANIRRDYLHKVTTTVSKNHAMIVIEDLKVSNMSKSAAGTVSQPGRNVRAKSGLNRSILDQGWYEMRRQLEYKQLWRGGQVLAVPPAYTSQRCAYCGHTAKENRLSQSKFRCQACGYTANADVNGARNILAAGHAVLACGEMVQSGRPLKQEPTEMIQATA

SEQ ID NO: 42425 - protein, 402 aa, Escherichia sp.
VKRLQAFKFQLRPGGQQECEMRRFAGACRFVFNRALARQNENHEAGNKYIPYGKMASWLVEWKNATETQWLKDSPSQPLQQSLKDLERAYKNFFRKRAAFPRFKKRGQNDVFRYPQGVKLDQENSRIFLPKLGWMRYRNSRQVTGVVKNVTVSQSCGKWYISIQTESEVSTPVHPSASMVGLDAGVAKLATLSDGTVFEPVNSFQKNQKKLARLQRQLSRKVKFSNNWQKQKRKIQRLHSCIANIRRDYLHKVTTAVSKNHAMIVIEDLKVSNMSKSAAGTVSQPGRNVRAKSGLNRSILDQGWYEMHRQLEYKQLWRGGQVLAVPPAYTSQRCACCGHTAKENRLSQSKFRCQVCGYTANADVNGARNILAAGHAVLACGEMVQSGRPLKQEPTEMIQATA

SEQ ID NO: 42426 - protein, 351 aa, unknown
  TnpB Polypeptide
MIHLVNKAFKFRIYPTKDQQILINKTFGCSRFVYNYYLAKSIADYQESGKSNSCFQNCNDSTRLKNELIWLKEVDGWAITNSLRDLDSAYQNFFRRVKQGQKPGFPRFKKRSNNRQSYRTTKSNKTDLQIKDSKIKLPKLGWVKMKQDRQIVGQIQNATISRTPSNKYFISICCKNVPIYEFEQTGSVIGIDVGLKEFAITSDGDKFHNPKYLSKSEKRLKRLQRKHSKKQKGSKNKEKSRIKLAKLYEKVTNQRKDFIHKLTTELLKNHDVICCENLNVTGMIKNHKLAKAISDVSWSEFFYQLKYKADWYSKKFIVKKICKESLQIRFINKYVDEAANETIKKIVIEKM

SEQ ID NO: 42427 - protein, 251 aa, unknown
  TnpB Polypeptide
VERDDTPAKRPTKGGAVGVDLGVKTLATLSDGAVIENPRYLKKSERKLKRAQKSLSRKVQGSNRRAKARMKVARLHAHVANQRLDAMHKLTTRLAETFSDISIEDLHVAGMVKNHHLAKSIMDAAFGEFRRQLEYKTTRTGARLHVVDRWYRSSKTCSGCGSVKAKLSLSERTYKCDSCGLTMDRDLNAAINIKVAGSAPETLNAHGETVRRNRPSGRVALVSVKCEPSGGESRVRLGADSRKAVLQVAVR

SEQ ID NO: 42428 - protein, 236 aa, unknown
  TnpB Polypeptide
MWQRRRGQCDLLYRKRTKMFFLAVTVDAPEPTPDEPQDDVGVDLGIITLAATSDGEFLNHSTGPRHAHINQVRARYSRMRRKLQVKGTKSAKRLLRKRRGREKRFARDINHCLSKALVSTAKDTGRGIALEDLKNIRSRVNGSTRQRRVLHNWAFFQLRAFMAYKAALVGVLVVDVNPAYTSQTCSRCGHCEKANRKSQARFLCVRCGFACHADLNAAENIRRVAVMRPHAAPLAG

SEQ ID NO: 42429 - protein, 407 aa, Streptomyces sp.
MQLRYAFRLYPDSGQRTALAKAFGCARVVFNDAVRAREDARAAGLAFPTAGHLSKQLITQAKQTDARSWLGEVSAVVLQQSLRDVEAAYKNFFASLKGGRKGPRMGAPRFKSRKDNRQSIRFTANARWSVTGSGRLNLPRIGAVKVTWSRTLPTTPTSVTVIKDAAGRYFASFVIDTDPHADATRMPDTDQTVGIDLGLTHFAILDDGTKIDSPRFLRRAEKKLKKAQRELSRKQKGSKNRNKARLKVARAHAKVADARREFHHRLSMKLIRDNQAIGVEDLAVKGLACTRLAKSVHDAGWAQFVAMLEYKAVRYGRSLVKVGRFEPTSQVCSACGAKDGPKPLNVREWTCTACGAVHDRDHNAAKNVKTAAGLAVTACGAQVRPGLVPAQRDEAGSHGFPSEPRAA

SEQ ID NO: 42430 - protein, 239 aa, Calidithermus sp.
VDRGQRHLAVAVTPEGRSLYLSFGWIRHIRRHYAAKRRRLQKAGKHKTVKRLEQKEQRIIRHTNHILSKKLVAFAKEHGCGIRMEDLTGIRQSPQRKATKSQADHNRDFWPYYDLETKTAYKALSAGIKFEKVPAAYTSQTCCKCGAIGVRNRHSFRCERCGYRGHADHNAGRNLANWLGLSCPWVNRPVRALSQQGIVPVALQAPQGGVHGTPWGYPNGNLPPSSVRPMQRASRVAEG

SEQ ID NO: 42431 - protein, 376 aa, Calidithermus sp.
MTMLKAFKYRLYPTQPQQKDLERTLSLCRQLYNAALQERRDAYRKAGKTVGFYEQKRHLPEIRAELPEYKHIHSQVLQNVIERVDKAFQGFFRRVKAGEKPGYPRFKGQGRYDSFTFPQANQTGVKVQDGRVLLYGIGSVKCKFHRPIQGAIKTATLKREGEHWYIVFVCEFEPQPLPENHEAIGIDLGTNPNFLITSEGEMVEAPRYFQKAQAKLATAQRSLARKKRGSRRRKQARRRVAKLHRKIANQRKDFHHKLARRLVSRYGTVVHEDLNILGLARSRTAKGVQDAGWAQFLQILAYKAEEAGRRVVGVDPKHTSQDCPVCGHREKKPLWVREFTCPACGASLHRDVAAALNVLARARTEPSGMGTAWAVP

SEQ ID NO: 42432 - protein, 220 aa, Bacillus sp.
DGKYWYLSASIEQEFTKEKLTAVSLGIDIGIKELAYCSNGQKKKNINKTKVVRKAEKRLRRLQRQVSRKYEMNREGNRFVKTSNIIKIEQEIRQLHRRLSNIRKNHLHQSTSEIVKTKPFRIVMETLHMKGLMKKRHLAKAIAKQCLHEFKRQIQFKCEKYGIEFVEADTWYPSSKMCSNCGSINKELKLSDRVYKCTCGHEIDRDLNAAINLSRYELAN

SEQ ID NO: 42433 - protein, 317 aa, Lactobacillus sp.
VIKKSTKRPTGLDRITTKQYPWLSDEYLDSDMFTNTKVHYQNAWNMFRKVHSAGIPKFKRKNRPVQSYSTSNHYSTKTVKNNGGVFSLYNGSIKFLDGSHIQLPKVGRIKVKLHRALPTNRLVRIATVTIKHYATGDWTVSLLLKSDEPFHQALPKTNQTVGIDLNTDNFLTTSEAAVTANPRYYCTIKKRLAKAQRVLSRRERRAKKEHRSLRKSRNYQKQRGLVAKIHVQVRCQRQNFLHGLATTLIKNHDLVVAENLKSKNMLRNHALAMSISDVGWRTFLSMLEYKAPLYGRLFVKVNPAYTTQTKLVMIVAL

SEQ ID NO: 42434 - protein, 410 aa, unknown
  TnpB Polypeptide
VLKSYSLKHERGEELFPLLKAYRDAVNRVLEELWNSIEWEKRKVNGKKQWRLLPKYKVDIHSKEYKKKLRESLLVDWPYAAHWVDSAIKTAYSIFKSWRKNYVKGDRRRRRPTAKRLFARAKQTLIKLEGEKLRVTVKPGEHVHIDLTHRYFPLPSEVSSAGLGEPIITPEKIHLPVHYEDGNQGGKPSVAWDFNLLSFDGYSPETGWIRIDTSKLASVHISSFEKRRSVQRKASKSKKARRILAKYSNRERNRAGKHQLEITRVIQSVCGPVGLEELKKQGMFSRSRIWNRRISRSDWRGIARILEGRMGEVKVEELDPYGSSSYCSRCGWENRDLNGADIFVCGGCGLRLDRQLNAAINLYMRMRFGYTVGWVRGKNEVELRMEGASRRLWWDHVVLPSLVGGCVPTG

SEQ ID NO: 42435 - protein, 456 aa, Actinopolyspora sp.
MATVLQAYQFALEPTPDQRAMLSSHCGAARFAYNWGLAQVKAVMEQRSAERSYDLPEDQLTPSMPWSAYSLRKAWNTAKHDVAPWWGENSKEAYASGLANLATALDNWNKSRKGKRAGGKMGFPRFKSKRHRLSCRFTTGSFGLAARDRRHVKLPRIGTVRTYESTRTLARHVERGIAHICSASVSFHRGRWHVSFSVEITKTEPKPAGKGGAVGVDLGIKSLAVLSTGETIANPKHLEVAQRELRRLQRQASRRNGPDKRPRKQPSNRWCKTQARIAKLNIAIANARRDGLHKLSARLVNEFDAVVVEDLNVAGMVRNHKLARVVSDVGMAELRRQLDYKTTWNGRDLVVADRWYPSSKTCNDCGAVKAKLRLSERTFTCDHCGYTADRDLNAARNLAGLASTASCVGTENTPAGNPRKTSPAGNGYRHGKTPPQRAGANAAPQGDSSGTLLHVS

SEQ ID NO: 42436 - protein, 405 aa, Actinopolyspora sp.
MQLRYRYRLYPTPGQRRALAQAFGNARVVFNDAVRARQDAHAAGEEFPSGTQLQKRLITDAKKTPERQWLSRAQHSMLQQAIRDCDQAYRNFFDSLKGARVGRKVGAPRFKSRKDNRQAIRFQPDGFRVLDNGKLRVSKIGDVTVAWSRDLPSDPSSVTVVTTADDRYFASFVVEVGDETLPTAVDEHGQDVELGLDLGLSAFAVDQHGRIIDNPRFLRRAERKLKRAQRELSRKQRGSNNRAKARKKLARQHAKVADTRQDWLHQATTSIVRENQTIVLEDLAVSGLARTRLAKSVHDAAWGTFRRLLEEKAARYGRQLIVIDRWLPTSQTCSGCGRIDGKKSLDVRTWSCPCGTVHDRDRNAARNILAAGRAERHNACGPDIRPHTGADGDEAGTHRSAAPAQ

SEQ ID NO: 42437 - protein, 410 aa, Actinopolyspora sp.
MQLRYRYRLYPTPGQRRALAQAFGNARVVYNDAVRARQDAHAAGEKFPSGTVLQKRLITDAKRTDERGWLGQCSNIVLQQAIRDCDAAFRNFFDSLKGKRAGRRVGAPRFKSRKDNRQAIRLHTGGFSIRPNGKLRLARIGDVKVAWSRDLPSAPSSVTVVKTADDRYFASFVVEVGDETLPAAVDERGEDVEIGLDLGLSAFAVDDQGRVLDNPRFLRRAERKLKRAQRELSRKKKGSNNRNKARRKLARQHVKVTDTRSDWLHKATTSIVRENQTIVLEDLVVSGLARTRLAKSVHDASWGTFRRLLDEKAHRYGRQLVVIDRWLPMSQTCSDCGRIDGPKPLDVRTWECPCGATHDRDHNAARNILAAGRAERQNACGPDVRPHTGADGDEAGSSGTPRGAAAPHAA

SEQ ID NO: 42438 - protein, 387 aa, Actinopolyspora sp.
MTGMRAAYKCRAYPDSDQAAQLGRTFGCVRLVWNKTLDQRHRAYHAHGTKTSYTETDAALSRWKKTEDLGFLSEVSSVPLQQTLRHQHTAFANFFAGRAKYPRFKNRNGKQSAHYTRSAFKLRDGHLTLAKQSAPLNFVWSWDDDTLANLNPTMVVVSREQDGRWYVTFAVDTDDPEPAAPTGEALGIDLGVKDFATLSTGETIANPKHLDRKERTLARYQRQMARKQRGSNNRRKATRNLARAHRKIRHARADFLHRTTTNLVRRADVIAIEDLNMSGMTSSAKGTTDKPGRNVKAKAGLNRAVMDAALGEFRRQLEYKTTRAGKTLAVVDRWYPSSKTCSACGHLLPSLTLSTRAWTCPDCGTRHDRDHNAAKNILAAGRAVAGP

SEQ ID NO: 42439 - protein, 285 aa, unknown
  TnpB Polypeptide
MKIGYQVISYKFRLYPTKEQEEKLLEVLDRCRFVYNKMLEGLNKQDKPSWLELQNSIPELKEKYPELKEIYSKVLQYESYRLFSNLRGLARLKKNGKKVGRLRFKGKSWFKTFTYNQNGFKIIETGNRHDLLHLSKIGDIKIRMHRKVKEGKIKQVTVKRYSSGKWYAFLYCEQRISNKKEIGKVVGIDMGILYYVTDTDGRKVEHPLYLSKSLKSLRRKQQKLSKKKKGSGNYNKQKIKVTKIHEKIKNQRDDFLHKLSRFYVNNYGFIAVEKLNIKGLIGIKL

SEQ ID NO: 42440 - protein, 400 aa, unknown
  TnpB Polypeptide
MKTGYQVINYKFRLYPTKEQEEKMLEVLDRCRFVYNKMLEGLNKQDKPSWLELQNSLPELKEQYPELKKVYSKALHYEPYRLFSNLRGLARLKKNGKKVGRLRFKGKGWFKTFTYNQKGFKIIETGKRCELLHLSKIGDIKVRMHRKVEGKKIKQVTVKRYSSGKWYAFVCCEQTIPDKKGIEKGVGIDVGIIHYVTDTCGRQIEHPLYLNKSLKSLRKKQQKLSKKKKGSNNYNKQKIKVAKIHEKIKNQRDDFLHKLLRFYVNNYDLIAIEKLNVNGLIRISYNARYIMDSSWNKFTQFLSYKAERAGKTVVEVNPRGTTQECYRCGEGVKKSLYIRTHKCPYCGLEIDRDYNSSFVVLKRGLEVLGQGLSKFMPVEIEPLPREISASSVVEPGSSLQ

SEQ ID NO: 42441 - protein, 281 aa, unknown
  TnpB Polypeptide
VVVFTSQQCKLKDGYIYFPKKTNINPLKTKVSNLCQVRIIPQCSCHIIEVVYEKESVETTGLEPDSYLSIDLGLNNLVTSYDSLNHKSFIVNGRPLKSINQYFNKKKALLMSYIGNRGTSNRIGKLTLKRNCKVNDYMHKASHFIVNYCIEHHISTIVIGNNKDWKQNCNMGKRNNQNFVSIPFEKLISMIQYKSEEVGIRVVITEESYTSKVDHYAGEEMCHHDSYLGKRIKRGLYRSSTGKILNADLNGAIGILRKVSHESYMQVVSRGGVETPSRILM

SEQ ID NO: 42442 - protein, 225 aa, Halobacterium sp.
  misc_feature (186)..(189): Xaa can be any naturally occurring amino acid
VDDPVPAENGTVLGVDLGVENIAVTSTGAFWSADELNHWRTEYVQRRKSLQECGSRWAHENVQAVGRKEKGRFKQYLHRVANELVDEAAENGCTMIAFENLTGIRERMPDARKFHEWAFRRLYDYVSYKAEVRGIQVEQVNPKNTSRRCSSCGFTHEDNRPAQDTFCCQSCKYENHADYNAAKNIXXXXSTPSQPNWRRRRRTRRRALEHRDAKRERGQAPAGFG

SEQ ID NO: 42443 - protein, 385 aa, unknown
  TnpB Polypeptide
MAHSVDNKTMKLTLQTQLRPTSDQVAELEKTMRAFNTAADWLAGEAFARKTANRIALQKLFYQTLRDRYGLSAQMAVRCIAQVSEAYKRDKSKRPHFRPLAAIPYDQRIMSFKGADRVSLLTLSGRIMVPFVMGRYQAGRFTAAKGQCDLVRRKDGKWFLLVTVDLPDGTKTPPTDVLGVDLGVENIATDSDGQRYSGAHIEECRLRHHNLRRSLQKSATGRKRRGRRPRSIRRKLKSIAGREARFRQDTNHVISKMLVAKAKGTGRGLALEDLRGIRHRTRFRKQQRAKMGGWAFHQIRTFVEYKAQQAGVDVVLVDPRNTSRQCSVCGHAARANRPSQSEFRCVACGHTDHADVNAARNIRSRARAAVNQPKVSEPHLELQAA

SEQ ID NO: 42444 - protein, 679 aa, Actinoplanes sp.
VNVNRGYVRRLVLTCGQVAALDEQGHAARAMWNLLHAWWTWGGRNRRSALKQADEAIRQARKDIGWLAVLPAQAAQQVLKTYVTAWRNCWKGRACAPQFKSRIRSRMAVDVPQGGELAVTRLSRHVGQVRIPKIGVVRFRWSGPIPGAGRERGRITGARIVKDVLGWHIVFRTEVESPVPARHEGPAVGIDRGINVALALSDGEDQTHGAWIRPKEAERLLRLERKAARQNRERSKPFEKTSNRLRRTYGQIAGARARIKRRRSDWQHKTTTTIAQRYGIVVVEDLRVSTMVRSAKGTTLTQGVNVRQKAGLNRSMLNEAHARTVEMLTYKLVERGGQLLKVPPAYTSQTCSACGHRDRQSRKGVAFVCTSCGWAGHADTNAAVNIVNAAGLAVSGRGACEVAGCETSTTQSAADRLWVSALSRGQRRSFEGRCRRRRDVDQQQGEAEGDRPQDQAGVGAHRSVRPPGPPVPGAQDQAGQQCPAEERAGRDRVRDEQEAGGGHDPDGQCLGHAQGNALLHRPTLRTVSKPCQDADMTSGVGDLDLSVGYALKQAAAALRTAMDAELRPLGLSVPQYSCLELLGQRPGLSAAELARGVFVTRQSMHALLLGLEERGLLARASSAPQGRALPTRLTDAGREVLTEASRTVAAVERRMTEALSDGGRERLQADLAACVRALS

SEQ ID NO: 42445 - protein, 510 aa, unknown
  TnpB Polypeptide
MRTQTPSYVVSVKLRLSETIENHLEKSFHIANSAYNEALSFGLHRFESMKQSSTYQELLEYRRELLQKSEKEQKTKNFKAQKKEIDKALTEIRKDYGLTEYGLSGQLSQQRRKSGSVYRHLNSGELQVIAKQAYKTLEKVLFYQIKPHKVRFRSKFDLDVSFRNRVNSTGTRLEESDKTGIAYRLYLHKASTFIDIPVKAFNDYQQMNLLRSERIKYVQVIRKTIRGKKVYYLQIICEGYPHTKTSKGEGTIGIDPGVSTVAYVTPNEVALVDLVPSTINQKEKHIKSLERRIERSRRVNNSDCYNEDGTIKKGSCFKRPSKRAQHLLTRRQKTYRSLSEERKKLQGQLITHLVSQASVIKIEELNVKGLRKRARDIRINPKTNRPFSKKRFGKSIFRAAPSAFREALKTRATQLGIEVIMISPKDVRPSQYNHISQTFEKKPLSTRIFDLSSEWIGLQRDLYSAFLIGHIEGGHYEQERLEKDFPTFYILMKDFLQQPIQTSRLAWYLS

SEQ ID NO: 42446 - protein, 415 aa, unknown
  TnpB Polypeptide
MEVTKTVKAKLVGLTKNKREALEAEYANYQKALLRAEELIEKLNISTLKQANELLYDESSEYSLKNLAPLYSAAYQMAYKRALCARGRSKKEQPLRLRNDTFDVRKTENEIATYWAKIPVYANHGGIKVALKMSPKHEELLQDSDIRTCDSEVLKRGDDFYLHITVKKRVDVAPKRSGRLAIIGIDAGIRNTATSVVLRNDSITGARMHSGGKLAHKTRQAKARLAKLHKLAFSHNSYHCVEKALDKEMEIGRRISNYTRDYLHKVSSEIVKQAVELRAQGYDVLVAVENLKHIRERISGKLQWWAFRQLLGFVKYKAEWAGIAYLEVEPANTSRICPKCGHCDKKNRKGLNFLCTECEYNANADFVGAANVARRSLASPGLHALGKGCHDYILEVASSMPQAMMLRQTQRYPDP

SEQ ID NO: 42447 - protein, 401 aa, unknown
  TnpB Polypeptide
MLIHKGFKYRLYPTEEQEEILLQCGGNTRFLWNYALMLNQDYYKETSKFKFYYEMAMSLPELKKEHPFLKISHSQSLQTVLKQFDKALKNSFKNKKGFPKFKKKLLLNDSFTSPQAWKLKKGFVFIPKVGEVKWKKNRPLKGKPKSITIKQDGNKWYCSVLCEYEVKEKKKKSKNIVGCDVGIKEFATLSDETVINNPKITNKYKDKLTKEQRSLSKKKNGGKNRFKQRLKVRKVQNKIKDTRIDFLHKTSSSIAKNYDGIVVEDLNVVGMLKNHCLAKAISDVSWSEFNRQLEYKCLWNFKHYIKIDRFFPSSKTCSRCGCVQDMPLSKRTFNCPDCGLKMDRDYNSSINIKEQGLNLIKNTQSNTLGYSEINACGDVLLGTSMKQEKECLDNQAEATRL

SEQ ID NO: 42448 - protein, 428 aa, unknown
  TnpB Polypeptide
MLNTRLEAGRCLYNACLGETCKRLGLMRSSKKWRSAIRKKKSKLRTNMFKAARNKAVYTEYHLHDYVGTLRNSCWIKDHIDSLTAQKIATRAFNAVTDYEFGKHGKPRFKRRGWMSSLEGKNNKSGIRWCDDHVEWSGLSLNCVFDKKDKFGVQAHALSHDVKYVRLVKKTVRGNLRWFAQLVLKGTAKIKRENMIGTETVGLDIGPSTGAIVGDSDALLLEFCPEVVVPYKQIRVVQRKMGRSLRSSNPDNYNGNGTTKAGAGKGKQRWIFSAKYLALKAELAELQRVLAETRKRVHGKLVNKILTLGIDIKTEKLSYKALQRTFGKSISRRAPGMFMSMLRRKAENAGGNVTEFSTQSTKLSQACHCGEVNKKPLSQRWHACSCGVNTQRDLYSAFLAKHVSNDILDTRQAAAAWPGANLLLERAC

SEQ ID NO: 42449 - protein, 415 aa, Planktothrix sp.
  misc_feature (263)..(309): Xaa can be any naturally occurring amino acid
MLNALKVRLYPNKEQEVALAKNFGCCRLVWNYYLEKTNNQYKETGKGLSYCEMAAYLTQLKKLPDYLFLQEATAATLQQSLKNLESAFKNFFQKRAKFPKFKSKHKKQSIRYPESCSIKGNGVKLPKLGIVKARIPKTISSKIKSVTVSKTSTDKYFAAILFETDDLTLDKTGKISGIDLGLTSLVTVFDGETYRKVDPIKPTRKYAQRLRRRQQTLSRKTKGSNNRKKQVKRVAKVHEKIANTRQDFLHKISRELVDENQVXXXXXXXXXXXXXXXXXXXXXXXXXXXXXXXXXXXXXXXXXXXXXXXGYKLEREGGKLIEVDRFFPSTKLCNCCKFKNNSLNLSIREWVCPNCQTHHDRDENAAKNIREEGIRILSTNTVGHTEIQACGEDVRLVAACCKKHSSVKQESPVTA

SEQ ID NO: 42450 - protein, 237 aa, Methanobacteriaceae sp.
MIRLGYPMGRNFARKYGVRYLYFTIPKHIWDKKIKEVRILPKCDGLYFEIGYIYIQQPVEAELNKDSYLSIDLGLDNFAACISTNGTSFIMEGRGIKSFNRWWNKEKAKVQSIYDKQGIKKGRKLCYLFRKRKNVINEYMNKNVQYIIQYCLKNKIGNIVIGELKNIKQNINIGRKNNQNFVNIPHNLFKQKIKSKCELYGIEYIETSESYTSQECSQCRIIDKTNRKHRGLYTCKN

SEQ ID NO: 42451 - protein, 241 aa, unknown
  TnpB Polypeptide
LLTSRRGETDLAFVRGDWYLFATCEVETPDPIDVDGALGIDLGVRNIATDSDGETHSGKAIKNVRYRHRRLRNKLQKLGTLGSRRRLRQLAGQERRFAKHVNHSLSKRIVAKAECTKRAIVLEDLRHIRTRMKARRSQRATLHSWAFAQLRAFIAYKAQLRGVPIHFVDPRNTSRTCPQCSHCAKENRKTQASFVCVSCGFAGPADTIAAGNIARRAAVNPPYCSEATATAVVAPEQSCLL

SEQ ID NO: 42452 - protein, 421 aa, Moorea sp.
MRTAYQYRLRPTQQQAALIDRWLSMLCAQYNYLLADRFNWYEQNRSPVNACPLICHLPQLRINPNYYSQKKTLPQLKQERPWYKDIHSQVLQDVVKRVKLTFDRFLIGDSSGKRSGKPRFKPLSRYRTFTYPQIKQSCLQGNRIDLPKLGKIKVVLHRQIPDGFKIKTVSISKKADGLYVTLSLEDKTVPEIKTDINPHLIIGIDVGLKDFLTTSSGETVTIPQHYRKAQKRLRLIQKKVSRREKGGNRRLKAIKLLAKQHQKVANKRKDFHFKTANQLLSKYDVIAHETLNVKGLARTKLALSVLDAGWSSFLSILTNKALNAGLLVVPVSAHNTSQNCSSCGEKVPKKLHIRWHDCPHCGCSLDRDHNAAIRRSRSVAKGLSRRYANNIKNRAVGHPVLKAQLMSDGIPGVAEKPTLTR

SEQ ID NO: 42453 - protein, 471 aa, Moorea sp.
MYRTVSVRADFSDEDKAFWVFQCENANNLWNCATYYSKQKHYKWLEQQPEAYTTYWKDEILRYGWKTYKCSTKYAELCRELKDNPHYKAMAAQSAQQTLKSVAESITSYNQLVGLYYKGQVDRPKLLRYRKKGGLAAVTFPRQALTYKEGLFCPSISKESKPDLLTKITLQAPDFIDPDWVNEVTVRPYLGQLWIDWVIDDGKKPVESNPNLDYSQAWSFDHGGDNWLTGVSTHGKSLIIDGRKLKSMNQGYARLVAKYKTGKPEFYWDSNLDRVQRKRNNQMRDAINKAARFIINRCLSDSAKPTLRERVGNLIIGWNERQKDSINIGKRGNQNFVVIPTKRLINRLEQLCPEYGIKLTITEEAYTSKASCLDKDSLPNYGEKPKNWKPSGKRVKRGLYKTSSGCLINADCNGATNIARKVATQLGIDLAKVSREFLTVPHRYDIFKSLKKSYRTRLLRSTVSTCHVTTS

SEQ ID NO: 42454 - protein, 402 aa, Escherichia sp.
VKRLQAFKFQLRPGGQQECEMRRFAGACRFVFNRALARQNENHEAGNKYIPYGKMASWLVEWKNATERQWLKDSPSQPLQQSLKDLERAYKNFFRKRAAFPRFKKRGQNDAFRYPQGVKLDQENSRIFLPKLGWMRYRNSRQVTDVVKNVTVSQSCGKWYISIQTESEVSTPAHPSASMVGLDAGVAKLATLSDGTVFEPVNSFQKNQKTLARLQRQLSRKVKFSNNWQKQKRKIQRLHSCIANIRRDYLHKVTTAVSKNHAMIFIEDLKVSNMSKSAAGTVSQPGRNVRAKSGLNRSILDQGWYEMHRQLEYKQLWRGGQVLAVPPAYTSQRCAYCGHTAKENRLSQSKFRCQVCGYTANADVNGARNILAAGHAVLACGEMVQSGRPLKQEPTEMIQATA

SEQ ID NO: 42455 - protein, 388 aa, Spirochaetes sp.
MTLSHKIQLDPTVKQRIYFAKAAGTSRFVYNWALAEWNRLYEAGEKPTGYVLEKNFNAMKYKEFPWIKEIHRDAHKRPFTNLHLAFNRFFQKKAKRPTFKKKGKRDAFYMENYVFRVDGSRIRLPRIGWIRLTEPLRFAGKINYAVVSRKADRWFISVSVDVGEYKKPRVSDNIVGVDLGLTSFATLSTGEHIIAPKPLRTMLSRLQKRSRDHSRKQKGSNNKKKSAMRLARLHAEIGNVRSDFLHKLSTRLCQENQLIAIEDLRVRNMIKNRKLSRAIADASWSEFRRQLEYKATIFGTQVVVVNPRNTSKACSNCGCIKETLSLSDRVYRCTECGVEIDRDVNAAKNIHTLGSREIQACGESVRPVCKKAVLAEAGTRKLSVRRAS

SEQ ID NO: 42456 - protein, 308 aa, unknown
  TnpB Polypeptide
LKLAKKGRYAFNDCKLPHYLLKDGFATLVIRFMRLNGNKLILPYSQTFKKSHKLIEVIIPPVLTHKKIKEICIIPKANARFFEIQYIYEVKEQSLGLDTSNALSLDLGINNLVTAVSNNGKSFIIDGKKLKSLNQWYNKQNARLQSIKNKQCFGKKTTSRQKAIARDRNNKVNDYMAKTARYIINYCISNNIRTLVAGYNETFQGGSNIGKSNNQNFVNIPYGKLRDKVEYLYGLYGIVFVKQEESYTSKASFWDKDNIPVYNNDNPKTYTFSGKRVHKGYGFVHMYDKDAARPLVMAINSVLLSFVT

SEQ ID NO: 42457 - protein, 424 aa, unknown
  TnpB Polypeptide
MLLQRAYRYEMDPNVTQRKLFAQHAGVARFAYNWGLARRIRYYRLFKKTVTGFTLLKHLNKRKLQKFPWMREVSTYAVQSAMADLDAAFANFFTNLKAGRKPGFPKFKEKGKNPDKFRLYGCIHIDASRVQLPRIGVVRLKEVSKVEGKIKSAAVRRVADRWYVSILTELDVPEPIPSQKPACGIDLGMSSDHCDSSFATIVSERLDGSLKIRKVRAPKPLARSLERLARAQKKLSRKQRGSNNKKKTAMRVARLYRRIGNVRADFLHKLSNDIAKNHGTIHVEDLNVKGMMGSNLARGLSDIGMAEFVRQLEYKAGDCGGKVEKADRFYPSSKLCSVCGHKTKTLPLSVRDWTCAACGAILNRDGNAATNLLRQTTPRTGGSDACGAAPDGGTVVIPVYELCRAETGRAVTPGDRCRRSRPHI

SEQ ID NO: 42458 - protein, 109 aa, Bacillales sp.
MTNDDMVSEKIANQRKDFLHKLSKQIVDENQIIVVETLKSKNMMKNYKVAKSIADVSWHEFVRQLEYKCTFYGRTLIKADSYQSRSMVRIDANLFRLRRERSEEDDGRP

SEQ ID NO: 42459 - protein, 380 aa, Microbispora sp.
MMCGMAQIVKRAYRYRFYPTPEQACELARTFGCVRFVYNKALEERSRAYTLEGRRVSYAESSALLTAWKRTEELAFLGEVSCVPLQQALRHLQAAFANFFARRAMYPTFKSRKRSRASAEYTRSAFRWRDGRLTLAKMDGPLDIVWSRPLPQGAEPSTVTVSKDAAGRWFVSLLVEETISPLAPTGDVVGVDAGITSLVTLSRPIPELTDEDGKVANPRYERAGRRRLAKAQRALARKAAGSANRARARLKVARAHARIADRRRDFLHKLSTRLVRENQAVVIEDLAVRHMVKNHSLARAISDAGWRELRSMLEYKARWYGRELVVIDRCFPSSKLCSVCGALQKSMPLDVRVWECACGAVHDRDVNAAKNVLAAGLAER

SEQ ID NO: 42460 - protein, 363 aa, Clostridiales sp.
LNKAFKFRIYPKENQKILIAKTFGCVRFVYNKMLADRTEHYQETGKSLNNTPAQYKKEFEWLKEVDSLALANAQLNLNKAYKNFFRDKAIGFPNFKSKKSNRQSYTTNCVNRNIKLENGYIVLPKLKAVKIKIHRDIPEDYKLKSVTISKTPTGKYYASILFAYQHHIEPVEPKDILGLDYSMGELFITSEGVSAEYPRYYRQALDQLKKEQKKLSKCQKGSKNRNKQRIRVAKRHEKVANQRKDFLHKLSRQITNTTDAVCIEDLNMKALSQGLNFGKSVSDNGYGSFVSMLDYKLREQGKQLIKIDRWYPSSKRCSVCGKTKETLLLSERTYHCENCGITLDRDHNAAINIKNEGIRLLSA

SEQ ID NO: 42461 - protein, 427 aa, unknown
  TnpB Polypeptide
LVNFGNMMHRAYKLRIYPNQAQKELLDKTFGCCRFLYNKMLEERKQVYKELKDDKDSLYNYKYNTENKYKQEYPFLKEVDSKALQSEWRHLKSAYDNFFRNLKKGIKKGFPKFKSKKNRQSYTTFNVNENCKIDFNNKKLKLPKIKTWIKYRDSRVFVEDIKHITVSKTKSGKYFASILIELESNISPKQVLEEDKIIGFDMSASKFLITKEFALSNPRFYRKEEADLQRLHREVSRKKKGSNNRNRARIKLARLYEKVENRKRDWVHKITRLLSEHFDCVILEDLNLKGMQRFNSGLSKSVSLDFSWNQFVTILKYKMEQRGKRLILVDRFFPSSKLCSKCGYKNKTLTLQDRKWICPKCKKWHDRDVNASINIRKEGLKILKQDNITIVNINNHSAVGTTVEAFGEDVRLSFREQFSVKNESIAL

SEQ ID NO: 42462 - protein, 327 aa, unknown
  TnpB Polypeptide
MLIMNYTYRIYPNSAQQAQLLEWLEICRGVYNYALRELKDWIASRRCPIDRCSLEKEYIISADEPFPSYHRQQNNLPKAKKQFPHLGKVHSQVLQTTIRRLHDTWEAFQKRGYGFPRFKKQGQFKSFVFPQFKDNPMSSSAIKLPKIGAVPINLHRPIPEGCTVKQVRVLSRVRGTQWYVVVTLESDVSVPNPPVHGRAIGIDLGLERFLTVSDGSFQERPKFFKALQSKLKLLQRRAARKRKGSQNWEKAQLKVSRLHHRIANRRKDFHLKTAHKLCDQAQTILAEDLNAKGMVRGMLRKDCADAAFGQFLSLLEWVCWKRGGVFC

SEQ ID NO: 42463 - protein, 388 aa, unknown
  TnpB Polypeptide
MEKMFHKTYKYKLKPTKDQRNLFAQFAGAARFIFNIGLECVKRALDAGLPIPTYTAIANMLPLMKILEKTCWLKTIHSQVLQQSLKDLFESIEAYFKKNKKRGFPKYKKRGQRASFRYPQGVRCRDGMVYLPKIGWVRYCDSRPIEGTIKQATVKLIGAHWYVCIVCIVEIEVPEVHITEDKVLGIDVGIKNYISTSDGTKIDNPAYLYQLLEKLRYLSKSLSRKKKFSQNWYKTRNKIQRLHIRISNLRRDFIHKLSTVLTKNHGVLAICIEDLNIPGMVKNRKLARSISDASWGTLYEFLAYKCEWLGKRFLKIDRFYPSSKLCSSCGNKQDMPLHVRVYDCAVCGLRLDRDINASINIRSAGTSELIACGEIRIGVLNEAGIGGF

SEQ ID NO: 42464 - protein, 481 aa, Blautia sp.
MAKKKSIRVDFVKSCITYNKLNTIAKIAISGIENICKRLNLDSVYGVINGRFVIPSKRPSGKKSSSKRVAKCDTVFVAYRFCGHPTEEQASDLNQNIGASRFMWNRMLSDYKLMWKMYGISIPMTPADYKDVSGLEWLNDRDSLALANVQLNLEKARSDYFAGERGAPKRKKKHQCKESYTTNCVGKNIRIENGGLRLPKINGLIKLSMHRPIKPDGTLKSVTVTHEPDGKWYFSILIEYPAEEVELSDGLQKFFASGDINAISGIGLDMSVPFLYIDSSGNKPSYELNGREIKFVKQYRKLEKRIAKEQRRRSHMVKDSNNYNKQSEKIARLHAKAKHRREDFLHQIAVRLVRTYDVIAIEDLDIAAMKKALSLGKSVSDVGWGRFAAILEELCLKYGKILVRASRWYPSSKTCHHCGYKNDDLQLSDRVYVCPVCGNVMPRDKNAAINILEEGLRTIKENMLRQSVEGYNRPSLITTIA

SEQ ID NO: 42465 - protein, 527 aa, unknown
  TnpB Polypeptide
VTYFNGKDGVLVKNQTYRAFMTSLTHILDLNGELLDSAPVLDQLVSEIRSISAYATFVARNDTVLGTELARATAVQAATAGRRAGVTMPDFLITGRSGRSRKEWLVRYNAVTAYRSWQERINAANRESGKYVSQGWRRTVDASAPSYGEDFINLGSVDRQYAVIENNPFDDGEIVLKMVVQGAWYRLIFNFDNARFREGKVTLPLVKVENDHPIFIFSVVTDNPVVQFSGDYTVGVDVGINNYATVVVRNTATEQVVYKYTLSQRVHSLWNSVRASENQVRSLRKKAASLLYDRQARMCALDEAQLHREAAARKKRELAIVAAQEIAYLAHFYGNAVVAVEDLSWISNTMQNGRWNRGAFTQWLAHYVSQNGGWVVAVNSAKTSQMCYKCGSKVTHPTHKLSVCPTHGKMDRDVNAAANIASRAVPRVEKARETRAKNRKLQAQLALKTPITRGTLKHPGRDRTKNVPTPKRKKHRILREVNLPFSPARVTTTTVLADCHTCSVAGTTKAAVNQGNMAYKCRLCSLT

SEQ ID NO: 42466 - protein, 399 aa, unknown
  TnpB Polypeptide
MNQLKAIKLRVYPTVEQQEQLPQMFGNSRFVFNYMLNLQRFVYRHKRADSKGHLSRFDMNYLMPKLKRKYPWLKQSDSTALLEACNHVDVAYQRFFQHIGGFPRFKKRSHYESYTALCVTNNIRHRDGNQLRLPKLGWVRTQPITIKGTIKNATISVTPRGHYFVSVLVEQDVRPNPKTENVIGVDLGLRNLINLSNGVKYKSLKFAEIDRQIKLWQRKYARRVINAKKQVQIDNQYQSKFGQFDFDEQYRNLPWFERRGVVAARKRIAKLYDKKANYRKDYLQKLSTRLINQYDVIVFEDLKIKNMVKNHHLARAIGEQGWAMLVSMCEYKAQWYGKTVIKVKPNNTTQTCSDCGYLCRGDEHLDLGVKHWVCPDCGVIHDRDKNAANNILNAGLATL

SEQ ID NO: 42467 - protein, 384 aa, unknown
  TnpB Polypeptide
MLKAFKYRIYPNKKQEEMFCKHFGCVRFIFNKGLETKIKEYTENKKSISCFNLTNVMLKELKKENKWLRNVYSQCLQMSLRNLDTAFKSFFKKSNNFPKFKSKHNKQSYQLPQNVKINFDKGIVVIPKVGNVKCIFSRKFEGKIKTTTISKSKTNKYYVSILIDNLKELPIKHEVKENNSIGIDLGIKDFCILSNGIKVNNPKYLRCNMNRIRYLQSKQNHYKKGGSNRKRYNLKIAKIFDKISNRRNDFLHKLSTKIVSENQTIILEDLNVKGMMKNHKLAQAIGDVSWSKFVEYLKYKCEWYGKNFLQIGRFEPSSKTCNICGEINKELTLKDRKWTCPCGASLDRDINAALNIKNFGLKKFLSGMEQPLDAYGDIRVNGSL

SEQ ID NO: 42468 - protein, 398 aa, Methanomicrobia sp.
MQYQKTIKIAIHYGTTKEKLDKLNKLTARITYAIWLISGLITEDTKLNRKTVRALVRNSDVVEKTVLSAGFVDQCIDKVLWSWKAYRKQHKKWARQVASAEKRDNPKWLAKLLKREPQKPSFENHKVPCRIDCRTGRIERSVKSKLTSLWMHVSTLKKNQPMDIPLNPSHYHLQQLQDAEINDFEIIKRGNKYYAHISITKEIEKSKVSSIGGVDQGLNHSAGIVLLPLDGSMPYEELICDAEKQALLQKYDDLIAELQGAEDWHKLRQLRHKRKNIAINFDWLIATEIAEKTKGAILGISDTDFRKTQYRGNEMPTLRKRIGKWSYARQRVFIALKRAENGDDTVLKNERGTSIECCECHSKMTRRKWLRNGSSYILCWFCGNKKDADINAAHNIAL

SEQ ID NO: 42469 - protein, 441 aa, Iningainema sp.
MGIQQNLIYCDGDTKAILTFLCEQSNSLYNCGVYWARQIFFKTGRIISKFDPVYEVGNNIHAQVMPSVPAQQTLLSVSEAFKSFRKLRDLFFKGELNQKPKAPDYRASGGMYKVAYPNTGAGRPTMVDGLIRFPLGLQINRWFKVKEFFLPLPTNLDFKKIKEFTILPKNGEFYLECSYEVEPVTVKLDIDQALSIDLGTSANLMACVDTFGNSFLVDSKQAKSMNQLYNKRVANHKEGKTQKYWDNFLDKITRKRNHQMRDMVNKAARIAVNHCLTHGIGTIVVGWNEGIKDGSDMGKKSNQQFVQMPLAKLKERIKQLCTLYGIRYIETEEANTSCASYLDGDSLPEHGKKPDGWKASGRRIKRGLYRTQNGSLVNADIQAAANILRKVAMNLGINLSRIGRRCLTTVGRIRIWKTRTNSLAKESPRLSSRGVSQKKNI

SEQ ID NO: 42470 - protein, 201 aa, unknown
  TnpB Polypeptide
LPKSDSNIGIDVGIKHLFITDSGIKIDNPRLTAKYATKLTKAQHALSRKKLGSANRAKAKMRVARIHAQISDCRLDNLHKLSRKLINENQVICVESLRIKNMIKNPKLAKHIADGSWGNFVNQLEYKADWAGRTVSKIDQFFPSSKRCSNCGYTLNFLTLDTRHWDCPECKTTHDRDINAAKNILTAGLAGLAFGENVSLV

SEQ ID NO: 42471 - protein, 273 aa, Cylindrospermum sp.
MAYATLRYQMRGQAKYWGKPTTCTIVCRHGKWYASITVNVLEPALKPEILPVGAIGIDLGCTSALSITDGENHHQIDAPQFLRNAEHKIKKASKDKRRKRAPNRNKKIKAARRFKKAQSKISKLTRKVGNQRHNWVHQVAAEIISGNSFVATETLVVKNMTGKAKRGKRKKQKAGLNKSILDVGFGMLRASIKYKVEQIGGVFIEVPTRQVKPSQTCPQCGHQHKKTLDIRVHECGVCGYVQDRDIAAAEVMLYWAKGILPGLGTNRANAPLR

SEQ ID NO: 42472 - protein, 257 aa, Arthrospira sp.
MAMTASTFKVFTETDWVWTTIEITSLEERHTVDSNKLLSPSLIFNEQKKACHLSVPFECHPPQREGEGRVVSVDLGINTTATVAVVNFDGTVTYREFIHPARDIDEVAAAAGTCVQRNGDRRDKRLKSVSKRASKTMGLGGSLQKGFCSHTYRKCRNINRQIGQIVSKRIVQIAQQFNADAIVFENLKGWKAKGGRKRSLLRQRFHGWLKGMIRDLTEMKWQEIGGKVIDVVAAYTSKLAYDGSGVERARRPKLCPG

SEQ ID NO: 42473 - protein, 459 aa, Mycobacterium sp.
MARFEVPEGWTVQAFRFTLDPTEDQARSLARHFGARRKAYNWTIATLKADIAAWHETGAQTTKPSLAVLRKRWNQAKGEVCVNSESGVVWWPECSKEAYADGIRGAVDAYWNWQTSRAGKRAGNRIGFPGFKRKGRDADRVCFTTGAMRVEPDRRHLTLPVIGAVRTHENTRRSERLIRAGRARVLAVSVRRNGTRIDASVRVLVQRPQQPNVALPASRIGVDVGVRRLATVANAEGTVLERVPNPRPLDAALKQLRQVCRARSRCTKGSRQYRERTTEISRLHRRVNDVRTHHLHVLTTRLAKTHGRIVVEGLDAAAMLRQKGLPGAHARRRGLSDAALSTPRRRLYYKTVWYGSQLVVADRWFASSKTCHLCRHVQAIGWAEHWTCQACSAVHQRDDNAAVNLARYEEPISVVGPVGAAVKRGADRKTRPGRAGGCETRKGTGHPAGEQPRDGVRVA

SEQ ID NO: 42474 - protein, 402 aa, unknown
  TnpB Polypeptide
VKIRRAYKFRLYPTKEQVAALRQHGGNARFLWNALLRLNQDKYESEKKFIFAHDMVVSLPQLKKEHDFLQLSFSQSLQQVARQLDRALKDCFNKTKRFPVFKKKGKQNDSFTVPQKFRIGKDYVFIPKIGEVAWVKHRPIKGKIKHLTISQDGEQWYCSVNVELKCKEKPISTNSDVVGIDVGLKTFATMSDGSVIENPKILKKHEKRLTTAQRRLSRKQKGSRNRYKQRNKVQRLHRKVRNVRRDFQHKATAHMIAKYEGFAMEDLNIKGILSNHCLSKAVSDCGWFEFKRQLRYKSEWNGKPLVEIGRFEPSSKTCSGCGWINKNLTLKDREFVCLDCGQVMDRDLNAAVNIRNIGMQILRDTQKSTPVEIGGCRTSVQCQSVKQEKEVLGLELHPCSLN

SEQ ID NO: 42475 - protein, 402 aa, unknown; identical to SEQ ID NO: 42474
  TnpB Polypeptide

SEQ ID NO: 42476 - protein, 276 aa, Metallosphaera sp.
MKEHLVEAKILDYGKLRQIYSDITYFVSYYKTLEKAGVKTKPSPPPSLRDLNIIYTSPRLGPLKLLGNGPTYKLDKVGATVKVEMYGNPLYAIVDFSDGIRVFLAYAIDDPIVGIDLGIRHLFTVVAVIKDGKIYKSKYIGNSEIMETFTKYMGESQGLSYVREIKTKVRSTLKELMDFLVELNPKIVALEDLRLYDAKIGRGLKLIEDELEREFIERGIRFKRLDPRNTSKVCSQCGYKKGEVLGSLFVCPVCGYKVDRDFNAAYNLALKCYYTC

SEQ ID NO: 42477 - protein, 377 aa, unknown
  TnpB Polypeptide
LKIAYKYRLYPSKIQIQKIEEQYHEARKLYNTALEQRINAYRSVNRKSLNYYNQASELKELRLEGFCKLANYSTCQDILRRLNKSFDNFFKRVKRGQTPGFPRFKNKNRFNTITYPSYGDGCKLINKKVYLQGIGKIKIKLHRNIGGTIKTVSLNRKVDKYYVIFSCETEIKPLPKTNNAIGIDVGIESFCTTSDGEFVENPKFFKQSQKKLRVLQRSVSRKKKGSNSRRKTVKLLSKLYEKISNQRKDFLHKLSNRIVKENDVVCIENLNIKAMSKGFLAKEIHDVSWNMFFLFLKYKAEKAGKEIIEVNPNGTSQRCHNCGAIVKKDLSQRQHLCPVCKINIHRDFNSALNILKLGTNLENLTYRDTESVFSEAV

SEQ ID NO: 42478 - protein, 384 aa, Solobacterium sp.
MNKAFKYRIYPNAKQIEMFSNTFGSVRFVYNKLLNIQEESNTYMSKVDSNNYCNRVLKIEYPWLKEVDKFSLTNSIFNLNEAYKRYFNKLSNRPVYKSKRYSRNSYTTNFTNNNIEIGEDYIKLPKVKKVKAKIHRLPNEDWKIKQATISKQSDNKYYVSILFEYEKEIINNTIDTSKSIGLDYASNGLYVDDLGNVGSNHKYFKESKNKLAKLQRRLAKKQGSKKGETKSNNYLKQQAKVNKLYSHIANQRNDNLHKLSYEIANHYDIVCVEDLDMKALSNKGFGNGLATLDNGYGLFLKYLEYKLNDRNKQFIKVDKFFPSTKTCSCCGNIVKSIPLSQRTYFCDVCGNTLDRDINAAINIKKEGLRLLDLQNQNSLNTILQ

SEQ ID NO: 42479 - protein, 388 aa, unknown
  TnpB Polypeptide
MPDFLVSGKSGRSRKEWLMRHNAVTACRSWQERDKAANGEGSKYVSQGWKRTANGSAPLYGVDYVNLGAVDKQYAVIENNPLTDGEIVLKMVIQGEWYRLIFGFDNERFTEGRVTLPVIKVEDGQPVFIFTVVTDNPVVQFSGDYTIGVDVGINNYATVVVRDTKMGRIVYETTLSQRVHSLWNSVRASEVQVRDLKAKAATLLHDRQGRMSALDEARLHREAASRKKRELAILAAQEIADLSHPWGNAVVAVEDLSWIVNTMQNGRWNRGELVKWLTHYVSQNGGWVVAVNPANTSQLCHKCGANVTHPTRTPSSARHRKAHPTRTPPISRCTKAPPKTQCPAGLCHAHSATKTAAGQGFEPWAPCGATVFDTARFGRSRTPPTPQQ

SEQ ID NO: 42480 - protein, 407 aa, unknown
  TnpB Polypeptide
VLRTQLKVACRLYNTLFHLEEEEYKKNKHSMSRNELRQLALVLRKRNTEFQALHSQVAQQVADRFYWARQRFFEGLANKPKEKKPHMYLSLVYPQGGWKLSNIREVGQGENTEKKKARLYLSKIGFFTVVIHRDFPLEGVSQVCVKLNPSGRIFVVFLVEGEVEAPYEEKRAGEPMEVVGLDVGITRLVTLSDGRFLDNAKPLERSLGRIRLLQRSLSRKRKLSKNWFKAKLKLAEEYEYVKDFRRDLFFKLGALLARDYVILVLEDLNVVGLIQRGETRKRRMRLYDSAFSELRRILGWQFQRHGKTVLAVPSYNSSRECFQCGEVNHSLALEDRVFHCPFCGFTLDRDLNASLVLSKRACRVGATRLVCLVGELRPIPPLPSLGLAARRRRGGAMIQEASPFRAG

SEQ ID NO: 42481 - protein, 294 aa, Actinobacteria sp.
LDSRAATLAEEIRRVSARRSNLNDALAWSAARWAVDQAVAAGATVIYLEDLRSMEAGGMGRTQNTRLSQTVRGQIADHMRHLAAEVGIAVVTVPPRNTSKHCPACLTSLRHRKAPDRPTVPGWKWAICPGCGWQGDRDQGAWRRIAARGLAHQTKTVVDRTSGAMVIRAVVDAMEAKSVIAATPKTHRTDRSKTGPTQPRTNRLTPGRREVPSPTRPLGRAGQRPEGHAPTDRTRLPRAAQRHQSVTTISTPTTSRHRPRGAALGAGFHLHAHASPPRWAEPTPDLTVRMGSLS

SEQ ID NO: 42482 - protein, 639 aa, Streptomyces sp.
VEEKTGELLPAAMLAERVSWCVELVSGMAGSLLAERWNAGDVDVIASGEDAGGRRLPSHAWMALRRLGWTVTVSDGVKVNDRIVRMAQEQAGRVLRSVKWRADLTSGVLVTWPAEPGKRTTQEWDAVRAGVPGGAHLPGSVIKARTRQIAAFAKVNGRMPAGVFEMEAAPKVARILLLSACDGQQATIERTDAPDRALLRMQLPTRPDPRSYRDWTWVACPIALPPTIPAGAVLHLPTLRIHNGRVRADLAYSHAVPKTRRAGHTIVLGVDWGLNTLLSAGAVRLHSDGRIATLGAGGMFRAAGVLAKQHRLRRLSEDLNAKAGRYQQLIRRHSGHPLAARHAVLTGEIRAVSARRLNLNQALARSAARWAVDQALAAGATVIYVEDLRSMEARGMGRSINTRLSQQIRGQIVDRMRHTAAEAGIAVITVPARNTSRHCPQCLTPLRHSKAPDRPTAPGWKWALCPSCGYQSDRDTGAWKRIAARGLTHQAKTVTDRTDATMVIRSVVDILEARAVVTPAADQTRRERSKTGPTRRRTARPAPRRRRAPSPARLTGPAGQRPEGHAHTDRQRLPRAAHRHQGATTISTPTPELCPGESPSGHRPRGAALGAGFHLHTHATSPRWEISWPDTTSSMGSLN

SEQ ID NO: 42483 - protein, 435 aa, unknown
  TnpB Polypeptide
MFVKRRITFKLYPSQSQATALSEALRLHQLLYNAALEERIDAWRKARRSVSYVDQAASLTQIRKDDPAYRSLNCHSLQQTLRRLDRAFKAFFARFKKGVAGVGFPRFKALDRYPGWSYDTHGDGFKFAPGENGHNGKLYLQGIGTLKARGRPRNRPTRILCADVCRTAGGWCLSLVVEALPDRVGGQAACGLDWGLARFATLVTENDTPLAFETIANPRHLLRRAKDLRRAQRALSRKRRGSINRRKARLRVAKLHARVRSARNDVHHQITSSLVKRFALIATEELQVKNMTASAKGTSAEPGKNVRQKASLNRSILDTAPAAFVAKLSYKAEEAGSRLVLHRPAETRASQTCPACGHVQKKSLSERTHTCAVCGHVEDRDAAAARVMLQLALGTQPVARGREPAEEVDPTERLETRAKGRRTSKPCLKQPARAA

SEQ ID NO: 42484 - protein, 425 aa, unknown
  TnpB Polypeptide
MIVKRIVKFNIKKNHVDYNYIKQQLIESKEIYNYANYIVRQIFFKKSKNHKFSLDFVDEYPELKDLFAKYIEEDKQFTSLFYNIICKFSKLKEFSVNAKIVQNIVDKLKSDWNSYWGLLNLAKNKQYDKPINIPKYKKQYNLVEYNNQVLSKKKLKLGFIGTDKMKQGIKISNFHKNLNCKSFRIFYKNNNFVCELIYEKEINDQTDSTDKVASIDLGLENLFTVAFNYNKKGISFKGTKLKSINQYFNKEKAKLQSLLPKNEYCSKRILHLFYKREEQLRNIIGYYSNRLMDILIGHNKNWKNKINIGKVNNQNFVSIPFNKVIDIIKYKLEDRGIKCIEQEESYTSKASFLDNDSIPTFNEDKNQKHTFSGKRITRNLYQTKNNQIIDADLNGALNIMKKANIKMLTFLDYLKFDNIFTGKLV

SEQ ID NO: 42485 - protein, 420 aa, Acidimicrobiaceae sp.
MTMAVLEQSKTTTPVTLNQAYRYALDPTSEQVSLLRSHIGGTRFTYNALLGLVKENWDENRVRREAGLEVAQEDYLGTSHFDLLYLWADQRDELAPWWSENGSSTYNAAAQRLSKAFTNWRQGRAKFPTFKKRGGKGSVTLLSSALKLRDSHHVRISRIGEIKTYESTRKLYRRLQRGTGRIVSATVSEVNAKFLISFTLEVTRSLAATRSPERVIGIDVGLTTLYTGASPEGEEEPSVENPRHFVTAEKKLSHAQRIASRRQSPRLGKSPSKRWKKANARVQKVHTNVRNARNNLIHETTTMLAKTYDVIVIEDLNVRGMVKNHALAKHISDAAWGEFSRQLEYKTQWYGSTLVRAPRFYPSSKTCSQCGAVKAKLLLDERKHHCEACGLVIDRDLNAAINLARLGLPGTSSGTGRGGE

SEQ ID NO: 42486 - protein, 453 aa, Caldivirga sp.
LFYSKYRQEYPSLNSQLAIQAIRQSSEITKSFIEKRRRGLVGKPYPEVKAVSIRFTEQAWGYGKFIGSTAPVRLSLSLLGGRREVWLRLHKRFWLYWWRVLTGEAELARTLIVKRRLNRWYAVFIFDIKPKKELPQSVVAFDINENTVAVGKIDIKTTVSKVTDWNRQYVTPELYMIRTDFGRLARGYEKIRSAIIDRLKPEFALPNGNYVNVANTREFRKRVKHLREKDRKLGRVRHVANELTKTPGIIVTEELGDNPQESMINEIRRNETRHRIKQIPFKAVERAIVDKALERGSKLFHASSYRDSRVCPIHFTRLERTDDWHFLKCPLGHYVHRDYASVMNMAWKTTPEAWIKGIWWDLRREIDRREYEGKSNPLVPHEIVKYIHATLKEFKASEQSPAVLARSSPMNPAGEANEDWARTPPRSKTISTPQGGEEASQSSTRTTLYPILL

SEQ ID NO: 42487 - protein, 526 aa, unknown
  TnpB Polypeptide
MPKPRKRKNSEFQTTLTKSVFLFGNPNKAKCLALQQIQDSFTELVNQDIQILNEDRSVLLQIIKNDKKDPDMRWLEKSLRPSGINSAFCQNAFDMAVTHLSNRMDNIRKDLMQENTGIFSRSKVLFAMSILQYGKKDMIAMMQSLPQKFHKECAEELMQMSSEEFCFRQTEFLEKYQSVNLEYQIPVLRNCSVPLDSRLMRIETSNHTIMPYVIFVSDPFHPGKRIQIPINTSRHSLHKIQTNHMAGTVMMQIRNNVLRIGWSYDVKRRQPETITYTGVDTGITDSFYTSYGRAIGSMSDVIGFYHREVEPAFATLSDLRNKKRAIRHYLKKHDVPEDVRRSLIKKMDRLEHMIRTMDMPYRKKRHYYNLLDQEIKNSVKAYMKDLRPDTLTVVEKLDIKEFRKSRHTNGMFSVFARGKLQKTLLSTLNWKGYDFLEVVPDFTSQVCPVCQNLDPKNREHKTFFCTCCGYEDDADHVGSLNIRTRATDQEILDLCQKYQYKHKELQRAMKIVYAGRNQTYRKAASA

SEQ ID NO: 42488 - protein, 368 aa, unknown
  TnpB Polypeptide
MKKQKAYKFRLYPNLEQKILFEKTFGCSRFIWNQMLADKIAHYEKTGESLNNTPAQYKEEFPWLKEVDSLALANVQLNLNKAYKSFFQSGFGFPRFKSKKTAQSYKTNNQNGTVALLNGKVKLPKIGWVKVKIHRQPKGLIKSATISKTATGKYFISILCEEEILPLPKTKSSLGIDLGLEHFVILSTGEKVDNPKFLTSLSKKLAKEQKVLSRRGLLAKKKGHKLSDCRNYQKQKVKVARLHEKISNQRRDFLNKLSIELVKNHDVICIEDLASQNLMKNHHLARAIGDVSWYEFVRQLSYKADWYGKKIVTISRWFPSSQLCSTCGFSSGEKPLSIREWTCEKCGTYHDRDINASLNILKEGLRLA

SEQ ID NO: 42489 - protein, 346 aa, Escherichia sp.
VKRLQAFKFQLRPGGQQECEMRRFAGACRFVFNRALARQNENHEAGNKYIPYGKMASWLVEWKNATETQWLKDSPSQPLQQSLKDLERAYKNFFRKRAAFPRFKKRGQNDAFRYPQGVKLDQENSRIFLPKLGWMRYRNSRQVTGVVKNVTVSQSCGKWYISIQTESEVSTPVHPSASMIGLDAGVAKLATLSDGTVFGPVNSFQKNQKTLARLQRQLSRKVKFSNNWQKQKRKIQRLHSRIANIRRDYLHKVTTTVSKNHAMIVIEDLKVSNMSKSAAGTVSQPGRNVRAKSGLNRSILDQGWYEMRRQRIQASVARTVVIQRKRTACHKVNSDARYVDIQRTPM

SEQ ID NO: 42490 - protein, 424 aa, unknown
  TnpB Polypeptide
MQLAERHIIKSTEHRFAPIDQLAFQSKNLYNAANYVIRQNFVYGWGYLNYNKMDQLMKFHQTYKALPAKVSQQILMKLDKNWKSFFEAVKAYKNEPIKFTGIPKLPKYKDKVKGRNILVYTVQAISSKQLKKGIIQLSGTNILIKTKVKPEKLCQVRLVPKCDSYVIEVIYNEPESTLDENQKELVASIDLGLNNLMALTSNQPGFVPLLINGRPLKSINQFYNKRKAHLQSRLKESRKTSCRIQRLTRCRNQKIENYLHSSSRFIINLLSSRKIGTLVIGKNVQWKNEINLGKQTNQNFVTVPHARLIEMLEYKAALVGIRVMVQEESYTSQSSFLNGDPIPVYGKNGADQVKFCGKRIKRGLYKTSEGRLINADVNGSYNILRKAIPNALCDGIESCVVQPRRLNPLGVKAKGEGFNASHVM

SEQ ID NO: 42491 - protein, 273 aa, Lachnospiraceae sp.
MQDIRNSRANTITINHTQQTSQMEILRQIKSATVSQVSSGKYYVSILVETEHKELAHTNHNIGIDLGIKDLCITSDGKVYENLKIIKKYEKQLVKLQRQLSHKGKRSKNYYKTKKKIALCHEKIRNIRKDYLHKVSHEIISENQVIVSENLQIKNMVKNHHLAKAISDVSWYELTRQLEYKAKWNGRKYIKIDTFYASSQLCSVCGYQNPDIKDLSVRTWICPKCGAEHDRDINAAKNILTEGHPVDVCSAPTGVERRNEVCEAGSPLALDNG

SEQ ID NO: 42492 - protein, 406 aa, unknown
  TnpB Polypeptide
MAPRKPHTKDLDDEARLAKNKRIAQTQKETKRRRKNMDVLVRTVKIQRNKLSSSQREKLDRLFLEGKWLYNTALAHNQFNEKFRKSLNHTVEVKLPNGEVELRNLETLGGQLQQGILERMRNNLKGLAALKKKGRRVGGLKFTSEMNSIPLVQFGKTHKIRGSKVKIANIPGWMRVKGLNQFTNTDEFSSAVLIRKGEDFFVAFTIYRNKDEHSSLATKKFIPDTTIGLDMGVSTHITFSDGSSVTARVEEPDRLKRLSRKLARQKKGSKAFMQTKELIGDEHRKVVNKRNDAANKVSSWILEHEHIFMQDENISAWRRKHSVARGSRSIQYGILGRVKTRLVDHPRVTVLKKNVATTATCICGEKTPHSLDKRTFFCPICGYSAPRDLHAAKNMYRLATKENIKE

SEQ ID NO: 42493 - protein, 304 aa, Helicobacter sp.
LTERIDKAFKKFFNKQAKLPRFKKVANYKSFTFKSQIDKKTGLNKGVGFEIKDNVVSFNGYSYKFIKTYALIGQVKTLTIKRDNMGDYFLCLVCELENNPNKQTACGKSVGFDFGLRTFLTGSDNTKIESPLFFSQYLPLIKRLSKNLSKKVKGSNNFKKAKKKLAQLHQKIKHLRTDFFYKLALKLSKKYQSIFIEDLNMKAMQKLWGRKVSDIAFSEFVKILENKAHVVKIDRFYPSSKTCSNCLCVDENFNKDIKKLGKTDKEREYHCKYCGLELDRDLNAAINIHRVGASILGVEFVRPT

SEQ ID NO: 42494 - protein, 409 aa, Hyella sp.
MKLVEKHLIKVSKQEWSEIDSLCFLSKNLYNCAIYQCRQAFFNNKPVPSFNQLYHLLKATDDYKALPTKVSQLIIKQVAKIFKSYFAARCAYSKDSSKFQSQPQLPRYKHKNKGRNILSYNYQAVSKKALKQGLIQPSGTSLSIPTKCENINEVRVIPKGGSYVIEVVYEVEEVQSNNQEPCRIAGGDIGIDNLACVTSNIPEFQPFIVCGKALKSANRYYNKVKARLQSLLPENQRTSNRIQRLTQKRNSKVDYYLHTASRYIVNRLLENKITMLVIGKNDNWKQNVNLGKKTNQKFTSIPHAIFINQLIYKCQLVGIKVVTVNEAYTSKCSFFDLEPIQKQTVYLGKRIKRGLFRASNGRVYNCDSNGSLNCIRNAVGDSVFDRQSVKRLVVSPVRTKPYQAMNSHI

SEQ ID NO: 42495 - protein, 257 aa, Chloroflexia sp.
VTEEAPILLSCVAVDVTGIQYTEVVKLSAQLKLQPTTEQAEALKRTLETANAACNAISGVAWNTSAFRQFALHKLVYADIRSSFGLSAQLTVRCVSKVADAYKLDRTRQRTFRPHGAISYDDRILSWKMNRRAVSIWTIAGRLDIAFACGERQWQLLQTRHGETDLAFVNDSFYLLAVCDVEEPEPIDVEGTLGVDLGVSNIAVDSDGTIHSGRAIKNIRYRHRRLRGKLQRKGSHGSRRRLRKLAGQERRFASHLP

SEQ ID NO: 42496 - protein, 233 aa, unknown
  TnpB Polypeptide
MRVETPEPPGEKTAGVDLGICNTAAVSVGEETLLYPGNALKEDAHYFRQQEYDTEGENGSSDHAQWARRKKSRRQEHFLHALSTDIVEQCAGRGVGTIAVGHPTHIRDDGDWGRHGNKRLHDWAFEMLLSHIEYKAQERGIDVERVDEAGLKTSKTCCECGTEAASNRVERGLYVCENCELVANSDLNAAENMRKTVTPNPSQDRSNGCLAQPSVRLFDKSTGRVRPQEQVVS

SEQ ID NO: 42497 - protein, 437 aa, unknown
  TnpB Polypeptide
MQTVSSYGVELRKQNIPVRQTLEIYRSAVCYLTEIYEQVWEELAEIPDAKRRFNAAEHLVHTTKKNPARFDFDLRFPKMPSYLRRAAIQHALGSVSSYETRMDLWEKSGEKAGKPRLAYENHAMPVFYRDVMYREEKEGKDEAYLKLYDGHDWKWFCVRLNHTDMEYLRRNWSGKKASAPTLEKRHHKYFLRFSYTEEVTLTKTPVKEQIICSVDLGINTDAVCTIMRADGTVLGRKFINHPSEKDRMYRTLGRIRRFQREHSSAQSRGRWAYTKRLNIELGRKIAGAIVKNAEENHADVIVFEYLEMQGKISGKKKQKLHLWRKRDIQKRCEHQAHRKGMRVSRVCAWNTSRLAYDGSGSVSRDPKNHSLCVFQTGKRYNCDLSASYNIGARYFIKDIMNGLSSKIKSQVKAKVPELGKRTTCTLNSLINLNAVLQ

SEQ ID NO: 42498 - protein, 430 aa, unknown
  TnpB Polypeptide
MRQVERHWIKENHELYSICDDLTFKAKNLYNAGLYQIRQSFFERERSDNKENHPILSWIDIVSKFNKEKQEDMLALPSKVSATLLKSLGAVMNSHYQLMKRFCDKSNTSVIRKPNLPRYLHKVDGRHVVEFNNQTISKKRGENGELIICPKSLNLKIPTKVDKPKCVRIVPKLGAFIIEVIYEVKESPLKHTNNFAGIDLGINNLASVTFSNGINPLLVNGQKIKSINQGYNRLIAKAQSALPKNQGTSKHIHRLWRNRETKLQNELHHITSFLSQYFDEMYIEKVFIGKNTGWKNNVSLGKKVNQKFVQIPFNTFISQLKYKCLLRGIEVIEQEESYTSKASFVDGDKIPVYGKIDYVTEFSGERICRGLYKTKDGFRLNADVNGSYNILVKGLQSIGKTIDRSNVSYHTRTFMSSNHKSIEDLISDYM

SEQ ID NO: 42499 - protein, 497 aa, unknown
  TnpB Polypeptide
MKRTQTPSFLLELPLKVDWSNEKQLRAHLEAGRCLYNALVGEARKRLRMMRHDPSWQQARALPYDQKTERREAFSALRKQYQFSEYALHAYAKVARCGWIADHIDSTMAQTLASRAYQAINRVCVGKAKRVRFRSKGRGLDSVEGKRNDVGMRFVLDPNAGDGGFLLWNTDVIPAIIDWLDPVVAHGLRHPIKYVRLVRRSASGAAAQGADRDGKRYFVQLVLEGHPFSKRAHEQAGTDIIGLDIGPQTLAIVPREHAADLVTFCEALAPNANKKRRLQRKMDRQRRATNPHNYDQQGRVKKGKKHWNASKRYQATRRQHAKAERKLAAHRKSLHGKLAHDIVQRGNHIQIEKTSFTGWQKQYGKSIGLRAPGLFVAHLRRLVAKTGGTLTQVSTFQTRLSQYCHQCGQYHKKARSQRWHTCPCGLGPVQRDLYSAFLLAYLDPGKNQPCITQSIWEGAEPRLRAVMEGLQQRANAGQHLPQSMGVVARRKSGAARA

SEQ ID NO: 42500 - protein, 401 aa, Fischerella sp.
VIVLEYKVKAKQFQYDAIDDAIRTTQFIRNKSIRYWMDASREQKVDRFALNKYSTELRKEFPFVCELNSMAVQSAAERGWFAISRFYDNCKSKKSGKKGYPRFQKDCRSVEYKTSGWKLHATKRQITFTDKKGIGKLKLLGKWDIQSYDVKDIKRIRLIRRADGYYAQFCVGIDVVDIQPKTGQKVGLDVGIESFYSDSNGHHEPNPKFLRKAESSIKKSQRRIYKKIKGSSGRRKARKVYAKKHLKVSRQRIEHAKRVARCVVKSNDLVAYEDLRVSNMIKNHCLAKSISDASWYLFRQWIEYFAVKFDKIAVAVPSQYTSQKCSSCGINVKKSLSTRSHVCSCGCELHRDTNAAINILNLAKAREGHSQSNANGLVTSTLLGENLVEQVTRVKLESQCL

SEQ ID NO: 42501 - protein, 374 aa, Fischerella sp.
MKTLKFKLYQHKRNRFLKRMINASGVIYNHCIALHKRYYRMWSKHLNCAKLQAHIAKLRKRNPFWQTVGSQAVQDICQRIEKAYQLFFKHNKKGVKPPGFKKVKKYKSFTLKQAGYKFLGSNKVKIGSKIYQFWKSREIEGTVKTLTIKRTPLGELFMVVVVDDLVEPEIKFTTGEIAGFDFGLRTFLTCSDGTTIESPQFFKQSLNAIKKASKQHSKKLKCSFNRERARKNLVRKYEDISNRRRDWFWKLAHKLTDKFDVLCFETLNLKGMQRLWGRKISDLAFGEFLQILEWVAKKKKKRVVFIDLWYPSSKTCSSCGHVLESLDLSVREWRCPECQSVNGRDENASKVICAVGASTVGLGDVRQAMPAIAV

SEQ ID NO: 42502 - protein, 427 aa, Fischerella sp.
MYRAIKVRIYPTDEQESYLAQCFGNTRWLWNYMLNATTTTYKETGKGLSKAAMDKLLPGLKKEYEWLGLAYSQVLQRVTFNLSSAFVNFFEGRTKFPNFKSRHGKQSIQYPQNVKLIPENSVIKFPGNLGRVKTVFHKELPTPKVQTVTISKNADGKYYASILFNHATSYNGGNPRNGVAQEDTPVVAIRDAIGVDLGLKNFAITSEGSKYDLPKKQLAKLEKNRKRKQKKLAKKTNKTSNKRRKAKRLVAKVSSKIVRIREDFLHKLSRKIAYENQVICVEDLAVKNMVKNPNLAKAISDQGWGMFQTMLKYKAERFGHSYVEIGRFFPSSQLCSKTLLPIPMLQKGYDSLGMRFVDCPHCLSTHDRDINAAINIRNEGLRILALGTSASALGGDVRPKSSGRKKSMKSEAIPNELGSLHCTARSV

SEQ ID NO: 42503 - protein, 418 aa, Fischerella sp.
MLLSFKTALLPNNKQETLFRKASGVARHAYNWANATIQNVLEIRQTDKSVKIPSAIDLHKKLVAEVKSQHDWYYEVNKNVPQKALADCRVAWDRCFKKTSKQPRFKKKGQRDSFYLEQGSKAQPKIQNDGKRVRLPSIGWVRLAEPLPVTAVHNCVISRQANRWFIAIKYETKQSTVLTDRPTVGVDIGIKELAVCSDGKVFSNPKAYRRLSKRLKRSQRRVSKRVKGSKNRTKAIRKVAKLHAKVSNIRKDAIHKLTYHLAKNHSEVRIEDLHVKAFLKNHKLAGAIADCGMYEFKRQLEYKTEKFQSKLILVDRFFPSSQICSNCGNHRHKMPLKNRVFICPDCGYEADRDLNAARNIDRWFEDIHVPERSETVSSTEIACGADKPLRSHSKTAMKQEVNTKTTSVQLILDLGSFG

SEQ ID NO: 42504 - protein, 446 aa, Fischerella sp.
MTGWIDMLRSHYNWCLNDRLTQYAQQYIQGDYCDTRTKAEACPLTCFVSKNGATGGPWKNSNQKNPRRSAGDIQITALPELKKARPWYSGIDSTVLQQNVKRLDIAYKNFFEGRGFPKFKNRSNFTSFTYQMGVKVQGSKIYLPKLGWMRFYNSRLIPNGFTIKAATIRKRQDGWYVSIRIEDKTVPDYVVNPLTEVNKIIGCDLGITKLVHLSDNYQIENPKFLTNKKTKGILKIRQRRVSKKSKGSSNQKKAAKKIGLLHKKIADKRQSYQWKIANKIASRNVDAIAIENLNVSGMKRRCKPKVDEQTGRFLKNGQSRKKSLNRSISDASWAELILKIEYLAAKQGKIVIKVNPKHSSQKCRSCGHIDESNRDGEKFICTQCGYMTHADIGAAKTIRDRAFSIVRGDSSELKRPKQRKETSTRPRGKRVEPGNLSNQDIKAVMS

SEQ ID NO: 42505 - protein, 415 aa, unknown
  TnpB Polypeptide
MLRAYKYRIYPTDEQKVLFAKTFGCCRFVYNWALNLKITAYKERKETLGNVYLTNLMKSELKAEHEWLSEVNSQSLQSALRNLDTAYTNFFRNTTAVGFPRFKSRKDRQSFLCPQHCRVDFTDGTITVPKAKDIPAVLHRKFKGTVKTVTVSMTPSGKYYASVLVDTSMQEIQPLEPVLRTSLGIDLGIKSLAVCSDGRTFENPKNLQKNLDRLAVLQKRLSRKRKGSENRNKARVKVARLQERIANCRRDNLHKITHALTHDNQVRTICMEDLNVKGMQRNHHLAGSVGDASFGMFLTLLEYKCRWYGVNLVKIDRFAPSSKTCRKCGCVYKGLKLSERSWTCPECGAHHDRDFNAACNIKEFGLKALPTERGKVKPVDCPLVDDRPRVLKSNGRKKQEKRGGIGISEAAKSLA

SEQ ID NO: 42506 - protein, 406 aa, unknown
  TnpB Polypeptide
LKGVIVQRAYVYRLEPTPEQEAFLAQTAGACRALYNLALEQRRDWWRPGRKIGLKSQSHELTRLREEIEWFRAAPVHALQSALKDLDRAFQNFFAGRAGFPRFKRKGEGDGFHLKDKSYLGFRRLNRSKGAVRLPKVGWVKLRGWRPLGGELRNVTITRRGGHWYAAIAWQAEVADPAPNALSAVGIDRGVAIFAALSSGTNYTAPSFFGRIERQLANAQRTLARRVKGSANWRKQKARIARLHMKAANARRDFLHKVSLDIAKSHGTVVIEKLQVRNMSRSAKGTAEAPGRNVKAKAGLNRSILDKGWSTFATLLRYKLGDRGGSLIEVPPEYTSQTCAECGTISKESRKSQSEFVCIGCGHTANADTNAALNILRLGHSRRACGSNHSGGRKQELAQEAAYVGS

SEQ ID NO: 42507 - protein, 422 aa, Chloracidobacterium sp.
MRGGEYNHFLRKSQKGCPRFNRGTNFGLTFARVSNSLVLWSTLCHTARVKLTAKVKLQPTPNQHKLLLETLERANSACNQISLIAFDQKVFNKFDLQGICYHTIKQEFSLTAQIIVRCVSKVSDAYKLDNTTRRRFKPRGAIAYDARILRYTSEQEVSIWTVDGRETIPYVCSEQSLELLKQQRGQSDLVFIKGQFYLFATCEVETPEPIEPEGVLGVDLGIVNLATDSDGHKYSGAEVRSLRKRHRRQRKRLQSKGTRSAKRVLKKLSGKERRFAKNENHRIAKQIVKTAKDTGRAIAIEELKGIRDRVTVGRQQRSDLHSWAFGQLIALIIYKAALAGVRVVEINPRNTSRRCSACGFTHKNNRKTQDRFSCGQCGLRCQADHNAALNIASQGWGQLSGPHESSGRNECLTGSSSRFYRG

SEQ ID NO: 42508 - protein, 398 aa, Bacillus sp.
MTKPQKDCFIIELKLIVDTWQKDILLKRFEIARKLYNTTLSYAMKQYTLMKEAKSYRKQLRCYQEEKKANHPKEWKEIAKELVSIRQSFGLSEYQLHAYIKKHQHNYKKHIDSNTSQKIASTVWKAMQHVIFKGTKAHFKPYGMLRSVEGKSNKAGIRFKENRVYWNGLRLPVRFRKNDLFIEESLALHTIKYCRLVKKVIRGKDTFYMQLVMDGIPPAKRINKTGAFRHSYQKKKRVGIDIGPSTIAIVSKETVSIQQLAPDVPLFERKKRRLLRKLDRSRRSTNQNNFNKDGTVKRGIKLHWTCSKNYQKTKSLLNELYRKKASYIKEKHGALANSILSFGDEVYIETMHFKGLAKRTKETKINQHGKFQSKKRFGKSIGNHAPAMLVEIINQKLK

SEQ ID NO: 42509 - protein, 343 aa, unknown
  TnpB Polypeptide
LRQKDRAALKAAPNLLERGNNAGRHDVHRLPPRREKRPCRTPGIRREPASNRRGEGVRKRNIRRRSRFRTRRSGRMRGNPFRTVRIAPEENIFRQGVDHITDRRRIRNRRGKSRTFREREHRVVEKDAIRKPERDIRDAKNRVDAQFLRESAYGLERDPRGRRIGRDRQGQGVKQEIRRGKTMFLPFCENLPRDRQASVSRRGNAGFVKTERNNCSAVLSNERKDDIHKMTNDLVRKYDVICIEHLNAKGMMANHHLAKAVADVSLGEIRRQLEYKAAWYGKTVSMVDTFFPSSQLCSCCGYQNTATKNLSVRHWMCPSCGASHDRDINAAKNILDEGLRLLA

SEQ ID NO: 42510 - protein, 374 aa, Fischerella sp.
MRTLKFKLYQHKRNRYLKQAINAAGNIYNHCIALHKRYYRIWRKHLNCAKLQAHIAKLRKRIPFWQLVDSQAVQDICQRIEKAYQLFFKYHKKGVKPPLFKKVKKYKSFTLKQAGYKFLGGGRVKIGNRVYQYWNSRSWEGTVKTLTIKRTSLGELFMVVVIDDVREPEIKFETGKIAGFDFGLKTFLTCSDGSEIESPQFLKQSLNCLKKASRQHSKKLLGSANRERARKNLVRKHEDVTNKRRDWFWKLAHNLTSRFDILCFETLNLKGMQRLWGRKISDLALGEFLQILEWVALKLGKQVIYVDKWYPSSKTCNACNHVLENLDLSVRQWRCPSCQSVNGRDENAARNIQAVGASTAGLGDVRRYETAITV

SEQ ID NO: 42511 - protein, 440 aa, Thermococcus sp.
MKRAIRVKLQPSKEQERVLFELAQAIAVVWNKINYQRLKQFKTFGKIDFAGTEKEAYHNFKDWIGGSTVQQLARKNAESWRSFFALSRKKKAGKLPEWFKPRPPAFIRERNDKKLFVIPLRNDQYKIENNILELRRLGKFGKLRIQFKGGRIYLKGKQGRLEITYDPVRRKWYAHISYTVEERLYREGWVEVPRQPIGNLSAGIDLGINNLIAVYVENGESFLVNGRPLKSIAFYFRRGIAKVQSKINKSGTKKSRKLRKMHLNAKLQMKHYIDTMVRRTIERLYRLGVSKIYVGYPKGISRNSNKNKKLNYLLSTVWHFSYVIKRLKEVSEEYGIKVKLVDEAFTSQVCPLCGQRHENARLVRGLFKCHREGVVMNSDLVGAFNILKKAARTITPPSLPALAGGRGGNWGVATPRGGVRRTQFELGSDEDPPQTSPPLG

SEQ ID NO: 42512 - protein, 412 aa, Cyanobacteria sp.
MLRAVKVRLYPNNQQQEKLSQVMGSCRWFWNYALNLCNETYKATGKGLGRTAINKELPKLKKAEDTAWLGECYSQCLQSTTLNLTKAFKNFFEGRAKYPRFKSFHGKQSCQYPQNVKIVDGCLKIPQLGLVKASIHRIFEGEIKTVTVSKTPTGKYFASILFDTQQELPEVSMTGKICGIDLGIKDFAIVHDGEKTSKYNNPRQIRKHEKNLARKQQQLARKQKGSNNREKARKLVAKIHERTSNARQDFLHKLSRKVVNKNHVVVVEQLNIKGMVRNHCLAKAISDVGWGTFINFLDYKLKEKGGLLVEIDRWFPSSKTCSHCLYQMSEMPLDVREWTCPSCGTHHDRDENASKNIRAEGIRKLALSVAEGIQTDGLAVSAKGGTVRPKGGRKSVLRHEPMKLEAPVKALA

SEQ ID NO: 42513 - protein, 540 aa, unknown
  TnpB Polypeptide
MSSVKRILTIRVLGRERKERVRKLLYDLAHFRNMLIILIRKYRLLYKESLLKESILYGLLSSRGYSGKYREEFERVIGNIQALAELKTLLENLRAQKEKVGNPHFIQLVIRQVVKDFKGYFRALQSFRENPEKFKGLPRPPKPKKLRFLMNFSAEGNANTFKQEKDSLLIRLGEGEYLKVKLPKDFPQEVSSVRLKFFGEDLYVDVVYEQELKEKEPEGEYRGGIDVGLDELLAVVSENPQLRSFIVSGREIKAFNQWFNKERAKLRSQMDYLRNEIESVDYNEEGLPLLKKKLRELEIKSKVLSAHRKRWMDTQLHRVARKVVDILYDTGHKVIYVGRNVLESKNGIELGSKTNQEFVSVPFRRLIELIKYKASELGMEVAEIDESYTSKTSPFVDIRKVQRLGREKRELIKGIEQVKEGREELEEKLRELESEIKELRQESRKGNLFKDKVLGNVFHADLVGALNILRVGAKLLKLDFYEDLKVLFVKLCNPVRLKLMDLFFKVTPESLLGIGGSSGGQCFPSGLSLETGLDLKKVIK

SEQ ID NO: 42514 - protein, 402 aa, Geitlerinema sp.
MNYTYRIYPTTDQQALMLEWLETCRRLYNRCLRDLKDWIASRKCSLYSCSLNREYIMSPDILFPSYLEQKRQLTQWKKTNPHYKAVHSQVTQDCVKRLHNTWEAFKTKKFGFPRFKKFGRYQSFLFPQFAKNPIQGNVINLPKIGFVEINQHRPIPEGFNIKGVRIVSRARGTVWYAVVTIQCDVKVPAPLPFGRGIGIDIGLESFLVTSDNLRIEPARFFRELQGRLKVLQRRASRKKKGGKNWELAQLKVARLHHQITNARKDFHFQTSHQLCDQADMIFVEDINFNMTARGFLGKQMLDGGFGQFRDLLSWVCWKRGKYFAQVDHKYTSQVCPECDAHTGQKELRERVHHCPECGYKTSRDHASGRVILNRGLESVVPMDCRERKPSAECVLPGIAISR

SEQ ID NO: 42515 - protein, 451 aa, unknown
  TnpB Polypeptide
MSNTISNKALKLKLNPNPSQYSQFIKFFGCERFVYNFYLNEKNQFYEKEIKPLGNDKKARNAVWGLFEETPLAELKKQYPFLKEADSQGIANAYMNLRTAYQKFYSGLAKLPKFHSRKSKNSYKNSMMKQNCLNWNEHTLEVPKIGKVKFFQNKAPKWYKNRTKICSLTFSKTPANDIYVSILFEVRVESQKKHFDSENQAIGLDFDCDDMYIDSNGKSALKDFGFKKQKQLHLQKLSHLQRQFVRKCKNSKSQEKARIKLDRFEEHIANRRKDWIEKETLRLVNSYQLIGLENLSIQGMMKGSRNAKNYQDIAWSTFVSRLEQKSQFKNCQVVKVNRFFASSQICSCCGFKNPDVQKFHLQRWICPQCGNEHQRDKNAAVNIRTEAIRVLREAEENQEKTCSKKNRLSKDTDSVLSVEKLANLALGLSPVIGNARNNPEHAKLFQNLPNL

SEQ ID NO: 42516 - protein, 248 aa, unknown
  TnpB Polypeptide
  misc_feature (174)..(174): Xaa can be any naturally occurring amino acid
VGRLLRDRRGRWHVHLTVRIETPEALPTGRVVGVDLGQRLLAALSTGARFSGGALKTKRLHYRTKRAEIRSKLDRPSERTRSVKRLWARLSGRERRFVRQVLHEASRRIVDGLAAGDVLAIEDLRGLRGRTKRKGKAARHLHQLWPYGLFRRLLEYKARLKGVRVVVVDPRYTXRTCPRCGHVDRRNRRSGRLFRCRACGFQHNADVVAALNLARRAGSEGMGRCQPAPGAIPAGGREGKPTTEVVGS

SEQ ID NO: 42517 - protein, 466 aa, unknown
  TnpB Polypeptide
VSDRPQRTNTYTADPVSDRYRECLFDWLAAHAPLWNQITYRRRQQYFDDTGDVWDAEYTDLYDQYAPLLGKATCQQLARKNSEAWRSHFELLSLYRDESNQAVTENPSPPGYWGNRDDGYDVHGLVRNDLYTLDWNEQQSTVEFGVGDVLEDRYNFEHNERVTLQVRGNPQWRGDDSRLELIYEEHADQLRVQHPVRIQSDDMQKQREDAFTHTLDFENTTHSAAIDVGANNTLALVTDDGDTAVYHARSEFGRFQTQSTRIATLQSELPADQWTSHRIQRIYDERSRKRDHSRDAAVKHAAEWLLERNVDTVYVGDLTDVLETHWSADVNEKTHAFWSHRQLVTRITLTLGDVGITVTETGEYESSSTCPECDSNAVSRSGDSFRCDACDLEAHADVAGAWNILQSEGGPMARPAALSADRDRDPPADGAYWQWNDHDWTPADYGEQSWSPDQTSISEPASSQPG

SEQ ID NO: 42518 - protein, 411 aa, Okeania sp.
MVEKAYKFRFYPTQSQENLLRRTLGCVRLIYNKALAARTTAWYENQERVGSAQTSALLTSWKKEENLDFLTEVSSVPLQQGLRHLQAAFTNFFSGRAKYPNFKKKRNGGSAEFTKSAFKWKDGQVYLAKCSEPLPIRWSRQLPQDCVPSTITVKLDPSGRWSVSLRVNDTRNLKLKPVTKQIGIDLGITSLVTTSDGKKIANPKTLLELHKKLRLAQKSLTRKTKGSNNYQKARLKVARIHAKIKDSRLDYTHKLTYVANPTAPLQLIRENQTVVVEDLAVNNMVKNHKLAKAISDANWGELIRQLDYKAEWYGRELIKIDRYFPSSKRCSNCGHIVEKLPLNIREWDCPECAAHHDRDINASVNILRMGTRVGDRRKGTPTKKAAGLAVSAPVAHGGNPQDRAGLSVERP

SEQ ID NO: 42519 - protein, 501 aa, Moorea sp.
MPKKVGATKKISTQIVPVVGMTKSVELELLKVMKKLGVVRAESYNKLGSINHWGMDWKKAIPEVKSFRTPDTLGLPAKLMDWTINDVAKAITAQQAACTDAVIKKIYKRFPGKENQKTRKELCQQLKTLALLDNPLLHRLIRKEFQRGHSWVKNQIVYQQVGYTCRQLSRNTYQLELAGLKRGKRNKIIVRSNRKIKGQIRLIYDNLSQKFEIHFLVDHGTVEIPSYRRSVGVDKGYTEAFYDSEGRAHGKRLGKAATNKSDRICAKNRNRGKLWAFHRKLEKLDPAKSARILKNNLSRKTENKRYRQNQSELRAIIGAASKSLFNGEPLKVFAEDLTQPIKGKRQSKAMSRKLNSWMKGEMRNSLQKWANWTGSVITEVQPSYTSQIDSVTGTLLGQRSGDSFTRFDGVVLQADHNAAKNILARGTDKEITRYMSKTEVQAVLLRRTARFLKGMGLSLLDAVELGWLDCKHSKTRAFKQLLVEIPGTSRKMGGRLNSNCR

SEQ ID NO: 42520 - protein, 447 aa, unknown
  TnpB Polypeptide
MGYTVVQRVITSNDWAYSYLDRFARKAKLLYNAALFRIRNIFTGYDKDHRTENETEVFAEVQLLQGSYPGKTVRKVITYYQLEKLLRVTGNPDFFSGLPMQTAQAVVKSAVSDFRNWLSALKEYQKHPEKFLGKPKMPKYKRTEVCTFGFSNQDVVLYPQDTGVQVKLPMTRQRLFFSNLSADACLREVKVKPYYGRYLLLLTFQGTHPAPTGRMPHSCAIDFGTDNFAAIVCGDQSSVIYKGGAVLSSCQWFHKQRARLVGILTKGSAYKNACSRQLSSLSYHHANFIKDQCHKISRSIINYCLEHQAGTLVLGVNKLWKQGSRIGNQNNQSFVSMPVTLLRELITYKALNAGIRVIEQEESYTSKADVTAGDYLPTYGVDDGNASFSGKRLKRGLYRCHDGRLVNADCNGAANILRKVFPDIWNQTADFGFLATPEVVGFHQLNP

SEQ ID NO: 42521 - protein, 402 aa, Bacteroidetes sp.
MYLTRKLKLGRTDQLDRLAERAGTLWSAVAKWHWRFVRRQGHWASKSALQRWLCKGYEGLHSQSSQAVADSFYDALSSWRTKRKASPDARPPYKQKRFFKTVWKSSAIRVRNGNLRLSNGRGKADPLMVRWQWPEPKRVEIGWDGEQYELRAQFEVEPREEPKGDRVAGVDLGEVHLATVCVGDETLISNGRELRSLRRKQNKLKATLDAKIDRKQRGSNRWRGLVRSKKRQLSKVRNQITDLLHKQSTRLVDMLHERRVSTLVIGDVSGIRKDLDYGAKSNQKLHQWAYAKFKHMLAYKARLRGMTVETENEAYTSQECPNCQNRYNPSGRKYSCSECSFEGHRDGVGSYNIRKKYLSNKRTVDGIMAFPSSVRGIKYRPHMACSSHSGSRLEAAKDHTGP

SEQ ID NO: 42522 - protein, 351 aa, unknown
  TnpB Polypeptide
LKKSYKTKLNISSERDLKQFNRIAGFYRKIYNLAMELQETRVFYMPNNRQDLFFVTGTELSNKMSEFFTEKQLPYLKEFDKGVFRAASMAANKAFVSNYKKYLRTLGYSGLTKYKSRKKGKLSFKTIGQVKVFYDYITLPKFGKVKLFEKGYIPQGKKYSNFTFSFDGVDWWMSVDVTDESVQTIKEERTGKGIFFDFDKKGNLYINGEKKYENIVSSEKYQRHVIHYKKLAKKLKRQTLESLHWSKKHFKKVSMTTRNILKTKKSMSKISNHMTNMKKDYFRKVANELARLKPCMVLTLPNNIIRVMKNGFLTRFLRESSTKEFFNILINKFKNTGVEVQRYFSPRLQLA

SEQ ID NO: 42523 - protein, 370 aa, unknown
  TnpB Polypeptide
MKTEKYELYHQSNIIQIGNLIDDLHSVHVHLLRLQRRYYRIYGKYASFARICRHITKLKQRTKPHWNALPSQVIQQVAKRIHLGYEKFFDYLADKKQGRSVRKVGKPQIKPQRRYNSLTFTQTGYEIEDNRIYIKCLKKSFTFWKHREWTGKIKRVTIKRDNVGDYYLYLICEDSDPTERLPLTSHAAGADFGMKTFLTLSDGIKIASPQFFKQSLNALRSAHKALSRKQKGSHAWYRAKRHLARLYKKIAHRRRDWFFKLALRLVRRYDTIAIETLNLDGMKRLWGRKISDLAFGEFALILQWTFAKYGKILLKAGRWQATTKPCSNCGYYNKNLTLSDRYWTCRECGTRHDRDINAAKNILQAGVPVS

SEQ ID NO: 42524 - protein, 385 aa, Lentzea sp.
MKTVVQVKLLPTPGQASALAATLHACNEAADFVSRVAFERNVKSRNELQKLCYQAVKCEFGLSAQPAVRVVKKVVDAYTALRANIRVGNLGGVRSRRRINAESKPIAFRQWAAQPFDDCCLSWGLDARTVSIWTTAGRLKNVPFAGSPEQLVMLRAHRRGESDLVSRDGKWFLVATCEIPEKPQFEPIDWIGVDRGITNLATTSDLANFQGRRLQRYRRWHARKRAELQAKRTKSATRRAKRRARREQRHATHVNHKISKEIVAVAERTGRGVALEELHGIRDRVRLHRYQRATQSSWPFHQLERHITYKARRAGVPVLLVDARYTSQTCPRCKHTSRSNRPTRDSFSCRRCGLAGPADVVAAVNIRDRARRAWVLVNVPLPAAA

SEQ ID NO: 42525 - protein, 310 aa, Lactobacillus sp.
  misc_feature (273)..(290): Xaa can be any naturally occurring amino acid
MLAMANKRYENNPKSQFVGEYDMNYLLKRFKQEYPFLKASDSTSLFVVNHNLAIAFKNLFQHRGGHPRFKSRHSAKQAYTGQSICVVEAKRRLRLPKLGSIRTNKTSQLTDAKIKRYTISYDATGRYYISLQVETEVHDLPKTNQRIGLGMGVADLAITSNGVKYGTLDAQWLEKQASLWQAKFSRRKHRATVAMHQWNHHHQLSKMALNDYQNWQRAKMTKARYQAKIANQRKDYLHKLTTALVRNYDVIVIEDLKTKNLMRNLHLAQSIAXXXXXXXXXXXXXXXXXXPVGLNSGPCLNISVPGTVSN

SEQ ID NO: 42526 - protein, 372 aa, Clostridioides sp.
VIAVKKAYKFRIYPNKKQQELINKTFGCCRFVYNKYLAKRIDVYKNDKETFTYKQCSSDLTNLKKELNWLKEPDKFSLQNALKDLENAYNKFFKEKAGFPKFKSKKTNRFSYKTNFTNGNIMYCGQYIKLPKLGMVKIRDKQVPKGRILNATISKEPSGRYYVSLCCTDVDIEVFENTNNHIGLDLGIKEFCISSCGEFIENPKYLKKSLNKLAKLQRELSRKTIDSLNRNKARLKVARLQEHIANQRKDFLQKLSTKLIKENDIICIEDLQVKNMIRNRKLSRLISDVSWSEFVRQLEYKANWYGRQIVKVGKFFASSQICNKCGYKNEEVKDLNIREWICPSCNETHDRDINASINILKEGLRLITIQNK

SEQ ID NO: 42527 - protein, 265 aa, Clostridioides sp.
  misc_feature (260)..(264): Xaa can be any naturally occurring amino acid
VEKAYKFRIYPNKKQQELINKTFGCCRFVYNKYLAKRIDVYKSDKETFTYKQCSSDLTNLKKELKWLKEPDKFSLQNALKDLDNAYKKFFKEKAGFPKFKSKKINRFSYKTNFTNGNIMYCGQHIKLPKLGMVKVRDKQIPQGRILNATISKEPSGRYYVSLCCTDVDIEVFENTNNQIGLDLGIKEFCISSCGEFIENPKYLKKSLNKLAKLQRELSRKTIGSLNRNKARLKVARLQEHIANQRNDFLQKLSTKLIKEXXXXXG

SEQ ID NO: 42528 - protein, 392 aa, unknown
  TnpB Polypeptide
MLKGFKTELRITEKHINKIHQSIGICRFLYNSYLAKNQELYELFKEGKIDKKQAFMSANDFNKYINHEVKVLDEFKWIDNCGSKARKKAIVNAETAYKRFFKGQSKFPRFKKKKNQDVKIYFSKNNETDWTIERHRIKIPTLGFVELKEKGYIPTNAKVVSGTVSMKAGRYYVSVLCDVVDYNDYSSIKNEGIGIDLGIKDLAIVSNIDEPFRNVNKTEDVKKLKKKLKRLQRKVSRKYEMNKDGKKFIKTKNIIKLESQIRTIHQRLSNIRLNYVHQITNTLVKNKPEYIVIEDLNVRGMMKNRHLSKAIAEQSFYEFRKQLTYKCLWNNIELRVVDKWFPSSKTCSECGSINKDLKLSDREYICKECGIIIDRDKNASINLKNAKEYNVA

SEQ ID NO: 42529 - protein, 377 aa, unknown
  TnpB Polypeptide
MRKTFAFKLYNSKKNKWLHKQIDAAASIYNYCIAMHKCYFKLWGKHLNKFQLQKHITKLKKRSRYTHWNLVPSQAIQDITDRIARSYQLFFKYSRKGTRPPTFKKYKKYKSITLKQAGYKLLDDNKIMIGKKTYSLFKSRDIEGAIKTLTIKRDALGDVYLFFSCDVKDSEPNRIMTGKSAGFDFGLKIFLTSSDGTKIDAPLFFKKGSGAIKKASRLVSSKKKGSNNRSKARVHLARCHKKIANQRKDYHVKLAQKITQEHDYLFFEDLTIKGMQRIWGRKISDLGFSAFMEMVGYYCQLTGAQMQVIDKFFPSSKMCHVCKKIYEALSLNERSWQCQGCNSLHDRDINAAMNIAIVGASTIGLGNVRPPSVAISA

SEQ ID NO: 42530 - protein, 386 aa, unknown
  TnpB Polypeptide
MEQKRAYKYRFYPTDEQKHILARTFGCARFVYNWALRQKTDAYYQEQRRLYYKDLSEALTRLKQQEEYCWLSEVSSVPLQQTLRHLDKAFLNFFEGRAKYPTFKKKRHRQSATYTSNAFKWDGTSLTLAKMTEPLDIHWSRPLPDGARPSSVTVTKDCADRYFVSLLVEEDIKQLEPVEQSVGADLGLKEFVILSTGEVVGNPKFFRKDEKQLAKAQRRHAKKKKGSKNRAKAHKKVAKIHARIADRRCDFLHQLTTRLIRENQTICVESLQVKNMVKNHRLAKAISDVGWSEFVSQLEYKAAWYGRNLVKIDKWYPSSKRCYDCGHLLDSLTLDVRVWTCPECGGVHDRDINAAKNIHAVGLTVFEACGEAIRPGRALSRSGKLR

SEQ ID NO: 42531 - protein, 491 aa, unknown
  TnpB Polypeptide
MLCRSVAVELEVAKELNKLLHSVETAYLNIVREVVEYAVTNNVTSATELQGIFYRRYRLEYQGLHSHLVIQAIKQASEIAKSFIARRRKSLVNKPYPEVKTVSIRFDETTWNYEQFVKSIAPVRLSLSLLGRRREVWIRPHKRFWQYWWRLLTGEAELASTLIIKRRLNKWYAIFIFKLKPRKEEPRSIVAFDINENTVAVGRIDVETTVSKVTDWNRQYMVPELYAIRTDFGRLARRYERIRNTIIERLKPEFALPNGKYVNVANTREYRKFVRKLREEDRKLSRVRHVANELTKTPAIIVTEELGNNPQEEMISDVGRSELRHRIKQTPFKALEKTVEGKALERGSKLFHVSSYRNSRVCPIHFVRLERTDDWHTLKCPLGHYVDRDYASVMNMDWKLTPESWTKAFWWNMKKDMNWREYEGRSNPLVPYFMAKILHVTLKEFTASEQSPAVLARGKPMNPTGEADEGGGEETSHTLLGRGGGQLLRIP

SEQ ID NO: 42532 - protein, 270 aa, unknown
  TnpB Polypeptide
LNSSSRQSKLSHTSRNIRSSLSRCRSSNTLCRYFVTKTKCTCMSKTHCLPLRSESSFVMKPSIIKGMASIKRYRYRAYPTKGQAHALSCLYGCCRFVYNRFVAVRETMFKVGGRMPTFTQLARDLTQSKNDPDTSWLKTVSAVPLQQSLRHARTAYDNYFAWKKGDRKGPEVGKPRSDPRGTQSAEFTLNSRFKLEHEPGCKWAFLTLPKVGRVKLRWTRDLPTVPKTVTVIRRPCGRYEASFTTITTSRITPRHCTPRRVWTSDCSPLA

SEQ ID NO: 42533 - protein, 157 aa, unknown
  TnpB Polypeptide
MRQVGKQARTKALHAKIANQRKDMLHKFSTALVRNNAAIFVGDAASAKLVKSKMAKSTLDAGWSSLKTMLEYKSHQAGIVFEVVSESYTTQECSACQARTGPKGLLGLVARQWVCGVCGSSLDRDVNAAKNILKRGLALMDIATAGGSVDFGFCQSR

SEQ ID NO: 42534 - protein, 415 aa, unknown
  TnpB Polypeptide
VVELTRTVVIPSVELTERKLKTFKELVELYKQMLVELVDYGFEKNVDSFTRLKRDKYRELRERFPQLPSHYIHTACQDASTRIKSFNKLKKRGLAKSERPEVNRVAIWLDDHLWKRVGYTTILVSTHKGWVPVELRPHKQFWEYVNSEWALRTQPKMRLDYKRRRLLVYLVFTKAANIDEERTENVVSVDVNEDNVTVKVLDKAYILKTNIKRLTLGYAKYREVVQSVRGNGHVKRALHGRERKRKKDIRLKVANLIANTAKELNAVVVLEKLPRGCPKNMIEGVKDATLRHRIYQAGFRSMVKAIEEECFERRVPVAKVDPKGTSSRCPFCSSKLMRGNASRHLKCSKCGVEMGRDVVAVMNIERRYLTYKGLVPLAPMPCEPALEVAVLPVKEWARRKSLDAINKHELVRMSI

SEQ ID NO: 42535 - protein, 429 aa, unknown
  TnpB Polypeptide
LSKTLTRTVVLECYTNRFARRTLREIEDAYREMLVEMVEYAVEHKASQSTLHKVFYEKFGKRYPWLPTRVIKGAYRDAVRRAKSFRERMKRGKVHKDRPEVRRVTITYSDSQDWRLGDGVIKLRTHKGWVELHYRNHKQLHRYIYSGWRLASELRFKILGKKVIAYLTFTREFEVSYDPRNAVAVDVNENNVTIALFKDGVLSDVYRVETGLGRVVVAYSKRRKRITQGRSTKTREVKKRLKNLREKERKLDVLRKTAKFIETLAVENRAVVVVGNINENAKKRMEESASNKLRHRIHQWSVRKLVELLDEKPIHVVRVSERGTSSRDPFTGKVIKRFEPLVIRSAVKGLERVKVMRMVLRVAWVGGRVLERDVVGAVNIGLKYLNSDGSPVALGSTGTHEVWVKLVNPHRGATPLTGLQIFVNTVMYR

SEQ ID NO: 42536 - protein, 224 aa, unknown
  TnpB Polypeptide
VDVNEKHIVIGNSKFEYRFKTPIERALHYKLLAENLQKKYSSMRYDAWLRRRGVRRRISHYYAKARCIIEDWVKKTSHRIVVLARQHQYAVAREDLTGLVESLMKLPREHKVSLLILSYRRISEWIDWQCGKHGVPSIAVDPMDTSTKCPRCSSKMRENGYRVLKCPRCGFEADRDTVAILNIEKRALTQMGGSLATPTAPQMTDVDPNRCGEPMNPLRGTHAL

SEQ ID NO: 42537 - protein, 412 aa, unknown
  TnpB Polypeptide
MQVTLRFRAYLPTEVASEAWRHIDILRQIRNHAVRDYYQTDPDNRPSAYDQHKKFTGWKNRWPVFSNPSAHAAQQAISQIHSDINTLNERRNNGYDVGRLKWQGAGEFRSVSYNQPRRWDVDHNTGDDRFVRLRLEKVGWFRIRTERDVPPADAINEITLKKQQTGKWYVSMVVNTGETPEKPSLDAVTPEDCIGVDLGITSYIHTSENLSVEPLNLSDEYDRYAREQRKLARKEHESNNWETQRQKVARAKRAIKRKVLDYQHKLTTWLVKEYEVVAVEDLDVKPMLEDSQNAQNKQDAAWSRFLRLLDYKADLHGTHVVQVEPEGTTKECASCGVETNKPLWVREHSCPACGHTEDRDLNAAKNILNRGLRQIGAGRSESTPMQTALPAFTPQRETVDAKRVVEVGSLEA

SEQ ID NO: 42538 - protein, 418 aa, unknown
  TnpB Polypeptide
MRKKKKETENPTPTITRTHKIRIYPNKHNQEVFQRYYDYQRSVWNIAIDERKAQYKIYKEMKATGLYTQKELNKNYFPSTKNLRKMERFDWEDNFYCRIREIQFDNLCQAWDNYFNPNMPNNKKPKYKKKKEVKSHKKLSLRNVRTKDKWLLLPKSHKSKPEYRFTKIKMAEELRFNGRITDDFTVSVENNKWYVTIAVEVPLEEKLAISKKSTGIDVNIGSIDYLKKDDSNKEYGKFYLLPKSLLKQYDRIKYYSRVISKKRNKNPYYIHSKSYYETITKLNNSYTKAYNIQEANLNNIVKYFFDNYNRIVIEDLDVNSMKMNKRLCKSLHRNAFGRFKQKMINKAEEYNVEFILANRFFPSTQTCSECGHVKTGDEKLFLWGDKYGNDHNTYVCYNCGTIQDRTENAILNLANYRK

SEQ ID NO: 42539 - protein, 433 aa, Mitsuokella sp.
MIKSIRVQLLPNNKQRTKLFQFAGAARYAYNWALDKQMDNFREGCKIQTDSELRKVFTILRHSEENKWLLNVSNNVTKQAIKDLCIAYKNFFCKQKQPGYIKYSSKKVTHYTRIGKSLTVYDMNGHPKFRSKKNGDFRFYQDNVKIQFTGTHVKLESLAGSRRKNRQRLNWIRLAERNRIPVRAKYTNPRIAFDGERWWLSIGIQTTRKLEPLRGLLFVCKKRRYARSEGIGIDLGIKDLAVLSDATKVGNINKTRAIRKLKKKRRRLQRQVSRKYQMNKKGERYCKTSNLIKSEKQLLRINHRLAYIRQNHVHQATAAIIKRKPSFVCLEGLNVRGMMKNLYLSEKIQEQDLYEFRRQIEYKAHWAKIAVVIADRWYPSSKTCVECGYVKKDLKLSDRTYVCPHCGNAIDRDFQAALNLKRYGDMKQSKSAN

SEQ ID NO: 42540 - protein, 409 aa, Cyanobacteria sp.
MRTAHQYRLRLTTLQQATIDRWLELARRQYNYRLAERFNWYEQNRCDIDACALICHLPELKDRPDFYSQKRDLVNSKKLFPEYKDLPSHTLQDVIARVEKTFDRWLSGDSNGKRSGKPRFKGQGRFRSIAFPDPVKSEHIDGGFIQLPKVGKLKMILHRPLPDGFKVKTAAITKKVDGYYITLSLQDSSVPVLSPDLPVMENTVGIDMGLKSFFTDDSGKEVAIPQHYRKTEKRLKRLQRGLSRQKKGSNRRQKAIKRVAKAHLKVSNTRRDFHYKTAKRLLSQGKHVAHEKLNIKGLAKSRLAKSVNDAGWGQFLQILSIKAERAGLLTIVVNPNGTSQNCSGCGTTVPKTLSDRIHVCPECGLTLDRDHNAAINIKYLAVGHSVNKAQVTSEAIAGVTEKPALYASA

SEQ ID NO: 42541 - protein, 374 aa, unknown
  TnpB Polypeptide
MEYSYKFRIYPTSEQERLIQRTFGCCRFVYNHFLALRKERYNATKETLNYVACSRELTALKKELLWLKEVDAVPLQEELRNLDFAYQNFFRRVREGIKPYGYPQFKRKHADRKSYKTKHHTDRTPQIWIRGGKLKLPKMTPIECRVSKEIKGKILSATVSQNAAGKYFVAINCTEVGLEPLPKTGAVVGVDLGIKALVTTSDGTEYPNRKFIKQSDTKLRRESRRLSRKQKGSKRREKQRIRKARLEEHIANQRRDYLQKTTTELIRSYDVICIENLKTKGMMKNHKLARSLSDVSFSEFRRELEYKAEWYGKAVQAIDTFYPSSQLCHSCGYRNPETKSLSVREWTCPECGEHHDRDVNAAINILNEGLRLLA

SEQ ID NO: 42542 - protein, 360 aa, unknown
  TnpB Polypeptide
LRLSAEEDQALFDLEKIFSAACNEVAQIGLREKEHNRVRLHHLSYYFLRQQFPKLGSQMCCNAIAKAAWCLKALKKPRKILFKNGCSIHFDKRTYSLKGETLSLFTLHKRIRIRLEISLFHKSFLDKGKIKEAELVRKGKRWFFHLVLDLPDPPLMQTNKAIAVDLGENVLAATSTGKLYGGGPLKEKRDQFLAHRKRLQSNGSQAAKQRLRKISGREKRAVRHENHCVAKQIVSEAQSNGCSTIILEDLKNIRDRIKTSKKMRSRLHRWSFDSLRKFVEYKATAQGIQVLYVHPAYTSQTCSYCLALGHRVKHRFYCSNCGSFQHSDLNASQNLLRLGLSIGRSTGDVNRRHIAAFSGQ

SEQ ID NO: 42543 - protein, 397 aa, unknown
  TnpB Polypeptide
MLTAQVIALNPNNTQLTYFYKACGVARFAYNWALAQWQNQYEEHKKDPTQKKPSEGALRRLLNSIKREQFPWMLEVTKNAPQMAIIQLGKAFKNFFSGRAKYPQFRKKGMRDRFTLTNDQFEIKDSHIRLPNLGWVRMREMLRFKGKILSATISRVADRWFVSITIETQDTPKLNPIDSIVGVDLGISAMATLSNSEKITGPKPYKKLCHNLKKLSKALSKKMKGSKNRAKAKTKLARLHARISNIRLDAIHKFTTELANRFSTICIEDLSVQRMIKNRRYARSIADMGFKEIARQLEYKLERSGGRLIKADRFFPSSKLCSNCGYIFNDLTLSIRQWTCPICGRNHDRDINAAKNLAAYAVSFTVKACGGNSSGRADILCGETVPVKQEVNINIYL

SEQ ID NO: 42544 - protein, 228 aa, unknown
  TnpB Polypeptide
MEGNASISLEDQTVPGLVPLDEIKLAVGIDVGLHEFLTTSDGETEPVQQNFRRSQKRLALGKRRSSRMQKNSSNAQKQKNRIARIHQRVKCQRKEFHYKVARKLVKTYDLIGVEDLNIIGLAKTRLAKSILDAAWGEFITILEAVAVKCGVRVVKVKPHGTTTDCSTCGWKVPKTLEVRIHDCPKCLTVLDRDLNAAKNILVRAINAVGLTVSACGGLLSWVTRHAGH

SEQ ID NO: 42545 - protein, 265 aa, unknown
  TnpB Polypeptide
MDVRRTAVVKLTVSDEQRDALHRTAEQYLYCANRTADYCWSDTSYTECKTNKREVRDALYPNFERRQTYRPSLFKPPSNALLKLSKRVSNDGKMDSASQPTFTAETMDYDTRSATFYRNKVSLATVEGRVEPSFVLPADSPTPYERYVLSENYEFRESTLRYDAATDEFYLNISMRRTDGDDEVSEDTGHPDQTVLGIDLGVNSLAVSSTGTFWQETTTTTGVVSSRRGVVRCNTVGRKPHTTLLPERVERVLPERHKIVTFCII

SEQ ID NO: 42546 - protein, 385 aa, unknown
  TnpB Polypeptide
MNYLGFKYKILPTAEQVEFLEQHFGSARFIYNYFLDLKSKTYEESQVNLSYNELSKYLTNLKKLDEYSWLKLVNSQTLTESLRNLDKAYKNFFEKRSKFPKFKSKRSSYSRFNIPQYVKLEGDTLFIPKFREGIKVILHRPIIGIIKRATIERNPLGEFFVSILCEIDSSTLVKPEIEEDTTLGLDLGISSYLATSKGEKIENPKYLSRSQSKLSYAQRRYSKTKGRKAKRKLNKIHTKVKNQRLDFLHKLSNKLLSDSENQTICIEKLNIKGMLKDNPLAKHISDAGWAMFINMLTYKANLKGKNILQVDTFYPSSKLCHKCNYKNDNLKLADREWICPNCKSNLDRDLNAALNIKNKALQEHRAKLKESCLVKPEAVTLGASL

SEQ ID NO: 42547 - protein, 396 aa, unknown
  TnpB Polypeptide
LWYNIASNFDRLYGGGMMKQLKAYKFRIYPSDEQKIFFSKTFGCVRLVYNLMLNDRIKAYEESKGSPDKKIKYPTPAKYKKEYEFLREIDSLALANAQINLDKAYKNFFRDKSIGFPKFKSKKNPVQSYTTNNQNGTINIFESWLKLPKLKELIKIKVHRKIEGIIKSATISRKGSSKYFISLLCEIDIQELPKTNSVVGIDLGIKDMAILSTGEKIENLKFRKQLEDKLKREQRKLSKRFLIAKKLNKRLNESKNYQKQRVKVAKIHEKIMNMRTDFLNKLSTYIIKNHDIICIEDLNTKGLLRNHKLAKSIADVSWASFVNKLEYKAKWYGREIIKIDRLYPSSQICSVCGYRDGKKSLNIREWTCPICNTYHDRDINASKNILAEGLRIREAI

SEQ ID NO: 42548 - protein, 371 aa, unknown
  TnpB Polypeptide
MVKKTYKSYKFRLYPNIEQKEMFAKTFGCARAIWNMMLADKIKYYEETGDFLKNNTPAQYKKEFPWLKEVDSLALSNVNLNLQKAYKSFFHSKFGFPRFKAKRYRQSYKTNNQNGTIALKSGNVKLPKIGWVKIKQHREVVGMIKNATISKSTSDNYYISILCETEITPFPKTGSSVGIDLGIENFAILSTGEKVGNERFLKGLSKKLAKEQKILSRRALIAKNSGRKLSESRNYQKQRVKVAKIHEKIANKRKDFLDKLSTEIIKNHDIICIEDLSSKNLMKNHKLAKAIGDVSWSEFVRMLEYKADWYGKTISKISRWYPSSQICSDCGYSSGKKALSIREWTCSNCGSHHDRDINASLNILYEGLRLV

SEQ ID NO: 42549 - protein, 371 aa, Clostridia sp.
MKTYSFKLYHAKRNKKLHRAINISGNIYNHCIALHKRYYRMYGKHLNMYKLQRHITKLKKTDKFSFWNMLGSQAIQDITQRIDRGYRLFFRNLKQGIRTAPPSFKKVRKYKSFTLKQAGFKLGDDNHIKIMGQGYRYHKSREIEGKIKIVTIKRDPLGDIYIYLVCETEEATVKPRSGKSVGLDFGLGTFLTTSDGNKIESPLFFKEGSKEIRKLNRSLSRKKKGSANRKRARFDLARGHKRIANRRRDFHFKLAKELSEAYSCICIEDLNLKGMQRLWGKKVSDLGFADFVRILEHQCHKTGTELIKIDRYYPSSKTCSSCGHVLEKLSLSTRTWTCPDCKAKHDRDRNAAINIHRVGASTFKGEVVRPA

SEQ ID NO: 42550 - protein, 180 aa, Caldicellulosiruptor sp.
MVQQTKGKTAVDLQQAQGIKCGRKLALVSRKRQHIIDNFLNQAVSLIIKHCLNNQISAVVVGEMKGIKQGIELGVVNNQNFVGIPYDKFKRKLKSKCMYYGIRYVEVDESYTSQRCSRCGHVSKSSRRYRGLYVCKKCGYVVNADINGAINIVVKVAGESAKEQITSSRCVNHPVRIRVA

SEQ ID NO: 42551 - protein, 521 aa, unknown
  TnpB Polypeptide
MNPRMPKAKAPKLYLGVHARLVFLKKEDEQAVLDLMRRFSSATRYAYNRLLKGRDRKELKREDSPLCRLFGLNTRYADGAIEKAQAALDSAKELGQDPRKVVFGGRKLFEQLKRKHLSGKTLLALKREWKERRQGLLYSRGDATKKGNANLRLEPQGDALWLRVNLGNGGYVRAQVRTSHPHLKTLLQRAYASLPYNVTLQLKDGKVYAHFTWSEGVSPPVHTKANGVLGVDANGDPYHLALAVVSPDGNLRRYLTLSLEEVDRAPNKGAKELLLWKVAHQVVALAEEHGVAVATERLKYLRKSKRGDGSGRHFRRREHRFAYRSLLAKVHSLARKRGVEVLEVSPQDTSTIGMLKYAPLLHLSKDVAAAYVIGRRALGFEEKLPKGYRALLRNKSFFAYTEGFYQSRLQELQKLREAEKNPYLRRRLSRDIGKAKAALTLVSSLQGSSGSRKGVTEGRNPSGAHPWRVLRVGLFLPLLGLEVPRDLSPLKPILHGSWEGWKVGSGPHPGGGPECANVHFY

SEQ ID NO: 42552 - protein, 357 aa, unknown
  TnpB Polypeptide
LLKAYKFRLYPDKEQKEYFAKCFGHSRFIYNKMLEDKIKHYEETGKMLNNTPAQYKNEYPWLKEVDSLALANAQVNLNKAYRNFFRDKSIGFPKFKSKKRSRASYTTNNQNGTIYIEDGYIKLPKLKSLVKIVQHRQFEGEIKSCTISKTKTNKYYISILVDEEIKPLTKIDKKVGVDLGIKDFAVTSDGDVFENPKWLRKSERRLKKLQRDLSRKEKGSNNREKTRLKLAKAYEKLVNQRNDFLHKLSSKLINDNQVIVIEDLKVNNMLKNHKLAKSISEVSWAEFRRMLEYKAEWYGREIIVAPSNYASSQLCSTCGYKNPEVKNLAFREWVCPECKAKHDRDINASKNLLKLAV

SEQ ID NO: 42553 - protein, 327 aa, unknown
  TnpB Polypeptide
LADAKNAGRKVGQLKWKAPKEYRSFTYSQSGFKLKNTSSRTRLWLSKLGDISLTFHRDLPDDIEIKTITVKQEPTGKWYAILGVETPDDPPAKLENPEQCVGIDVGILKYAHDTDGTAVESLDLSDERERLERAQRDLSRKRHGSENWEKQRRVVAERHADLKNKRRDFLHKLSNYYAREYDLVAVEDLDTKGLIELPGNSRNRADAAWGTFLRMVKYKCEREGTHFVSVNPRGTTKECASCGVSTEKPLWVREHSCPACGFEADRDANAAWNILSRGIAKRLEWDGPNQRLWRLRFLWIRPYLQSALWKQEAPPSSARRKASGRLG

SEQ ID NO: 42554 - protein, 426 aa, Halomicroarcula sp.
MKRANTFDVIPQSDEDEELLRRLLDASAALWNEINYERRKNYADPDGDVWDISEYRGRYGGVLGASTVQQIERKNSEAWNSFFSLKKKDEANGKPGFWGNSENGRELRTYIRTTSYSVEWGEYSRLEILIGKDLKDEYGLGYRERLRLEVRGNPNWKEYEKQGRLELFYDEQAQTFRAFQPVTISEDHSRLAHPLASQEAALDIGANNLVACTTTTGQQYLYEGRDLFERFRETTREIAQLQSLLEEGRYSSHRIRLLYDRRAKRRNHAQDALARDLIERLYEEGVSTVYVGDLTDVLETHWSVRANEKTHNFWAFRAFVNRLACTAEEYGMSVEVRSEAWTSQTCRNCGSTTDTVRHQDTLTCSCGFEGHADLLASESFLRRQTTVTRSMARPVCLKWDDHNWSESPCSVPNEEHTNPQVASVGR

SEQ ID NO: 42555 - protein, 402 aa, Escherichia sp.
VKRLQAFKFQLRPGGQQECEMRRFAGACRFVFNRALARQNENHEAGNKYIPYGKMASWLVEWKNATETQWLKDSPSQPLQQSLKDLERAYKNFFRKRAAFPRFKKRGQNDAFRYPQGVKLDQENSRIFLPKLGWMRYRNSRQVTGVVKNVTVSQSCGKWYISIQTESEVSTPVHPSASMVGLDAGVAKLATLSDGTVFEPVNSFQKNQKKLARLQRQLSRKVKFSNNWQKQKRKIQRLHSCIANIRRDYLHKVTTAVSKNHAMIVIEDLKVSNMSKSAAGTVSQPGRNVRAKSGLNRSILDQSWYEMRRQLAYKQLWRGGQVLAVPPAYTSQRCACCGHTAKENRLSQSKFRCQVCGYTANADVNGARNILAAGHAVLACGEMVQSGRPLKQEPTEMIQATA

SEQ ID NO: 42556 - protein, 402 aa, Escherichia sp.
VKRLQAFKFQLRPGGQQEREMRRFAGACRFVFNRALALQNENHEAGNKYIPYGKMASWLVEWKNATETQWLKDAPSQPLQQSLKDLERAYKNFFRKRAAFPRFKKRGQNDAFRYPQGVKLDQENSRIFLPKLGWMRYRNSRQVTGVVKNVTVSQSCGKWYISIQTENEVSTPVHPSALMVGLDAGVAKLATLSDGTVFGPVNSFQKNQKTLARLQRQLSRKVKFSNNWQKQKRKIQRLHSRIANIRRDYLHKVTTTVSKNHAMIVIEDLKVSNMSKSAAGTVSQPGRNVRAKSGLNRSILDQGWYEMRRQLEYKQLWRGGQVLAVPPAYTSQRCACCGHTAKENRLSQSKFRCQACGYTANADVNGARNILAAGHAVLACGEMVQSGRPLKQEPTEMIQATA

SEQ ID NO: 42557 - protein, 407 aa, Streptomyces sp.
MQLRYVFRVYPDAGQRTALARAFGCARVVFNDAVRAREDARRAGRPFPKAGELSTRLITEAKQTIERSWLGEVSAVVLQQSLRDAESAYRNFFASLKGDRKGPRMGAPHFKSRKDKRQSIRFTANARWSITDKGRLNLPKIGAVKVKWSRTLPTTPSSVTVVKDAAGRYFASFVIDTDPAADATRMPETDRTIGIDLGLTHFAVLSDGTKIGSPRFLRRAEKKLKKTQRELSRKQKGSKNREKARLTVARAHAKVTDARREFHHQLSTRLIYENQGIAVEDLSVAGLARTRLAKSVHDAGWSSFVNMLEYKAVRYGRILVKVGRFTPTSQVCSTCGVKDGPKPLSVREWTCTACHTVHDRDHNAALNVQQAAGLAVSACGAPVRPEPVLAQREETGSHGFSTGNRAA

SEQ ID NO: 42558 - protein, 264 aa, Coleofasciculaceae sp.
MAKTFAAQINQLPDTPELQAALGYLCRESNKLYNCTVYLARQLYFKAGKYSNSRWLSSQMKRNPHMKALYTSAAQQTCISVGEAFKGFKELMKLWRSGELPERPKLPNYCTSDGLFQISYPKRWLSLNNGMVRVPMGTACKVWFDLPEIFIPFPTNLEWDKVRELQIVPRAGYFDAVWVCEVKPIQYIPLDPEKALSIDPGLDNWLTCVDTEGNSFIIDGRHLKSLNQWYNKRVATIKEGKDQGFGATCSIALQASAIVRCAMQ

SEQ ID NO: 42559 - protein, 396 aa, Microcoleus sp.
MLVFEFKAYGKSNQFNAVDEAIRTAKFVRNSCLRYWRENKKVGKNDLNKYCAVLARDFPFADELNSMARQASAERAWSSISRFYDNCKKNIPGKKGYPQFQKDCRSVEYKTSGWKLADDRKSINFTDKKGIGQLKLKGTRDLHFYQISQIKRVRLVKRADGVYVQFCVDVDRKENTEPSGTTIGLDMGLKEYYTDSNGVTVENPKFLRIGEKVLKRSARRVSRRVKASKNRGKARQILGKRHLKISRQRKDHAVKLARCVISSNDVVAYEDLSIKNMVKNHCLAKSINDASWYQFRIWLEYFGKVFGKITVAVNPQYTTQECSKCGEIVKKTLSTRTHVCKCGCVMDRDFNAARNILRRGLGTAGHVGTFGLEPSNALGELTSTVVGEILPQQVGS

SEQ ID NO: 42560 - protein, 513 aa, Caldilineaceae sp.
MPKSATSHLKGLAKSRRVALSPTDRQATLMMEHAGWARVAANWARGRFQLAWFGRTDERNAGEWYAHVDVNPDGGQWMSDMDLRKDFNAIKSDLFEWSCPLSQYVSKNAIAHMGRGLDSWGEYCKERKRGKPRRKVGFPPLRKRRRKIAFTPSNGRNSIQVEGPNVRLPKIGWVRMREELRFEGDIMGVTVSRKGGRWFASFTVDTCLPAPAARPGPDTGIDMGVSTLATLWDGEEVEEIATPQALAPALKSLRRLDKAIARSIHTHGKHNPSQRRDVLYAKRNRLYFDIANLRADHHHKATTQIAKRGGTVKVETLNVDGMKKNRRLARALSDAGMAEFVRQLEYKCHWYGTEFRRVDRWYPSSKTCSHCGAVKQSLLLSERTYRCNLCGFECDRDENAARNIQAYTGHKEPARTLNALPGPARPVGRVAERHAQGRGSVYRTTHLQYRQVVADRYRFWRPDQGHAAGTEGTGHPSRVSADLQPRAEHQRTGLQTGPSIRPCPAAPAPPPVS

SEQ ID NO: 42561 - protein, 448 aa, Caldilineaceae sp.
MASIPKSTTQEPPTVIRTLRLRLYPGTATNGRYLEQLAGACRFAWNHVLAGHETDYRTWKAAGKPEDGPGSPTFFTLGQRFTQLRNAPGNEWLQDYSYEIVRYTCKYLGDAYAAFFDPDRPDHGRPQYKARHYTKPAFTLPSRVRIEDGRLYIPKMGWTRLGPIHRYADGQPLTVRVRQESESRQPKWYAYIVFEVPEDHPDVCRPAAEGAIGVDRNVGQATDSTGEVHALPDTTVEDAKIKRYQRRMARQQKGSQRRRGTGGKLRKLQRRKARRRDNATHQVSRKIADTAHTVVLEDLNTKAMTKSAKGTVENPGKNVKQKAGLNRSILASGWGQLERKFAYKAGELRFVEPAYTSQACSQCGYTAKSNRPSQAVFRCGACGFRANADHNAAINILVRAGLPPAPVSARGTGAAARRGALPPWSVARPAKGTPATREPDMRGVNHRI

SEQ ID NO: 42562 - protein, 386 aa, Streptomyces sp.
MKLVVQVKLQPDALRATAFERTLPAVNAAANWVSAVSYERFALKGSVRELRKLCYGGLKADGFGAQAAQHIIKRVADAYTTLRANIRAGNLGPETSKRRRKAESKPIVFRLHAAHTYDDRCLSWNYDAQTVSIWTLDGRVKNVRFACSPNALKQLTEHRKGESDLVFRDGKWFLIATIDVPDPETYEPRDFIGVDRGIVNLATTSDGDNHQGRRLGRYRRWQARKRAEIQAKKTRSSVQLLAKRSRREGRHATHVNHKVSKTVVAVAQRTGRGVALEELQGIRERVTVPRDQRARLSSWPFHQLGAFIEYKARRSGVPFVEVDPAYTSQRCPRCGHIERGNRRTRDHFHCRRCGLAGPADYVAGVNVRNRARSAWVFVNMPDPAPA

SEQ ID NO: 42563 - protein, 391 aa, Blautia sp.
  misc_feature (269)..(292): Xaa can be any naturally occurring amino acid
MNRAVKIRIYPNKEQRVQIEQTIGCSRFIYNQMLADKISYYQKEKKMLRNTPAGYKKEYPWLKEVDSLALANAQLHLESAFRKFFREPACGFPRYKSKKHARNSYTTNALNGNILLQDTHLKLPKMSVIRIKLHRQIPSDWKLKSVTVSREPSGKYFASLLFCCENQTVEKRPAERFLGIDFAMQGMCVFSTGERAGYPMFYRKAEKKLAREQRKLSHCEKESRNYQKQKKRVALCHEKIKNQRKDFQHKLSRELAERYDAVCVEDLNXXXXXXXXXXXXXXXXXXXXXXXXLNLKGMSGGLHLGKGVQDNGYGQFLFMLGYKLEECGKHLIKVDRYFASSKICSLCGHKKKELALSDRMYVCECGNRMDRDVNAAVNIREEGKRIYKECA

SEQ ID NO: 42564 - protein, 380 aa, unknown
  TnpB Polypeptide
MKAYKFRIYPNKEQTEKLEFALDTCRQAYNMMLGELNEQVIIDRNMIQAILPDLKICEPRFKEVYSKTLQYECYRLFSNLSALRVLKKNKKKVGRLRFKGKGWFKTINYNQSGFSLDEENKKLNLSKIGNIKIKIHREVEGKIKQITIKKSIDKWYVTLITDAVIKTECGTKEIGIDLGINNYLVDSDNNVVENPKILNYYKKELRTKQKNLSRKKKGSNNRKKAKKSVAKLYEKITNVRRDFLHKLTTKLVKENKFIVMEKLDIKQMSQQKFFNARNMLDCSWGKFGGLLNYKAENAGCLVVKVNPKNTSKMCSSCGNLQDMPLWKRTYECDCGLVLDRDYNSAKNILKLGQELSYVENNPSVPLVQGLSMKQEATSFM

SEQ ID NO: 42565 - protein, 351 aa, unknown
  TnpB Polypeptide
MNTFNQICNQISERAFQEQEFQKIQLHHIVYKRQREALPEFSSQLTIRAIDVVSCSYKTKRGKRPNGFKRTSAVVYDDRCITFRGTESVNIWTSEGRMNIPMKIWDKELFKFKKGQVDLIIQNNQFFLLVTLDISTPEKYDAEGVIGVDLGVKNIANTSQGDVFSSEQLEKKRQQYHNHRQRLQKRGTRNAKRRIKTTGNKESRFRKDTNHCISKLIVSKAEGTRKAIALEELSHINKRVTVRKKNRNERMSWSFAQLRSYITYKAERSGVPLIIVPAPYTSQTCSSCGHCEKKNRKSQSLFFCMSCGHTENADFNASKNIASLGEKSISLLLGSPKDSLVASPAPCGRGN

SEQ ID NO: 42566 - protein, 384 aa, unknown
  TnpB Polypeptide
MQRLQAFKFELRPNGEQDRLMRRFAGACRFVFNKALALQKTNHEAGGKFIGYVAMAKHLTAWRNGPQTPWLKDAPVHPLQHALKDMERAYKNFFAKRAASPKFRKKGQRDSFRYPDPKQFKLDAANARIFLPKLGWMRLRLSRVVLGTPCNATVSLSGGKWFVSIQTEREVEQPVPQAGSAIGIDVGIARFATFSDGQYLEPLHSFKRHETRLRRAQRAMSRKIKFSNNWRKAKARIQRIHARIGHARRDCLHKATTAISQNHAMVCIEDLQVRNMSRSAAGSTGQPGKNVRAKAGLNKSILDQGWFEFRRQLDYKLACSGGMLIAVPPQNTSRTCPVCGCVSADNRPSQAVFRCGDRSSPPIKRPASFSHRWSSTGAGNSGIG

SEQ ID NO: 42567 - protein, 321 aa, Leptolyngbya sp.
LSAGLTKISKKQLQWGSASDVQSKRTTELRAENPYYSQINADVLQGNLAKLDKAYTGFFKHQRGFPAFRKVSNFKSFQYKPGVAKLIINRDGKRYKRTGERKPCYSRVYLPSIGTIRFLDSREIPETAAQRTITVKKEADGWYISVLLELAEELLDLKVDIQSSVGIDVGINKLVSLSDGSFIENPKFATNKATRRRLRIRQRRVNRKVKGSRNRAKAGLLVAKLHKQIRDHRDGYQWQAASKIVKTADVVVREDLNIKGMKARCKPKRSQGRFLPNGQAAKRGLNRAISDAAWGGLFDKIAWLGQKAGKPVLAENPQYTS

SEQ ID NO: 42568 - protein, 500 aa, Mycobacterium sp.
VAGGALARPRYAGAVGGMWEPTGEMTRYTTFKFCLDPTAEQQCRLERHAGASRFAFNQCLRTVKTALTQHKDQPDFPVPWTGFDLINAFNKWKKTEAAGRVFAVDTTGVADIVVTGLAWRTEVCQQVFEEAAIDCARALAAWSYSRSGRHRGRRVGFPRFKKKATGISSFRLRNKHPKRGEPSIRVGQSHARSVTLPGIGTVRVHDDTRRLRRMLAKGRAKVLFATVSRRAGRWWVSLNVEAADLHPACRHPARDPDDHTGWIGIDRGLSAYIVAASSDGRVVSRIDDAPKALNAGMRQQRHLAKSLSRKVKGSRNRSDAAARLARHHCRVRDVRRHFLHRLSSELVKTHDRLVVEDLNVAGMLHNRRLARAIGDAGWAEFARQLRYKASWRGGEVAIANRRYPSSQLCSYCRNRQYGLTLANRIFSCVCGYVGDRDVNAAVNLARWGEEHCARPDSRTRKHAGRVINARRRDGAGRHHVSAGETSPVDAGTDVQASRRP

SEQ ID NO: 42569 - protein, 482 aa, Mycobacterium sp.
MLTAEMTRHTTFRFCLDPTVEQHEALTRHSGASRFAFNQCLRMVKTSLTHHKTDPETPVPWTGFDLINAFNAWKKTENAGRVFTVDSSGVAEVVVTGLSWRRSVCQQVFEEAAIDCGRALGAWSDSRSGKRKGKRVGFPRFKRKTDNVASFRLRNNHKKDRPPPIRVGDNSLPRSVTLPGIGAIKIRDDTRRLRRMLTKNRAKILFATVSRHRGRWWVSLNIQAAELHPAHQHAPRGEDDSGGWVGVDRGLSAFLVAATSDGAEVARVDNAPKALRAGMRRQRRLAKKLSRKKKGSQNRKDAGAKLGRHHNHVANVRRHFLHQVSNALVKTHDRLVIEDLNVSGMLTNQRLAQSISDAGWAEFARQLRYKQAWRFGQVLTVDRWFPSSKTCSACGGVNTALTLADRVFTCGCGHSADRDTNAAVNLARWGQAHHDLHRSPDPQAGGRATNARRRDGADQHPTCAGETSPEEAGTDAHTASAA

SEQ ID NO: 42570 - protein, 238 aa, Mycobacterium sp.
VSRYRLVPTAKQAVLLAEHCRHARFVWNLAVEQQRHWQPGRQAPGYNEQCARLTAARAEYSWLAAGSQTVQQQALRDFAQAMRNFFNGTHRRPTWRKAGVHEGFRQVAVKAHHVERLNRRFARVWVPKVGRIRFRLSRPVPEGAKFYRITRDRAGRWHIAFAHAPQTIAGPADGSVVGIDRGVAVAAALSTGQLLHAPRLSHGEAKRLKALQRRLARAKGGSHTGSKRSALRSLMCVR

SEQ ID NO: 42571 - protein, 195 aa, Halomonas sp.
MPLHLVRFGQGAVGIDLGLKDVATCSDGGRLENSRFYRRMEDQLATAQRARNKRRVKAIHAKIKNRRQDAQHKFSRKLVNQYGEIVVGDVSSTRLAKTRMAKSVYDAGWSQLKTMLEYKCAHAGIVFKVVRETNTTRACSSCGSLSGPQGVNGLRVRVWECVECGVLHDRDVNAARNILSLGAGRCPQEVGIPVL

SEQ ID NO: 42572 - protein, 372 aa, unknown
  TnpB Polypeptide
LSAIYEAKALVKSLKCREKEDRDLIKTRLKKINKKIKKNEKQLKKALKEKEKLINRSKKKKCTEEDYLYEVQILDPNMKRLKSIIRNLKFRRNRNEFKLKRKMPSVCFGGKKNLKNGDLETFRFRRQRRMLITGRRQGKYSNNLFKLNVENDMLTYRSTQKDIVFKVQFHKYKNELYARVNEKHNSPNKAVAYELMDYGEYFIVKAIFEKHMNLPKTNTLYGAVGIDINVDHIALCETNMDGNIVLIKKYPIHKENTKNKRNEELYQLAIEIMEQCKSKKKSLVVEDLNFKQLKTRMLYRPKKQNKTLSSFAYKKIIEKVERKCLMNEVDVIKVDPRNTSKIGKEKYTKIKGLSVHYCAAYVINRRGMGFVD

SEQ ID NO: 42573 - protein, 368 aa, Lactobacillus sp.
MIKVLDQLCDYRRYCWNEALATWNDMYDLHTIEPSNPSPSAYAVRNELVANKQDWQYQRSARTLQLAVTDLGKAWQNFFDKSQPDWGKPKFKSKKAPRQGFKTDRAKIVAGKLRLDRPHGILDWQDIKLSRHLDLSGDLKVVSIYRENGKYWASLPFEVAIAVKPKTDAVSAVDVNVGHLNYTNGVQDTLPKPLSKLYRRIKFYQKRLARKRRLNGKQATKSNGYVATRTKLQRDYRRVANIQHDLMQKFTTKLVTDYDRIVIEDLSVKDMQMTHVASKGLQRSMFGYFRQILTYKCVWYDKELILADRFYPSTQRCSECGDIKSGQDKITLSGNSAHKTKHYEYICYHCGAVLDRDKNAVANLLALI

SEQ ID NO: 42574 - protein, 484 aa, Lactobacillus sp.
MIKLPKKTEYLRVRRYRLVPTSQMIARYCKNLEVLNKAHQYAVKYLEKTYGCKHLGRPYPSTKKAKIYVIKDKILPGFLHDVYGIDKWDGKVVPIHSQALRDEFLVTVMTNFGEYRKVLKKAAKMTDKEKNAYRSNCDRNNPQHRSWYRKGSLSYLRSGASHKTVALPDNGQIEVRSPHWIKIQDYGEIQVVENIKHLATAKITTSKIKRKDDGTYELQLVLKDQIERKKPISMIGADWNMKDNKVFHTSDDEKIYLGYLKLTNRRLINVGAKADEYETIINGLKRRRAKKEKHLSTDSQQLERLSIQIRYYSARRVGLLTERYRQIARQMFDHYDLIAIEQLDAKEMRKENRKWSKAANHGKNRKLAKVKPYEISLLLKQVADREGKTLLKVDSYKTSQVEFGTQYQEKHDPNGERQWVSKYTGKLIDRDLNASRNILTWALAPKKHIKYLERQAKIKVAKRAGITKDKLPKAIPAKALVTMN

SEQ ID NO: 42575 - protein, 374 aa, unknown
  TnpB Polypeptide
MERAFKTKLILNNTEQTYLRHCCDVSRFVYNWALADRKTAYETDKTNVGYNDQKVRFNALKKVSFPWLLDTPYVITEYAFRDLDTAYKNFFRRVRRGAEAPGFPKFKARHDSRQSFSVRGSVMVENERIKLPVIGWLRLMEHGYIPVGKVDGRVTVSVHAGDWWISVQMDAPIKPQPARTGSVIGVDFGHGVLATLSDGTQYQNPRVLEAAEKKLARLQRELNRRVKGGLNREKTKAKIAKLHAKIGRIRAHGLHDTSRKIVDTQAGILALEGYHVRDMMKQTLREMRKYARRNFKMADASVGELRRQITYKQEWAGGEVFKGDRNDPTNRYHCDCGHVNQVVPLVEKFVCAGCGATVQRRCNSAQTMVQLATA

SEQ ID NO: 42576 - protein, 195 aa, unknown
  TnpB Polypeptide
MYRTLGRIRRFQREHGSAQTQGRWAYTKRLNTELGKKIAGAIVRYAEENHADVIVFEYLEMQGKISGKKKQKLHLWRKRDIQRRCEHQAHRKEMRISRICAWNTSRLAYDGSGAVTRDRENHSLCTFQTGKRYNCDLSASYNIGARYFIRELLKPLPATERSLLEAKVPPVKRRTSCVYADLRKLHSEMELLKAA

SEQ ID NO: 42577 - protein, 440 aa, unknown
  TnpB Polypeptide
MSLPVRVTVTAKVEAVTPEGDEGPLVEFLRTYRDSVQLVVDRVWDLGQVPSEKTPHRVFYSRLRGLGFRAHHVSEIYRRAREVVESTKRNGGSKPVLRRLTARVHPLDYELDLETRTIKVAVLHDKWVELKLKWYSYLDRYLDGSWKPGEILVSYRYGRFYVYISFRRDVVPREPRAVMGVDLNFRNVTYTVVDLSGNLVSIGVIPFRGLSRALHLKKLAEGLQRKHPRSWRFLRWARRARARWLNKARSILVDAAHRVSKRLVEVAREYNAVVVFEDLEKIRESGNGGGKISWERPMWCYRRIQEYAEYKALVEGIRTIYVDPAGTSRRSPNGKKLRFVNYRFVELGDVITSRDVVASWNLALRGLKRMRGSRVTWSPDSPRGEAMRTRAKRGNPEAGKYLQLSTNNRLGETPPLATPPSLTQLLQVTRGLLSFSRLLR

SEQ ID NO: 42578 - protein, 329 aa, unknown
  TnpB Polypeptide
MGLPSQLACSLCKVICATYKTAKSNKRWRRAKFTRAVLPIVWKRDFNRTKKGLTLWGELLTVTDSRALPEGSCKDSKIKRVGKQWFLCLAHEIEIPELKSAGCLVGVDMGIKRMLVATNSANSKTLFFHGGVLNHRRTCIRRTRAAVQSVGTRSAHRLLRRMSGHEASVTGHLLHVASKALVKYAVEVGARRIVVEELSNIRDSSLSKGKDLRSKVHRWPYADARFQIEYKAAAVGIELEAVSPKNTSRGCHSCGHVSASNRKGLRFACQKCGHQEDADRHASKNIRARSVAVEHNSAMTGSFKAPLGSSELSDIVADSLVSQDDSVSV

SEQ ID NO: 42579 - protein, 366 aa, unknown
  TnpB Polypeptide
MMMKIIQTVIEETSEQRAILDENMARMSEAQNFAVSSCYEHKETNTFRMHHVNYTILRERFGLPAQLAVVANKYACAAAKTALRKKRSRQPKFSGTSIHYDTRSSTINLNKGIASLLTKEGRIKLTFSIPKYFQRYTDWDAKGSNLVKCRDGKFRLMISVEKATAESNKKGKVLGVDRGINNLIATSDGWLYDSAHVFSVKKKYVGLRSRLQSKGTRSASRHLSKVRGREQRFMRDVNHVVSRRLIDSVGENGVVILEKLKGIREARHRRKQNWLFSNWAFYQLEQFLLYKGEEAGVAIEFVRAKDTSRTCSACGNMDRGQRQGSTFSCKACGIILHADLNASRNILHKYTLTGCPVNQPIAPQMS

SEQ ID NO: 42580 - protein, 386 aa, unknown
  TnpB Polypeptide
MVVRAYKFRMYPDQAQSEMLDKHFGCARFVFNWGLEQKSKAYSERQEKLSCLALMNRLPELKAGLPWLSEVNAQSLQMALRNLDVAFTNFFKKNADYPAFKSRKGRQSFQCPQSCSVDFGKGVLHIPKIKGIKTKLHRQFEGKIKTVTVSRTPTGKYFASLLVEREGEEPMPAPVTDNTLGLDVGLEHFLITSDGEKITNPKHLRRIAKKLGRIQHAFARQKKGSSRRRKRKNQIARLHEKVANQRADFLHQVTHRLTRENQAETFAIEDLAVKNMVKNRRLSRGITDASWGTFFTFLSYKAQRRGKNVLTIGRFEPSSKRCHVCGCVNQSLTLRDRYWDCPDCDTHHDRDTNAAKNIKAFALIRHYSTAGSAETHTLRESGLSRG

SEQ ID NO: 42581 - protein, 363 aa, Isachenkonia sp.
MNRAFKFRIYPNREQQELIAKTFGCVRFVYNRMLSDRIAYYKETKKSLHNTPADYKKEYEWLGEVDSLALANAQLNLNKAYANFFRDKSIGFPNFKSKKKNHKSYTTNVVNGNIKLGTGELVLPKLKAVKMKQHREIPKDYTLKSVTISQTATGKYFASLLYAYEQDIKVIEPKVFLGLDYSMKELFISSEGVPAAYPRYYHQALVKLKKEQRKLSKCQKGSQNRNKQRIKVAKLHEKVRDQRKDFLHKLSRQITNAADRVCIENLNMKGMSRALHFGKSVSDNGFGMFVSMLDYKLKDQGKDLIKIDKWFPSSKLCSSCGEKKAELSLSERIYHCEACGIILDRDYNASINIKNEGMRMTLG

SEQ ID NO: 42582 - protein, 153 aa, Okeania sp.
LSFVVEIQPEILPKTDNSVGIDLGIKTFATFSDGRKVDAPKPLKKRIKKLRKLSKSLSHKTKGSKRYEKTRIRVAKFHAKLKDTRTDFLHKLSTEIIRENQTIVLEDLNVSGMVKNRNPPPSPPGRGARGVGIRFRLETIPDIPRRKSRKIWS

SEQ ID NO: 42583 - protein, 409 aa, Okeania sp.
LYAKKLELKLNNQERSKMAQWAGYARFVYNYGLNMVNGTSGMTKVNKRGQKVSLSYTLRILEAKKVFTNYVKKQPEYAWINNYSSRIYQSAFQHLGEAFKRYKEGTSKYPQLKRKKDRQSFTVYDGNGKVTINPGKKIKIPTLGTFRLWESIPYTTASQTFAISRTGEKWFVSFGVEAEKLPVHPLLDERYQEAFGIDLGVKQFGTIASSKENQIISFPESIKKEQFKLAKFQWHNRQKQLGGKGKPASKNAVKYYKKLAKYHARIASQRKDFIEKITTELASYYKHICLENLNVKGMMQNGKLAASIARLGFYQFRQRLTTKIVASGGSVVLADQWFPSSKTCHNCGHITRDLKLSDRIYNCPNCGTVIDRDLNAAIVLSQYGEVNQKARVGCTRIYACGLEGTDSPG

SEQ ID NO: 42584 - protein, 223 aa, Salmonella sp.
MSLKDLERAYKNFFQKRAAFPRFKKRGQNDAFRYPQGVKLDQDNRRIFLPKPGWIRYRNSRHVTGMVKNVTISQSCGKWYISIQTESDVSTPVHSSASMVGLDAGVAKLAPLSDGTVFEPVNSFQKKQKKLARLQRRLSHKVKSSNNWQKQKRKIQRLHSRIANIRRDHFHKVTTAVSKNHAMIVVEDLKMKNMSRSARGTVSQPDRNVRAKSGLNRSVLGQG

SEQ ID NO: 42585 - protein, 405 aa, unknown
  TnpB Polypeptide
MKYKSFKTEISLNRTQVEYIEKCFDICINAYNEYLKANDRSKEIKKVVVTANDFYNGIKTGRFMFKGSADFLKAKYRTAGLTTIKNGELFVNRYVYGSMNWPNTKKAQSKHISLHFKPGKYEGEYIKVERHRIHIPYLDWVRIKEKGYLPYKQGHNIISGKIKKEAGRYYVIILVAIKEESSFYRAIVPENAYGIGIDLNITNFATLSDGTVFDNINKAENVLKLKKKLKKEQKDYYRLTRIYRKLPDEEKAKLEFKNMKKRAHKIDVLHKRIKDIKDDYERKCVKAIIDKKPDFVVMEDLKVKEMTNDRRFSKYIADSSFYSFRLRLYIKCLENGIEFRLADKRFPSSHICHDCGAYFTNLTIDDRVFYCPGCGVEIQRDFNASLNLRDTTKYTFWNPSRSDDI

SEQ ID NO: 42586 - protein, 253 aa, unknown
  TnpB Polypeptide
VGLNNLFAVVFNHSDTAILIKGSTIKAEYYWWKRETKTYQAIRDWLRNRGFNAWRKYHAFYLHAVFKRRERLRHYYRTAIRFLARTMHEMEVNEVFVGYPYLVGQDNGNEYNTNVWWFSKVINWLKDVLQEYGIKLHVVNEYGTSRQCSICNINHENGRVKRGLYVCELTGIKINADLNAARNIAKRVGYEVPIPKKILTYIVTTNGVKPLTPMEGVTIETPTVKTPPKKGEKGVIMPNTQPVGLGIRWMWPT

SEQ ID NO: 42587 - protein, 242 aa, Thermocladium sp.
MSRSLLKTMNSQNCQGLGRAVGIDVGVEKLLVTSDGEYLPNLRPYEKALKKVRRLHKELSRKRYLSRNWFKAKIKLARAYEHLANLRRDLYMKLGRYFAEHYDVVVMEDIHVKQLIGKSGRKMRMRLHDVAIHELRSIVEYQMGKYGKEVVFVDPRNSSKACAKCGYVKDDLTLNDRVFSCPRCGWTADRDYNSSLNHLKHAGWESPVVPVELRPLPITMGKAGRGSGKPLKGGVAHSGQLS

SEQ ID NO: 42588 - protein, 382 aa, unknown
  TnpB Polypeptide
LANRKNNLFSIPDNLPFSGYDAAMKLTAKVKLLPSKEQAVGLKETLKQANVACNSVSDIAWEHKEFHKYGLHKIAYHETRASSGLTAQVVVRCISRVADAYKLDKKTKRKFKPLSSIAYDDRILRWYVDKSEVSIWTVNGRQRITFVCGERQRCLLSSRQGETDLMLHRGKFYLATICNVDELDPKDVDDALGIDLGIVNIAVDSDGEVHSGSQVKSVRHRHRRLRTKLKRKGTKSAKRLFNKMAGKEARFAKDVNHTIAKHIVVKAKGTHRGIVLEDLNGIRDRVTARRSQRATLSSWSFFQLRQYISYKARLVGVPVFLVDPRNTSRTCPACGCIDKRNRPNQATFSCVSCSFAGPADTIAADNIRRVAVNQPYADRLRA

SEQ ID NO: 42589 - protein, 784 aa, unknown
  TnpB Polypeptide
MSTDNITKTQIQDNKSLLLFSGFRAIKVPLKNISNNPEFFEELAIRLHDLVTFGYELVYLYITDCFENNIDILPICKKTYLYAMQILSNDLNFMPKDKQSEQLFDVFKRLFRPKIIDFSDYKFNGLSALMDSVAVECITSYKNNIFMHFHQRLKRVIYLFVKYHPDFSGLDEKMQNQIPYKVLNAVTNRQLDNDIPNSFIPIVKQSILDFIPGNAWKKSYEYDLKSDTNKFLLPTLRLEHKLEELLKRDLAILEQKKKDGFFENKIEENNITPTLVAKVKKNRKRKPFKRKTKRYRTNRKKKEKPTYDAATKAEFDIRKKYKSFQAVPLRTAYVPCYFKMHTFSLLRKGNFDGPGGIPGFPSIGNVIKILAKKADTNLKEIPSEEELDEKSIEMRKIMWGHYLNLDHKIFRKQERKGFRFFNTILTDGFGCTLLFVKKGKQYVNGKLVDDDTEPEDDTTKEKYSFPILSNLSNAEKLELLEGTLIGCDPGTFYMSCMVDNNPNGNPEGPKTYYCCDADCKRETMAYKTNATRRKILKKAGVTIAEQPLSKTNKKILTVESLCEYIKTHHEVGKIVKPIYQNVVFRKLKYYSKMRRTAWLQKLPDKIEKEFGRDAVLLYGNWSQTSNMKGLSPTPGKAVKMCLARRFRTFDIDEYGTSKYCSRCYEELEHLKYVDKNGKTQTSYRLLICRECSNQQGQTVNIRHIARDNNGASGCLMLGIKELKGEQRPDNFTRGFKKKKENPVPIVPPVMRKKINTPLRTPIPPVIALKKVNITKKTQINGESW

SEQ ID NO: 42590 - protein, 625 aa, unknown
  TnpB Polypeptide
MLPRKVKYKRENDPIFISFKNRINQYGNTLPIPDLSNVKPINIKNSWYTNKIFKFNTNDTNNNPINIDYANLVKLQFSTKAIKIRCYPNEIQINILINWFKADIELYNATVLFLRKTIPYIFIQQYKKSYGKKKYSYICQKQIDTLNHKKNIIKNKKNNATTILNKKLMIRNKSKKDYEFIIDKKKQISKLNEDIAKINIEITKFIEKKNSCNIYVDFFNKSDVLIKKYTDYKYLRSNELKTIRDEIYNKYKDFGVLAHSLDASIKRACTSYKSGITNLLENNCRRFRVRCLSNNNKGMIEIEKQAFNFDKNEKNYQICKKTLGCMEYKYNNREHFITIPSTSYFSYDGDKYWLLYSTAIEEKTNIEPKKLYAGVDPGIRTFNTIFTPYSIVNYGTDVYSQIREYLLKIDKLKTKHTIEEEILKCNKIINKHVEILKILKNKRYNEITDKNIKRLERQINFNEERIKNLKKINGNDKKKEMYEKNMNKRKEWKGNFYYDKIKRKVTELHWKTANDLAKNYENVIIGRFSMKSICEKDDVCEMVKRVGTLMRHYDFRTKLVYKCLTNKTKILVSSEKYTTKMCSICGHYNDKIKGEKEINCEGCKKKYPRDGYAARGIVINNLKIK

SEQ ID NO: 42591 - protein, 346 aa, Streptomyces sp.
LKKFQPQPGFVVQAFRFALDPNAAQEAVLRSHCGAARAAYNWAVGWVEASWWQRRAEDTYGIPEADLTQRRPWSLPSLRKAFNEAKHTDPRFAAWWEENSKEAYSTGLAGAAAAFDNYAKSKNGNRRGKRMGAPRFKSKRKACLSCRFTTGTIRVDTDGRHVTLPRLGTLRTHEPTAGLLARVQAGTARILSATVRPEHGRWLVSFQAGVKRDLERVARPGVAVGIDLGVKTLAVMADSTGEIRAVANPGHYDAARKQLRRASCIVSRRQGPDRRTGRKPSKRWEKASAALGRVHHLVGDGGAAAGRDDRGRGRERGPGAHPASCAGADARTGGHGHVNCRVMAAT

SEQ ID NO: 42592 - protein, 534 aa, Anaerobacterium sp.
MAMRTITLKLHKPGKRKSGIIDEAMTNYTLAYQFLLDKAYGQIDEMQKKYRDARGNYRASNIQKWVDKDISKELNRFGVECFKDSLKMDFGMTMASYLRLREIQNDAGYPVAYLDPCASEERYSLIMRQLTEGKKTLEECEKDIDKLSDKTSLLKPVFFCRYALNRDYCLLYDAENNRYFAKFYMMNVKSNDRAVTNTNKERKLQYIHKSEEIYVGTGRPERFILVPLSFGRWQEEYLKRAVNNPGILKTARLMKRKNEYFLSISVDIGCMQRIKPASYMGVARGIKHAVNYTVVNLKGDVLDSGSINGDVRHEKTGDIIPGDIHKIANAIEGIVLKNSCQLIMHTFTNKGDKLQWVDSEGLGHVPAMNCRSYNKLCEILKYKLVHKGFSPPVQTSPVGLFYTCPECGLNSLGNRLSESMFICIACGTAMDIEQLGSINLSRRLIKYNKAGIEVKLERTESGIKFINEDLDLDFTPSDPLNCIEEFKNEIKRIIEDFYRNIPKKQKDRDFNKKYGIIKRIDRAEDFIKLIKIVE

SEQ ID NO: 42593 - protein, 220 aa, unknown
  TnpB Polypeptide
VLRRLGISTWIYYHEKYLDAMYKRDERLRHLYITAIRFLADDLYRRGVRKLYIGYPIMLSQNNGNEYNTNIWWFRKIVLWIVDIFMEYGIEVELVPEYYTSKECLICGIRHKNGRKHRGLYICSKTGKKINADINATLNIARRLGYRIKIAKKIESYHVTHNGIKPLIPLQRANTPDPSIETPPLQGGEGVILMVICDLSNCFLKDQRSIERSLSFAKTT

SEQ ID NO: 42594 - protein, 396 aa, unknown
  TnpB Polypeptide
MSKRTHKIALNPNNKQRKWFAQQCGYSRFAYNQALDDFKKYHDATGEYLSATELNSRFNVSKQDHGWTADMDQVVANKSIFKNLASAISRWRKKLSRFPRFKKKGIRDSWTTNLSNDKIDGKYITLPKIGRIKMFEELRFEGKVTTVTISRTAHRWFASITVETENTIAVEKDSTHPVIGIDVGINTLATCSDGTKYENPRPLKRYEKKLVRFQRRLSKRVQGSKNWYKQKDKVARLHYRIACIRDDAHHKATTDIVNRVSGIGIETLKVSNMLKNRKIAKALSDSALGGFLSMLKTKAEACGIKPKEADQFFASSKTCCSCGHKKDDLKLSERTYHCGACGISIDRDVNAAINLRNVAVGHTETQNACGDPVRRQSDAKVVEAGKVIWQQKPLPI

SEQ ID NO: 42595 - protein, 222 aa, Desulfonema sp.
LEKLWGATVSRTADRWFVSIGVRMNITPATCENQAVVGVDLGVRHLATLSDGEIIEGPKAYRKSEKKLRRFQQSFARKQKGSRNRERQKRKISRTHYRISCMRQDALHKLTTRLVRKFSVIVIEDLNVRGMLRNGGLAKAISDMGFYEFRRQLGYKARISGVRVIIADRWFPSSKRCSACGEKHPNLTLSDRTFVCPAYSLRIDRDLNAARNLEMYPGLMAA

SEQ ID NO: 42596 - protein, 396 aa, Desulfonema sp.
MVRVRIISLRLPEPEVRRVSEISAEAARCWNDITETANSFYLSHKKWMSKGDIQKAVKGGYALHSQTVQALTDRFCGNRETAARLRRNGDRKARYPYRTKRFVTIPFKKAAIRYDRDGELILTLAKGNRLRTGFVPEEGTVIRTAELVWNGAGNYNLHYTFGVPEPELLKNGLSAGIDIGEIHPVALVCEDGDGLIVSGRLIRSVKQWRNKVLAKLSKQISRCEKGSRKFKKYVRAKARLRQKTDRQIRDMLHKATRMAADFCSAKGIAEIVVGDLRGVEKNTRKKKRLGRKSRQKVSQMEYGKITSYLNYKAKERGISFVRKNERNTTKECPGCGCHNICAGRNYRCEKCGWEGHRDGKGAFMILRKKYPDTPLPEIGIFFRQVFPFFKKSIAGC

SEQ ID NO: 42597 - protein, 422 aa, Desulfonema sp.
MNRSFRGVFSQKNVPGNRFLLTGDLFCDTGGYMDFVIRRSYKYRVYLTKAQISNLENQFSMCRHLYNRSLAERTDAYKKDGTAISYNQQQNSLPELKKERPWYRGVYSQVLQDVLRRLDKGYQAFFRRVRTGENPGFPKFRKRGQWNSITYPQYRKRPDSVITVPKIGRVRLVYHREFPEDATVKTLTITREAGKWFACFSAEFPFIAEPEQGLPDPLGIDLGLTDFFYASDGSHVPVPKYFRKKEKQLGRLQRRLAKAEKRSEKYYKILKAVRKCHYRIKCRRSDFLHKTANDLLKKSGLIFYEDLRISDMMRRPKPKQDGDGKYLPNNASAKAGLNKSIADAGWGRFLAILKYKSRRLGKKTLAVPPQYTSQVCSACGEIVKKSLAVRTHRCACGFVANRDLNAALNILRIGMDTLQART

SEQ ID NO: 42598 - protein, 390 aa, Desulfonema sp.
MKLPLRKSYKYRIYPTKAQESRLENQFSMCRHLYNWKLAERIEAYEKEGVSVGYTQQQNSLPELRKERPWFKDVYSQVLQDVLRRLDNSFQGFYRRIKAGEAPGFPRFKKRGQWDSITYPQYKKRPDSVIDVPKIGKVKLVHHREISDEAKVKTLTITKDAGKWFACFSVEISFPAEPEQDLSDPVGIDLGLIDFFHTSDGEHISAPKCLRQKEKHLKRLQKQLSKAGKRSGRYYRLLKAIQKCHYRIRCKRNDFLHKSANVLLKKSGLIFYEDLKIRNMIRRPAPKQDEEGKYLPNKASAKAGLNKSIADAGWGRFLDILKYKAPHFGKKVAAVPPHYTSQKCSACGNIVQKSLSIRTHSCICGFVSNRDLNAALNILRVGMDTLQART

SEQ ID NO: 42599 - protein, 425 aa, Desulfonema sp.
VGDFSEFPGHLFTEKWPRKQFFLLTGNLFCDTGGYMDFVIRRSYKYRVYPANAQISNPENQFSMCRHLYNRSLAERTDAYKKDGTTVTYGQQQNSLPDLKKERPWYKGVYSQVLQDVLRRPDKAYQAFFRRAKAGGNPGFPKFRKRGQWNSITYPQYRKRPDSVITVPKIGKVRLVYHRELPDDAKVKTLTITREAGRWFACFPAELPFTAEPEQDLPDPLGIDLGLTDFFYASDGSHVPVPKYFRKKEKQLRRLQRRLAKAEKRSEKYRRPLKAVRKCHYRIKCRRSDFLHKTANDLLKKSGLIFYEALRISDMIRSPKPKQDENGKYLPNNASAKAGLNKSIADAGWGRFLAILKYKSRRLGKKLLAVPPQYTSQKCSACGEIVKKSLAVRTHRCACGFVANRDLSAALNILRIGMDTLQAPT

SEQ ID NO: 42600 - protein, 459 aa, unknown
  TnpB Polypeptide
MSAVPARSIECAYRQRSYPSPTQQRQLQRLFGARRYVWNWAWRRQDEHYRTTQQHLSWVALSREFTALRTAPDTAWLAELPREPFNQTLRDLNRAWQNYLRGRAARPRKKAFGTVQSARFTLDQRRQQVDRAGGTVQLDGVGRVPFVVSRPLAGRLRSATLSRDAAGRWFVALTADGVPAPHSPNAPREAVGVDRGVREVAVTSQGERIAATRRTRAVERALKRHQRAYARGYRAALARAGLDPTQPCPKGTRLAPSNRMRRRQQKLGRLQAQLADLRREALHQASHRLVVTHQVIALESLNVRGLARTLRRGFRRRLHEAGMGELARQLAYKASWHRRTIVKVDPFFPSSQLCSTPGCDYRNTNLKLRERHWRCPQCGVVHDRDVNAARNIEREGLRLLAATPRSGESHARGEAACGAEAPASARQPTSRKREPGRPAAARQRAVVPPAGSGKATVAG

SEQ ID NO: 42601 - protein, 280 aa, Paenibacillus sp.
LDTVLFKKPEYDLVWNRDYSLSKQIISINTLYGRIKVPYMTKGMDSYFDGSWSYGTAKLVHKKGKFFLYIPVSKEIAEIETGAIHQVVGIDLGINFIATSYDSQGKCTFFHGRPIKDKRSRYKHMRKQLQQVGTASARRKLKRIGGRENRWMYDVNHCVSKALVRKYGATLMVVENLKGVRSKTEKIQLNERYESVSWSFYQLRKMIEYKAALHGGKVIAVDPKYTSQTCPKCGRKNKGNRDKKKHHFKCKECGYSSSDDRVAAMNLQRIGMKYITEGIV

SEQ ID NO: 42602 - protein, 551 aa, unknown
  TnpB Polypeptide
MIIQSKYTKIFHSKDLTRQKYDELYDFAVLIQNHKNAVSQHVNSYLLHYLDYNKFQFIKVMRERFKNVITSSFDAQLYTQVFTCYQNKFDAIQRKLAFEVRVFNGFEFYKRDTKKHKKGGLKKVILDKRQTPLSNCLTYLARYGNESIIDYINNNISSCDENKREFYNNILRCCEKYGFERLFKLALSKRKRIVKHYSEYPIEFKSLTFSGRCRKTRIIDYNSKFGSKINSFVSLSGISRSKGRKSFDIPVTFNKGWHGNMKDYRKNNPDYEYTITFNEKEHQVSIHLCKDGERYIPQVNGNTVGIDVNCKHNLFSLSDETTYDYDRKLVNDFCKLSLEIDKQKERNKEYKVGKRKQQKLDTLKSKMVKSEQQLIANMCKALREQGVGHIVMEDLDNGFGKCYVKDKDNDDINYNRKVKFLGLSSLKQEFEHIARKYDIAVSTVQASYTSKMCPICGCIEDENRPNQETFECIECGYKDNADFNAAKNIRNRALVTVLREQLLKQLDNGAFEPRKLKREKVKEVLLSFRRNLQEVARSECIKGSVTTFDYV

SEQ ID NO: 42603 - protein, 386 aa, unknown
  TnpB Polypeptide
MDRTLRLPLNPTTEQAEYLLETMRQFTQSFNLVCAEGWRLKEGNAYTLHRLTYRDSKALCPKLVSDLHVQARQKGAEAVKSAISLAKKGRKVGSPNSSLCPPRYNCNSFSVDWQKGLANLATVCGRQKIAFTVPAYARELIDNRVATADLMYRKGRFTLHVVLKLDDVEFMDTRQAIGVDLGVCRPAVTSDGRLHGQKRWREVSKRRFRLKRKLQSNGSKSARRHLRSLAGREMRFRRDCDHVLSKSILQGIAAGTTVVVENLTNIRARVKARRGAAKRRLHSWSFAQLRSFLEYKGEALGCRVQGIDPRHTSQRCAACGHIYRGNRPSQSRFVCRSCGHRANADKNAAVNIRDKHLVGWSSPSDAAPSEAVSSQTRDCQAQSLSV

SEQ ID NO: 42604 - protein, 372 aa, unknown
  TnpB Polypeptide
MMLSHKFRIYPSKTVQAKLQEHLELCRWLYNRLLEELNTAKSAGRKLRQKETQRLIVELKKQKPELNDVYSKVLQMVNYQLWSNIRALASMKKNGRKIGKLRFKGKWFKTLNYNQSGFKLDGKKLRLSKIGEVNVKLHHPLMGEVKGVVVKRELSGKWHAIFQCENVAANPLPKVNKNIGIDIGLKYFLSDSDGRQLENPRFYEKTLKKVQMVQRELSRKKKGCKNRGKQKLKLAKLHEKLVSQRNDFLHKLSRFYVNNYGTLAVEDLNITNMVRNRNFAGKILDASWGKFLQMLAYKAENAGRQFVRVNPRGTSQEYRHGELDRDYNASLNILERGLSGLGRPFEPVEVKPLLVVIPASNIIDTGSPYPSG

SEQ ID NO: 42605 - protein, 409 aa, Unicellular sp.
MLVLEFKVRAKKHQYTAIDEAIRTAQFVQNKCLRFWMDNEKVNKYDLNKYCRVLAHDFNFANKLNSQARQSSAERAWSAISRFYDNCKSPRAERTPLDKGGRGDRGFPKFKKNCRSVEYKTTGWKLDLTTRKCIIFTDKNNIGRVKLVGSYDLNFYPIESIKRVRLIRRADGYYCQFILSVEVKVDTSPANSVIGLDVGLESFYTDQNGNKINNPRFLRKGEKKLKRLQRKLSRKKLGSSNRRKAKQRLAKTHLKISRQRKDFAVKLARCVVHSNDVIAYEDLRIQNLVKNHCLAKSINDAAWYQFREWLEYFGQKMGKITIAVPPQYTSQICSDCGKKVKKSLSTRTHVCACGCRLDRDENAARNILKIGLGTVGHTGTWLQDSLNACGEDTATFSGFAVSISRTEKS

SEQ ID NO: 42606 - protein, 381 aa, unknown
  TnpB Polypeptide
MYKGMKAQLYPTLDQKEIIDDYLQLFAEVFNLALTKAGEAKEKGKSLSFGQIYHQLMKEKKAEYSQRYPIYSDECLFLASSYALKQFNYSHAKDYHALFFSKDSHKTFFLVPLTAPYEDKGTLALKMNRTKKKAFLPLKGIGIIETRGIPPFSGRYISARITKTQLGRYYLSVQYETKDPSLPIEGDGHPIGIDVGLNEIVVTSDGEKVLNPRFFQVNEARLNRLNRILAHCQKGSANYRKVHLKIAKIYEHLTNQRKDFINKLTLDLVKKHKILVVETFAPVELKADHHLVRSSVEACLGEFFVQLKSKAKWYHRQLIRVDKYYPSTQICSNCGYRNHEAKDLGVRQWVCPNCHQSHDRDINAAKNILEEGLRMLSAPSV

SEQ ID NO: 42607 - protein, 379 aa, unknown
  TnpB Polypeptide
LIESVYNGFMKLVVQLQLVPDAESARKLRESVERFNEAANWLAGIAFDQQISNKISLQKIAYQEVRERFGLSSQMACLCIHRVCEAYRRDKSKRPKFRTHSAMSHDIRTMSFKGIDRVSLLTLEGRVLVPFLLGSYQAERLPQRKGQCDLVLRKDGKWFLIVTIDVPEGTPIPVTDFIGVDMGIARVASTSDNAEGHCGKPVERIRRKHNVQRKRLQRKGTRGAKKKLVRVSGKEAKFRKHQNHCISKTIVESAKRTGRGIAIENLEGIRGRVTARGGDAQNKLSGWSFHQLAAFLSYKATLAGIPIVQVDPRNTSKTCSVCGHCERGNRKSQAEFVCKHCGFSAYADWNAARNIRALAVSCNAARTGQCRSGIRTPGS

SEQ ID NO: 42608 - protein, 197 aa, Salmonella sp.
IKSDGDKVANPRHLINASRNLRRKQKALSRKKKGSANLRKARIHLAGVHERVANARADFQHKLSRTIVDENQAVIVETLKSANMMKNHHLARAIGDAGWSGFISKLEYKAAEKGVHVVKLDQWFASSKTCHCCGHKMPEMPLNKRIWQCPECGVEHDRDINAAINIRQKGILELQAAGLVVSAHGGQRKSVTQTVAA

SEQ ID NO: 42609 - protein, 382 aa, Brevinematales sp.
VKAFVFKLYRSKNNKTLHQTVNIAGIIYNYCIAVHKKYYGVFGKSLSANRLKVHLTKLKKRTEYEYWKKVGSQAIQDIVERIDRAYSLFFSNLKRKVKCAPPSFKKVKKYRSFTLKQAGYNLFEDNRIRIGKKVYKYSKSREIEGKIKTVTIKRDTIGDLYICVITDFKDDCPVRLSPNNGGVASGKMAGADFGLKTFLTLSDGTRHESPEFYKQSRNEMKKASRELSSKKDGSNNRKKAKLSLARVHQNISNRRKDHHYKLALELCRKYDVIYFEDLNLKGMKALWGRKVSDFGFYSFLKILEHIAGKYGTEIRYIGRFEPSSKTCSVCGYIYEGMTLREREWECPECGTLHDRDLNAANNILKVGASTFRGEDVRPAQAG

SEQ ID NO: 42610 - protein, 397 aa, unknown
  TnpB Polypeptide
MRKRKKQKQHRRTYKYQIREHPQNMRLGNMLDDLGDVHNHFLKLEQRYYRIYGKYAGRYRLQPHLTKLLERTHRQWAWIPRDTLDAVIIRIDTTYQRFFAGLGGLPKFKRKDRYRSAKFQSAYLLEEGRIRLSLKAWDASQQRLKFNKRWFSFHQHRDYDGKVCYIQILRDSVGTYWLYVITDASTPEPYSATGESVGIDNVIQGMDLVYSQTKSGMETYLTFSTGEKKHSPQFFKRSLKELRTLNKSLSRKVKGSNNWWRCVRRLARLYRHIANQRKDWHYKVATDLCKRFDTIVTETLNLAGMKRLWGRKVSDLAFYQFVEILKFKCFKHKREFLQVGQWTPTTKPCSDCGFHNENLSLSDRQWTCPDCGSHHDRDVNAAINILRAALGPSVETV

SEQ ID NO: 42611 - protein, 171 aa, unknown
  TnpB Polypeptide
MEKKLKREQRKLSMRALLAKQKGINLFEAKNYQKQKRRVARLHEKVVNQRTDFLNKLSTDIIKNHDMICIEDLNTKGMLRNHKLAKSISDVSWSSFVAKLQYKADWYGREIIKVDKWFPSSQICSECGHKDGKKPLSIREWTCPICYTHHDRDINASINILSEGLRIQALA

SEQ ID NO: 42612 - protein, 508 aa, unknown
  TnpB Polypeptide
MRPTHILDLNGELLDSAPVMAQLASEIQSISAYATYVTRNDTQLETGLAQAGSVQPASAGGRAGVMMPDFLATGRTGRSRKERLVQYNVVTAFRSWQERTKAVNGESSKYVSQGWKRTMNASAPSYGEGDFINLGAVDKQYALIENNPFADGEIVLKIVIRGAWYQLIFNFDNTRFTEGKVTLPLIKLENGNPVFIFSVVTDNPVVQFSGDYVIGVDVGINEYATVVVRDTKTGKVAYKTTLSQRVHSLWNSVRASERQVKQLREKAESLSLYNRQAIMAARDEAQLHRAAASRKKRELAILAAQEIAYLSHFWDNAVVAVEDLSWVTNTMQNGRWNRGELIKWLTHYVSQNGGWVVTVNAANTSQVCHVCNNEVTHPKHEVSQCTQCGVFGRDVNAAANIAARAVPKVEKARKTRAKSRKLQEQAPLKTPVARVSLKYPGQDRTKNKPTPKRKKHCISKGVTLPISPARVNPTSVLADCLTYGVAGTSQAAINQGTITHKYRLCSPI

SEQ ID NO: 42613 - protein, 304 aa, Bacillus sp.
MMLAKKVRIKPNKEQELQLWKSVGTARWAYNWTLAKQEENYKNGGKFISDGFLRKELTVLKQTEEYAWLYDVSNNIAKQAIKDACEAYKRFFKGLADKPRFKSRRKANLSFYNDNVKLKVKEKQVLIEKVGWVKTSEKLPVGVKYSNPRISFDGKYWYLSVGIEQEFTKEKLTAVSLGIDIGIKELAYCSDGQRKNNINKTKMVRQAEKRLRRLQRQVSRKYEMNKEGNRFVKTSNIIKIEKEIRQLHRRLSNIRKNHLHQSTSEIVKTKPFRIVMETLHMKGLMKNRHLAKAIAKQCLYGFKR

SEQ ID NO: 42614 - protein, 427 aa, Tolumonas sp.
MILTEKQYVEIDAQISSTLWFNSRCSVRIWNRLVEHRETAKKQNEPSGYITQKKQLPIWKKEDERLKQPSSQQLQEVVKEFHGAWKSFFEKRNHGDTDCRPPSFRSSRNFYSMHYPQRYNSFEIEGGTLKLAFGKNRKEWLTITLRENDYSNVKTVRLCFDDVLKQFCVCLHREEVEAKPKAEGLRLYFDPGCKTTLTGIGSDGKIYEYDINPLRKVNMSSYKLIDELISRRDKKQKKSWQWRRLNKRIARLWRKVKYRTKAYLHTLANRIFASHPNLSKILVGDWNKQETLADAGYVFVNKRINRAVQNNNPVNMLVTILSYKGKLRHGVSVEKFDERGSTRTCSQCNYIHEEGVSPAVRLFTCPECGFTYPRDWQSGLNFLRQFESAVWSGLEGHYPSRSVRKVLAPFSLKAQRTICTASFALAS

SEQ ID NO: 42615 - protein, 401 aa, unknown
  TnpB Polypeptide
MDCRNFEYRIYPSRKQTGRLNTQFFLATKMYNLLLSVKKETYLANGKNLTKYDLNKDIKYFRDTDTNFKGMHSQVLQNVSDRLSKAYANFFRRLKEKKSGKHIKVGFPRYKKQLKSITYPQSGFKFISDKKLRISKIGNVPIVLHRVPRGKVKTMTIKRTKSGKWFVVFSCEIEHTLKGHPFPDKSVGIDVGLENFATLSDGTIIHNPRHLKKSEIKLKRLQRQVSRKKKGDSNRKKAIHMLAVQHERVANQRKDFLHKTSRMIANNYGVVAVEGLNINGMLKNHCLAKHIADASWGSFLRMTCYKEEESGGRFIVGDPFEPTTQKCSRCGAYVRKSLADRIHNCPICGLVLPRDLNSAINIEKFGNRVGHTQIYACGDSTSTSCLEQDASGVIEAGTTLG

SEQ ID NO: 42616 - protein, 438 aa, unknown
  TnpB Polypeptide
VGKDALNKRQRLAKNRQIKKTMKETLARHEKMTCKTYELKIDRSHLSEETTRVLRLLFLEAKWFYNHLIAQGEVWNADYAIKTVMVKNKDRLLEPRELTRLSSQMRQEIIARAKDNIVGLSVSKKKGRKVGALKFKSRINSIPLKQKGITYRIEGNRIRIQNVRQPLKVRGLHQIPEGAELTSATLEQRNGDYFIHITVFQPKTRKQFSLKELAVDAGIEKQLTLNNGIDVVEGAPITEKVRRLHRELARREKTHGKNWFKTNLKLNKEYDRITNKRRDVKNKVVSRIISTARTVHLQDDNIAGWQMMWGRRVQTSAIGGIMSALKQRAHTPVVVGRFVPTTKTCHRCGNVQDVGLKERIFECVKGCPRIDRNLNSTFCIGQAVEDGEGWRIVPVVCRESTPVDTKTSIEMLEYFNSISGVSASPVVEAGSHPTFSRW

SEQ ID NO: 42617 - protein, 381 aa, unknown
  TnpB Polypeptide
VNLGAVDRAYASIENDPFTDGEIILKMVIQGSWYRLIFDFDNKRFTEGRVTLPVIKVQDGQPVFIFTVVTDNPVVQFSGDYTIGVDVGINSYATVVVRDVKTGRIVYETTLSQRVHSLWNSVRASEQQVRDIKAKAVTLLRDRQARMSALDEAQLHREAASRKKRELAIMAAQEIADLSHTFDNAVVAVEDLGWIANTMQNGRWNRGELVKWLTHYVSQNGGWVVAVNPSNTSQQCYTCGQRVSHPTHKDSVCPEHGVMDRDVNAAANIAARAVPRVVKARVTRAKNRKLQPQAQLRTPPARGSLKYPGRDRTKNAPTQKRENRRRVSREVILPVCPARAQAYRLEASVLADGGTARAAGTSQAALKQGNAAYKSRLCCLI

SEQ ID NO: 42618 - protein, 227 aa, unknown
  TnpB Polypeptide
MAEMKKTEAYAFLREVDSIALQQSLRHLDTAFQNFFKQPKTGFPRFKSKKRNKSSYSTVCINGNITISNGYLKLPKIGQVRLKQHRAVPNGYRLKSVTVSQTPGGKYYASILFQYEDQVQEKEKEMQRFLGLDFSMHELYRDSNGNEPAYPRYYRKAEKKLAREQRRLSKMQKGSNNRSKQRIKVAKLHEKVSNQRKDFLHKQSRQITNAYDCICIASCIIQSVESK

SEQ ID NO: 42619 - protein, 427 aa, unknown
  TnpB Polypeptide
MLRGMRFRLNLTTEQAVQAGEIAGVCRTVWNTGLDLYRHYARANVGKAKIDRIYLGYVQLARELAQARTEIDWLAAGPSHTLQQTLRDLDQTVRKHGPWTTKFRARNTWSPSFRFPDGDRVRITMINHKWATINLPKFGEVKFRHHRIIDGRIRSTTMSMDAGHWYLSVLVQDDSQTPTMHSGPVVGVDRGVNILAAVSDGRVLHPDAPFVTAGEEERVRRLQRHLARQRKGSARRGRTKAKIAATSAKGRRRRQDWAAQTAHQLAEQYSVVVFEDLKVKNMTKRAAPKPDLTRPGHFLWNNRKAKSGLNKSILNAGWGALKLATASAARRTGTRVLTVPAAYSSQECFACHHIDHQSRKSQAVFHCTNPSCVVGPINADLNAARVVHHRGLQLLLSLENADGHAVSGRGDLQDFAVSANRLLQSAS

SEQ ID NO: 42620 - protein, 197 aa, Cyanobacteria sp.
MLFKNHRGVEQLQYFYGDSDGNFVDNPRYYRQSEPRLNKLNRRKSRKFPKGKPVSNNYIKARKRYSKAHLRVSRQREEFGKKTALRLIQSNDLIAYEDLKVKNLVRNSKLSKSINDAGWSQFRKWLEYFGFKYRELIIAVNSAYTSQDCFNCGQRVKKSLSTRTHICSCGYVEDRDTQASLNILKRATQGHWGSKSD

SEQ ID NO: 42621 - protein, 291 aa, unknown
  TnpB Polypeptide
MHLEGAFKAFFRGVGKHPTFHKKGIRDGFYVPSGQFKLFGNKISIPKVGRVRMTESLRYQDAKPVSVSVKHQADGWYAVLKVELEDTPRTDSDTFVGVDVGCTQLAVASDGTICESPARLKDLERQLRRRRRLLARKAKGSHNREKARYALAKTWQRIDNIKQDTVHKFTATVAKNHGTVCIETLDVKGMKEGDNKYVRKGVQNSCMSEILRQLKYKCNNFVEVDKHYPSSKTCSNCHSPKADLALSDRVYTCQSCGLKIDRDLNAALNLRQEGFRIYTVGHTGRACGENR

SEQ ID NO: 42622 - protein, 396 aa, Nodularia sp.
MTFRLYPNIQIEKQLRYHRKLHKDLFNAAVNNRLTQYKKFNRSIDYFEQQNCLPAFKEVWTEYKQINSQALQATLKRVDFAFERWFKGLGKRPRFKSIRHYSGWTYPAKTGYSVESNSENGYLNLSKIGRIQMRGKAKYWGKPTTCTIVYRNGKWYASITVDVLEQALKPEVLPTGAIGIDLGCKSALSITDGENHQQIDAPKFFRNAEQKVKKVSQEKRRKRAPNRNKKVKASRRFKKVQLRVSKILRKVANQRQNWVHQVAAEIVSSNSFVATEKLEVKNMTSRARKGKRQKQKAGLNKSILDVGFGMLRSAIKYKVEQIGGVFVEVPTKKVKPSQTCPKCGHRHKKTLDIRVHECGVCGYVQDRDIAAAEVMLYWSKGTLPGLGTNRANAPLR

SEQ ID NO: 42623 - protein, 306 aa, Bacteroidales sp.
MKRRPVFKMKGRGDGIRFPQGFRIDNRRIFLPKIGWVGFYKSCTIQGRPKNITVSRRGGKWYASIQVEQMIEIGKHASDSEIGIDAGIKCFAAFSDGTLVEGVHSFRKHEERLAREQRKLSRMKKGSENWKKQKREIAKLHHTITNVRSDFLHKLSTDISKNQAKVFVEELQIRNMSASAKGTVEEPGRSVKAKSGLNKSILDQGWFEFQRQLDYKLFWRGGMLVEVNPRHTSQQCSCCGHTAKENRVSQAVFFCQVCGHEENADVNAAKNILTVGQTGIACQANRISGRQQEPAGTREEVLPVAS

SEQ ID NO: 42624 - protein, 356 aa, Streptomyces sp.
MTVACARRAFKYRFYPTDAQAAELSRTFGCVRKVYNLALAARTEAWARQERVNYNATSAMLTAWKKTEELAFLNDVSSVPLQQTLRHLQTAFTNFFGKRARYPRFKSRKKSRKSAEYTTSAFRFRDGELRLAKMDQPLAIVWSRPLPEGAVPSTVTVSQDSADRWFVSMLCEDPSVQPLPAADAAVGIDVGLDHLLTLSTGEKIANPRHERKDRARLALAQRRLAKKAKGDGANRAKARRKVARLHARVTDRRRDGLHKLTTRLVRENQTLVIEDLTVRNMVKNRSLARATRTRRGRSSGTCWSTKRSGMGGTWSWSTASSPPPSCAPPAASLPRACRRTSAPGRVRAAARPMTGT

SEQ ID NO: 42625 - protein, 369 aa, unknown
  TnpB Polypeptide
MNKAYKYRIYPNKEQQVMFAKTFGCVRFIYNKMLGDKIDFYKETKQKLNNTPAQYKKEFGWLKEVDSLALANAQMNLQTAYNNFFRNKSVGFPKFKSKHRNQNSYTTNNQGGNIRIEHGKYIKLPKIGIVRIKLHRQIPNNHTIKSCTISQTPSGKYYVSILVEFAYETPKIVLNINNFIGLDMDMKNLYTDSNGVRAEYPRYYRQMLDKLKREQRKLSKCNIGSNNRNKQRFKVAKLHEKVDNQRKDFLHKLSNQIANDYNGVCIESLNMKAMSQCLHLGKSVQDNGWGMFTTFLKYKLDWQGKPLIKINKWYPSSKTCHHCGYVNDKLTLSDREWVCEGCGEIIDRDWNAAMNIRDEGIKALLSKVA

SEQ ID NO: 42626 - protein, 347 aa, Methanocalculaceae sp.
MILTYKIRHNRDFSEELAKAFAIAEFAVKNPKCRSSKDVKHIGLKSAISNQILKKYGRSKTIKEVRSVPLIIPGQSIHFDASTKIIRIVPLDLSLRYHFNDPVTINQIEIDRTYAYVSVTVSEEPLKKTDSCIGIDRNTTGHIVVTANPDTGKIQKFGKKAMHTRKKYSSIRRRLQKKGKYRQLKKLENRESRIIKDTNHKISRNVVEMAVEQNATIVLEDLSGIRNTNNQVNSFKYSLHSWSFYQFQQFVEYKASMFGIPVVYIDPAYTSKDCSKCGCRGIRSGKNFKCPTCGHVDHADVNAAFNIAYRQKSMIDRIQKEMCTMGALIPHDAMFEECQTTSEPHAL

SEQ ID NO: 42627 - protein, 303 aa, unknown
  TnpB Polypeptide
MGSVIFIPYKWVSSAIAFDSKTQVLHYAKTLYEERSLQHKAIYPSSFSCMAKSMRVERYSLVFMFGQSFLVPKLRIQTKIHEQQWNRLNSGDLVKADIKEIHEDFFVYLLISVRTPHISVSLKEERKMGVDIGMRCPAVCYTCDGVIRFVGNGREIRYHTRRIRKRADEFIKRTQGTKKQLRHRLNDYKRYIDHRLSREIVDFAVEQNIQIICLEKLYHLQKKFSHHEQVCWSYQRLQQFIAYKAKLAGIHIRYVNPRLTSKRCPSCGKINNVKGRSYSCRCGFHHHRDVVGAMNILHAPEIL

SEQ ID NO: 42628 - protein, 131 aa, Okeania sp.
LTTNTGETVSVPNFYRKSQSNLARKQRKIARKEIGSNNWRVAQNRIARLHQHIARQREDFHYKTAHKLVKEYDLIAVEDLNIKGLAKNTKLSKSIYDVAWGTFIEKLNAVAAVRGVHVIKVNPHNTSHSLQ

SEQ ID NO: 42629 - protein, 432 aa, Moorea sp.
MEFKAVLKKPQELAINEAIRTARFVRNKVLRYWMDNRGVGKKELYRYNTQLRDEFEFVKNLNSHACQASVENVERAIKRFFDNCKKKVPGKKGYPKFKKHSRSVEYKQSGWKLSPDKKSIKFTDKKGIGKVKLKGTWDLWCFEQKLIKRVRVVQRADGYYVQFCVKIDNSEQLEATGYTIGLDVGLKEFYTDSDGYSEHNPRFYRKGEKRLKFHQRRVSRKKKGSANRKKAINRLGRTHLKISRQREEHAKILARCVIRSNDLVAYVRAACRRQDLRVKNLVKNHCLAKSINDAGWYKFREWLEHFGTKFGRITVAVNPAYTSQNCSSCGEVVKKSLSTRTHVCKCGCQLDRDSAKPTLREHNAAINILTIALGTVGHTGTYQNARGDSTSTLLGSDLVEQVGSLNRESPGISAMGSVKRRFDGIPPIVIRV

SEQ ID NO: 42630 - protein, 455 aa, unknown
  TnpB Polypeptide
MLFIYTVLGMAITRSDRLRIKPDSPAQRDALTETLDLYRRLVRDLMTVAFTHWPSVGPAKGNEAVAVIEGLVHPTAKRPNVRYRYFHNRYYKFPSYLRRVAIMDAVGQVRSFMSRYGDWLDGQRRHPHARPPRLTASTNTFPSLYGGQCIKLNEETTQAFIKVRYRNDWIWMSFRLSGRCRYRGRGQSKSPMLTFNGKHWGLSLPEQFEPAKPVRTPKRVLAVDVGINTAATWAVVDDLGTVQARGFLRRRDKDREHRLMQRIRAKARKHTRHGSRLPAGFCGRDHARLKRLANNEAHQISRRVINLALQYQCHAVVAENLKGWHPKAGRKRSPMKARFHRWFHRMLVDRIQSKAQESGLRSILVYARGTSSQAFDGSGPVKRDASNYSLCTFASGKRYHADLSAAYNIAARGLVVFQGSRRKPSARAAQPKSGRTPGTPVTLSTLWATVRAAGE

SEQ ID NO: 42631 - protein, 521 aa, Actinokineospora sp.
VNFSPGPCPGSSGKADDSRNARCSDCSPSRIGPACGPRYSTDAVTSPASAVMSRRASSRSRCGLLSGSASARPRRSAEADMSITAARLITSTLGILARSRSFSSRLSFTRISRGLSVVAANLIDMSRFRLQSTPAQERVLLEHCGHARFVWNLAVEQHAHWRTGRRAAPGFVAQCRQLTEARAANAWLAAGSVTVQQQALKDFTQAMANFVRRTHRRPAWRRRGRGEGFRIVAVKPGDVRRISRKVGEVKVPKVGWVRFRWSRAVADGVKSYRVTRDGARRWHIAFNVLPTPIPPPGAGAVVGVDRGVVVSAALSTGELLSAPTLRGTEKARLLRLQRKLARAQRGSNRRGKVKTAIARLRARETDRRKDWVEKISTRLAREFDVIAFEDLKISKMTRSARGTLDVPGRGVRQKAGLNRGILANGWGLLVTRLEHKAPGRVVKVDPRFTSQRCSACGVVDREARESQAAFRCRSCGFAANADVNAALNIRFAAGHAVAARGGPPLGEPMNREPQRDLLLVR

SEQ ID NO: 42632 - protein, 358 aa, unknown
  TnpB Polypeptide
LDWVRSILNRLYNAALEERKTAWETEHRSVTLYDQIKGLTAMRNDDPEGLGSVAVRVERGMLMRLDRAFKAFFRRRKAGEKPGYPRFRPIARMETIDFVDPKATMVKKRARGYAIRPKGFPTIRLFPSQPLPTRCPLKALRIVRKPNRVYVDLTYEVEKEPLPQCDSAVGIDLGVRKRAVLSTGHVIDRNTRDWPEIRRQQRAISRCKKASGTKRKRVRRLADMRYREGIRNRNTCHRVTTEIVRKYGLIAVEKLDVKGMTTEWVRKKGLNREILSQSWGLLRHQLQYKAEWAGREFAEVDPKHTSQDCHRCGARNKPGRSETYRCAACDLRMDRDHNAALNILRAGVVALGSVTWVI

SEQ ID NO: 42633 - protein, 382 aa, unknown
  TnpB Polypeptide
MFRTYRYRIRPTKTQEATLLSWLDATRELYNAALQERRDAWEKQRKSVSRFDQTAQLPSIRELRPDIDAPAVALRGALRRIDLAFAAFFRRCKVGDKPGYPRFKGRKRWDAIEFENKPTTNLIFGKRILIPKLGLVHISLHRPFEGTPATLKLHRENGKWYALIGCDDVPEKTLPPTGREAGIDLGLLSFAATSDGEIFENPRPLKSARLHFERAQRRVSRRKKGSNRRRKAVALLAKLHARVANIRREANIKVARSLVAKYDKIYIEALNIKALSRSRLSKSINDAGWSTFKHWLSCKAEEADRVIVEVDPRYTSQTCSGCGRVEKKALSVRIHECLCGLFLDRDINAAINIKRLGSSLRREAPVVMGPQRPEKLSGSIAR

SEQ ID NO: 42634 - protein, 414 aa, Streptomyces sp.
MSTHVKRAFKYRFYPTDEQAAELSRTFGCVRKVYNLALSARTEAWALRQERVNYNATSVMLTAWKQTEDLAFLNDVSSVPLQQCLRHLQAAFTHFFAKRAKYPRFKSKKRSRKSAEYTSSAFRFRNGKLTLAKMTEPLDIVWSRSLPEGASPSMVTVSQDSAGRWHVSLLCEDPSVKPLPATGTAIGVDAGLDHLLTLSTGEKITNPRHERRDRCRLAKAQRQHGRKATGSNNREKARRKVAKVHARIADRRRDHLHQITTRLVRENQTIVIEDLTVRNLLKNGRLARAISDAAWSEFRSLLEYKAHWYGREVIAVDRWFPSSKLCSTCGSLQDKMPLNVRIWTCASCGTAHDRDVNAAKNLLAAGLAVSACGAGVRPQRSTPGGQSATKQEALRREPQDFPSRRRGRKPTALN

SEQ ID NO: 42635 - protein, 341 aa, Moorella sp.
MYQEMADRCTAFANRCLQLDKKDRPKTSKQARQYSEKLPSAVLAQAIRDIRAAKKAKRFKRLWPNFNSQNFRVEKEASQNGGAVWKASFPTLEKRVGVPVEVSAYQEKYLEMPLSGQAKQGTARLVRRGKEWFIHLSLTMSIAEEKSRTGKIMGIDLGQIDLLVATVAGQTLFFSGAPLAYIRRRFARLRHSLQKARAYRAIKRLGDKEHRWVTDVNHKISRVVVKFAKSQGVILIRMENLKGVRWTTRQRKVQKRDHGRNLDYWPYYQLQQFIKYKAALAGTRVEFVNRDNTSLTCSRCGETVKSRPQGRWFKCPRCKETMHVDANAASNIAQAISGLAA

SEQ ID NO: 42636 - protein, 361 aa, Moorella sp.
MAQEILKKAHQSWNAFFACLRLYRNGKLENRPHIPGYWKDRKTGQRFFKVIPVKSPRSYSLAARFLSVTLPADLRDNGRLVVPARGILKFSGKPRTLEIKYDQVKKRWYAFQVVEMPEPDCKPKPVKVAGVDLGTRTLAALAVEGIDNQILFSGREVWKDFLYWSKRISAEQSRLNKAGRKTSRSLKLLYRARSKRLNHAFEALAKEIARRLKANKVTMLYLEDLTGIRADMDFGPGNLLVHNFWAFRMLRKAIEAACLKVGIQVVPVEPRGTSSYCAVCGTRLDRFMRNKAYCSHCGLVWHADANAALNILLKGSSKGHGVKAAPQRPQVLRWNRHRWESRLESAVGTPFKAANSVPEAA

SEQ ID NO: 42637 - protein, 417 aa, unknown
  TnpB Polypeptide
MIKTATFYLADMPQEDKRLCQLLCDELGAAGSAMVREWYRACDEVDGERINWGDVQARGVQVGKQAFADRGYRGELVNDLQRAEFFARFKTEFKKIAAGERASLPFPGSAPFIFLRMDPGHEVASVVNEGGTWYLCNPHFYPGGSRSEDNRREWRLKDVGRNGWGYAILAEAEKFACIRIMPDRKKRGSWVVKITVHLPDAIARREVEKQEVWAGIDLGLNCPAVLSIPDHPDGGFVRFLGNDQYPRLWKRLDDYEERKRVLNRAGKREAARDLRAKITGVRQHINELISREIVDLCLAMRVTGLRMEDLKGLGVEGSGRLKFWPRFHLVTRIEQKCGEVGLTFEKIKPAGTSQTCSSCGHRDKDNRNGPDFVCLRCGFARHADVNAANNIARGMDDFDLPTGASAPTKARRLEIAS

SEQ ID NO: 42638 - protein, 432 aa, unknown
  TnpB Polypeptide
MHYTYRFRLDPTPEQRELLDHHRDTCRQLYNHALNEFKQIPKSAGTLNQRVRQVRDQLTSLKDWWDELNDVYSTVAQAAVMRIEDSIKALSQLKQNGYNVGSLNWKAPKDFRSFTYIQSGFEFDSKNGQPVLSLSKLADIPLIKHRAIPDAETVKEITIKKESTGEWFASFTVGDKETPEKPTDPDRCVGIDVGILKYAHDTDGTAVESLDLSDERERLERAQHDLSQKEHGSANWERQRQVVAERHADLKRKRRDFLHKLSNYYATEYDLVAVEGLDAKELVELPGNSRNRAGAAWGTFLRMLEYKCEREGTHFAEVDPRNTTKACASCGVKTDKPLWVREHSCPSCGFEADRDANAAWNILSRGLKNIGVVHSESTPVETALPTDTVVSAKRVIETGSPITRSQRLRVSSQNSESSDDTLKERTASAVSE

SEQ ID NO: 42639 - protein, 462 aa, unknown
  TnpB Polypeptide
MGQATRTTKLLLDLGKRDQGGANTDKRAALDATALELTQARAFYIDFFLAHTDKLAERVSYYSEKHLQMRERAISANELLSWAEACTVVTQDHPDPWEGWNFSARFADLPFAYRRSVIKDAIGKVRSYLSQRATWEKSGKKKGKPGLPGANDHPTLYQGTCELSLEEAKGGERFARLKVYDGKRWQWVNYPVVCSRYFQQRQREPAWERQSPTLVLSKQTAALHFPQTKQVQAKKVKESKLDPELVTVAVDLNVKHLAVITVRQHQQIIETVFVTDHGLDQQRYRHLKRIARKQWLSGKPVAGEHSNQQLWRHVRRMNEDAARKVACSIARVCAQYPGCVLLFERLRKIKPKGASKSRRMNRKQANHLRGKINQYAREKAFLAGTVTVEVNPHGTSQYCARCGQLGERFSYRAGSRIKVKWGKLFWCPHCHYEANADFNASVNGHHSFFQEFHWKTRPKRSG

SEQ ID NO: 42640 - protein, 390 aa, unknown
  TnpB Polypeptide
MKAYKYKLKPSAKIVAIFESWLAVLYELYNAALQERRDAYRINRLSINYLAQANQLPEIKAERPDLASIHSQVIQNVLKRVEFAFDNFFRRVKEGQKPGFPRFRSRSQYDSFTYPQSGFSLKGKKLHLSKIGKVKVHFSRPIEGEIKTCTIKREADGWYVILAVDEPKKEVAPAPNESVGVDVGIESFATLSDGQAAPIENPQYFRRAEGDLKKAQRRVSRRVKGSKRRKKAVGLLAKKHLKVRRQRRDFHFKEARKLVNQYQSIKVEDLNIKGMVKNHHLAKSISDAGWGQFIMIVVFKAEEAGRTVIKVNPSYTSQDCSRCGHRNEITLATRIYRCLQCGLVIHRDRNGAKRIEQKGRAVPSGSKRGVACEEPRTYQAADLKSPAITR

SEQ ID NO: 42641 - protein, 396 aa, unknown
  TnpB Polypeptide
VKIIKYTYKFRLKPTKEQEVLLNKHFGSVRWSYNYFLNQRKEEYLNSKKSITYNKQSKCLTQLKQENETDWLKEVNSQSLQYSLKCLDQAYQNFFNKRTQFPRFKSKKSKNSFTCPQFVRNEDVLLFIPKFQEGIKMIMEREIKGIIKKATLSKTPTSKYFVSILTEKEYTPLVKTNQSVGIDLGIKDFLVLSNGTKIKNHRFLKHYEKLLTKNQKYLSRKTKGSSRCEKQRIKVAKIHEKITNSRMDLIHKTTLNLVNQYDKIYLEDLNVKGMMKNHKLAKAIGDVSWGKFIDILTYKAEWNEKEIIHIDRFFPSSKTCHKCGYINQPLHLKDRTWTCPECSEVHDRDVNAAINIFNEGYRKNISGGTSDYKRRAKIRPSFDGISNEAFKEKELV

SEQ ID NO: 42642 - protein, 405 aa, unknown
  TnpB Polypeptide
MKTIKYTYKFRLEPTQEQQVLLNKHFGSVRFVYNYFLNQRKDEYLNNKKTLNYYDQSKELTQLKKIDDKKWLKEINSQTLQFSLNCLDTAYDGFFKKRTQFPKFKSRKSKNSFTIPQFVSVKKDKLIIPKFRNGIEMIMERKIKGTIKHCSILKKPTGKYFVSILTEMEYNSVNKTGLSVGIDLGIKDFLVLSNGTKIKNHRFLKHYERILKLNQQYLSRKTIKSVRYEKQRIKIARIHEKITNSRMDLIQKTTINLIKQFDTIYLEDLNIKGMMKNHKLSKAISDVSWGTFVQVLDYKSLWNDKSVVHIDRFFPSSKTCSKCGWINNNLTIKDRYWICSKCGEKHDRDFNAATNILNEGYRINISVGTTDYERGDQIRLEKSGVICETLKEKEHYVPETTTSLV

SEQ ID NO: 42643 - protein, 388 aa, unknown
  TnpB Polypeptide
MLKSYKYRIYPNQAQKELLSKIFGQVRFVYNLGLETKITAYTGNKKNIDVFDLNKQIKELKDNECEWLKESPSQALQMSMSNLDNAYTNFFRGKGFPKFKNKYSKQSFQLPQGVWLSDNNKQIFIPKLKFTDIDLHREFKGDIKTVTVSKSITNKYYISILTDNLQPKPEKKPIKLNTTIGIDLGIKDFAITSDGKKFKNHDFFKSALRELRVEQRSLSRKKKGSNHYNQQKMKVALIHEHIKNQREDYLHKISKYLVDNYDTICIENLGVSNMIKNHKLSKAISDMGWNKFKSMLDYKCEWYGKNLSVIGRFDPSSKSCSSCGTINKELTLKDREWVCKECGVKHDRDINAAINIRNFGLRNQPSVTQSEWLHCACGVETHKSSVCV

SEQ ID NO: 42644 - protein, 424 aa, unknown
  TnpB Polypeptide
MKIIRYTYKFRLEPTEQQQVLLNKHFGSVRFVYNYFLNQRKNEYLNNKKTLNYYDQSKELTQIKKLEDKKWLKEINSQTLQFSLNCLDTAYDGFFKKRTKFPKFKSRKSKNSFTIPQFVSVKKNKLYIPKFRKDGIEMIMERKINGVIKHCVISKTPTGKYFVSILTEMEYISMNKSGLSVGIDLGLKDFLVLSNGTKIKNHRFLKHYQHQLKLNQQSLSRKVKQSIRYEKQRIKVARIHEKISNSRMDLIHKTALDLIKQFDVIYLEDLNVKGMSHRCKSKQDENGKYLPNGQSAKSGLNKSILDVAWSTFINILEYKAEWNDKQVIHIDRFFPSSKTCSKCGWINNGLTLKDRTWDCKCGEKQDRDVNAAINILNEGYRKNISDGTSDYEHGAKIRPKKLGNGNEVLKEMNQFDSETTTSLV

SEQ ID NO: 42645 - protein, 288 aa, Moorea sp.
MILTYCYRIKPTLEQAEKIDYWLELLRRHWNYALGQRLDYLRQTRSRVDRCSLVCESMGEIPEPVNYYTQQAALKETKILFPEYKKIYSEVQQINLQRLDKAWKRWLIPDKFGKRGGRPKFKKARQLSSFSFSRVNHPKATIKFDGKNIITTRLETIRVVVHRPIPEGFELKTASIIKKADGYYVCLSAKDERVREPLPLDKIKSAIGIDVGLKEFLTTSEGKTVPIQQTYRFAQNHLARQQRKLKNKQKGSKKSQKQQNKIALIHQRIQRQRKDFHLHCSQLVNEVL

SEQ ID NO: 42646 - protein, 510 aa, unknown
  TnpB Polypeptide
MYTVRFQLELNPSEKRFLSKSFFYANQMHNQIVCHAANRLNALFHDKEYLEARKAYGEAGFSKKEADGLSASEKKKKKELSSIMNNKQKEYGLTKTSLCKFVSKEQKKYKNYINSHQAQAEADAVYEGVEKVLFKDGHHLHYRRYNSFDCIKQKCAATGVLLSRWDTIYFMKHYFKVRIPEDEYIQSVLSSSDLKMDVVYSFLKRIEFNSGFKYYVVITLRGNAPKRIKLSEDGGHRTGVDFGTSTIATASNNEVHLEELAPDSAKYEKEIRHKQNLVDVSMRKHNPENYNKNGTVKKGKHKWKTTRRCRRLKRQIRVLYRKQTAYIKTSHHTFINKVIRNASEFILEPMNFKALQKKSKKTERQDEAAPVKQKDGSSKMVCKYKRKKRYGHSIKNRSPGRMQADLKAKATQYGIPYYEIDIYQYRASQLHHDTGEYSKPALNERFKTIEGHQVQRDLYSAFLICHIDNTLTAPDFKACQLDFPHFVEMQDILILNMKKCGHTMRSCFGF

SEQ ID NO: 42647 - protein, 342 aa, Arthrospira sp.
MAQTTSIIRTDLWNLNPTASQQVLLLQTVEVSLGVCRHLMGILLTHWPSLGGLSSQKRVLAVEKLIHQTAKNPNPKYRQFDQTFYKFPSYYRRAAIVFAAGQVSSYMTRYREWQSGTRQRRDAKPPVLNPNSGCYPTLYKGQCYKLHGYDRIDIKVFNGTDWVWTTIEITSLRERHTVDSNKLLSPSLIFNEQKKACHLSVPFECHPPQREGEGRVVSVDLGINTTTTVAVVNFDGTVTYREFIHPARDIDEVAAAAGTCVQRNGDRRDKRLKSVSKRASKTMGLGGSLQKGFCSHTYRKCRNINRQIGQIVSKRIVQIAQQFNADAIVFENLKGWNLHSAG

SEQ ID NO: 42648 - protein, 325 aa, Arthrospira sp.
MQSDLPEWVKETPCHIRQNAIFDAYQALSASPDARFRSCRDSSQGIKFNNTNFSSGSWYPRLTKGLIFMVSEPIPKACGQGTQLVFTKGRWLAIFPEPVAVTPTEATGVIALDPGVRTFITGFDGSRFLELGSGDIGGITRLCQHLDDLMSRIAKEPCRSRRRRMRQAAQRMRTKIPQCKLMKPTNKLLTTDSQLQHNFSADLRDFQHGCQGEAENQIQDCPRHADMGALSIQTNPETSRGNNWNHSVDVTEEYTSKTCTHCGHVHSQLGGSKVFRCPECGFTLPRDWNGAFGIFLKALRDTASVTLTGNSAIVALSGNSRINVA

SEQ ID NO: 42649 - protein, 256 aa, Arthrospira sp.
LSGTRHKLPFVGWVSTFEALPPSLVKKVTITRQAGDWYMSFFVEIRPEITPKFRERIGVDLGINNWATCSDGTQFSNPKAYKAATKKLARLQRHLSRKVKGSKNRAKCLLKVQKLHQRVANIRRDTIHKITTFLAKNHSQVVIEDLNVSGMLKNHCLAGSIADASFYEFRRQLGYKAERYGSKLIIADRFYPSSQLCSNCGYRQKMPLVRRTFECPNCGLKIDRDLNASINLEKSPGSDDYTCGRGAADSPGRSQK

SEQ ID NO: 42650 - protein, 257 aa, Arthrospira sp.
MVSEPIPKTCGQGTQLVFTKGRWLAIFPEPVAVTPTDATGVIALDPGVRTFITGFDGSRFMELGSGDIGRITRLCKHLDDLMSRIAKEPCRSRRRRMRQAAQRMRTKIRNLVDEAHKQIAHYLTHNYSIIFLPTFETSDMVAKVKRLIRSKTARAMLTWAHYRFKLTLRHQAEITGTTVVDVTEEYTSKTCTHCGHVHSQLGGSKVFRCPECGFTLPRDWNGAFGIFLKALRDTASVTLTGNSAIVALSGNSRINVA

SEQ ID NO: 42651 - protein, 183 aa, Ktedonobacter sp.
VEQEVVSHPSEEAVGIDLGLLHFAPFSDGSTIENPRHLRQAENKLKKLQEALARKKRGSKRRRKAAQRVGKAHRHIRNQRRDFHHQAGRKLVTTYQTMVFEKLQPANMSKRPKPKQDEATGQYLPNGASAKAGLNKSILDAGWGQFQQICESKAACAGSRVLFVSPKYTSQMCSGCGAIVQKA

SEQ ID NO: 42652 - protein, 379 aa, Okeania sp.
MKSFKTKLKLNNKQKTILAKHAGVARHAYNWGLATCIKEYEETKKRPSAITLHKRLVAEVKSINPWYYEVSKCAPQQALRDLEKAFKNFLTIPKRGFPVFKKKGRKDSFYLEGSIKITQGNYIQLPRIGVVKTYEILPSVPVKNVTISKKADSWYISFKYNFEPEPTKKVGETIGVDIGINTLATCSDGSKFANVKAYRQAKKQLVRHQRAVSKKIIGFLRNATQTKNRLKAVKKLAKVHKKVADIRADTLHKLTSWLAKNHSTIVIEDLNVSGMLKKRCDPATTIVARESAPRDHKLASAIADCGFYEFKRQLTYKCELYGSELVIADRFYPSSQICSNCGPQQKMPLHLRTYECSECGFQADRDYNAAVNLKNYAYQ

SEQ ID NO: 42653 - protein, 406 aa, unknown
  TnpB Polypeptide
MVKTYQYRIYPTTKQRKRLETIFEACQTLYNQALAMRKQAYEKHGEPLSYKIQANHLTPLRQASCFWSSLHIDVLQDTLRRLDKAYQAFFRRAKAGQAPGFPRFKGKGRYRSMTFSHLSKQLIRNVRNRMARIVVPKIGHVAIRYHRPLPNGKIKNLTIQRKASGWYANIAIKVADVPEVKVQTTIGIDVGLESFLTTSDGDKVDNPRHFHESEKQLGKAQRILSRRDKGSTRYQQQREIVAKIHEHIANQRRDFHYKTAHQFFLQCEEVAIEDLKIRNMVQHPHLAKSISDAGWGNFQLILQSKAASAGKQLTKVNPHHTSQKCSGCSEIVAKQLSDRIHDCPHCGLVLDRDHNAAINIKKAAVALRGGAEVVISPDPSRFIGNRSAEPNKSRGTGNKPHPFRVG

SEQ ID NO: 42654 - protein, 404 aa, unknown
  TnpB Polypeptide
MKKTFEYRAYPTTKQRKTFTIWLALLRMLYNQALAWRIDTYQTTSESVKWTTQANALPDLKQESKAFAGLHADVLQDAIRRLDKAYKAFFGRVKTGDKPGFPRFKGEGRYRSMTFNHLSKQLIRNVHRKFARVVVPKVGHLKIRSHRPLPDGKIKTMTISRKASCWYVAICVEVPAPVEASVNTTLGIDVGLNSFVVDSDGEHIPNPRHYRTAEKKLGKHQRILARRKKGSNRRAKQREIVARIHQRIANQRKDFQFKAAHRILERCDEVAVENLTITNMLKNHYLAKSISDAGWGSFRLKLQSKAESAGKQFKKVKPHHTSQKCSGCGEIVAKNLSDRVHDCPHCGLVLNRDHNAAINIQKAAVALRGGASVVNDPETPERERSAEPNKPRGTGNKPQPFRVG

SEQ ID NO: 42655 - protein, 409 aa, unknown
  TnpB Polypeptide
MVYIVFYDKKKGLNMFKNRLLIMTTTYKFRLYPKKAEEEKLETAKEVCRQTYNHLLAELNEGYTKNEIQNFILDLKVAYPEMSDVHSKVLQMENQRLFGNLSSLSHLKKKGHKVGRLRYKGRNWFKTFTYNQSGFLLTHIRGKKGILWLSKIGDIPVKLHRKVEGNIKNITIKKSNGRWYASISSDFVQKRTCGTKEIGIDVGMMNYIYDSEGNTYENPNHFDNYHSKLKVAQQSLSKKEKGSNSRRKARIKFAKIHEKIANARDDFIHKLSAKLIKESKFIAIEKLNIKNLMLISYNAKNIADASWGKPRMYLHYKAESAGCVVQDVDPAYTTMDCSFCGARNNKLELSRRKFVCEKCNKEIPRDYNSALNILARGKELALMEKASNTEQLVQQGVSMKSEALSMGMG

SEQ ID NO: 42656 - protein, 185 aa, Okeania sp.
MVGNYFLSLTKLWVSMTQELVYKKNNHYKVLYSQAAQQILRTVAESFRSYYDLIIAYREGKISDKPRIPNYRKKGGMATVSYPKQALKLKNNQIRIPLGNTCKRWFGVDSFLIPMPSNLAFSPLKELRILPRNRCFYWEFVYQKEVVIKPLLNQENVLGIDHGVNNWLTCVSNVNTSAGSRWETD

SEQ ID NO: 42657 - protein, 417 aa, Streptomyces sp.
VHLRYSYRVYPTAGQRASLARTFGCARVVYNDALAVRKEARKGGLPYPKSTDLQKQVITAAKRTAERAWLASVGVDPLIQSLRDLDTAYRNFFDSLSGKRQGRPVGLPRFKSKRDARQSLRFTRNGFRIRGNGKLNLARIGDVRVKWSRALPADPSSVTIVLDPSGRYHASFVVEVEPDPLPEVDAEIGIDLGLTTYAVLSDGSVIDNPRFLRKAEKKLKAAQRELSRKAKGSKNRAKARAKVAKAHAKVADTRRDWLHKQTTKLIGENQAVYLEDLNVRGLGRGRLAKSVHDAGWSTFRRLLEEKAARYGRYIGIVHRAFPSSQLCSECGHRDGPKPLAVRAWTCGTCGVLHDRDLNAARNILAAGQADRLNAPGGPARPGVAIPRRAQPVERGTHLGDQRTTGVRAAGAGGIPVL

SEQ ID NO: 42658 - protein, 404 aa, Streptomyces sp.
MIRAYKFLMRPTVGQQQALTEMLRDHCSLYNGALQERRDAYRHVSRTSVTYGMQSAQLKDIRAFDPERQGRWSFSSQQATLRRLDKAFAAFFRRVKSGETPGYPRFRGVTWFDTVEFPKDGDGCRWDSTPHDPVTRVRLQGVGHVKVNQHRAVVGRVKTVAVKREGRKWFVVLSAEQEQPKPPPPTGSVVGIDLGIANFLADSNGGFVPNPRHSRTAAAKLESAQQALSRFPRVRRDKRTANHQRAVERVASLHGKVRRQRLDHAHKTALGLVREHDFIAHEDLKIRNMSKAVAPKPDPGTPGRFLPNGAAAKAGLNRSIMDAGWGVFLAILTSKAESAGREVIAVDPRNTSRTCPECGHVSAQNRPTQEKFHCQSCGHTAHADTVGALNVLRAGLVRREANPA

SEQ ID NO: 42659 - protein, 401 aa, unknown
  TnpB Polypeptide
MLIAHRIALDPNNLQVTYFARAAGTARFAWNWALGEWQRQYRERLGDPSLTAPSDARLRCQLNSIKRERFPWMYDVTKCAAQEAIIDLGVAFRNFFDKRGRHPRFKRKGIRESFCAANEAGSFRVDGKRIRLPVIGWVRMREEVRFAGRLKRVTVSREAGRWFASIMIETGDIRPTEQPEGAVGIDLGVKTLATLSDGSAIAGPKAHKALLKRLRRKNRALSHKRKGSANRRKARAKLARLHTRIANIRRDATHKATTMLTKTYRRIGIEHLNVRAMVRNRRLARSIMDGGFFEFRRQLEYKAGMSGAAIVVADRWFPSSKICSCCGSVTAGLALSQRRFKCDACGYETGRDHNAARNLRNLAASSAASACGEERSGAVHKPRVKRTFAKQEPNSIAAEQL

SEQ ID NO: 42660 - protein, 180 aa, Enterococcus sp.
LIDSKFIKVPKLKSLVRIKLHRQPKGIIKSATISRHSSGKYYISLLCKEEVRELPKSNSAVGIDLGIIDFAILSDGQKIDNNKFTSKMEKKLKREQRKLSRRALLAKNKGINLFEARNYQTQKRKVARLHEKVMNQRTDFLNKLSTEMIKNHDIFCIEDLNTNDMFLYHKLTKSISDVSW

SEQ ID NO: 42661 - protein, 138 aa, Sulfolobus sp.
MKNLMSDYIHKVTSWLIEQYDEIYVGDLDVKYMVEDSESKTLRKHILHSNFSKFMSYLSYKAKRAGRRVVKVDPRNTSKTCARCGHVKKDLTLADRVFVCPSCGWTVDRDYNASLNILRAGSGPRACGQETSAIHTLL

SEQ ID NO: 42662 - protein, 252 aa, unknown
  TnpB Polypeptide
LHYDRLRGKWYGHIPVRVKWPRKGKPHQPTRKRASIDLGICNLTTCVVEGGDRAYIYSGRAVLSDWRYWTKQIASYESTLKKTNGYNRSKHLSRLYRTRRRRLNHAVKSMLRDLYDRLETHEVTDLIVGDLKHIRDNANHGKVGNQKLHNFWPFAQIRQRIQELSEEYSIRVRFKSERGTSKRCSVCGKKHKNGRVKRGLYKCPDTNVRLNADVNGANNLLEPKVAADSGSRPMAWPMLLKWNSQEWEVSAA

SEQ ID NO: 42663 - protein, 275 aa, unknown
  TnpB Polypeptide
MKKQKAYKFRLYPNFEQRILFEKTFGCSRFIWNQMLADRKAHYEKTGETLKSTPAQYKEDFPWLKEVDSLALCNVQLNLNKAYKSFYQSGFGFPKFKSKKAAQSYKTNNQNGTIALLDGKVRLPKIGWVKVKVHRHPKGLIKSATISKTATGKYFISILCEEEIIPLPKTNSNIGIDLGLENFAIFSSGEKVENLRFLTSLSKKLAREQKILSRRALLAKKKGRKLSDCRNYQKQKLKVAQIHERISNQRRDFLNHHDRDINASLNILKEGLRLA

SEQ ID NO: 42664 - protein, 384 aa, unknown
  TnpB Polypeptide
MVDMGYRFRIYPNQRQRQLIERTFGCTRWVWNHFLNKRQIEYAETGRSSRAFRQMKDLPKLKAANPWLREVDSVSLQAVLQHLDRAYDNFYRRIASKKKGGYKGTAGYPRFKGKHDRHQSYTTKNVGHTVYVVDDKHVRLPKLGMVKAKVSRPVTGVVKSATVSRNPAGEYYVTIKCAGVCRHMEPAPGESIGIDLGLKDYCITSEEVKHPNHRYLKQSEKRLRRAKRKLSRKPKGGANREKQRIKVARLEQKVARQRRDTLDKLSTMLVRRHPVICMETLMPKNMVRNHKLAKHISDAAWGEFTRMLDYKADWYGRKVVHVDRFYPSSQLCHDCGYLNPEVKNLDVREWTCPQCGVFHDRDINAALNLRGEGLRILNQLEPAA

SEQ ID NO: 42665 - protein, 428 aa, unknown
  TnpB Polypeptide
VCGEVLGVGVRAYRFRAYSSNTTAGVLITQLEVACKLYNTLLHLEQEEYEKNKHSMSRNELRKLALDLRKRDPEFQALHSQVAQQVADRFYQARQRFFEGLANKPRVKKPHRYLSLVYPQSGWRLSDIRAVGQGENTEKKKRARLYLSKVGFFSVVIHRDFPLGRVSQVCVKLYHSGRMYVVFLVEEGEKSPYEQAAAGEPMKAVAVDVGIARLVTLSDGRFLGNPRPLERSLGRTRLLQRSLSRKRKLSKNWFKAKRRLAKKYDYVKDFRRDLLFKLGALLAKEYDILVLEDLNVVDLIQKGETRKRRLRLHDSAFSELRRILEWQFQKQGKTVLAVPAYNSSRECFWCGGINQGLTLEDRVFRCPYCGFTLDRDLNACLVLLKRAGWVPPGVPAELRPIPPLPSLGLKKGRQGGAMMREAPPFRAG

SEQ ID NO: 42666 - protein, 311 aa, unknown
  TnpB Polypeptide
VYPQSGWRLSNIRVVGHGENKKKKKARLYLSKIGFFTVVVHRDFTLEQVCQVCIKLNPSGRIYVVFLVEGEEAANEQKCAGEPKKAVGLDVGIARLATLSDGRFLDNPKPLELSLERIRLLQKCLSRKRKLSKNWFKAKLKLAKEYEYVKDFRRDLFFKLGALLAAEYDLLVLEDLNVEGLIRRGETRRRRLRLHDSAFSELRRALEWEFEKRGKTVLRVPAYNTSRECSRCGEINQDLTLQDRVFRCPHCGFTLDRDLNACLVLLKRAGWVPPVVPAELRPLPPLPSLGLVGRGGHGGATMREAPPFRVG

SEQ ID NO: 42667 - protein, 385 aa, unknown
  TnpB Polypeptide
MNRNELRQLALDLRKRNPEFQALHSQVAQQVAERFYQARQRSFDGLANKPREKKPHKYLSLVYPQSGWRLSDIRAVGQSENMEKKKRARLYLSKIGFFTLVVHRDFPLEQVCQVCIKLNPSGRMYVVFLIDESEGELPERPIQGRGRAVSVDVGITRLATLSDGRFLENPKPLERSLERIRALQRSLSRKRKLSKNWFKARRRLAKQYEYVGDFRRDLFFKLGALLAAEYDLLVLEDLNVEGLIRRGETRKRRMRLHDSAFSELRRILEWEFEKRGRGVLAVPAYNTSRECSRCGEINQDLTLGDRVFRCPHCGFTLDRDLNACLVLLKRAGWVPPAWCACGAPPNTSPTIPRVGEGWARRGNDAGSSAPRGGAAHHISRRRLGR

SEQ ID NO: 42668 - protein, 268 aa, Crenarchaeote sp.
MIVRISKLGEFKIIGYPKNLKEYLSWKMKEARQVIRNGKAFIKITFEKIIQKIEPKDSIAVDINMQNITVGKDENNYVRINTRINEIHRYKLLAENLQIKYPNKWKENRNIKRRILSFHSKAKRIAEDFARKVSKRIVNEAIKMDANVIKLENLKYMIKKVKKLPKKFRNKLYLMQYRKIQYWIDWQSKKHGLLINYVHAAYSSIKCPKCNKNMNEISYRCFKCNCGYENDRDVIAIINLNGRGSLSLSTAPHMRYVATNQLRGTLVL

SEQ ID NO: 42669 - protein, 426 aa, Methanonatronarchaeia sp.
MGKQRTVPVKLDVDSGDDTLLRKTVDEFLWAANYTTRQAFKGEYVTTSKTTLHNKTYEDVRDQTALQSNHVQAARNKAAEACKSVVARWKQGKKASMPHFTSPHLVYDHRTATFHEEHVSLATVDGRIEADYILPDKERNTPHAEYFFSDEYETTGAELHHNNGNWMLHIHCKREVESDTPDQAATENRTVLGVDLGVNNLAVTSTGTFWTGDEFDHWRQEYEKRRSKLQECGTRWAHQNIQSVGRKEEGRFKQTLHRISNELVAEARENECSVIAFEDLTDIRERTGASWGHKWAFNRLYEYVEYKAEEYGIDVEQVDPKNTSQRCSECGFTHPDNRDGEDFECLKCGYENHADYNAAKNIGLRYLRRNQTGSGGGAPVGVRLNSGMLNVNGGYSPAEESARTGVHAESHDFSPGLAYTLNFYTT

SEQ ID NO: 42670 - protein, 300 aa, unknown
  TnpB Polypeptide
VYNDRTITYNDDHVSLATTDKRVTAEFVTPVNEEGTLFEEYWTDEWEKGEATLHKRDGTYYLHVAVKKEVGSDSSDEETENGVVLGVDLNVDGYLAVTSTGAFFGNADYLNHKRDQYERRRGNLQQAGTRSAHLTIKSIGDRFAQWSADYLHRVSKAIIQEAVENECTAIAFENLKHIRKRISNASKFQQWAFKELQRHVKYKAEEYGIDVDDVSPSYTSQQCSHSECGFTHENNRDGDEFECVKCGKQLHADYNAARNVGWRLVQHWLKSGAERATSQLALKSGTLNANGRFRPTALRS

SEQ ID NO: 42671 - protein, 414 aa, Meiothermus sp.
MAVYRKVYRFRIEPTQAQSEALLGMAGARRFVWNWGLARRKEVYAATGKGLTYNQQAAELTALKKQLETAWLKDVDSQLLQQALKDLDRAYQAFFSKQAGFPRFKSKKRDAPRFRIPQRVRVKESEVYIPKVGWIRIRQSQPVDCSIKGATFKRDAEGQWYVSLTAEFEMPDVPLPPANPERVVGIDLGLKDFAVMSDGTRIAPPKFYRRGLSKLRRVQRQLSRKQKGSKNRDKARKRLSRVHAKVRNQRQDFLHKLTTGLVQKYDGLCIEDLNLRGMAKTKLSKSVLDAALGEFRRQLEYKTIWHCKHLAVIDRYFPSSRLCRECGSINANLTLSDRVWICECGAVHDRDLNAACNIKAEGMRHIPLVYGPSPSREGIVPVAAGHTETQNAWGEGVRPAHSRQSSLNQESHVL

SEQ ID NO: 42672 - protein, 222 aa, Lonepinella sp.
VKLSERLRFSGKINSVTISPNGDKYYASFSISIAKENYQSQPKTKLGLGIDVGLKSFVSLSNGLEIKSPKPLAKLARKLKTKSRQLSKKQHPKTKGDKTKKSANYLKASLKLAKLHRRIVNIRNDFLHKLSSSIIKQADYICLEDLNVKGMMKNHKLAKSIADVSFYEFRRQLEYKAKYNGKEIIFADRFYPSSKTCSQCGSIKKELKLSERFIVVNIAVRK

SEQ ID NO: 42673 - protein, 423 aa, Mycobacterium sp.
VSRFRLVPTAEQAVVLAEHCRHARYVWNLAVEQHLHWQPGRCAPGYNEQCAQLTAARAEYGWLAAGAQTVQQQALRDFAQAMRNFFSGTHRRPRWRKAGVHEGFRQVGLKPHHVEKVNRRFGRVWVPKVGWVRFRLTRPVPEGVKSYRVTRDRARRWHIAFAHTPQPLPGPCDGSVVGIDRGVTVAAALSTGELLHAPGLSRGEAKRLKVLQQRLARAERGSRRRARTKRAIATLKAREADRRKDWVEKTSTDLARRFDTIRLEALDVRAMTRSARGTLEQPGVGVAQKRGLDRAISRSGWGVLAARLRQKAFGRVEMVPAAYTSQRCAECGHVAPGNRKSQAVFECQACTAGACHADVNAARNIAAGRAVTARGDLGVSRSTNREPQLCSPAAWVVVNGVGIPWLQPEEDVNVVDARLRRRG

SEQ ID NO: 42674 - protein, 377 aa, Desulfobacteraceae sp.
MKIKRSSKVTIKLATGKKREILDGIHDEYARTANFFIDYFWDHPEIRSANQITSEIYSLPETWLTARMRQCAAREALSMVLGARNIENRRKSSIELEAEELLGEEIFTEPVKPVHNGKKMTLSSQVVRIEKGRNSFDLWLVVHSVGNGIKLYIPLKKHRQFNKWAEIGKMGSSVVINRQHVQISFEIETGEKKQEGKLVGIDAGINHLMTTSKREFLGNEVSPLISKIKRKHQGSKAYKRAKKELSYYIHKTVKDYFADNNLQLVVTEKLKNLKHNTRQKNKTKELRKTLSNWNYRELLNIIQMRCEENRVSFRSVSPFKTSQKCPNPDCAHTQRENRNNEEFKCLKCGYSEQADYVGSLNILYRFLTGPYGAGFKT

SEQ ID NO: 42675 - protein, 296 aa, Actinomadura sp.
MYMDVRFKGAPQRKGRRAAPPRFRSRKDLRQAVRFTRNARFTVTAGGKLRLPKIGDVRVRWSRDLPSAPSSVTVIKDAAGRYFASFVVETADGPLPEVAAEVGIDLGLTHFAVTSDGRKITSPRFLRRAERRLRKAQQALSRKQKGSQNRRKAVAKVARMHARVTDARRDHHHKLSTQLIRDNQAVYVEDLAVNGLARTRLAKSVHDAGWSQFVARLEYKAERHGRTFTKVDRWFPSSKLCGACGTVAEAMPLNVREWACPCGAVHDRDVNAANNILAAGRADSLNACGGTISPSA

SEQ ID NO: 42676 - protein, 594 aa, Actinomadura sp.
LGALPAGQLPGLARGVQAEPLDAVPGEGVVPARVEPRAELQVLGDGQPGVGGRVLGDVPDLGELLRPARGASAQDPDAARGRRELADRQVQQRRLPGAVRPDQADDPSRREVECAVGERPALPVSLAQALGLQRGGASGSPCGNPCLQAGEETDSCGAGDGRAIRRHGGAPFTALLAKRPRPHTRIARLPGMARQVKRAFRYRFHPTGEQAAELARTFGCVRLVYNKALAERTRAWRTEQRRISYVQSSAALTAWKKTDELGFLNEVSSVPLQQVLRHLQTAFTNFFAGRARYPRFKARKKSRASAEYTRSAFRWRDGELTLARMSEPLAIVWSRPLPDGAQPSTVTISRDGAGRWFCSILCTDIIAPLAPVKAAVGVDVGITSLVTLSTGEKITNPRHERRDRERLARAQRDLSRKAPGSANRDKARIRVARIHARIADRRRDFLHKLSTRLVHENQVVVIENLNVAGMVGNHGLARAISDAAWRQLRMMLEYKAGWYGRDLVVVDRWLPSSKTCSRCGIVREGMPLDVREWECGGCGSRHDRDVNAARNIVAAGLAVSACGADVRPRRESSRAGQSAMKQETQPATVGNPRL

SEQ ID NO: 42677 - protein, 477 aa, Actinomadura sp.
LHKRSPELPHRARPPQRAPDSWPRSSDTYSVEIPSLRAGRKRGSVRDGYSPGFVGGGRYGAGVSRYRLYPTPAQEAGLLVHCAHARFVWNLAVEQHGWWTPRRGPAPGYVAQARQLTEARAANRWLADGSQTVQQQALRDFAQAMANFFAGTHRRPTWRKAGRHEGFRIVGARGRGWEVRRLNRRTGQVRVPKVGWVRFRWSRPVPPGVKSFRVTRDRAGRWHVAFAAIPTPVPAPGNGAAVGVDRGVAVSAALSTGETCTVPGLTAGEAERLNRLLRRLARAKPGSNRRARVKAAIARLRAREADRRTDWVEKTSTALARRFDVIAVEDLDVAAMTRSARGTLDAPGVNVAAKAALNRGILANGWGRLAARLERKAPGRVVKVDSAYTSQTCNPCGHRAPDNRESCEDDLVLPRLYCGPASTSSATPCSERLVAARVSRSTLITHPLLGPHHRPSGVPPRGAYSSASLRSFSAHLR

SEQ ID NO: 42678 - protein, 402 aa, Actinomadura sp.
MARQVKRAFRYRFYPTDEQAAELARTFGCARLVYNRALEERTRAWYNEQRRVSYAETSAMLTAWKRTGELAFLGEVSSVPLQQALRHLQTAFTNFFAKRAAYPRYKSRKKSRAAAEYTRSAFTWRDGRLTLAKMSEPLDIRWSRPLPEGAVPSTVTVSRDGAGRWLVSLLCEDTIARLDPVDQVVGIDAGITSLVTLSTGEKVTNPRHERRNRDRLARAQKDLARKAKGSKNRDKARQRVARIHARITDRRRDFLHKLSTRLVRENQTVVIEDLNVAGMVNNHRVARAISDAAWRELRTMLEYKADWYGRELVVIDRWFPSSKLCGDCGTVTESMPLTVREWRCDCGTVHDRDVNAARNILAAGLAVAACGDGVRPQRESSRTGQSSVKQETQPVTVGIPRL

SEQ ID NO: 42679 - protein, 443 aa, unknown
  TnpB Polypeptide
MTIDEEFDKLLKQFHKLSDRHILVAETDMSCSDIQKVVELSDRIRKAGNELVGLMKKNYDQLMRTKRYRGLLKLYGFTKDKQKRKMLADQLNEIQKQYNVTGDYCRKSMIPIGKKYGINAVFALTKAEDVWHGIEKCLYDNGKTLHFSKHGDLPCIRAKQTKCGIILKVKDNQLQFKLGKSVFGIQVKDRFQTDEVNAVLDYLAAPEIADRKAVQILLEDAYCISTYRPCYATLVPKLIRGKYRVYLHLTIEGRAKPKYDRFGNPRHKYGKGIIGADIGTQTVAYTSDTETGLKNLSERGNSIQTSERLERLYYRAMDRSRRATNPQNYNDDGTVKKGAKTWNYSNHYKKLKARHAELCRINATNRHLAINEDANHLRSIGDVFITESKNAAKLMKCASKTTVNDKGKINKKKRFGKSIKNRCPGGGFRLRWKISSRHPAALT

SEQ ID NO: 42680 - protein, 368 aa, unknown
  TnpB Polypeptide
MLRAYKTELEVNNKQRTKLMQYAGTARFVYNWALLDRIESHQNNLSTNKYEQEKRFNAVKKERYPWLKEICYKVTEQEFTNCDLAFSNFFRSWKKGDKLVGYPKLKSRKEGIGKFTLRGKIIIESNRIKLPRLDWLKLKEVNYLPISGIKILSATISERAGHWFVSVQADTLKEIIPLGLTDKVIGVDLGIKILATCSDGKVFENPKALNKSEKKLAHLQREVSRRVKGSKNRTKSKKKVARLHYRISNIRQYALHEVSNYLTVKAKPKVIVLENLNVKGMVRNRHLSKAISDASFSELRRQIEYKAKWYGEKVVIADRFYPSSKTCSECGNVKPLLKLSERTFVCEVCGAVMDRDFNASLNLALLVH

SEQ ID NO: 42681 - protein, 368 aa, unknown; identical to SEQ ID NO: 42680
  TnpB Polypeptide

SEQ ID NO: 42682 - protein, 398 aa, unknown
  TnpB Polypeptide
MIQHRQHRVYRFRLEPTTAQEAAFQRYAGARRWTWNWALYQKRAHYAATGTGLSEKELSARLTALKKEPDTAWLREIDSQLVQQALADLKTAFEAFFAQRARYPRFKSKKRDTARFRIPQRVTLADGSLTVPKIGRVKVRQSRAVDGTTKSATFKRDACGHWFVSLVAETEMAAVALPLPSEERTVGVDMGLKDAIVTSDGERVAAPRFYRAAQRKLRRAQRSMSRKVTGSNNRAKARATVARVHQKIANKRNDFCHKLTTNLIDSYDAVCIEDLNVKGLVKTKLAKSMLDISLGTLRRQLTYKGQWSRTHVVAVDRFYPSSQIHHACGWRNRTLTLSERTWVCEGCGESVDRDHNAALNIKDEGLRILTAAVGHTDALTACGQGIRPAMPAALATPV

SEQ ID NO: 42683 - protein, 400 aa, unknown
  TnpB Polypeptide
VRRAYKFRAYPTRPQEGRAARLLADHCDLYNAALLERREAWRMRGVSISYGTQSAQLKEIRRADSDGQGRHSFTAQQQTLRRLNAVFAAYYKRCTAAKKAGEKKPGYPRFKPYQRFSQVLFVAGDGARWQPSDSGRWAHATFQAVGSVKVREHREVRGAVKALQFKREHRRWYVIVVAETEPVPLPAAGREVGVDLGVARFLTTSDGEVIANPRFLTVSAQVIADLERRKARTRPGSGNRRRIRRALAREWRKVRNRRRDFQHKTARTLVNECDVIALEDLNIAGMTKRSAPKPMPGEPGTFLANRARAKAGLNRSILDAGWAQFTSILTGKAAEAGRHVMFVNPAGTSINCHRCGQRCARPQQKIAICPVHGVIDADVNGARNIASRAGLGSGQAPSAA

SEQ ID NO: 42684 - protein, 373 aa, unknown
  TnpB Polypeptide
MRLVMKAYKYKLYNSKKNKYLVQQIETASEIWNFCIAMRRMYYLVYGKTLSEKKLKMYIAKIKKRRKWAHWRNLGSQAVQDVVERVYRAYKAYFDNKKKEHPVKKSPPKFKKREMYKSFTLKQAGYKFDGKGGIAINDRKYRYFDSRPLKGEVKTLTVKRDNLGDIYIFVVTQEECNEILPRAGKAVGMDFGLKHFLNLDDGSVVDSPEWYKASLKELQRVQRHISRCKPGSNNRKKAIKELNRIYRKICNQRTDWFFRLAYQLIADYAIICIEDLNLKGMQKLWGRKINDIAFGEFVQILEWAASNCGTEVVKIDRFAPSSKCCSRCGYIYRELTLKQRRWDCPSCGTHHERDVNAAVNICRMGLVHMGYPA

SEQ ID NO: 42685 - protein, 429 aa, Hapalosiphon sp.
MLLSFRTALIPNNKQETAFRKACGVARHAYNWANAHIKEVLELRKDDKSIKIPSAIDLHKKLIETVKSVNDWYYETNKNVPQKALADLRQAWDRCFKKVSKQPRFKKKGHRDSFYLEAVTKAQPKIQNDGKRVRLPSIGWVRLAEPLPVKAIHNCVISRQADRWFIAIKYEIDKPSVAENRPIVGVDIGIKELAVNSTGKVFKNPKAYKRMNKRMKRLQRSVSRKVKGSKNRAKAVNKLGRIHATISNIRKDAIHKLTNYLAKNHSKIKIEDLSIKAFLKNHKLAGAIADCGMYEFKHQLEYKTKKFSSKLIIVDRMFPSSQICSNCGQHRHKMPLKNRLYICPDCGHTENRDLNAAKNIERWFEGIFIPNRSDLAVSSTVSACGVDKPLKSHLETTMNQEVNAEDDNWFWTAEETDALWFWSASTTIV

SEQ ID NO: 42686 - protein, 637 aa, Limnothrix sp.
MGKPKPIYRTAKISLKVSRRQQKQLRRLMSAQRWCYNVVIAALRAANSPIYPIVPGVGPVRACSLKSAPKRRKQYLADGKPAEGYIVREWRDWQQFKPWDALKGHCDLYPYHDRDEGGSKYGVSAKTASGVTQTIRGFIQGYWTKRKRGDFAAQMPNQFRSAQFESGWIWEVDKQELDWDGDRLVLGTRNQIGGVVSLPIPKRYVGCSINKASITRDGAGDFWLHLSYAAAGEHGFAPDPDLTRSAGIDMGQIRAMVLTLDSGKSVSLSGRQICGLKRERDRRFRGIQRARARVFRAQVRQYLTDEQKATMAAMEAKSPGQGTKYARRMVSAARKELGLKKRSRRDHHLWQTQKRVATQVNRNLKYANHSITRRAVDWLRGNKVGKVYLGDIGSIPKGRKKGSKRLKQVKRNAQWEYGNQEKMMTEKLEEYGATLHKAHEHFTSQTCPNCGARHKPRGRLYRCRVCGWQGDRDAVGSANILARSIDPAWPDSGRIVPHTLKPLAISPAMKKAGRLHVGAARPQPLGGPPTSREVGCRPPECVDRSPRITREPEATAEGLVAESTRKPRPAGKTAVRADKKVRASRESLAPSAIPASEGLHDDLANTQKQDTRSRFAQQPPETPVQLNLWDLADATEV

SEQ ID NO: 42687 - protein, 411 aa, unknown
  TnpB Polypeptide
MGNVIAQMLVKGVVFRLESELPCEAKFLLEDFRLAVNGAIRAGLRARVTSRNALARLAYSDFRKEHPKMYAKHLVSAFEVAGSILKNHRRRVRRGNAGHVPYVRRVFMKAENQAYKLDRANGVIDLPIRAGCHVMLTLVLSDYHRGYLSDSSYSLGSLTILPDRAIIAFRKNAPRQYVPDSVLALDTNERSLDGVFAKGDSGVAVKAEFPDIAMIQQRHHDRRKRLQKKKAHDRRTSRRLCRREGKREHHRIEYRLHQVANAVLSFAENQKSAVVLEDLRGFKPRWNKGLNRRLSLWPRRKLHRIIEYKAQWRGIPVVKVDPRNSSRTCPICGRIQDSRMGTEFECECGWHLDRHINASLNLLQTAISKGMAGGLRFNPGAFQHDVMMILYDPVTGARSEPNGTSCIGLAT

SEQ ID NO: 42688 - protein, 364 aa, Peptoclostridium sp.
MQVTAQIKLLPTKEQETLLNKTLQEYIDTANSIVSGYLADDDARYTSKSVNAELPSALKNQAIQDAKSIFKKYSKALKAGSKKDASIQKEIKVPVLKKPVAIWNNQNYAVKFGYMSFPVWNNGKSTRLIVKAIITDYQASLLLNKLGTMRITKKSGKYIAQIALTVEEASSAGYQVIGVDLGLKIPAVAVTEDSKVRFFGNGRQNKFVKRKFRSMRKNLGKSKKLCAIKKMNNKEQRWMRDKDHKISRQIVNFAKENNASVIRLEKLSGIRQTARTSRKNEKNLHTWSFYRLAKFIEYKARLEGILVEYVDPRYTSQTCPACNTRNHAVDRKYKCSCGFATHRDILGARNIISAPVADGNSPLA

SEQ ID NO: 42689 - protein, 395 aa, Acaryochloris sp.
MEKAFSYRFYPTPEQESLLRRTLGCVRLVYNRALAERTEAWYERQQRVDYIQTSAMLTEWKKQDDLQFLNEVSCVPLQQGLRHLQTAFSNFFFGRAKYPNFKKKRNGGSAEFTKSAFKWKEGQMFLAKCLVPLNIRWSRQLPAAAEPSTVTVRLNPAGQWYISIRFDDPRVLKLEPVEPAVGLDVGISSLVMLSTGEKIANPKPFNTHYPRLRKAQKVLSRKLKGSRNRDKARVKVARIQQKISNARKDHLHKLTTRLVRENQTIATESLAVKNMVKNPKLSRSISDAGWGELVRQLEYKCEWYGRTLVKIDPWFPSSKRCGNCGHIVERLPLSIREWDCPECGTHHDRDINAAQNILAVGHTVAVCGASVRPDRQESKGQLRNTSNGKKQKLKS

SEQ ID NO: 42690 - protein, 431 aa, Methylobacter sp.
MNVHIKNTVPTVSNIVVFFHRPNIMESMKRLQAYKFQILPSGEQRRDMRRFAGACRFVFNKALAWQNERYAAGKTVKFSYTTLANLLPLWKQDPAISWLKESPSQPLQQTLKDLERAYLNFFAKRADFPRFKKKGHADSFRYPQGYKLDQANSRIFLPKLGWLRYRNSREVLGVVKNVTVSGKQGKWFVSIQTEREIETPAHPSTAIVGIDMGIARFATLSDGSYFAPLNSFKHQEKALVKAQRAMNRKQKFSNNWKKAKANVQLIHARIGNARRDYLHKATATISQNHAMVGIEDLQVRNMSRSASGTTGTPGKNVRAKSGLNKAILDQGWFEFRRQLDYKLAWNGGQLVAVPPRNTSRTCLCCGHVVKENRLSQSRFECVECGFEENADLVGAINVLRAGHARLACADTSPAVGASGQEPTEATQAIAA

SEQ ID NO: 42691 - protein, 437 aa, unknown
  TnpB Polypeptide
MLEVHRTHRARIRNHSQVAESLDRHGWSASKLWNVANYYSREVWEETGKIPDHEELKTELKEHDKYRGLHSQSSQRVLEELAEAFNSWYSSDDDRDNPPGYRKQNYYDNNGNRVHEEHPRSTVTWKQNGIRHDTKNNRVRLSKGANHKEHPRAREYILVEYETRPGVTVENLQQVRAVYDQAKERWELHLVCKDEIETPDPPGNETAGIDLGISNFAAIAYSTEDADLYPGNRLKQDGYYFPKEIAKCDDSSSDRVTRLHKKWSERRTHFFHALAKHIVERCVEKGVGRINVGDLEGVRKDENGDSKNWGTHGNLDLHGWAFDRFTNILEYKAKVEGIEVVEVSERDTSKTCCICGKEDDSQRVERGLYVCETCNAAFNADVNGAENIRLNITESNSESAPSLGEDRSTGWLAQPGVYLYDLSGGFQPQEQVVDSKP

SEQ ID NO: 42692 - protein, 173 aa, Alicyclobacillus sp.
LGLTDSVAQRRLAKKKKGSKNRDKERLKVARIQAKIADRRQDFLYKLSTRLINENQVIAVESLQVKNMIRNHHLAKSIADVGWGEFVRQLEYKAEWYGRTVVKIDKFYPASKRCFDCGHIMPKMPLSVRHCTCPECGENHDRDVNAAQNILAAGLAVLACGEAIRPAGKLTSQ

SEQ ID NO: 42693 - protein, 436 aa, Methanobacterium sp.
MKTIFRTYQFELMPNQEQKTLLDKYFGCIRFVYNHFLNERKEQYQADEKSDNYYAQAATLTELKRKDKTIWLKEVNSQSLQFALRCLDTAYVNFFRGNAKFPRFKSRKKKNTFTVPQFAKLEADKFYAPKFKEGIKVNVHREVKGEIGKCTLSKTPTGKYFVSILCEEQYQPKEKTGAVCGIDLGLKDFAITSDGIKFKNNKYTKQYERKLAKAQKHLSRKRKGSNSFEKQRRKTALIHEKITNSRMDNLHKVSHKLVTDYDIIALEDLNVKGMVKNHKLAKHISDASWGTFVRLLEYKADWNDKQIVKINRWYPSSKTCCECGWVNQDLNLSIREWTCKNGHILDRDLNAAKNILKEGLKIYRQELAITKVERKSDFGDKAYSMKPEAHPSPLVWVGSSLGQTRLMDLGYTYKCNSHALAPKMIMMMNGVEESGT

SEQ ID NO: 42694 - protein, 524 aa, unknown
  TnpB Polypeptide
MSEATKTLAYRYRLRLTPAQEDILDPSQEQLRLVWNHLVRSQRHAEREWIHGRAACVKNELLDLSLAKEARGTAVVSARKLAEERKVPLEEAMQIRRREYVEKVASIPTRKKDGSRCLVIARRKLAVAYADALVNSKYDNYFGLRKGIYQRLRDKFAKCSAMWLKGKFRRPRFKRKGEPVALQLQIFYGRFALKRFSDLSAFGGQALKKCEVIIHRPLPDSAVIKQIAIAGKRDARHLIVMFEAAASDVAKNFPATNRTAGVDPGIKIALTITPLDSPDFGASDHIEKQPQLARDERFLKRLRRVQRKLDRQRRKNNPDCFDKEGRWIKGKHDNVKSENMKRTQARMTRMQTHLAEARRDFYHNAACEILRSFDNVAIGKWRPAQTRRSKPSTPSPKGLGAARRAINRISYDHAISLFISYLKDKKERSTTPKEIQDVGEAFTTRDCPKCGKPTPKDLGEREWICPHCHTMFHRDAAAAWMIAKKFKAEVASTSQPVGVARHHKFSVGANVTGIKPPLPTKRFP

SEQ ID NO: 42695 - protein, 390 aa, Planktothrix sp.
MEKAHSYRFYPTPEQESLLRRTLGCVRLVYNKALHERTQAWYEKQERIGYSQTSSMLTNWKKQEDLDFLNQVSCVPLQQGLRHLQTAFTNFFAGRTQYPNFKKKHQGGSAEFTKSAFKFKNGQIYLAKSLEPLAIGWSRQIPKDCEPSTVTVRLHPSGRWHISIRFDDPTIKPLPVTDKAIGIDLGISRLVITSDGQKIANPQHFKKHYQRLRQAQKSLSRKQKGSKNREKARIKVARIHAKITDTRKDHLHKLTTQLVRENQTIVVENLAVKNMVKNPKLAQAIADVSWGEITRQLAYKCRWYGRNYIEIDRWFPSSKRCSSCGHIVEKMPLNIREWDCPNCGTHHDRDLNASKNILAAGLAVSVCGASVRPEQSKSVKATAKKQKPKL

SEQ ID NO: 42696 - protein, 418 aa, Planktothrix sp.
VLHKVVQVRLYPSKEQEIQLAQTFGCARWWWNYALNKSIETYKETGKGLGRAALNAFLPPLKKAEDTVWLADCYSQVLQATTLNLTTAYKNFFEKRAGFPKFKSKQGKQSIQYPQNVKIVDGNVKLPGNIGIIKANIHRPIEGKIKTVTVSRTPSGKYLASILTEVEGENPTVSEGKIYGIDLGIKHFAVVTDGEKVSKYDNPKHLAKHEKNLKRKQKKLARKQKGSKSRNKYRQVVAALYERVSNSRQDFLHKLSHKLVSDSQAVIVENLHVKGMVRNHNLAKAISDCGWGTFTNFLAYKLERKGGKLVEIDRWFPSSKLCSNCFYQVSEMPLDVREWTCPDCGTDHDRDENAASNIRAEGIRILALSAVEMLKTDGSAVSAVGGDVRPHLGRKPKLRHSPVSTEADTVLGTPSQCG

SEQ ID NO: 42697 - protein, 364 aa, unknown
  TnpB Polypeptide
MNKGIKFRIYPNREQQNLIDRTLGCARFIYNHGLAYRIEQYKLGNKANYTVTNAMLTEMKQQEGCAFLKEVDSIALQQSLRDLDRAYQNFFKRLGKYPCFKSKHNHHQSYRTLNQGDNIRIEDGRLKLPKLGFVKVKQSMEVGHINNVTVERTPTGKYFAVLNVDFEPIPLVPSDAVVGLDVGIKAFATDSNGNTIPNHKRLEKAQRKLRREQRKLSRKVKGSVNRNKQRKRVAAVHEKITNQRNDFLQKLSTILINENQVICVEDLKIKNMLKNHKLAKSISSASWGKFFTMLEYKAAWYGRTVQRVPTTYPSSQLCSSCGYKNPLVKNLAVRKWVCPSCGTSHDRDVNAAQNILNKGLAMIA

SEQ ID NO: 42698 - protein, 394 aa, unknown
  TnpB Polypeptide
VKEIKYTYKFRLKPTKEQEILLSKHFGSVRWSYNYFLNQRKEEYLNNKKSITYNKQSSYLTQLKKEEETNWLKEVNSQSLQYSLKCLDQAYQNFFNKRTKFPNFKSRKSKNSFTCPQFVKTNGNKIIIPKFQEGIKMIMERKIKGKIKKAIISRNPSGKYFVTILTEKIYKPVNKTNKSIGIDLGIKDFLVLSNGSKIKNHRFLKHHERQLKLHQQHLSRKTKGSSRYEKERIKVAKIHEKITNSRMDLIHKITLNLVKDFDKIYLEDLNVKGMMKNHKLAKAISDVSWGKFIDTLTYKAEWNDKEIIHIDRFFPSSKTCSSCGWINNTLTLKDREWICKCGEVHDRDINAAINILNEGCRKDISGGTSDYKRRAEIRPSLDGTGVEAFKEKEI

SEQ ID NO: 42699 - protein, 397 aa, Okeania sp.
MLKLIEKHIISKHHSNYQEIDKLCFLSKNLFNAVNYIARQEFIFNQKYLNSAQTYHLIKEYVDYKAIPSKVSCQIIRLVDRYWSWFFASIKDYSKKPHKYLGKPKLPRYKDKLKGRCVTIYPAQTISKRSLKKGLLEPSGTQISIQTKIQGKVNQIRLVPCNGYYVFEAVYEVESEKPINNNRVAAIDLGLSNLATVSSNVKEFEPFIINGKPLKSMNQFYKKKKGELQSKLQKQTEKPLNSNQIQKLTTKRNFKVETYLHQASRIIIHNLQENQIATLVIGNNQKWKLEINLGKRNNQNFVQIPHYKFIEQLKYKAELVGIKVIINEESYTSKASFLDLDNILNYSEGIKHKFSGKRIKRGLYKSKNGLLINADLNGSYNILRKAVPNAYTDGIEG

SEQ ID NO: 42700 - protein, 269 aa, Clostridium sp.
MVRLKEFGYIPVNSLVKSGTVSQKADRYYVSILVEERDIKTSNSNIGIKISNSNTGMKISNTNNEGLGIDLGIKEFAVCSDGIKFKNINKTSTVKKVEKKLKREQRKLSRKYESLKIRNKNIEEGRATCQNIQKQVVKVQKLHQRLDNIRTDYINKTVFSIIKQKPSYITIEYLNIKGMMKNKHLSKAIASQKFFEFKTKLTFKCKENHIELRIVDRFYPSSKTCSNCGKVKKDLKLSDRIYKCDCGLTIDRDLNASINLKNAKEYKIA

SEQ ID NO: 42701 - protein, 298 aa, Actinopolyspora sp.
VINEGRWSVVQLRYRYRLYPDESQRQAMAQAFGNARVVYNDAVRARQDAHAAGEKFPSGTVLQKWLITDAKHTDERGQDVELGLDLGLSAFAVDQHGRVINNPRFLRRAERKLKWAQRAVSRTQRGSNNRTKARRRLARQHAKVSDTRQDWLHKATTRLVRENQTIAVEDLAVSGLARTWLAKSVHDAGWGQFRRLLGEKCARYGRELVVIDRWWPTSQTCSDCGRIDGPESLGVRTWSCPCGAVHDRDINAARNILAAGRAERLNACGGDVRPHTGAVAAEAGSSGTPQGDAAPHPA

SEQ ID NO: 42702 - protein, 398 aa, Kibdelosporangium sp.
MIVSVKQVVQVRLLPTPEQASALSVTLNACNAAASWLSKQMHAVGIFRKFDVQKRFYVELRERFGLAAQPAIRVIGKTVDAYTTLHAKLTAGSYGPPGSNRRHKVESTSIEFRPQAAQPFDARCLSWQLGDVGRDGMVSIWTTAGRLRNVRIMGSSDRLVLLRSHPIGESDLIHRDGIWLLHAVVDKPETPQQEPVNGFLGVDLGIVNVATTSNGDRMSGARLNRYRKRQQRIRRRLQAKKTSSARRLLKKRRRKEQRFATDANHRVSKRIVAEAERTGRGIAIENLVGIRARVRLRKPQRATLHSWAFAQLGQHITYKAQLAGVACVQVDPAYTSQQCHPCGWIDKKNRRSQASFICGRCGFVGHADHNAARNIAARGVACWGEVMRPHAAPTLAAS

SEQ ID NO: 42703 - protein, 427 aa, Kibdelosporangium sp.
MRCDVTSIASGNGPERRERRDRVRHAYKFLLRPTSKQARALGEMLRDHCSLYNGALQERRDAWRHVSKTSIRYGDQSAQLKEIRAFDPDCQGRWSFSSQQATLRRLDKAMQAFFRRVKAGQKPGYPRFRGVRWFDTVEFPKDGDGCRWNSTPHDPVARVRLLGVGHVRVHQHRPVRGRVKTIQVKREATRWYVVLSCDNVPAQALPATGAVTGIDVGVAHFLTTNDGTHEPNPRHGKRTADALADAQRALTTFPKTRRDQRSAKHRRAVAKVATLHRKVRRQRVDHAHKTALNLVRTNDRIAHEKLNIAGMVRAPKPRPDPAQPGGFLPNGAAAKAGLNRSILDAGWGCFLGILAHKAESAGRVVIPVDARNSSRTCPRRDCGHVSEDNRPTQETFRCVQCGYTANADRVGALNVAIRAGLVLPDVA

SEQ ID NO: 42704 - protein, 372 aa, unknown
  TnpB Polypeptide
MAERIIRKTFKFRLFVTKAQDKLLTAQLSEACRLYNACLQERRDAWRINRESVNYYTQANQLKEIRAAGDLTLANYCACQDVLRRVEKTFKAFFARVKRKTKAGFPRFKSHTRFDSITFPSYGNGCKLINSKLRLQGVGLIKVKLHRAVEGTIKTVTVKREAGRWFACFSVECKAVPLPANSESVGVDVGLSNFATLSDGTEIPNPRYYRKAQARLRRAQRKVARRKKGSHRRRKAVQLLQRAHAHVRNQRSDFHHKISRWLVNEYGLIAVEGLNVKGLASGMLAKSVNDAGWSSFINKLTYKAEDAGRVLIKVDPRGTSQTCTCGNHTPKTLSQRWHECSMCGLSQSRDHVSAQLILGRGLRLQNATCSTS

SEQ ID NO: 42705 - protein, 493 aa, unknown
  TnpB Polypeptide
MSQVVKITKVSVKGATPYLGDVNGDSSQPIFSKSPNQVMEWLCSAWRKRFNDHRSQRKKYGKGKVLVPLGDGVVEMTDKQAREAQSFLRAVPSLVLQSPAQIEAKEWFGAVKRRKTLKESGRNPGKMPKFKSFKKHDHSFVCWFNGGRNARFEKVGRRSGIVFISGMNPKGKKLPGEKGQRFVIRIHVRLSQEIRPYTSVRVNWTTKQLVFVNEPPSIAPRDKRGHGAVTGVDRGAVVLSADTQGNLDRLPWDTITKLDNKVRRLQRSQERSAKDQGYKSAHAVKKAGKQTRASIRREKEIAETRAKISRVVQDVQHKVSRRLVEEHDIIAIEKLNLAGMSKKAKAKVDPNNPGEFLPNGQSAKRALNRKLRLSALSQFGEFLHYKARLSGGQIVEVNPRNTSRRCSSCGHVAQENRESQATFLCKACGFSDNADHNAAINILDRALRDHEEEINEFWGGKHPSVRAYKSGPCGSTAGQHSATTRKPVRPSVS

SEQ ID NO: 42706 - protein, 354 aa, unknown
  TnpB Polypeptide
LAREIENYEKGEKFLSDAELRKEFTKLRHSDEYAWLLSISNNVTKQAIKDACTAYKNFFKGLQKFPRFKSKKRSMPKFYQDNVKIRFSNTHVKFEGFSSSRKANKQKMNWVRLAEHGRIPTDAKYMNPRISFDGLNWWISVCVEFPDCRETLNDDGVGIDLGIKDLAICSDGTKYKNINKSQKVKKLEKQKRRLQRSISRSYEKNKKGESYCKTNNVIKKEKLLLKRNHRLTNIRKNYLNQTISEIVNRKPRFICIEDLNVSGMMKNRHLSKAVQVQGFFWFRKQLEYRCSDKGIQLIVADRFYPSSKLCSCCGNIKKDLKLSDRVYRCACGNMIDRDFQASINLKTYGEKFAG

SEQ ID NO: 42707 - protein, 230 aa, Ruminococcus sp.
  misc_feature (3)..(6): Xaa can be any naturally occurring amino acid
LAXXXXTFDGINWWISVGIEAPENTNKPLSNGIGIDIGIKTLAVCSDKAEYKNINKTAKVRKLKKKKRRLQRRISKKYSKNKKGVCYCKTRNIIKSEKQLLKTTHGLTNIRHDHIHKATSEIVNRQPKFIVMEDLNVKGMMKNKHLARAVQEQCFYEFYRQIQYKCQWNNIEFVTADRYYPSSKKCICCGSIKKNLKLSDRVYHCDNCENTVDRDYQASVNLMRYYRLTA

SEQ ID NO: 42708 - protein, 398 aa, unknown
  TnpB Polypeptide
MKSIAAIKLKIPYKKELLETMKQYSQSAQYALDIGWDNGIYFKKEIHHLTYYPIRETLGLPAQLVCSSRDKACESLKALRKTKKPTKPRFKEFLTIRYDARSFTFKKNFVTLASVNGRTKINVEIPEYYKQYLSWKPRSADLVFDRKKRLFLHITFFRDIDTPINSDGFLGVDVGINHIAITNNRQFFSGNKIKSYRLKYKRLKAKLQAKGTQSAKRLLRKISGKERRFKAWVNHKISRQIVDNCKAGTIALEDIKGIRSNKGRKFNFWLHGWSFYQLQNFIEYKAVRKGIRVIKVSPYNTSQTCSKCSSIGSRSKGFFICSHCGYSLNADLNASYNLAKQHSNADVVLEKAKLFRDTGNQRFPRVSAAVTQPHIQANELEGSLRTIESEVMDKSQLL

SEQ ID NO: 42709 - protein, 406 aa, unknown
  TnpB Polypeptide
VQTPCLKYRLLPTKEQTRKLENTLETCRLVYNSLVNDRVFQYETAKVSVGRYQQQKMFPQWSKDFPEVKAVHSQVLQNVAVRVDLAFRAFFRRVKAGETPGFPRLKGEGQYDSITYPQSGFKIGDSTVSLSMFGKPVQIKAKLHRPIVGTVKTCTVRRYGSKWFACFSVEQEDDFLPPCTDAIGLDAGLNSFMALSNGEFIDNPRFFRKDEKALAKAGRKQAKTKKQSRERRKANKVLSRLHERIRNRRHDFVHQTARRLVNHFGVIAVEKLNVKGMVKRNPKNHCLAKSISDAAWSMFRTVLTQKAESAGRDAKGAALREVIAVNPAYTSQDCSGCGYCPDGLEGRTKKKLSDRWHNCPMCTASLDRDTNAAINILQLALRGTSHAGITACQVIPVEAPPFMAGE

SEQ ID NO: 42710 - protein, 315 aa, unknown
  TnpB Polypeptide
MDVRVFEVRPPRGPARPRPGIQELLRGASEIPQVPLAPPGHRVVPSHRINPCERTAHNPAPNRAGSSEGDGISTHYCPHSLRHEERPVPTPIDGEPVGVDLGIHVLATVSDGTVVENPQSLRGRARKLKHLQKEVSRKQKESRNREKAKRRLSRCHAKVADIRKDALHKATTMLARTKLAIVVETLRLKNMVKNHPLARAISEASFGEFIRQLEYKCQWYGSRLVKADPFYPSTKRCSGCGHVKEDVSLSERTYSCDHCGMVLDRDLNASRNLAMLAVSSTERVNACGETRFMPGLAGAAQGSRNPASLVPVTNV

SEQ ID NO: 42711 - protein, 408 aa, unknown
  TnpB Polypeptide
MALIWRNYNFRIYPSKEQAKLLEQVFSRTRFVYNHYVDIGRRLYDAENRYPTYQENMDTLAALVSQFPFLQETDPESLPLALHNLARAYKNHATKAEYQPPRFKTKNSGRQSYMTKYKVGSKLIANGKINLPVVGAVKIVTHRPIARYFMPLYITVIRKPSWKYEVSIALYAPDYLFKKDMPSNPLHDELKSCVEDSKSNVKKDPNEYANGEVRSIGLDFSLPELLIDSEGHSASYPHFYKQQLKRLSREQRKLAYCVRGSHNYQKQRIRVARMMQRCADQRLDFQHKLSRELSDQYDLVCIEDLAIKRLITDTKFGKSAYDDSWYQFVQMLAYKLTESNKHLQKVSRWYPSSRTCSQCGRVKKHLDLDERIYCCPCGYTASRDVNAAINMKREGERLYRQNAALLPS

SEQ ID NO: 42712 - protein, 397 aa, unknown
  TnpB Polypeptide
VTSKTIHKTYKFRLKPGDDQREQFARISGVCRLIWNVCLEQREMVYSSKRKTLNSYNQLPEVTLLRHEYDWIRDVPSQVLQQKVRDLDIAYKNFFEGQADFPERKKKGKSPDSFRFPQGFQIDNRRIFLPKVGWVGFFKSQSIEGTIRHITISRNGKHWFASICCEVTIADVPPKKTAVGIDMGIAKLCAMSDGQTTENPTYFKQYKRKLAKLQRKLSSKKKFSENFQKLKARITALHTKIADARRDHIHKTTTIIAKNHGMVVLEDLRVKAMSKSAKGTIDNPGKNVCRKSGLNRSILDAGWGEFRRQLEYKIAWANGIVLAIDPKNTSRRCSVCGHTAKENRMTQADFICVRCGHADDADVNAAINILRAGHARLACGEIGAVRPLSEAGTLKAA

SEQ ID NO: 42713 - protein, 560 aa, unknown
  TnpB Polypeptide
MTGMAGCKPRPSGRGKPGGCVDRPPLFDVLPDDAQRRAVAGRGEVGRRPEMPVHDVPVHAAGELRSQPSRRHALEAVHQRGYGRLRRVSGQQVHVIIFPVEFSQRGAEVVADLPYCILAAAEHVRAGHAPPVLRHEDQVNMECGNYMPVTAVVVVKCHRPMACSGVVQVRYRYRIYPAPGQRQALARVFGCARVVYNDCLGLRDETYADGEKISDTEVQRRVITLAKLTPERAWLCEVASVALVQACQDARRAYKNWFDSLKGCRKGPKIRHPKPRRKHGRQSIRLTRNGFALHGERLYVAKVGDIKVEWSRPLPSVPSSVTVIREPDGRYYASFVVERETTPLPACDRAVGVDLGLASLAVTSDGAVIVNPRFLRKAQKRLRTAQRVLSRREKGSANRAKARHRVAVLHRKVRETRLDHAHKTALRLVRDNQAVYAEDLAVNGLMRTKLAKSVADASWSKLMRCVEEKAAQYGRTFARIGRFEPTSQACSACGVKDGPKPLSVRVWACAACGTVHDRDVNAAKNILAAGRADNPNACGAGVRPQLAAVGAEAGTHRSVA

SEQ ID NO: 42714 - protein, 454 aa, Crocosphaera sp.
MFVLEYKVYPKQYQIDAINEAIKTTQFVRNKVLRFWMDNRSVGKTEMFRYNTRLRKEYNFVTELNSHACQTAVERTLRAITRFYDNCKNKVKGKKGYPKFKHNSRSVEYKVSGWRLEETKKHITFTDKKGIGMLKLVGSRDINYFQPEQIKRVRILKRADGFYVQFCIKLDPRDTIKPIEPSGKAVGLDVGLKYFLADSQGNIEPNPRFYRKAEKRLNKLNRRKSKKFKKGKKQSNNYHKARQRYACANLKVSRKREEFVKRVALRLVKSNDLLFCEDLSVKNMVRNAPPLSTADPAGFEIQQERGSAFHALNSIQGGSAVKNRRLSKSISDAGWFLFRRWLEYFADKYGKIAKAIPPHGTSQICSNCGQKVEKTLSTRTHVCPHCNYVEDRDINAGKNILQKGLSRLGRSQTYASGEIPSWLVGEILLANGNSSNEESPRRDSRGERQNQKKS

SEQ ID NO: 42715 - protein, 411 aa, unknown
  TnpB Polypeptide
MNNNNKIMKINLSYKTELDLNNKQKSQINQATGGARFAYNWGLGRRIKLYEEEKKSTNAIDQHRELTKLKKTDYDWMYLSSKCVFQEALRDLDKGFENFFRNVKQGKPPGFPKFKSKHNSKQSFRLNGSIHVFNDKIQLPRLGKLNLKEKGYIPTDEKILSATVSKHANRYFVSVNIEKEVELPPNISKETVGIDLGIKDLAITSAGIHFENPKTYKKFLKKLKRMQRRLSRKTRGSNNRRKQKEKVAKLHYKISNIRKDNIHKMTSSVVKAKPQTIVIEDLSARNMMKNHKLAQSIADSSFGEIRRQFEYKCKWNNINLVIANRWFPSSKLCSGCGFKKEELKLSDRIYKCNICGLKIDRDFNAALNLKEYTASSAGINASGEDKAHDSNIRWSSLNEEFNSKTSELIIC

SEQ ID NO: 42716 - protein, 403 aa, unknown
  TnpB Polypeptide
VQLRYNFRLYPTPGQRVALAKAFGCARVVYNDGLRIRQEAHEQGLPYISDGELSKRIITEAKKTPERAWLGEVSAVVLQQALADLNTAYRNFFASITGKRKGPKMAPPRFRSRKDNRQAIRFTRNARFAITAGGRLRLPKVGDVKVKWSRELPSQPSSVTVVKDAAGRYFASFVVEVGDEPLPETAAEVGIDLGLTHFAVLSDGRKIDNPRFLRRAERRLRKAQKALSRKAKGSNNRKKAVARVARAHARVADARRDFAHKLSTQIIRENQAVVVEDLCVKGLARTRLAKSVHDAGWSAFVNMLAYKAARYGRTLVKIDRWFPSSKLCSTCGALAESMLLNVRTWTCACGAVHDRDINAARNILAAGRAERLNACGGDVRPPFGVADAGEAGSRRGAARCGTG

SEQ ID NO: 42717 - protein, 373 aa, unknown
  TnpB Polypeptide
MYGCQQNLITGSECLPFLEYLCTTANKLINCGIYLARQWYFKCGYITRKYELEKQLKQNQNFKFLFAQAAQQTLRGVAESFKSFKELSKKYKKGELKNRPRLPNYRKKGGMGVITYPRQALKLKEGKVRIPLGLKVKAAFKVDAFFLPFPTNLNFKKIREIRILPRNGCFYVEWVYKLETQQIEVDKEKVLGIDHGLDNWLTCVSNTGKSFIVDGKHLKSINQWYNKQIATIKKNKPQSFWSKRLSRITEKRNRQMRDAVNKAARIVVNHCLENSIARIVFGWNKGQKDGIDIGAKNNQKFVQVPTGKLKERIKQLCEQYGIEFVETASFLDDDFLPTFGAKPSPPVSPPLGGTEGGEESELNSDYIALPMAV

SEQ ID NO: 42718 - protein, 424 aa, unknown
  TnpB Polypeptide
MKVPRTESIWLGPDKVLGHLCHLSKNLFNEANYIVRQEKFAVGRWIRYHELCNTLKTSANYKGLPAQTAQQTLRTVDACWYAYYMAMEDYQINPEKYLAMPRFPRYKKKDGEFILVFSNQQVRLRNRLFKLPKAVGLEVRTRLPKGTKVTGARIIPKGVGYNLEITYDKEVKEKRVQKKEMHIEGEIMNDPKEQAKPCRALGIDPGLNNLLTTVNNIGVPPIAFKGGPVKSINQFYNKRRAEFQRQYARQGIITGPKMQKLSLKRNRKINCFFHLVSRLLIWYCLMWKIDTIVLGRNKLWKQKIDLGKRTNQNFVDIPFYKLYQMIKYKAEEAGIRVIEIDEAYTSKCSFLDWESIEEHEVYMGKRIKRGLFRSAKGILINADVNGGYNSMRKAIPESMERLKEKVMADGIEAVGIHPVRAVLD

SEQ ID NO: 42719 - protein, 515 aa, unknown
  TnpB Polypeptide
MKDRLESLMASEEYKSLQKTYGEVSQELGKVKANSPDYKHLKSERKKIGDLMDKAQLMNGISQDATREVMKQYAPDLKLNSQIARKRADDVWMGVRNVLYGNGKTIHFKPRGDLPAITAVEATSAIPIHVGKDGHLEFSMNGVGDFGIIIPEMDYFLQDEEQAIVNFLRNPALEDECVLQYKADKTVIPVFRPCYAAIICKEIRHRLRVYVQICVADEPCRKLDRWGRTRHISGKGRVGVDLGPQSFASVSNSEVSLSNLAERNGKCTKCHEERKAFLKKAMDRSRRGTNPERFNKNGTYKKGTKGKWKESNHYRNLRYELRELERKDAESRLYSIRTDANKLREEADVCIIEEPNASRLAKRSLKTERQETETEIVSKDGTVKKVKKYKRKKRFGKSIHHRCPGEFQAELANKFRDGYHVVPKMYRASQYDHILDDYIKKKLSERWHTLPDGKRIQRDIYSAFLLYCADENFKAIDRQKCIDKFDEFWIKHNKLIETIIKNGLSICNSGISFKS

SEQ ID NO: 42720 - protein, 413 aa, Meiothermus sp.
MPRAETVVLKLRPPGRAKRAWLDRTAELFRQGTQLGLDAALGMATSSRAKIHTATYASIRALGLPSDYCRMAVNQAVQLARSHFGLRKSKQQAGKPTAVRSQGIGLGTNAYKVVGTALRLSTGVQGVYIWLPLCVPQHWRDRLQYVRGDARLFRRGDEWFVMLPLKMPNTPTVRDGNGETVIGVDLGIVRLATAKHPNGVFIANGKAIRHTREGYASLRRRYQRHRRLDRVRAMKGKERRWMTDLNHKVSRGLVDLAARYPNPVLAFEKLDGIRDRIRGSKRFNRMVASWAFRQLADFVLYKAERAGVRVIFVDPRKTSRTCPKCGHATRANRTTQADFRCVACGYQGNADVVASLNIAGVAAGLLRQGPPDTARPSAAPRCGAGQAAPAGERLDGVKVWASVHADSNLESSV

SEQ ID NO: 42721 - protein, 712 aa, unknown
  TnpB Polypeptide
MSSPASLRSNLGWIGARSKSGPKPVPSAPCSPEASDASDSTTSAVSVIGTPQLSPHPRRRWGQLPSQRVAPATSTPSTPSTRASPPASSSTTSERSSATCSVATPTRTSSPTSAVGSTLSARASYRYWNWRLKVAYDLCTLPTKTGSAGLHSISSSTFSAGTVRKSSWTHTTVTPPPPPPSSSSPRTSLPSSPFLALASTASAALATGASASATPPPPPQPAAPPRKRARKTAKGQAPPTEPPTEPAPTEPKRKATPGQRQRALDGQLRTFRVRMVLTATQRRTLKDCFAGARWAYNEVVGAVRQGARPNFIDLRNALVKVQGDGDNGRPPCARGVHNKILARAVKQACDAHASNFAKMRKQGLSYKFSVRFRSLAKSSTEVLVLERGKEGPVKGFEAMAAPASAKRRDAARTECLLHLGGKSFKDMGGVRLQDHDEVIARMVSEGKVLQEDAKIKWDKRTDSFYFVYTYVLPVAADPDPEFKAKRVLSGDLGVAPFLEWYQPDGSHGACLDGINAELEARCAKLDALHSRVQRRKTAHHARRTEAHKARPRAKRRATARRLHQKLARERVRLHNWVEGAHYDAANFLLERADVLVIPKIASKRMSERATRGIRSRTVRTMLTLSPGEFCARLASKAAAYAGRHVFTHTGEPGTSKTTSCCGWWNWNLKVQDKVCACPRCDVTIDRQVNGARGNLLAALGMALGIGWDGASG

SEQ ID NO: 42722 - protein, 428 aa, Halorubraceae sp.
VTELTETLELKLVEPNAHKHRKLCETKQAYQDALEAAFNANCTTQSAANDVVVNYDLSGYAKNALKKYVPQLCGGSYDAKELHDDHPVRFTNEGPKLDHKPQNAIEWYVKIPHHDDYHLWLPAQPNPEQREWLEALYAGDATMGECRLFDRDGEWYFHIVATRDVGERPSSADETPIGVDIGEASLLTVCHRDERGSPATPNLWNDEGKQVRQLRETHFTATRRLQKRGSERIAESYGDSLWRQIDDILHTVTSEVVAYADQFENPVLVLEDLTHIRENMDYGAFMNRRLHGWGFAKMHAQLRYKAAEKGIRVETVNPAYTSKTCHCCGEQGYRPKQATFKCSNSECWVSEYHADINAALNIADRYLENQRFSTSTRISDSLDLSGESYSREDTSGDDSAEEGGRLTVPQDSQADADTQQETLGTYAS

SEQ ID NO: 42723 - protein, 395 aa, Halorubraceae sp.
MKRANTFDVIPQSDEDEELLRRLLDASAALWNEINYERRQNYTDPTGDVWDISEYRGRYGGILGSSTVQQIDRKNRESWKSFFALQKKGEANGNPGFWGNSEDGRELRTYIRNTSYSVEWGEYSRLEILVGKDLKDQYGLGHRERFRLEVRGEPHWKEYDKQGRLKLYYDEQAQTFRAFQPVTIIEDHSRLAHPLASEEAALDIGANNLVACTTTTGQQLLYEGRDLFKRFHETTREIARLQSLLEDSRYSSHRIRQLYDRRTKRRDHAQDALARDLIERLYDEGVSTVYVGDLTDVLETHWSVRTNEKTHNFWAFRAFVKRLMYTAEEYGMSVEIRSEAWTSQTCPNCGSTTDTVRHQDTLTCSCGFDGHADLVASESFLRRYTTVTRSMGIAR

SEQ ID NO: 42724 - protein, 427 aa, Halorubraceae sp.
MMKRSNTFEVVPQSDKDRELLLRLLDASAALWNEINYERRENYANPDADVWDISEYRGRYGGVIGASTVQQIERKNSESWNSFFSLKKKGESNGKPGYWGNEREGRELRTYIVNQAYSVEWGEYSRLEILVGQDLKDEYGLGCRERLRLEVRGEPNWKEYDKQGRLELFYDEQAQTFRAFQPVTISEDHSRLAQPLASKEAALDIGANNLVACTTTTGKQYLYEGRNLFKRFRETTKEIARLQSLLEEKRYSSHRIRRLYDRRTKRRDHAQDALARDLIERLYDEGVSTVYVGDLTDVLKTHWSVETNAKTHNFWAFRAFVKRLSYTAEEYGIGVEIRSEAWTSQTCPNCKSTTDTVRYQDTITCSCGFEGHADLVASESFLRRQTTVTRSMARPVCLKWDDHSWSESSCSVPNEEHTNPQVASVGR

SEQ ID NO: 42725 - protein, 413 aa, Halorubraceae sp.
MEHSYRYRAYPSDEVAAAAEHHIDVHRQLYNHVKWDYTNSPDDDKPKEYTQNNKLPEWKRQWPVFAELYSKAAQATVARFHRNLSNLRKKKENGYKVGWLKRQAPSDYRSVTYNQSGFDLDNKRGRDGVAYVRFSKIGWMKIRYHRPLCKNATIKEVTLKKEVTGEWFVSFSLETDDEHVRTKPELDSLDASNSVGIDLGILNYIHTSDGKTVDWLVLEDEYERLRREQRNLSRKEHGSNNYEKKRQKVAKAKRKIRRNVLDYQHKLTTWLVKEYDAVFVEDLNVSGMLQGTGSARNKQDAAWRQFITLLEYKGDLYGTHVVQVPARGTTKECACCGVETAKPIWVREHSCPGCGFETDRDANASMNVLKRGFSILGLGWPESTPVETVTATDTADFQRVSASHVIETGSPEA

SEQ ID NO: 42726 - protein, 574 aa, Halorubraceae sp.
LDTLTTRVANTLIERYWTPEHLTGIDEYSYQAWKYLDEDEAFADVDLYLPSRYKRCVMQKVGETLRSHADKRESFQAVQSVLSNRKIRSIDTRRIKEQLWDSKEYIKSGYVDLLIGQLNSYYDRHGRFPESYFEMQECPTYSKGVLPYSADDGPTSGQAVKYEYDEDTQVLTVKLKTPDTLKPESRGDWTWTEHTLEGYEAFHELLEHGTLSAPSFHPTQTKTGDDYYELSFPVEVEHAAKPADVETVLAIDGGLRKDATAVIVNEDGEQLSVPYFIQNTERERMRNLARERNQLNSKLAYLRREGRDHTGSFKHVQSEYERVNNKIRHKREQLVHDVANQVLALALVYDVDAIVHEDLRSLSPPRGEGQLSWELSSWPRREIISKIEYRADVVGLHVERVYAGNTSRSCPRCGSTGHTIKSPDHFHEVWWGGHFRCDNARCGYQADRDYVGAVNVACVFFSETATLEHDFTSSYTGDSEIVPASRSAGESFSERRSSSELASDGGPRLVFGEAPLAFTEQSEQDVTAGGGSCFIAPAVTSTETKNNSSNPCASSPAMLGTTRFRRVTPNRYRK

SEQ ID NO: 42727 - protein, 439 aa, Halorubraceae sp.
LYAPNISVVEQTFKYRVYPTEDVASEARRHINICREVYNHALGRYDSAPDGEKPTYTRLQNKLPAWKRKWNSWKTVNSKCLQMAVRRIFSSLSVLKSLKSKRYKVGELKWKSPREFRSIVFNQSGFDVDSNTGRTEHATLELSKLGTMDVDYHRPIPEDGTIKEVRLKEEKSGKWYASVVVDHNPEYPDKPAVKNIQLEDTVGIDLGILKFTHDSDGTAVTPLDESEDRERIEKRHRALSRKEHDSANWENARVKLAEAYETLSNKRKDCIEKLAGSYTTQYDAVFLEKLNVREMLKQDSNGRNIASMSWSAAIKTFKRHGDKNGCHVVTVPPEGTTKRCARCDGESNKALWVREHSCPGCGFETDRDENASYNVLKLGLDKLGIEYDVDAIVGLGEAESTPAETALPTGADVNDNSSFRVVPAKRVVETGSHGSGDPW

SEQ ID NO: 42728 - protein, 379 aa, Acidihalobacter sp.
MNVKRAYRFRFYPTPAQAQVLAQTFGCTRFAYNHMLRLRSDAWLQRQERVGYHETSAALTALKKTPEHAWLNDVSSVPVQQALRHLNTAFTHFFAKRARYPAFKRKHGPQSAEYTTSAFRWTPALRELRLAKMSEPLNIRWSRTIPKAAKLTTVTVSLDAAGRYFASLLCDDAVASNPVVSGQIGIDLGLTHFAVLSTGEKVTSPKAFRQNESRLGRLQRRLAKKKLGSKNRAKAKSKVARVHAHITDSRRDFLHKLSTRLVSENQVIAIETLSVNDLQRNHPLAKSISDAGWSEFVRQLEYKAQWYGRTLIGIDRWYPSSKRCSVCGHTQGSMPLSVRTWTCPECDTQHDRDINAARNVLAAGLAASAHGEAVSPVLQ

SEQ ID NO: 42729 - protein, 371 aa, Acidihalobacter sp.
MTTQPTTTLKTLSVRVKDKHAKVLSRMAFEVNQVWNLANELSYEAWHIPVPEVGWVQGTWQLSAFDIQKALAGINKAHGWMIGSATIQEVIAVHGKSRHQFKSSKLRWRVSNGSKRNLGWIPFKARAARFEGGKVRFAGQSFGVWDSYGLDNYKFRAGSFAQDARGRWYFNICVEAPVENRLPTGATAIGINLGLKDVAICSDGERLEAKRLYRSLEAKLGIAQRAGKTDRVRAIHARIRNRRKDALHQFSSHLVKANAAIFVGNVSSSRLAKTRMAKSVLDAGWSMLRTQLQYKAIAHGVVFEEVNEAYTTQACSCCGSIGQSSPKGRAGLGIREWTCEDCGAVRDRDINAARNILALGHQRLAGGIPRL

SEQ ID NO: 42730 - protein, 483 aa, Acidihalobacter sp.
MQIGNRFRCYPTPVQKRTLLRWIGCQRHIYNSKVREDQYFRCFARKSLQHTGQPIPIDQRYSQFKTELTPYLSEVPSVLLRNGAVLCKQAYGRYFSKLGGRPTLHKKHGKQAAWLTSEVFKFIPVMDADTGEVTGHQLHMGTQKFPVGILAFKAHKEFKLPASLHISIHAGRWHVSFNYDDGLPEPTDKDTTDWLIRFDEPELRKMTVGLDRGVKLPLAGSDSQEFDFSKVQKKRLLAQERHKKRWQRRQARRVKGSAGWVKAKRKVARYQRYGADVRRDVAHKTSHTLATDPRYKLFVFEALKVKNMTAKAKPKQDAQGRWIKNGAAAKSGLNKSILASTWGQTKTYLQYKARRQGKLVIEVPPFYSSQECAACGHIHQDNRVSQSEFVCLSCGNTDHADHNAAKVIALRGVRQLLSGKCVRKDKKRCRITRNKVGAEGSRTDCEESQSTLGETVVSCGGGNTPALWSLTQEETPTTTRLRA

SEQ ID NO: 42731 - protein, 481 aa, Acidihalobacter sp.
MQIGNRFRCYPTKAQEKILLQWIGCQRHIYNAKVREDQYFRRFACKSLQHVGQCVPMDQQYAQFKTELTPWLSDVPSVVLRNGAVLWKQAYGRYFSKLGGRPVIHRRHGKQSVWITSELFEFVPMVDAETGEITGHQLHLGTQKFPVGIIAFKAHKEYRLPASLHLSIHAGRWHVSFNYDDGMPEPTDRETTDYLTQFDESELRAMTVGLDRGVALPLAGSDLQKFDFSDIQKQRLAAQERHKKRWQRRQARRTKGSAGWFQAKRKVARYQRYGGDVRRDVAHKTSCTLANDPRYKLFAFEALKVTNMTRRAKPKQDERGRWIKNGASAKSGLNKSILASTWGQTKIYLQYKARRQGKLVIEVPPFYSSQECAACGHVHPDNRISQSEFVCQRCGNTDHADHNAANVIALRGVRQLLSGKCVRKEKKRCAIKRNKVGAEGSEPVAGTQSTPGKTVVSRMGGNTRVLWSLTQETPATNPSGI

SEQ ID NO: 42732 - protein, 465 aa, Acidihalobacter sp.
MLSVRFEAGRQLYNAVLGEALRRLDLMKQSRVWQAARKMTKGKPGSPEQKARATEFSLITKAIGFTDYDLQAYATQCKNACWIGEHLDAHATRKIGTRAFKAAQRYQFRTGGRPRFKPKWKSLASMEGKSNATGLRWRNDHLEWNGLKLKAIYDCKDTHGVQAFALQNSVKYCRLVRRILNGKTRWFVQLILAGVPKWKDKKTVRPGKSAIDIGPSTIAAVSDTDAFLTQFCANVPNLQKAIRRIQRAMDRSKRGSNPDNYNKDGTIKKSANGRRLQWVFTNGYLRLRAQRRELHRLLAAYRRSEHGRLANHVIALGDTVMAEKLSYKAFQRMFGKSVRDRAPGEFMEHLRRKAASAGGEIIEFPTRTTKLSQSCQCGTVVKKPLSKRWHDCACGVRAQRDLYSAYLALHVLEDGGVWKLDTESARKGWCAVESLLGKAVSGAVQAAKGGPLPASFGIRARDRRC

SEQ ID NO: 42733 - protein, 400 aa, Acidihalobacter sp.
MILAHKIALDPNNAQATYFARAAGTARFAYNWALAEWQRQYAAWKADNSLSRPSQAALRRQLNAIKREQFPWMLEVTKNAPQMAIIQLGQAFQNFFAGRARYPQFRRKGVHDRFTLTNDQFAIDDCRIRIPYIGWVRMREPLRFAGKILSATISRLADRWFVSIAVDVPDASHLPKAENQGAVGVDLGVSALATLSTGETINGPKPHRALLARLQRLSRSLSRKQKGSANRHKAKAKLARLHARIANIRNDALHKLTSDLTRRFHTIGIEDLNVRGMIKNRRLSRSIADMGFFEFRRQLEYKAAMRGGVVVVADRFFPSSKMCSTPVCKYTLDDLALSVRQWTCPECGTVHDRDVNAAINLKNLAVSSTASACGEAGTGSGRKTGVKPASTKQEVSFVPV

SEQ ID NO: 42734 - protein, 412 aa, Acidihalobacter sp.
LNRRQAFKYALMPTGEQQRQMRRFSGACRFVFNEALELQKRRYASGESGLGYAGLCKALTGWRNGASLPSGRGAPWLADAPVHPLQQSLKDLGRAYANFFAKRADFPRFKKKGQHDSFRYPDPKQLKLDQGNSRLFLPKLGWLRYRNSRDVLGTVKNITVSQSCGQWFVSIQTEREVAQPIPQGDAIGIDMGITRFATLSDSSFYAPLNSFKHHQAGLRKAQQALSRKTKFSNHWKRARARVQRIHARIGNVRRDYLHKATTTISQNHALVFVEDLRVRNLSKSASGTTENPGKNVRAKSGLNKAILDQGWFEFRRQLDYKLAWQGGWLVAVPPQNTSRTCPCCGHVSADNRQTQAQFRCVECGFEENADVVGAINVLRAGHARFACEVSGATMPPAAGTHRSDSGVAQCRA

SEQ ID NO: 42735 - protein, 465 aa, unknown
  TnpB Polypeptide
MTTVTRTIQADVPDALRSICKAMGFVRADIWRRFGAFGTVGKSANDVRKEISAASLYSALPVDGTIRNETTKDIVNDVLLYKAAAMQKVRKAIAARTEDEAERKRLFMLLRKDQWLTDNFLHRQMRKHFRHGKSSVANQFVVRSDKYTTEVADGHLTIVVHVARKYGAPIRLTTTSSGKNVNLLGSNLRVVVKKGSTEIHYATTKEAGRSCGSQMTGIDKGYTEAFTDSDGVAHGKAFGAVLTDYSDKASVTGKARNKLYALEKKHREAGRVAKSDHIRLCNLGRIKIDNRKERTHKRLRTIAYQSAHTIVDKAAVVVSEDLTAPIAKKQAWKRYNRRMSAWAKGVLAEALDSVCTQRQADHRLVNAAYTSQMDSVTGLLEGKRVADKFYRANGDVLQADHNAALNVLRRYEDTEITRFTPYQEVRRILLARSPAQLSVNGHELQVMSTYQPCADKSSVQICTGL

SEQ ID NO: 42736 - protein, 414 aa, unknown
  TnpB Polypeptide
MACENIRSKSREMRRLLKAFKTEIAPTLEQANKIIRSIGICRFLYNQYIAYNKKLYRMYQRGLLDSHQKHFVSANDFDKYVNHKLKPELSWISECGAKARKKALVNAEAAFKEFFKGQAGFPRFKKKSRQDVKLYFPRNNKGDWKIWRHKLMIPTLKQVKLKEYGYLPVGVAVISGTVSYQAGRFYVSVVADVEETSRYNNDWETSCHPKSEGIGIDLGIKNLAIVSNGQTFKNINKSSKVGRLEKRLRRTQRQLSRKYELKKKKGGAPAIASANIDKQKLKVQKLHQRIKQIREDHENKTIHEIVKQKPSFVTVEDLNIKGMMKNKHLAKAVAAERFYSFLSKLKRKAEIIGIELRVVDRFYPSSKTCHSCGYIHKGLKLKDRMYVCPKCGYMVDRDLNASLNLRDAKEYQTA

SEQ ID NO: 42737 - protein, 568 aa, unknown
  TnpB Polypeptide
MDTEKTLDLNKPLFSYSRYERNEYGYGDDFIHRDGDGVDMQVFFNQATGEFVSKGVSISDFTNLVEGKSARDTNAWTRHSLDPKELLPDDISKVEINDGMMAFLKTYRFIVSDEHTGDPIRQKVYDFDFKDADFYSALYGDVGNWPPTEEGVPRDQAQALEGVLLEQELLPAYDRRSPHRGHPPLHREPGAEMTVTMHRAVVYRAYPTREQAALIERTCGCARFVYNRMLADKIAHYEKTGEMLKVTPARYKREFPWLKEVDSFALCNAQLNLDAAYRNFFRRVKAGEKHGFPKYKAKHRSRCCYKTNFVNGNIRFEGDERYLRLPKLGSVRVRQKREIDPSWRIKSVTVEHTRSGRFEVSVLFEFETQEPEQVEPESFVGLDYSSHDLYVTSDGERPGYPRYFRHAERKLAREQRKLSRMQKGSANWRKQKLRVARVHEKMKNQRKDFHHKAANGLVERYDCVCVEDLDMRGMSRSLKLGKSTMDNGFGMFRALLGYKLEDRGKRLVTVGRLFPSSQLCHECGYRFSGTKDLSVREWTCPLCGRTHDRDVNAARNIRDEGMRLALSA

SEQ ID NO: 42738 - protein, 401 aa, Chlamydiae sp.
MQAYKYELQPDGTQERNMRRISGGCRFVFNKGLAIQKENYEAGNKFIGYVAMANQLTQWRNSVETPWLKEAPCHPLQHALKDLDRAYKNFFAKRAQFPRFKKRGTGSSFRYPDSKQIKLDQPNSRIFLPKLGWIRYRKSREIMGELCNVTVTHNGSKWFVSVQTERQENPPKQTVTTAVGIDVGIARFATLSDGHYVAPLNSFKKHQERLRRYQQRMARKIKFSNNWKKAKAKVQKVHIGIANARKDFLHKTTTAISKNHALVCIEDLQVKSMLKTAAGTKEQPGKQVRQKSNLNRSILDQGWGIFRSQLEYKLGWNGGLLFAVPPENTSRTCPNCDHISDHNRKTQSQFLCVCCGYKNNADIVGAINILERGHRLLACGEMVHLGRSKKQEPAEVESVSF

SEQ ID NO: 42739 - protein, 556 aa, Mycobacterium sp.
VIVVMRTRAQAAKVAEATGGVQLPGKAKPDGTPTVSRFVAVGSDFEAHRATVESVSVLFELYDGDADRYAATGSPGTQLPTGWMVTAAKLEVEWPADGARAGLVRSHFGARRKAFNWGLDLVKADLDAKAVDPAHESVGWDLGSLRKAWNRAKDDVAPWWAENSKECYSAGLADLAQALSNWSASRNGTRNGRRVGFPRFQSARRDPGRVRFTTGAMRLEDDRRTITVPVIGGLRSMENTRRVQRHLASGRARILNMTLSQRWGRLFVSVGYALRTPDTARTPTRPTVRAGVDLGVRTLATVATRDIITGTETLVEYQNPAPLKATLAARRRAGRQLSRRIPGSHGHRAAKGKLSRLDRRCVHLRREGAHQLTTELAGTYGQVVIEDLDVAAMKRSMGRRAYRRAVSDAAMGMVAPMMAYKTTRCGSTLIVADRWYASSQIHHGCYLPDGSPCRLQGKGRIDKHLVCPQTGEVVDRDRNAAKNLRDWPDMPVVAQSGPRPRSSAVPAGVPETAAQTIGTTDCLGSLRKTRPHGKAANSEAKTGVAPATTELRKESA

SEQ ID NO: 42740 - protein, 392 aa, Helicobacter sp.
LNAERRYLVTNTKCTCIKKTQCLPCLISSVIAQQSRMNVERALKDAFKVKNRGFPKFKNSKFAKQSFSWNNQGFSIKESDDERFKIFTLMKMPLMMRMHRDFPPNAKVKQIGISCSHRKYFVSFSVEYEQDITIIKNPKNGVGLDLNILNIACSCDINHHDKLTDFKQYQTDMKELLGIEIDEEVNTKRLIPTYSKLHSFKKYSKEYKRLQRKQSRRVLKSKQNKTKLGGNFYKTQKKLNQAFDKSSHQKTDRYHKITSELSKQFELIVVEDLQVKNMTKRAKLKNVKQKSGLNQSILNTSFYQIISFLDYKQQHNGKLLVKVPPQYTSKTCHCCGNINHKLKLNHRQYWCLECGYREHRDINAANNILSKGLSLFGVGNVHADFKEQSLSC

SEQ ID NO: 42741 - protein, 402 aa, Serratia sp.
MKRLQAFKFPLRPKGQQEREMRRFAGACRFVFNRALALQNENHEAENKYLPYTKMASWLIEWKANPETQWLKEAPSQPLQQSLKDLERGYKNFFQKRAAFPRFKKRGQNDAFRYPQGVKLDHVNSRISLPKLGWIRYRNSREIIGVVKNVTVSQSCGKWYVSIQTEYDVPEPAHNAASMVGLDAGVTKLATLSDGTVYPPVNSFKANQCKLATLQRQLSRKVKFSSNWQKQKRKIQHLHSHIANIRRDYLHKVTSEISKNHAMIVIEDLKVGNISKSAKGTSDQHGRKVRAKSGLNRSILDQGWYEMRRQLEYKQLWRGGQVLAVPPAYTSQRCACCGHTAKENRLSQSKFECQICGYTENADVNGARNILAAGHAVLACGGRVQSGRPLKQEPAEASQARV

SEQ ID NO: 42742 - protein, 376 aa, unknown
  TnpB Polypeptide
MLKAFRYRLYPTKVQKTTINKMLESLRWVYNETLAVRKKSWEQEHKSISLFKTNKLLIDWKKEHPELNSVFSQVLQDAQVRVDLAFKAFYRRVKAGEKAGYPRFKGYRRYDSLTYTQFGYKLEANKLTLSKIGTINVNMHREVEGKIHRITVRKASTGKFFVSVITEVKPKHVPFKDGAVVGVDVGLESFATLSNGEKIENPRFFRTEERELAKAHRKLSVEKKGSEKWCKRLKVVQRIHERIANKRNNFIHQESRKLVNRFGVIAFEALNVKGMMQNSNLAKSIGDAGWSMFVNATRYKAEEAGSKVVLVNPNGTSQTCSRCGLTVKKGLNERTHRCKCGLEIDRDLNASINILRLGLESLGYKAVEAHDLQSWE

SEQ ID NO: 42743 - protein, 351 aa, Natronorubrum sp.
VDRPETSPLEGVVEGRTTTVRQPLDAERSEGQRPPRRRTQVERPTGISFGQVQSNRLRTQQHEWPHCTFSFQNWRYSDGLLPQRSRRRHDQRGRRQAGTDRRVVRCSRDRNQRRRAAEAKTLKNCVGIDVGLLKYAHDSDGTAVESPDLSDERERLEREQRKLSRKEHGSANYRKQQRVVPKRYADLMRKRRDFLHKLSNHYAREYDLVAVEDLDAKGLMELPSNSRNRAGAAWGTFLRMLGYKCEREGTHFVAVDLTGTTKECAACGAESNKPLWVREHSCPSCGFTADRDWNAAYNILVRGLNQVGMDCPESTPAETALPTGTDSVPAKRVIETGSPTLKEQTASAVSE

SEQ ID NO: 42744 - protein, 380 aa, unknown
  TnpB Polypeptide
MPLSFTRTLRLKVRREAYAWLNAAAIEVNEVFNYCNETSYKAATRTDTKRKWLSGFDLCNLTAGATQYFEKIGAHTIQVICNHYAQKRRAARRLKLRWRVSRGSRRSLGWIPFKAASLKRKGVCLRFAGKCFRVFERERLDGITWQAGCFAQDAVGDCLPVKVEAEQTIAPEEEVGIDLGLKDIAVTSDEDRLPAGRWTQEYAVKLASAQRRGHKRQAKRIHSRIARSRADALHKFSREMVDRYQKIVVGDVSSLKLVKTRMAKSVLDSGWGMLKGFLEYKRQQAARTFEVTSERNTSVTCFPCRALTGPRGINGLIVRSWVCRNCGALNDRDVNAARNTLIGSRCRTSVCGNEPTSWPIPPSSAYCVREVGIESARTAA

SEQ ID NO: 42745 - protein, 380 aa, unknown; identical to SEQ ID NO: 42744
  TnpB Polypeptide

SEQ ID NO: 42746 - protein, 489 aa, unknown
  TnpB Polypeptide
MVITPGGKIKLFNENVAISSYCTMVNLVHLEAEVAEIVNKHPKAGERCEVGSAKSDYTSEHLDHQKRGRRMRLACKAEIQPTPTQEQTLLQGAGNARWAYNWGLTKHKAAYDQWKDAGKPKKWDGWPSTFGLDAELNKLKKVHEEDGGIPWMYMASKDCHQQALRDLERAFKNFLSGRARYPRFKSRNKSIGGFRLTGTIRVDNRTIQLPCIGRVRIKPGNHGYIPLGKHSMASVKNEAGRWFVSVVGPEVAEAENNGGPAVGIDLGVAKLATLSDGTVYKNPRALKRGHKKIKRRQKELARKQRRSQNRRKAKRKLARAYARVRHVRQDALHKITTAIAKSHGMVVIEDLKVSNMTRKGGSRKRRLNRVLQDAALGAVCRMLEYKGKLYGCEVVAVNPAYTSQRCSACGHTEKANRPSQAKFLCVACGHKANADLNAAINILAAGSCPEALNAWPERVRGLGHAGAGVRRGGPLAPSQPAVKQELSAA

SEQ ID NO: 42747 - protein, 380 aa, unknown
  TnpB Polypeptide
MPAVKQNRAIKYRAYPTEKQAVLLAKTFGCVRFVWNHMLTDAQTFLDEAGVFFIPTPAKYKKEFPFLKEVDSLALANTQLDLKAANKRHLEDKKVGTPQLKSKHKSKMSYTTNNQTMHCKDGSSKDTIFVVGNLVHLPKVGNLKIKKHCLPEAGWTLKAATVSCTRTGKYFISLLYEFEKDIQPVAATKEKSLGLDYSSHDFYVDSNGDAANYPRFYRRAEAKLAKEQRKLSHMKYGSNNYNQQLHKVRLLQEHTANQRKNFCHTLSTAIAKQYDAVFVEDINLRGMAGSLKLGKSTNDNGFGMFRTMLEYKLTSQGKTFAKIDKWYPSSKTCSVCGLIKDDLTLADRNWTCSSCGTTHNRDHNAAINIRNVGLLGLYPA

SEQ ID NO: 42748 - protein, 387 aa, unknown
  TnpB Polypeptide
MIVITHKFRLYPTKEQEEKLLFILEQCRWLYNKLLSIMNESKSTPPKRKMQSLLPKLKEERPELKEVNAKTLQMVVFMLYNNLKALAELREKGRKVGKLRYKKRGKLKSFILNQSGFKLVKTGNRLDRLYISKVGEVPIRVHRPVEGKIKQVIIKRYGSGAWYALICVEESEAPKKEIERAIGIDLGIRSYLTDSEGRAIENPKFYEQELERLRREHRKLSRKKRHSKNYLKQLRRLCKVYEKIERRRDDFLHKLSRFYVDNHDLIVVEDLEVENMRRNHNLSSEISDASWSKFLHYLSYKAERAGKTVVKVSPRGTSEGLSWDDPLRDYISACRILERGLEKLGLGRPFEPVERRPLLHITASSVIVGHVSSTKQEPPLAGCSSLQ

SEQ ID NO: 42749 - protein, 413 aa, unknown
  TnpB Polypeptide
MEYSHRYHAHPTEEVAERLEHHLDVHRQLYNHVRWDYTNSPEDDKPSEYDQNNKLPEWKRKWPVFGELHSKAAQATVARFHRNLSNLRKKKEKGHNVGRLTRQAPSDYRSVTYSQSGFDLDEKRGRDRFAYVRFSKIGWVKIRYHRPIPDRASIKEVTFKKETTGEWFVSFGLETDDENLPEKPDVESLDTSNSVGIDLGILNYIHTSDGKTVDWLDLEDDYDRLRREQRKLSRKEKGSSNYEKQRVEVAKVKRRIRRKVLDYQHKITTWIVKTYDAVFVEDLDVSGMLQGDENARNKRDAAWRQFITLLEYKGDLYGCHVKQVEARGTTKECASCGVETAKPIWVREHFCPSCGFETDRDANAAMNVLQRGFSELGLGWPESTPVETVTATDTADFQRVSASHVVETGSLGA

SEQ ID NO: 42750 - protein, 282 aa, unknown
  TnpB Polypeptide
MEYSHRYPAYPTQKVAAGLDSHIDIHRQAYNYTLYEYENVDVDDIGSAYKHHYRLTDWKDEFPVFAEVNSSTATNRHSVLPRTSTGSPSKTKRAQGREAQVEVTTGVPEYDVLAVWLRTQNTSGRRATLWLSKIGDIPIRYHREIPDEADIKEVTVKKESTGDWFVSFGLETDEADLPEKPLVDSLDASNSVGVDLGIQNYIHTATARSWTGSTSKTSTTASATSNGSCRGRRRGRTTTRSNAEKWRRSSGTSVERCWTTSTKSRRGSSASSTMLCSSRTWT

SEQ ID NO: 42751 - protein, 343 aa, unknown
  TnpB Polypeptide
VAFRISAKPYKHVKGVLEGSDAHLDILKTALTSDEWKIGTAEALFHDDTAELHVNVTNSKQTVRNKQDSRTVVGVDVNEDNVALTALSEDGVEDTLVIDFPEIKFERHRYFTMRKRVQNAGKDSIHDTLEGHEERFVRDRLHKVSRHIVEWSQQFEKPCIVFEDLKEMRDSIDYGTRMNRRLHHLPFRALQFYTSYKASFEGIPTAWINPEYTSQRCPMCGHTERTNRNKKRFKCRSCSHQDHSDRGASVNIAVKGVKKLNWNVPALNSLPVVRKVRRQASGGRGRPDRDPPDRPEAIRPMVGWECPTNHGKPRGLTPRRFTSPVVESVALGGILPHESVATP

SEQ ID NO: 42752 - protein, 400 aa, unknown
  TnpB Polypeptide
MLKVKVKTMQKTYRYRLYPNKEQEQTLLWTMRQCKFVYNMMLEWLQKQDKPDRYVLQNSLSELKEQYPHLKGVYSKALQHEVYRLFSNLKALSQSKKKGRHVGRLRFKSSAGFKTIHYNQSGSKIIPTDTRCNKLHISKVGDIPMCMHRNFGGNIKQVVIKRYGSGRWFASITVEESDTVVQKRPIKKIVGMDMGITEFLTDTTGKIVENPKYLKKSLKRLKHRQKRLSRTKKKSNNRRKQIVRVAKLYEQVANQRSDFCHKVAKHYVDSFDFISVEDLNITGMLKSIDGEKKSKRIKRHMRRNTLDVSWRKFFDILSYKAEWAGKTMVKVDPSYTSQIYKYGKSLDRDYNASLNILERGLKQVGQGLSEFMPLEIVPPPELKTVLASTVIELGSHFQNH

SEQ ID NO: 42753 - protein, 214 aa, Oscillatoriales sp.
LARALDPGVRTFLTGFDGSDIIEAGRGDIGRIYRLARHLDKLMWRIGYAKGGQFKRLRYCLRKSAAKIRIKIKNLVNELHKKAAKYLVTKYKLIFLPTFETQQMIKKGKRKLATKTARAMVTLSHYSFQQMLKHQAVKYGSLVVDVTEEYTSKTCSKCGHIHTKLGGSKKFKCPECGHTLDRDLNGAFNILLKALRDTSLTGELAAFTLLAIHG

SEQ ID NO: 42754 - protein, 525 aa, unknown
  TnpB Polypeptide
MFITTCFKLVVNKEEKNQILKLMRNFSSAVRFSYKRLLEGFTPSQAYSTAREKFPELNSHYVSCAVEKAREIFQSCKARGQNPKKLIFGGRALFEKLKKKHLQGKSRRELKRKWKEKRQGTLISIGAKHKTHKGNLNLRFIPAEKGKNNLCLRIALKNRKFILARVKRDLSGKSDKWALFLAKILSGERFPYTVELKLKDGQIYGFVRFSLDIPLQTITKAKGVIGIDVNASPFHLALAEVSSDGNLQSYKSIYLSHLLKYKSRNRKEYEEWLIAHEVIKFAKEKGKAIAIEDIKNLPKGKRGDGKAKIRKILQFFSYRRILKKIESLANQEGIEIVKVNPAFTSLIGMMKYCPQYFIDKDVAGAYVIGRKALGFQEKIPENYKKLLKSQIYIQYALWRLGKMEEELKNKLNQEKNKYKVNGIKRDLRRLKRERKFLERFLVETNRKESSQSEPETQKQGNLRKEPVRGPESGQKLWRVLRVAFAIPLLGKSFVRDFSPLRPVVVQGRWEGIAGRLGPDGFAGPP

SEQ ID NO: 42755 - protein, 479 aa, unknown
  TnpB Polypeptide
MQDGFRFRCYPDKAHQKKLMPWIGHQRFIYNAKISEDRYFQRFKNRFREEIEEEVPIDQQYSHFITELTPWLRDVPSQVLRNGVVRWMQAYRRFFKKLGGRPTFQKANRKQSVWLTSELFSICRRNDRWFIRIGTKKFKIGEFEFVPHREFSRLPASVVLSVEGGHWYLGFSNEDDQYEPTRDEIGEYLETFTCEDLLERTIGIDRNTPAGKQVAVSSGQAFAYGETQKERMEKKERHNKRYQKRLSLQTKGSNGWRKTRKRIANNNRYTRNIRRDVMHKASRELVDNPRVYVLAFEDLRIQNMTKSPDPKQGPETGKWLENGAAAKAGLNKAILHSGWGLLYTFTRYKAQRAGKLVVQVPAPGSSQECRLCGFTHPDNRKSQSDFVCQRCEHTENADFNASGVIKTRGVKVVLSGQWREKPPQKTLRLKKRQVGPEGSEPGQSTVRSPVETRGKPRGRKRLNAPVEETGNPHYNASGV

SEQ ID NO: 42756 - protein, 418 aa, unknown
  TnpB Polypeptide
MPDAYRIERVRLYPTAAQRRQMESYAGAHRWTWNWALAAREVHFAAHGTSLSYYAQGRALTVLQQQPDNVWLTGIPRRVKVGALRDLDKAYRAAFRRVQRGERPGFPRFKARKRGDASFEIPAETRFDGRRVKIPGIGWVRARGGRAIATTTTTARYFRDGAGDWWAALRYIVPLADTDVSDIAAVGVHLEPGHALTLSTGDIVNESRYVSRSDRKLRRLKRATRRTQPGSGNRRRARQRFTRATRHVANQRWDWQHTVSRRLVNSHPRLVMQERGTTTHTTDPESQRAVWGDHARRARVSDATWGGLTRLIQEKAAAAGCPVVVIPAEVPTNVTCSQCRHVRETLPELVNIWLCERCGTLHERGTNAARNILSVGVRDDARSERRREAPGDAKRLWTHDKTPAGAGEERLASASRKQ

SEQ ID NO: 42757 - protein, 231 aa, unknown
  TnpB Polypeptide
MEYLRKCWSGKKASAPTLEKRHQKYFLRFSYTEEVTLTKTPVKEQVICSVDLGINTDAVCTIMRADGTVLGRRFIDHPSEKDRMYRTLGRIRRFQREHGSAQTQGRWAYTKRLNTELGKKIAGAIVRYAEENHADVIVFEYLEMQGKISGKKKQKLHLWRKRDIQKCCEHQAHRKGMRVSRICAWNTSRLAYDGSGAVTRDWENHSLCTFQTGKRYNCDLSASYNIGRDIL

SEQ ID NO: 42758 - protein, 384 aa, Micromonospora sp.
VDVKLVVQVRLFPDGAQEAALRDTLTVCNNAANLASAEAYRARVFAKQALQRLTYTRLKAMGLSAQPAIHVARKVAGAYATLKANIRAGNLGKAGSKRRRKAEAKPIVFRRNAAQPFDDRCLSWQMQSRTVSIWTTAGRRPGVRFACSDAQHAMLSAHRRGESDLVCRDGKWYLYATCDIPDVELTEPKGFLGVDLGIANIATTSDGTQHCGKGLNRVRHRNQRLRAKLQRIGTKSAKRLLKARRRKEARFAADTNHRIAKQIVTEAQRTSRGVALENLSGIHGRVRLRRPQRVTLHSWAFQQFGQFIAYKAARAGVASVYVDPAYTSQGCSACGHVARANRPNQSSFRCKSCGFAEHADVNAARNIAARGAVGWAAVSLPNAA

SEQ ID NO: 42759 - protein, 241 aa, unknown
  TnpB Polypeptide
MLPHHHWPSEHRRADGVRGGAVACPRPSRRRCRRRSHPTAHKQSKLNDLLETYRDGLQEAFDAGASTMSSVSDIVTPYDLPYQAKAALCNYVPKLRKTYNAQDLDDEHPIRLTNQAAKFDHSEERDYEFTWWVPRPGRGTNFWMPLRINPEQEDLWHDLVSEDAKAGEIRLQQHRKNWVLHVTVEYPVEEPAADGDATHIGLDIGETALITGCALKDGSPTDPFVCSGSRAKHLRKRCTRP

SEQ ID NO: 42760 - protein, 407 aa, unknown
  TnpB Polypeptide
MMEAIKSVKFKYKCDSDIEEIFKDFCEMIMLCIDRALELNITSYARLRKTIYGEWKQKWYPKYHTHYCHSACKIATAILKNFRKRKRKGLVKKDKPEVRRDFIKLEEMLFKFEGDKIRIVTSPRHYIELELIIGEYQKMFVEAWKKGKLDIGEIIIKRNYVIVPFKRKIKPKDVETIMTIDINEKNLTYSIFDLNGNVLKTVRLDIYKAKRIHDNYSKKREKIQKKLVKKPLKMRKILQKYSGKEKRRIEDYLHKVSAIVVSEAEKYNSKIVMENLKNIRESINRKNKKIRRRLNRWNFRKLQFFIEYKAIWSGLAVEYINPRKTSSLCPICGHKLKKNPNRQRLLKCEKCKFEFDRDVIATYNLYKKSQNVGSLRSPRTLPDEVLLIREDGTGEPLHPILKTHKNS

SEQ ID NO: 42761 - protein, 392 aa, Aneurinibacillus sp.
MPTITIKLLLFEPTKTKLEMYETMRSHFSDACNKTLELKKSNLKMKATEIDHALDGIELPSTLRQEARKLALSRYQDWKKNQKTKGFPSFKNKIAILFNNQNWHLRFDKGYLKVGIPTIEEGNLNIDKYVPVKANEYSLFWVSYLLKNEMDKANRHYQPSYEGISKPKKGNGQLYYKNGKWFFSFSITFEMKQTDKKEKAIGVDRGLRLVAVAGDANSGKYLTFNGRHIGHIRRKFARLRHALQKAKNTKALKRLEDKEQRIIKYWNHVISKKMVRFALSCGACVIKIEDLTSIRSMKKFWKLSDRNINSWAFFDLETKLTYKATLAELRVEKVNPYKTSQECSKCGEIKKSNRRKDTYTCSSCGHKENADINASFNIARRPSIVKEDNSAA

SEQ ID NO: 42762 - protein, 475 aa, Halovivax sp.
MIMEFARLKPRPKGRGYSRQALPYPRSIASPDIPRPVVTFNIPILISTYEHSSMLETTRTYRAKIVNHTQVSDDLDECGHSASKLWNVARYHTQQEWDDTGEIPSEDDLKRELKDHERYSDLHSQSSQRVLEELAEAFNGWFKKRKNGDTDANPPGYRKRGDTHPRSTVTWKQMGIKHDSKHSQLRLSKGFNLKQHRSDFILAEYETRPDVTVENIQQVRAVWNGNRWELHLVCNVKIAVEDAPGDNTAGIDLGISNYLAIAYDDGNAALYPGNVLKQDKHYYTRDEYDTEGENGPSRRALRTRQKLSRRKDHFLHSLTKHIVERCIDHGIGRIAIGDLREIRADANGDSRNWGRSGNKKLHGWEFDRFTSLLEYKAEEHGILVDRKDERDTSKTCSCCGRKRDANRVERGLYVCKSCGATMNADVNGAVNIRRKITQNPPTEDMSNGRLARPVAYLFNQTSGRFAPSEQAGCEP

SEQ ID NO: 42763 - protein, 461 aa, unknown
  TnpB Polypeptide
VRGNDDQYRLARQAQARHIIGLRATISTIGKRLAQPTADSLTSGQRTERKRARLPKGYPTQAERFQKQRRLQTLQAELGRVTADLDDNLVRVVDGGKRLAKTRHNLHAAGLTQAQWRDQWDSARWRIDANGSGDEPFGNLTLTVTPTGEVSLRLPKPLEHLANAKRGRYVLTNPASFAYRRDEWLARIPGGKSVAYALTRKPGRSGVYLTAAWSNPATAEPEGEAVADGPVVGVDLNDGHLAVRILDTHGNPVGKPERIEFGITGSSTRRDAQIRHVLTRLIRHCLRHGVTTLAVEDLNFEDARTIGRETMGRGQRGKTFRRTVAGIPTSVFRNRLPAMSHRHGIRLHAVSPAYTSAWGNQHWRKPYQNVTRHEAAATVIGRRAQGHKARRREGVPRTRPEDRVVRATDQTGPSAPRVTSSRHRPGTRGAEVRPPNRASTRLPGRATVTPATVGRNGQPHS

SEQ ID NO: 42764 - protein, 417 aa, unknown
  TnpB Polypeptide
MATQVTRTYVASIRNHQQVRADLDSLGFAASKLWNVARWTCDRIWSETGTIPDHGTLKAYLKSHERYADLNAQSSQAILEQLAEAFDSWYAHRGNGNDDANPPGYRKHGDDHPRSTVTFKEDGFKHDPDHDRIRLSKGSNLKESWSDFVLCEYAADPDVDVQNVQQVRTVWTGEEWELHIVCRVETGNPDPPGERVAGIDLGICNFAAVGIGDEALLYPGGALKEDDYYFQKERAKCGDSDSRQARRLDRTRRGRRDHFLHAVSIDVVTECVARNVGTIAVGDLSGIREGADWGDHGNLDLHGWAFDRFVSMLEYKAAERGISVKRVDERDTSKSCASCGTIDDGQRVERGLYVCEECGLVANADVNGAENIRQKVLPNLACDGGDRDNGWMAQPAVRLFEKSTGRVVPQEQVTREP

SEQ ID NO: 42765 - protein, 570 aa, unknown
  TnpB Polypeptide
VSKLRETAAPFVAAGPAGARVRTRLRVSGPDAEVLRAVGRHLGTLAGHDLAARCAEGRLEAKGRAASRAARKRALTGESSSRWAGAITRTSEDTYQLAARNLAAERRTLKARAEKIQARLAVPAGGKAGRLAGYVTPAERHEKTLRLKALKGRLARVERQIADGSVTVTRGGQRLLRARLSLADAGLTEQQWRKRWEASRLFLTADGEKVKPWGNETLRWNPDEGWFEVKLPAPLAHLANRPHGRYRLSCRVQFAYRGGEVAAQAATGAVRYDISRDAVRDRWYLDASWKAPARPVLSLDEVRESAVVAVDVNAGHLAVAVISPDGNVAGVPFTVPLELAGLPASARDGRVRAAVSLLIATAQDAGARAVVIEDLDFAEARAEGREKTGKRPSRGKRGRRFRRLVAGIPTARFRDRLTQMTANVGLSVVVVDPAYSSRWGGQHWLAPLREHHPELTGHHAAALVLGRRGLGHRARNRATGNRAAPEDAAQPAQARTRKPPAAATAPRKPTAPRGTRPPTGSKTGMPHRTTAGNQAAQDRSGPPAKRAQPLSVEERFLAERAAPHGLNDVS

SEQ ID NO: 42766 - protein, 465 aa, unknown
  TnpB Polypeptide
MARFEVPDGWCVQAFRFTLDPTEEQARSLARHFGARRKAYNWAVETLKVDIQAWRETAIETAKPSLQALRKRWNTVKGDVCVNAETGQVWWAECSKEAYADGIAGAVDAFWNWQSSRAGTRAGKRVGFPRFKRKGRDADRVCFTTGAMRVEPDRRHLTLPVIGTVRTCENTRRIERLIRSGRARVLAMSVRRNGTRLDASVRVLVQRPQRPGVMLPDSRVGVDVGVRRLATVADADGVVIDRIDNPRPLQTALRELRQVSRARSRCTKGSRRYRERTTELSRLHRRVNDVRTHHLHVLTTRLAKTHGRIVVEGLDAAGMLRQKGLAGARARRRGLSDAALGTPRRLLSYKTGWYGSQLVVADRWFPSSKTCHACGHVQDIGWDQTWQCNGCSVEKVEMITHQRDDNAAINLARYEDTNSVVGPVGAAVKRGADRKTGPRPAGGREARKGGSHTAAEQPRDGVRVA

SEQ ID NO: 42767 - protein, 433 aa, Streptomyces sp.
VRREEHARETGVQVPFLSDRCAGGRAVAHVRVRAEGLQPGPGSTHPGVGIAAGAGELQRHLGHAHRVEEDRGTRLPERGFLRPTATGPAPPPDSIHPLLRPAGPVPAVEVAEEVPQVGGVHHQRVPVPGREADPGQDDRAAGHRLVPPLPEGAAPSTVTVSQDAAGRWFVSLLCEDPGVQPLPKTDAAVGVDAGLDHLLTLSTGEKITNPRHERRDRDRLAKAQRELARKAKGEGANRTKVRRRVARVHARIADRRRDTLHKITTRLVRDNQTIVIEDLTVRNLLKNGRLARAISDAAWSEFRTMLEYKARWYGREVIAVDRWFPSSKLCSNCGTLQNTMPLSVRTWTCGSCGVTHDRDVNAARNILAAGLAVSACGAGVRPQRSTPGGQSVMKQEPLRREPSEPPPSGGGEVNGPPRPRRTPRTGRSGTGSG

SEQ ID NO: 42768 - protein, 482 aa, Pseudomonas sp.
LNSTSSASKSAQTFEKSPLRLSSMGAVSTSFRYFVRKTKCTCILKTQCLPIRMSFTLSIDQTIVESMKRVQAYKFRIDPNGEQQRKLRQFAGMARFVFNKALALQQENREAGGKYIQYVPMAKLLTDWRNGPETPWLKSAPVHPLQHALKHLDRAFKNFFEKRAAFPVFKKRGRNDSFRFPDSKQIKLEQDDERIFLPKLGWLNYRKSQKVKGLVKNCTVSLKAGHWYVSIQTERAVAQPRHPGATAAGIDVGIVRFATLWDGQTEQVIQPLNSFKTHEHRLAKAQRQMSRKVKFSSNWKRAKLRVQKIQNQIANVRNDFLHKTSHSISKNHALLCVEDLRISNMSRSASGTPEDPGRNVSAKSGLNKAILDQGWGEFGRQLDYKSAWQGGWLVAVPPANTSRECQVCGHTCAENRKTQSVFLCVACGHTENADTVASKNIRERGLNLFEGQGIGRLACEVNGAVRPSAAGTRRSEQAAHAA

SEQ ID NO: 42769 - protein, 424 aa, Pseudomonas sp.
MELDMHRTERILIKPSDTNYRAVARICREAKTVHNCASYLMRQSFFDGKLIPWATADKLLKRGFSEHPSYSALPAVMSQAIIKRIGSDWNGFFGALAEWKKSPGKFKAMPRIPGYSKKSKTAIMPFKDMSCRDGHLIFPKKAGLEPIRVNCCENQILKAKGDQQIILEIRFVPHGSCYWLEVVYEKRSAEADRTKSVLLDKKKLLSIDLGINNLATLVSDQPGFRPVLINGLVVKSVNHLYNRDVAKLRSKGHKKLIEAKSVKRFCWINDHFHKASRLVIQTCLDHDLGTLVIGHNPGWKQDVNIGKVNNQKFVSIPHAKLIEQIRYKAEEYGIQVIVREESYTSKASALDLDPVPTYDTKNDAKHRFSGRRVKRGLYQAASGLQVNADVNGALNVLRKEIGDSFFKAVADEGNVFRPKRVTLR

SEQ ID NO: 42770 - protein, 426 aa, Lactobacillus sp.
MHGQMMTVFIMSLQGLLILICYDIHKQVGGENMLRTHKIRCYPNATMRRVLEQACDYRRYCYNQALATWNEMYDASLVLADKTARPNERQVRNELVNNKADWQYSRSARILQLAVHDLAQAWANFFNPEMPEHRKPRFKSKKRSRYGFKTDRAMVVNDKLRLDKPQGYLDRWYDIRLAETPRWQGTIKLAAIVKEADGYYACLSIDVAKPEPLPASQHVCGVDANVGKYVYNDGEAISAVRVLTEQLVSLYHRVSLYQRRLARKRQVNPKHFESNNYRATKTKLQRTYQKVTRIQSDLLQKFTTMLVKTNGTLAIEDLDVKHMKMNKRLAKNLHRSLFGRFRMLMKDKAQWYGRQLVMVNRFYPSTQRCSQCGLVKTGDDKLSLAGNVFHGTKHHEFHCYGCGAQLERDENAVQNLIQYAQGQAMS

SEQ ID NO: 42771 - protein, 374 aa, unknown
  TnpB Polypeptide
VLLSYRYRIEPNRAQATALSEMLGDFCQLYNAALEHRINAYKHGVSIKCNEQIVTLPEIRRDLPHQGRWSATAQQQVLRKLDKAYKAFFGRVKRGATAGFPRFRARDRYHAADFRVGDGMTIRKSGKLGFVGIPGEIRVRWHRKLPSQPKSCILSRNAGKWYIIFHVEVATVERASPESVGIDVGLSSFVALSNGETVDRSNFTKRAERKLRRLQRALARCKRGSNIRRKRKLAVATHQAYITSARRDFLHKQSRAIVNRFGRIAVEDLNIKGLARGMLAKSVHDASWGQFVSLIRYKAESAGCEFVEVDPRGTSQECPKCNAIAKKTLAERTHRCSCGCVLDRDVAAAMVVHFRAFGFWPGAGLGLSTWPVAA

SEQ ID NO: 42772 - protein, 403 aa, unknown
  TnpB Polypeptide
MQITYKVELKLNKAQKQQINSYIGVSRWVYNKFLEINNTNYKENHDSKSYMSAYTFSKWFNNHYLKDNPNDLWIKEYYSKHTKQAMIDADTNMKAFFKHKRGKPRFRSFKKHQGSYYFCANSKSQPVKYNEYQIKLPRIGFVRYKEKGYVPVGDDYRIVSGRIKERAGRYYLTALVEQPDLTKLNLTGEAIGIDLGIKDFAILNNGTVYKNLNKSTRLKRLRKRLRRLQRKESRQYQDYKQRLKENNYERRATTDFNLSDTQDKILKLNGRITNILNDYQNKIIANVVRTKPQYIAMEDLNVSGMIKNHHLAKQVQQQKFYRFRIRLVNKCQWFEIPVHLVDRFYPSSKTCSQCGFYNEEFRNMGQKFLRVRKWTCPNCGSTLDRDINASENICITPKFKLAY

SEQ ID NO: 42773 - protein, 218 aa, unknown
  TnpB Polypeptide
MEGEQTIAPEEAVGIDLGLKEIAVTSDGDRLAAGRWTQLYAGKLASAQRRGHKRQAKRIHRKAARCRADALHKFSRKMVDRYQKIVVGDVSSLKLARTRMAKSVLDSGWGMLKGFLEYKSQQAARTFEVTSERNTSVTCFPCGALTGPRGINGLIVRSWVCSNCGVLNDRDVNAARNTLIGSRCRTSVSGNESSSWLIPPSNVYSVREAGIASARTAA

SEQ ID NO: 42774 - protein, 218 aa, unknown; identical to SEQ ID NO: 42773
  TnpB Polypeptide

SEQ ID NO: 42775 - protein, 408 aa, Desulfuribacillus sp.
VKLSLKYYPRWKKEQLQIIEELSFHTTKLYNIANHQCREKYKSYRVLEKELKQNWHKPYLHSHTYQQLLKVLEQNWKSYFSSLKDYKQNPSKYKAMPQPPKYKHIHKRKNEIIFTNLAIRRKDGHILLSLSKTMQKAFKVDSLKVEEPKTLPLPEHAHIQQIRLQYDQNWHLLIIYNIPAKAQSTSKNIMAIDLGLSNLSAITFSHSKDNYIIDGKSLKSINGYINKKIAHLQSIRMKQTSAKAYKTTKQIKRLRKKRHDYITNYLHQASRTIINLAQQYDIGTIVIGDIKRIKQHSTLKTFVQIPIERFTKMIQYKAELAGIKITYQKETYTSGVSAIDLEPITKTYYNKTRRVCRGLFRTNQGIYVNADINGSLNILRKTYTGTPNLITSVRDNGCVNHPQRIRVA

SEQ ID NO: 42776 - protein, 372 aa, Caldilineaceae sp.
MNESIVHKTYQERVYLTAAGYGRVREILGACRWLYNRSVEERRNIYRVCGKSMSKFSQMKHLTRLRAESQWWRDLSVQIARGVLVRLDRSFQDFFRRVKSGDKPGYPRFQGPGRYQCIELAEVTPEMVKDGRIRVKGMPGLRIRPNRELPDSRQLKGLRFVMRGRHLWADLVYVEDVTPLPYSDQVVGIDMGVNQRMTLSDGEVVERRVVRKRERVLQRAISRCEKGSSGRRKAVSAFAREKRRNVLRNRNACHAITTDLVRRYEVIVVEDLKVKNMTAAGGSYKRGLNREVLAQTWGVIRQQLAYKAEWAGRKLVEVNPAYTSRQCAECGDVNAKAKVYRVFECSSCGYVADRDLNAARNIMARGVFASVA

SEQ ID NO: 42777 - protein, 430 aa, unknown
  TnpB Polypeptide
MRQVERHWIKENHKLYSICDDLTFKAKNLYNAGLYQIRQSFFERERSDDKENHPILSWVNVVSNFRNEKQEDMLALPSKVSTNILRSLGAIMNSHYQLMKRFYDKSNTSVTHKPQLPSYLHKVDGRYVVEFNNQTIAKKRGENGEIIICPKDLNLMILTKVDKPKCVRIVPKLGVFIIEVIYEVEESPLKHTNNFAAIDLGIDNLASVTFSNGANPLLVNGQKIKSINQGYNRLIAKAQSKLPRRQKTSKHIHRLWRRREMKLQSELHRITSFLSQYFDEMCIEKVFIGKNTGWKNNVSMGKKTNQKFVQIPFNTFISQLRYKCLLKGIEVIEQEESFTSKASFVDNDNIPVYGKIKYEPQFSGKRIHRGLYETKGGFRLNADINGSYNILVKGMQSIGKTIDRNNVSYHTGTFRSSNHKSTRDLILDYM

SEQ ID NO: 42778 - protein, 486 aa, unknown
  TnpB Polypeptide
MHSATQICVTSDSEFYDYFATITMLANNLRNATLFRVRQVLTMVEKPFDNLTANELEVYNEIACALPLMGDRYKMPVKGKQFLNYYFLEALLKATKNPDYFAEKLPKQTAQQVLKEAASDMKGFYAGIRALKKNPSAFTGKPKLPRYGTKGGYHTAIISNQDCVIYAVKDKPGCHEVKFPGIPKRMFISDMPMRGRLMQVTVKPNHGNFVLSFVFEDGKEKPVTKPPHRMAGIDLGVDNAAAITNNLGLPCLLFKGGVMKSINQLYNKKMAKIQSEQTKGTSKKFVMTKEAHQLCVWRNRRIDDVISKIGNRIIDWCCDNDIDTIIIGHNTRWKQNANMGKKNNQTFTQLPLYKLIENITYRAEWCGIRVIEREESYTSKASFLDNDIIPTYGEAKEPKFSGRRIKRGLYKAADGTIINADLNGSANILRKEFPDAFASHQPDFSSVVIIRHPDLESIKRNREKQLAKPKGISKSKIKRLKAKGKM

SEQ ID NO: 42779 - protein, 387 aa, unknown
  TnpB Polypeptide
MFMSLTEKHRSKGSEEMETYTLGYKFRIYPDKEQTELINRTLGCCRYVFNHFLAVRQEQWKANHKSIGYIDTSRMLTDLKRYEETSWLKEADSFALQEALRNLDNAYQNFFQKRARYPRFKSKHNHTQSYRTRNQHNGIRIVNGKIKLPKIGFVKIKLSKTFDGRILNATVIHTASGKYFVSLCVELDRKSLISSNNGGNIGIDVGLSKFLTDSNGNTVENPHALKKLLKKLSREQRRLSRKTPRSNNRTKARVRVARVHEHIANIRKDFLHKISTRLVIENQVIAIENLKVKNMMKNNHLSRAIADVSWGEFFHMLEYKTVLHGGKVIRIEPFYPSSQICFECGHRNEKVKDLSVRSWVCPKCGTNHDRDINAAKNILREALKNIA

SEQ ID NO: 42780 - protein, 299 aa, unknown
  TnpB Polypeptide
LHGERAPTRGRRENHAHDHRHEGGRWYASLSVECDEPQPAANLKGSIGIDLGVRTFATLSDGTMIANPHRMKLIARKQRRLSRRLSRRHKGSKRWVEAKRENSKLANRAANQRRDMLDKTTTMLAATYRDISIEDLNVKGMSRRNKPKEDPGRPGEYLPNGRARKSGLNREILDQGFGMFRRMLEYKCARTGARLHVIDRWYPSSKTCSGCGTVKTKLSLSERVYHCGKCGLVMDRDLNAAINIQVAGSAPETLNARGGNTRRTPGAHSPNETRTKQPHPKGMRLGANTRKSVLQAKTN

SEQ ID NO: 42781 - protein, 373 aa, unknown
  TnpB Polypeptide
LYSTGKQIHYKKWDEFLSFEGKKNTTGIIYKDGKVYINASPKRQNRGLVLKVSLPKNQNTDHWCYETSALNDRTKYCRIVRKKFSTGWRYYVQLVQEGIPPLRHAVGAGRIGIDIGTSTVAAVSDTKCHLTELGEGIEVQDKKIRKMQRKLERSRRASNQDNYNADGTIKKGRKTWNYSNRYKKIRNELSAMQRKRSDTLRQWQEAYADLLLEEGNEVYVEDMNFKGLQKRSKKTEKNKKGKYKRKKRFGKSIGTRAPSQFLAILERKLRHTGGTYHEVNTWTFKASQYDHTRNTYRRKKLSRRHNTINGEWVQRDLYSAFLLMNSDDTLEHTDRDKCLQNYPQFKTMHNRCITEILQSGKHIPSSFGLKRAA

SEQ ID NO: 42782 - protein, 395 aa, unknown
  TnpB Polypeptide
MQLVQQVQFKRSNLLDEITFLSKNLFNVATYTVRQRFFEDRHWIRYNELWKLLKTHDSYRKLQESCGSHPPQQVLKQVDRNFKSFFKAIKVWKSERSKFQGMPRLPHYKHKNGHNVIYFTSLQCRLKNGHILLTQKMENLGFPKIKTALKSVKGVRIVPFGDRYNIELIYDYEPKDLHLNENNLLGIDLGLNNIVTASDNIGNKPMIIKGGVVKSINQFYNKQLSKYKSMAKKCNGTDVTERILKFHRKRNNKIRDFFHKTSRKIVNHCISNDIGTIVIGYNEGWKQKITIGKRNNQNFVSAPFLKLVQQIEYKSEMVGIQVIRTGEEYTSQTCSSCGVVRKSNRKYRGLYICKDCGVVLNADVNASRNILQKGVPKSRWIGDRRCLNHPVVLKV

SEQ ID NO: 42783 - protein, 437 aa, unknown
  TnpB Polypeptide
LDVFSISSRPFAYSTNAFTEWTARKPPGFSPSGGSAASLFGCQSYPICDILRTMQRTVKCKLMTSDAARDALEQTATAFANGCNIILQSSRKLKTSNKVKLQQAIYNEVREKTGLSANLTIRAIARVAYAIKIAAKRKKYVSEFHSTSIDYDQRIFVWRERDESVSLTTVKGRIHVPLKIGGYQRQALAKKKPTCARVVKTGKDWFIHIVVDENPPEKKGGPPLGIDLGIRNIATMSTGKQISGTKVKTIKERYAKVRASLQSKGTRGSLRVLRRLSGRERRFISWSNHNVSKSIVREAIENGYGIIRFENLKGIREHTKTWNKHKNRMMSGWSFGELQKFSEYKAERAGLGFELVNPAWTSETCHVCHQRGVRSQAKFWLYCPTCDRVFDADQNAAKNIEAGGVEPREIRGDRNATRIAEIIEFFSRPLQAKAAGL

SEQ ID NO: 42784 - protein, 409 aa, unknown
  TnpB Polypeptide
MITIKLPYKSDYNFINLMRQYTIMVKSCYKQLLKGSKDKDIRLYIKSLNNISDLDSRFIENALLDAKGFQKDNKIIFSKQNFFKRLKNKINKDTFKENKYLPLVNYGEKAQKGNRKFQLDLENNKIVFKLNRNEHIDIFLPSLKSNYKKQLTEIQLLMEENEIKTSFKIDRKFIYISYEPLEKENVILKDNRILGLDLNPNNIGISILEFKGLEFNIIHKSFISLYENNKLNKNKKNYNVIMISKQIAQLMKSFNVKNLAIEDLTMETKQHNKGKKYNKLVNNDWNRNLFVNNLKKRCKILNANIYDVHPAYTSIIGNLRYEYFDPINASIEVGRRGYLFNKMFIKNSFYPEFKLKNQWNQWKKEIGLFFEGWKDFYKHLKTLEMKYRVPIQGLVYKKECIKRIEFSIF

SEQ ID NO: 42785 - protein, 350 aa, Pseudomonas sp.
  misc_feature (232)..(232): Xaa can be any naturally occurring amino acid
MSKRAYKFRFYPTAEQKLLLEKTFGCVRFVYNYILDFRSKAYAEDKVRIGFKEANAALTLLKKDPEKAWLNEVSCVPLQQVLRHQQTAFTNFFEKRAGYPAFKKKHHRQTAEFTRSAFKYVGGQLFLAKSKVPLDVRWSRELPSDPSTVTVSRDWAGRYFVSCLCEFEPEKLQISPLMVGIDLGLTDLFTRCNGVKEPNPRHTAKYAARLALLQRRLAKKKLGSANRLKAKXENQVICVESLKVKNMIKNRKLAKSIADAGWGELVRQLDYKGDWAGRQLVKIDQWYPSSKTCSGCGHVLEKLALSTRRWTCPVCDEEHDRDTNAAKNIRAVGLTVLACGERVRPIAQVA

SEQ ID NO: 42786 - protein, 494 aa, unknown
  TnpB Polypeptide
VVVLAVELDQLNLEVGAHVPHHLLQPDQVRVAEHPVAVLRHENQVRVKDESTVPAGTYRVHVAHKPIWYSAGMPADAARKYRAYPTPEQAERLTGWGHTCRAIWNAALVQRQILWRERRWILRSARQCGELTEARAEFHWVADLPAQCAQQILRAMDQAYDNWWNPQHPADAPALRKRGAKLSVSFPGQAVKVEKLNRRWGQVRLPKLGPVRFRLSRPLGGTVRNATVSVDGLGWHVSFGIESDTPDAPANGLPGVGVDFGVKVAAYLSDEDQGRVMAPTLSAGEQGRLLALEQKKARQVTYAKRHNGGKYSRRLRRTITKIAAMKARQARRRLDFTHKLTTDLTKNHGWVAIEDLRVNSMTHTARGTVETPGTNVRQKAGLNRSILDNRPGERRRQLEYKARKFGSEIRVVPAPYTSQRCSACRAVDPKSRPGCGSEFTCTTCGHADHADRNAAVNIRNKAEGQPASQHSIGRVSDCQAPAKVSRTRAALVDA

SEQ ID NO: 42787 - protein, 478 aa, unknown
  TnpB Polypeptide
MFVSLQFKLELRKEDKEKLIKLKLPTRYIDSAIYKAKQYSTDKPVVFGGKRLFEKLCKNHLTGKAREKLKKQWRELRQGTLISIGSKSDKGNRLTRFKDLNGQLCLRITTGNREFIYAKVLREPSDSKDKWLTFMAMLLESWQTKNYFPYTVELKLRDGEVYGSVSFELPTPEVRYTKEKGVIAIDTNASPIHLAIAEVLKTGELLSYKTISLHHLLGLSQNSKDHQEWILAHQIVDLAIQKGKAIAIENLKKLKKGMRGDGKAELRKRLHQWNAKKFLQKLKRVARLKGVEVIEVNPAYTSIIGMLKYAPQLNIDKDIAGAYVIGRRALGFKEDIPENYEKLLKDEAYLEFALKRYEEREKELRELVEKESNEYKRNALKSELRSVEDAKKLLINIIQSLQSEPSSCEGANGRNPEQGETKKVSHVAWRVLKVALLFPILGRVLQRDLSPLKPVLVEGAWDRVRSRSAPLEAGGASR

SEQ ID NO: 42788 - protein, 277 aa, Burkholderia sp.
MILVYRYRVKSLNGLLNKQSRAVNYVWNFCNDTQKHALMWSKKWPTGFDLNGLTSGSSKELGIHSGTINATCLQYAQSRSQHRRPYLRYRGKRTLGWVPLKGRDLKREGDAFRFAGNTFRVFNSRPLPEGKIKDGTNFAQDARGNWFLNIVIEMPDVQARPIRSGVGIDLGLKDFATLSTGEKLPNDRFGRRAAEKLAKAQRARKHKRHIAKLHAKVANARADSQHKLALDLVRRFDYIAVGYVSAVKLARTRMAKSVYDASWSSFRNMLRYKAIAH

SEQ ID NO: 42789 - protein, 286 aa, unknown
  TnpB Polypeptide
MLKAYKYRIYPNNEQKIQIAKTFGCCRFVYNQTLAYRKEVYEKEKKTVSKTDCNNYCNRQLKKEYEWLKEVDKFALTNAIYNMDAAYQKFFKEHAGYPKFKSKHNNHKSYTTNFTNGNITVDFGCNRVKLPKLKGIKAKLHRNFIGQIKSATISQVPSGKYYVSILVETEHVELPHIKQNTGIDLGIKELCITSAGKKYENPKIIRKYEKKLVKLQRQLAHKEKRSQNYYKTKKKIALCHEKITNTRKDYLHKMSHEIISENQVIVSEDLQIKNMVKKSSFGKVYK

SEQ ID NO: 42790 - protein, 496 aa, unknown
  TnpB Polypeptide
MRAQTASFVVQTKLKLSTSVENHLEKSFRIAASAYNEALSFGLRRFKALKQNSFYQELLEKRRDIEAQKECDKALSELRKSYGLTEYGLSTHLGQQRRIPNSPYQKLNSGELQVIAAQVYKALEKVLFYKIKAQSLRFRSKYDLNVGYRNRVNTTGTRLVKSDRQGIAYRLYLHKMSTFVDIPIKSFNRHQQESLLCSEKIKYVQIVRKTIRGKCIYILQIVCQGCPPAKTTRGNETVGIDPGISTVAYATHSEVALVDLVPKNINQKEKLMKLLDRKIERSRRVNNPDCYHEDGTAKKGVKFKRPSNRQLRLQVRRQKAYRSLSEERHKLQRQLVNRIVSKARLIKIEDLSVKGLQRRSREIRMNPKTNRPFSKKRFGKSIFRAAPSTFRNALQTRAHQLGIDFEVISPKDVKPSQYNHITQTFEKKSLSTRIYDLSEDVTGVQRDLYSAFLIGHIENGHYLQEQLTQDFPVFYKLMKEFLHQPPKTGRLVWYLN

SEQ ID NO: 42791 - protein, 415 aa, Streptomyces sp.
LLVVKLVVQIRLLPTPMQAAALEATLRACNEAATWAGEVAFEKGVRRNFALREHTYSQIKTRWGLGAQAAQHVIKKTCDAYATLAANLRAGNLGRPGSKRYRKATGKPIAFRRQSAQPYDDRMLSWRIGRRRVSIWTTAGRLKDVAFTASVEQLATLARFRKGESDLVVRDGMWFLNATCEVPQAPLNTDPVDFLGVDLGIVNIATTSDGEIMAGRQMNRDRVRERALRTKLQKRKTPSAKRRLKKRRGKEARRARDINHKIAKRVVAEAERTGRGIALEDLTGIRERVRFRKPQRATHSSWSFAQLGAFIDYKARKAGVPVVYVDPAYTSRTCAECGHIDRANRVSQAWFACRSCGFVDHADRNSSRNIRARAWELWRRGAPSTAPAPLPRQRGGAGRKRRITASDARCASPLF

SEQ ID NO: 42792 - protein, 420 aa, unknown
  TnpB Polypeptide
MYGCQQDLIKTPECLPFLEYLCRTANKLINCGIYLARQRYFKCGYIPGKYELEKQLKQNQNFKFLFSQAAQQTLRGVTESFKSFKKLSEKYQKGELKNRPRLPNYRKKGGMGVITYPKQALKVKEGKVRIPLGLKVKAAFKVDAFFLPFPTNLDFKKIREIRILPRNGCFYVQWVYKLETQQIKVDKEKVLGIDHGLDNWLTCVNNAGKSFIVDGKHLKSVNQWYNKQIATIKEGRPQRFWSKKLANITEKRNRQMRDAVNKAARLVINYCLLNGIGRIVFGWNKGQKDGIDIGAKNNQKFVQVPTAKLKERIKQLCEQYGIEFIETEESYTSQASFLDDDFLPTFGAKPESWNPSGKRVKLRLYRSANGSLINADCNGAANILRKVAATLGLCLEGVSSGVLTTPARVHFWAACESPSL

SEQ ID NO: 42793 - protein, 368 aa, Megamonas sp.
MKTYCFKLYNSKRNKKLHRQINAAGLIYNHCIAIHKRYYRLFKKSLNIYALQNHLTKLKKLAKFSYLKEIGSQAVQEITQRIDRAYKLFFRNQKHNIRSAPPSFKKVRKYKSYTLKTSGWKLYDGNIIRIANQKYRYFKSRDIDGKIQTVTIKRDALGDIYLYFACKTNENEVLTRTGKSVGFDFGLKNFLIGSERNNIISPLFFKQNAKLIAKTNRNLSRKQKSSNNRQKERINLARLHKKVANMRKDFHWKTAQYLVGKYALISIENLNLKAMQKRYGRKISDLGFADFVNKLKYEAQKTGSSVVEIDKFFPSSQLCSNCSYQNKELKDLRIRQWTCPKCGKHHDRDLNAAINIKKEGERIFSLVK

SEQ ID NO: 42794 - protein, 403 aa, unknown
  TnpB Polypeptide
MPMRYRYRIEPTPTQQAMLARVFGCCRVVFNDALRVRDEAYRAGVKLSDSEIQRRVITTAKTTEARVWLCEVPSVALVQSVNDSRRAWRNFFDSTTGKRKGRTVGRPRFKSRKDHRQSFRLTRNGFSVRDNGWLFVAKVGKVRVRWSRDLPSVPTSVTIIREPDGHFYASFVVDVPAAPLPAVAREAGVDVGIARLATIATTDGQRSEVANPKHLGRKLRKLARLEREKSRRQKGSANRDKSRRMVAVAHNKVARARRDYHHRQALALVRENQVIHVEDLNIVGMVKNRRLAQAISDAGWGQFVRIIGEKAERYGRTVHQVSRRLASSKTCSACGHRLDELPLQIRRWTCPACRVVHDRDHNAAKVILAAGRAERLNACGAPVNPPTTREARGDEAGSNPTAA

SEQ ID NO: 42795 - protein, 426 aa, Oscillatoriales sp.
MAKTNKMMGVQQVLLSPDSETHALLEYLCQQSGKLYNTGIYFARQTFFKTGKLLTGKFDLAFEPSVSKSLLAQSMPSTPMQQTLMSVAESFKSFKNLRDLYTKGQLHFRPKPPGYLKGSKLFKVAYPNSGGQKPTLINGQLRFSLGLTVKRWFGVSEFFLSMPSNLDYSNIKEFTILPKNGAFYLEMSYEVEKQKHDLDINQALSIDLGTADNLVACVDTLGNSFLIDARYLKAKNQLWNKKVSTRKEGKSQGYWDNWLDRITRKRNHQMRDGINKAAKLIVDHCLKHGIGNLVIGWNEGFKINANLGNLNNQKFVQMPLGKLKSRVKQLCDLHGIRFIETEEAYTSKASFLEVDSLPKYGEKPIGWKASGNRIKRGLYRTADGFVVNADLNGAANIFRKVSGRLGISLNQLSRRSLAIVARIKLN

SEQ ID NO: 42796 - protein, 302 aa, Thermococcus sp.
LRRLGKFGKLKIQFKGRIHLKGKQGRLEIIYDDVKRKWYAHISLTVDEKLEGEEWVKVPKEPLGNLSAGIDLGVNNLMAVYVENGESFLVNGRSLKSIDFYWRGKIADYQSKLNKSGAKTSRKLKRMHEKAKLQAKHYINTAVRQTVKRLYELGVSRIVVGYPKGIARNSGKGKRRNFLLSHVWRFNTVIKRLTEVAEEYGISVVVVGEAFTSQTCPLCGQRHSDARFVRGLFKCRREGVVMNADLVGAFNILRKVKAITPSLEGLKAFKVRGNWPKTGPEGSKTQFVLGLNETPQTSLPLG

SEQ ID NO: 42797 - protein, 434 aa, Thermococcus sp.
MKRSVTVKLQPSKAQEKILFELAYASAVIWNKLNYRRLKQFREFGKIDFNGTEKEAYHEFKNWIGGSTVQQLARKNAGSWRSFFSLNKKKKKEELPEWFKPRPPKFVREENGRKIFAIPLRNDQYRIKGNVIELRRLGKFGILKIQFKGRIYLKGKQGRLEITYDPVKRKWYAHISFSKVEEKLEGEEWVALPRTPKGSLSAGIDLGVNNLMTVYVENGESFLVNGRPLKSIAFYWQRKIADYQSKLNKSGAKTSRKLKRMHEKAKLRAKHYINTAVRGAVRRLYDLGVSKIVVGYPKGIARNSEKGKKQNFILSHVWRFNYVIKRLKEVAEEYGIVVEVVDEAFTSKTCPLCGQRHSDGRIFRGLFKCHREGVVMNADLVGAFNILRKVKAITPSLPALAGRGNWLKTGPEGFEEPFSRVALMRTPQTSPPLG

SEQ ID NO: 42798 - protein, 271 aa, unknown
  TnpB Polypeptide
LNIAYRFRIYPTEEQKILLGKTFGCCRFLYNQMLNDKILEYKKTKKLLKNTPAMYKKEYSFLKEVDSLALANVQLHLEKAYKNFFRDPKVGFPRFKSKHHSKNSYTTNVVNGNILVEDNRIRLPKLKWISMKKHREPAENCCLKSVTVSMEPSGKYFASLLYEGYSCENQAADEDYSNAKILGIDYAMQGMAVFSEEIELEKAGFFRRNEKRLAREQRKLSRCVKESRNYVRQKKKVARCHEKIRNQRKDYLHKTEPQDHRPVRYSRGRRY

SEQ ID NO: 42799 - protein, 485 aa, Moorea sp.
MPKKVDTAKKRSTQIVPVIGMSELVQAELLSTMKKLGIVRSESYNKLGSISHWGLDWKKAYPEVRSFRTPDTLGLPAKLMEWTVSDVAKAITAQQAACTDAVIKKIYKKFPGRDGQRRRKELCKQLKTLAFIDDPLLHRLVRKEFQRGHSWVKNQIVYQQVGYKCKRLSRNTYQLELAGLRRGKRNKITVRSNRKIKGQIRLVYKQLLGKFEIHFLVDYGTVEIPANRRAIGVDKGYTEAFYDSDGQAHGKNLGKVATNKSDRICAKNRNRGKLWALHRKLEKIDPAKSARILKNNLSRKTENRRYRKNQSEITAIIGAASKSLFNGESLKVFAENLTQPIRNKRQSKAMSRKLNSWMKGVMRESLQKWANWTGSVVTEVQPSYTSQVDSVTGTLLGKRSGDNFTRFNGVVLQADHNAAKNVLSRGTDKDITRYMSKTEVQAVLLRRTARFLEGMGLSLLDAVELGWLDCKHSKTRAFKQLLNGI

SEQ ID NO: 42800 - protein, 459 aa, Moorea sp.
LYKTIPVRASFTDEEKAFWVFQCQQANSLINCATYYVRQNHYNRLEQQENSFTTYWRGDEMFYGWKIYKCRTKYAALCKNLKENPHYKAMAAQSAQQTLKTVAESVRSYNQLVGQYYKGNVDRPRLLRYRQKGGFAAVTFPRQPLKYRDGLFYPPISKETKPELITEIALEPPDFIDPDWVKEVTVRPYLGELWIDWVIDDGKQPVDHNPHLDYCQAWSFDHGGNNWLTGVSTYGKSLIIDGRKLKSLNQGYCRLIAKYKQGMPELYWDGNLDRIQRKRNNQMRDAINKAARFIINRCLIDRIGNIIIGWNEGQKSRSNMGKRGNQNFVVIPTKRLIERLKQLCLEYGIKLTITEESYTSKASFLDDDPLPKHGEKPEGWKPSGCRVRRGLYKTYKGYLVNADCNGAANIAKKVATQLKIDLAKVSRGVLTLPHRYDIFNSLKKLYRTRCEEARFQPAS

SEQ ID NO: 42801 - protein, 386 aa, Caryophanon sp.
MQHKAYKFRIYPTKEQEILIAKTIGCSRFVFNHFLAKWDNVYKEAGKGLSYNTCSALLTELKQELIWLKEVDSISLQSSLRNLADAYDRFFKKQNDKPRFKSKKNRVQSYTTKIQGKNQQPDHCIEGNRIKIPKLGFVRFAKSKEITGRILSITVRRNPSGKYFISVLAETVVEALPKTGSAIGIDVGLKDFAILSDGTTHENPKFFRSLEEKLAKAQRILSRRKEAAKQRNCPLHEARNYQKQRIKVARLHEKIANARTDYLHKISTDIVKNHDIIGIEDLQVKNMLKNRKLAKAISEVSWSQFRIMLEYKAAWYGKQVVPVGKTFASSQLCSNCGYQNKDVKNLALREWTCPSCYTHHNRDFNASMNIRNEAMRLLTVGTTGLA

SEQ ID NO: 42802 - protein, 266 aa, unknown
  TnpB Polypeptide
VRSFTLTTNKLSICIARDAPSIQCASTVGVDRNLRNLTVGKTSRPIAMTYRRLRIAKNTVRTLASFRRDDTRIRTAIASKYGQRRTAARTGHLLHTATKTIVTVAVQRREAIVLEDIRGIRCLYRKGNGQTRKYRGRMNGWSFSEAQRQIECKARWVGLPVVRLSRRETRGSSVTCPRCGERLHSDKRLGRKLWCGKCRVVMDRDRVAAVNLARRGRVRFARSRPLIEAQGGAVEAVKGNPTPTVIPGVDAPKLTQPTTSQQNSAD

SEQ ID NO: 42803 - protein, 485 aa, unknown
  TnpB Polypeptide
LPKREKEASWANGRYFVSIGTIGILRPGTTIRIYYAADCLRSKMLSVISTVSKKLKSRLKKCFCTGWKMRGLQVKIKKAYKIELDPNKKQCKYFYQHCAAVCKVWNFYLGLRIEAYEKDKKTLWAMGKGESQKITQFKKENPWLKEVASSPLNQCLRDQDQAIKHFFQRVKLIIQHKLNPKEAGHPRFKSIRRNRNRGFRFLGREIKIDQNKIYFPRIGWIKLKENDYFNHEAEIKNATVSFTAGRWFVALGVEEEIENKVKCKDAEKNILAVHFGIRNKIICSNGMIVDKLLPYHRAERRLARLQHRKDKPPPGWSNGKNKAYLGSKNKKKLAAKIAGLHYRIANIRKDATHKATTEIIYLNPDVIILEDWDNKGMMKDKRFAKIIADTSFYEPRRQLEYKAEWAGIQVIHLERQYKSSKTCSICGFVDNTFDVLKQIFKCPQCNHIEDRDQNAVRNVLQEGRKLYEQLQLEKVDKPTDAQSES

SEQ ID NO: 42804 - protein, 268 aa, Shigella sp.
MRYRNSRQVTGVVKNVTVSQSCGKWYISIQAESEVSTPVHPSASMVGLDAGVAKLASLSDGTVFEPVNSFQKNQKTLARLQRQLSRKVKFSNNWQKQKRKIQRLHSCIANIRRDYLHKVTTAVSKNHAMIVIEDLKVSNMSKSAAGTVSQPGRNVRAKSGLNRSILDQGWYEMRRQLEYKQLWRGGQVLAVPPAYTSQRCACCGHTAKENRLSQSKFRCQVCGYTANADVNGARNILAAGHAVLACGEMVQSGRSLKQEPTEMIQATA

SEQ ID NO: 42805 - protein, 364 aa, Methyloprofundus sp.
VIKTLSVRVRDKHAKRLNQMAFEVNQVWNAVNAFTSDMTAIPVPGVGYVYCRWSAFDLQKQFKSIRKARDLNATHSTTVQEVIAEHAKARKQHKRSKLRWRVSSGSKRSLGWVPFKAGSAKWKNGQVYFNGHYFKVWDSYGLSQYEFRAGEFSQDARGRWYLNVAVKVDEKPRYHPDGVKAVGIDLGLKDVATCSNGEKLQAKRFYRELEKKLAVAQRANNKRQVKTIHAKIKNRRKDFLHKFSTKLTKDNGAIFVGDVSSQKLVKTKMAKSVLDAGWGMLKTQLQYKAIAQGVWFEVIDERYTTQVCSCCGSISDNSPKGRTGLGIREWVCVECGTHHDRDINSAKNILALGHKRLAGGVPCL

SEQ ID NO: 42806 - protein, 410 aa, Methyloprofundus sp.
MKQIILKAFKFRLNPNSDQAQKMVEFAGANRFVWNKALALNLSRLENKQPMLWYGELAFWLKLWKQSEEYGFLKSVHSQPLQQTLKNLERAFKDGFDKKQPLKRIPKFKKKGLSDSFRYPQGFKLEQASNKVFLPKIGWVKYRNSRQVIGDVKNMTISRKGKYWYVSIQTEYEAAILHHQSTSMVGIDLGVKRFLTLSDGSYIEPLNSFKKWEKKLALAQRKLARKAKFSANWKKQKQIITRLHERIANARLDFLHKSSTEISKNHAMIVVEDLKVRNMSKSAKGDITRSGRNVKAKSALNKSILDQGWGMFVQMLEYKQHWSGGDVLRVNPQYTSQTCPSCHHVSRDNRKSQSAFACTECGFKANADLVGALNVLERGHRLLACGEKSLDFLTKQEPVGSSNTNLLLTA

SEQ ID NO: 42807 - protein, 446 aa, unknown
  TnpB Polypeptide
MVVKARRTVRIPLELSVDAIDRLHATHSPYQTCQNRTVEYCWPDHSKRPDDLRTSKGDAEAALYHPLREHIDGLHANLVQKAIKDAVSAVSACQSNWKAGRRVSKPSFEDGRDNEWSMRYDKRAATYSRYKVSLATIDGRVEGRYVLPAELEGTPYAKYVLDRRWSFSTSTLVYDGERFWLHVSMQRTYTTTPTPPTPTDVDEGDLEAQEDAIRVLGVDRNVEGGLAVTSTGGFYGNADALNDYRARQEALRGELQRAGTHAAHERLRERRGREWRHYDDLVHRVANAVVEDALKVEATHVVYEDLTDIRKRISNLPKFQQWLFSTLSEYVEYKLEPYGVEVVTVDPAYTSQGCSRTDCDCVSKRNRDGKDFECVECGYAVDADYNAARNIGLQYLEKQHPASHTRSSGWATSQLALMSGTLTPAGVFVGRDWESTGKPTTTVVGH

SEQ ID NO: 42808 - protein, 268 aa, Microcoleaceae sp.
MLVFEFKAYGKSSQFTAVDEAIRTAQFVRNSCLRYWMDNQKVDKYDLNKYCAVLAGDFPFADELNSQARQASAERAWSAISRFYDNCKKGIPGKKGYPQFQKDCRSVEYKSTGWKLAEDRKSIKFTDKKGIGKLKLKGTRDLHFYSFSQIKRVRLVKRASGVYVQFCIDVHRKEQTESSGNTIGLDVGLKEYYTDSNGVMVENPRFLRKGEKVLKRCQRRVSRKVKGSKNRGKARQILGKRHLKISRKRKDHAIKLARCVVQSNDLIA

SEQ ID NO: 42809 - protein, 384 aa, unknown
  TnpB Polypeptide
MKLTAQVKLQPTPDQRVLLDRTLRAANAACTFASRVAWESKTFRQFALHKRVYREIRTRFHLSAQLAIRVIAKVADAYKAGRTGERTFRPRGSFPYDVRILSWKVAERTVSIWTLGGRQVIPFVCGERQQAWLDSQQGETDLVSRDGAFYLLATCVVAEVPAIRPTDVLGVDLGIRNLAVDSDGTRYSGAHILSLRHRHRRLRTKLQSQGTRAAKRRLRLRRRKERRFQADVNHCISKQLVASAQGTRRAIALEDLQGIRQRVSVRRAQRATLHSWAFGQLRAFVDYKARLAGVPVVLVDPRYTSQRCPACGYTARANRPSQSRFCCVACGFAGLADHLAAENIRRAAVNQPDVARDDVQAPIPSKRRTATERSSKLPAGAGSS

SEQ ID NO: 42810 - protein, 256 aa, Halovenus sp.
VSEPLLEGTSEELFSVVSPPVGGPDVFVPLGESQLREHLEATNDPEPRRLAFKAVDSTEQMIGYVELNTIDRRNLSASVSRVIVSPDERDRLEREQRNLSRKEHRSNNWEKQRQTVAERYQKIKRKRRDFLHKLSAYYAREYDLVAVEDLNVKGMLESPRNSRNRASAAWGTFLRMLEYKSEREGTHFVAVDPRGTTKECAGCGVETDKPLWVREHSCPSCGFEADRDLNAAWNVLSRGLSELGVVHSEGTSSESP

SEQ ID NO: 42811 - protein, 361 aa, unknown
  TnpB Polypeptide
MNVLRTVTFKLRLVDQDRVALLDTMRAYTKAFNESAKWGFENKSWNKVDNHHATYKLVRQSTDLPSSLVQGARDCACEALKAVKCKTLPERKPLASMRYNQRVATVNLIHGIATIASTKGRVKATFFVPLAYRDYLGWKIKSSTISYDRRADTFYLHVSLEHNDPDPTTDLKVLGIDRGIVNIAVCSDNTFYNSKKVKNTRAKYAHLRKELQSKGTKSAKRKLKRLAGKERRFVTDVNHCISKQIANSDFTVFALEDLSKIRVQKRRGKQFNRKLNNWSSYQLEQFLRYKAENLGKHTLLVDARYTSQKCSNCGHVYKGNREGSAFRCRQCGFQLHADLNASRNIAQAGISCLSRLPCQPA

SEQ ID NO: 42812 - protein, 406 aa, Nocardia sp.
VRRAFRFRCYPTQEQAAELTRTFGCVRKAYNLALAARTEAWFQRGERVSYNTTAAMLTTWKQSADLAFLNEVSSVPLQQALRHLQSAFVAFWEKRARYPRFKSRKKSRASAEYTRNAFRFRDGELRLAKMTEPLRVVWSRSLPDGVEPSTVTITRDSAGRWFVSLQCEDPRIQPLPHIDAAVGIDAGLDSLLTLSTGEKVTNPKHERRDRVRLAKAQRLLNRKQKNSKNREKARIKVGRVHARIADRRRNTLHELSTRLVRENQTLVIEDLAVRNMVKNHRLSHAISDAAWREFRTMLEYKAAWYGRKLIVVDRWLPSSKLCSACGSLASAMPPQVRSWACGSCGAVHDRDVNAAKNILAAGLAVSACGAGVRPKRSTAGGQPAAKQENRSARIEVPAVSGGNETN

SEQ ID NO: 42813 - protein, 202 aa, Leptolyngbyaceae sp.
VIQLFGCQQVLIKSDRETQAILEYLCSESNDLYNCAVCYARQVWFKTGKIVSGFDLTAEMKTNRHFKAGYASSMQQTCLNVGEAFKSFKQLLAKSRKGELDQKPLAPKYRKSGGLFTVTYPKRWLKLVNNQIRFPLGNQVKAWFGISEFFLPMPSNLDWKPIREIRILPRNGAFYAEFVYPMQTESCPLDPSKALGLDPRSE

SEQ ID NO: 42814 - protein, 409 aa, unknown
  TnpB Polypeptide
VAHRYRLYPTSEQAAFMLARHCADARYVWNLAVEQFNWGRAGRSAPGPAARQKQLAQARQAFEWLAAGSSSVQQQALRDFDRAAAAYFAGTHRRPTWRRKFFDEGFCVRDSRLEPINGKWAQLFVPKLGLVKLRLSRPLPPGKLGMARITCKAGRWHVAFPAPQPSVAATQDRDGRAVGIDRGVKTTLALSDGTMLRAPIMRSGEQKKLARLQRQLARCRTGSIRRGKVKARIARLHAEVADRRRDWVEKTTTRIAATYGVVAVEKLATRNMVWAPKPKPDPDNEGHYLPNGKAAKAGLNKGIYANCWGVIAQRLDHKMSASGTALIVVPAAYSSLQCRNCGHSVKENRKSQAEFQCMRCGHQDHADLQAATTILARATAPAHTSGPEATPAPAGVLAQARRPDNAQAA

SEQ ID NO: 42815 - protein, 416 aa, Lactobacillus sp.
MKSMAKMKYHYGLKMRCYPSDQQKQLIKINSDASRFIYNEMVAINKELMQLRRVKLPIDIVQDRIKQLTMRQNAKQMSNHYQFLEDERIDSLTKANAIQNYRKAWNAFRKVHATGVPKFHRKSYHWRYQTNCQYPGQKTALLTNGTVCFLDNSHVKVPKIGLLRVAGSQARLLKRICETRIGTVTLTKDSADRFFLSMQLASDESFVKVSKATHGHVGIDLNTDNFLTDSEGNIVPNPRYYRTIKGKLAKEQRILSRRQQRAKKEHRSLRDSKNYQKQRLLVAKLHAKVMNQRHNFLQQISTALIKNHDLVVAEELRSKNLLKNRALALSISDVGWRTFLGMLAYKAKLYGRQFITINPRNTTQTCRDCGFVMGTNGTDKLTLDDRNWTCPNCGIHHIRDWNAAKNILDKGIAKLA

SEQ ID NO: 42816 - protein, 411 aa, unknown
  TnpB Polypeptide
MRGSIRQLAWRIPERAYRRALKAEAEVVESNLNDLLWDLLLYRHAMQMVVDALWDLDKVPSKAQTHQMFYNVLRGYGFRSHVARNIYEYALTLVKAGRESNGGKPTLKRLSARLDYQDAGVDLDKGVVRIILRNKWYTLRLKHGREYIERFRGLKWKEVHVKYVSGKIYVSIVFEFRYEPYVPRGIIALDINLRTVTAYDGSEVRRFRTRFVDALSRKKRAEELQKKYAKRWRYNEKILNRIRALHRKARNIVVDWCWKLAKQVALKALKKGCAIALENLEGLRKRVNSEDDATAWKFTMFAYRRLQHSIISKAIEYGVPIIIVDPRNTSSTCPRCGEKLVYIHRLAVCNRCGFKADRDSVGAMNIWLRALQAYAGVPGSPLRAPAVKNETRQSGGTKHEGMKKVIRAVHR

SEQ ID NO: 42817 - protein, 419 aa, unknown
  TnpB Polypeptide
MMTRLKAFKFRFYPTADQRQQLAIEFGNAWFVWNRGLDWRSKAWEERQERHNYVSLGRQVTEWKRGEFPWLADSAVCGLTQVLIDQDQAFKNFFEKRGRYPRFKSRYDRQAVRYQLDQRQIERTWQAGEVLKLPKLGALNMRWSQVPAGVPKRATVSKTPDGRYFVSFACEVALQPLPLTGKAVGLDVGIKEVVVSWDGERATKSGNPRHLKSQLRHLKRQQRRLSRMQKGSQRRRKQRVKVAKIHAHIAALRADFLHKTTTALVKSADVIVLEDLHVKGMVKNHHLVGVIADVDMGELRRQIEYKADWNGRTVVVVDRWFPSSKTCSDCGSYQQQMPLRIREWMCPDCGTRHNILKFSTAGEAGRQARGASQNLSGHVSLTYDEARTEPECHRSRPSGTGRVDERRGFQKGSYEWVRR

SEQ ID NO: 42818 - protein, 396 aa, Sulfobacillus sp.
MLLAKRIRINVSRPDANTLDFMQAKCRALYNWHLSQLKAGAKWSLYEAKKTLQQSRAVDPEINAVYGKLLQEVFFRLDEAMRGFFRRVKAGEAPGFPRYHPRQKFFTLKYPGMYLRVEGPTLILPTGGRGKHKRFPDVYAKLTETPPMPFREVAVTKDAEGHYYATFLSDAGESRPQADDGSAIAYDLGMKTLATGYSTTGRFVHIGGFTTYRWYNKQLDHLRSLRARCHKGSRRHRYLTGVYHRVSEKKRRKQRDSLHKAWAFLTRQAESAIVLGDLSQQQMVRKSRKCTKRTKGLHRSVQNEWGLYQFVQMVHYKAQRTGKKVYVMNERYTSKECSGCGYRQDMPLWKRTYTCPQCGLVMDRDENSARNILARFLARLGPYPDRDDVLSERSGI

SEQ ID NO: 42819 - protein, 297 aa, unknown
  TnpB Polypeptide
LPIKRPGSSARFNQRTFKAFLDSGSLSLTTVEGRLKVPLRIPEYFRKYAGGKVNALRVRDVDHNLMADLVVELPDVPIKEVANPRVLGIDRGINNIAVTSDGGFFNSKHLRNVRGRYAYLRRELQSAGTRSAKRHLKCLSGRERRFQADVNHRIAKEIVETDFDVLALEDLSIRKDKRLGKEFNRKLGRWAFAQFEAFLRYKSEECGKLVISVPPEYTSQMCSRCGDLGIRKGHSFRCPVCGYSLNADLNAARNIASLGNALVGRPTVNGPIVATGDAEHRTSVEVSYKPPISMGGS

SEQ ID NO: 42820 - protein, 256 aa, Frankia sp.
VQACQDARRAFRNWFDSLSGKRKGRKVGHPRFRSRKDNRQSIRLTRNGFGVTPRGVRVAKVGVLRLAWSRALPSVPSSATVIREVDGRYYVSFVVDVDDVPYPAVDAEVGIDLGLDRLATLSTGEIVANPRHLRSRQRRLARAQRALARKQKASHGGPPGGGPAPEGAGNPPGSSSQAGCSAGPRQPSSLRRGSGGGRAGPDEAGPVGARRGLGDAGRSDRTESGPARPGGRPGRPVLPVVAALLGLRAQGPGRSH

SEQ ID NO: 42821 - protein, 440 aa, unknown
  TnpB Polypeptide
MSDFFERRNVMLQMKNMSFVMGIKLRIYPTNEQKSIIAANAGAARFVYNRLVARNKELFLLRKTGCFVEPIVNRINYLESLGESSASFKESCPFLTDSRIDSLAIANAVQNYHKAWKQFKTVPGTSIPTFHKKGYAASYQTNAQYKKDAVLISDGNVYLTDKRHIKLPKLGSMRFKGSNRIYKIFERSDTRIGTITVSKDECNRYFVSLQIGSTEPFHKTSKTEPVSKDKIGSPGKLNVIGIDLNLDNFYTDSNGVVVDNPRYRKKVQTRLAREQRKLSKRAERAKKDGRSLKDSKNYQNQRIKVAKLHKKAAAQMKDFQNRLSKMLVESQDIICVEDLKVKNMIKNRKLARAIADASWSQFINMLVYKGRIYGTTVVKVPPQNTTQTCSSCGYILTGEEKLTLKGREWICPCCGTKHNRDHNSAINVKIKGLEFLFPAA

SEQ ID NO: 42822 - protein, 421 aa, unknown
  TnpB Polypeptide
MNTCADGKMNRTNLVLLMPTCEQDQQLRSLAETSARLWNLANYERRQALFKSQRVPTYAQQCKRLKDADTFKQLGTCKAQALLMKLREAWGSYHALKRLKRRGQLPPHIRRVRPPRYMKDRQTRRLVAESIYVRNDGYKQQEDVLTLSKDLRVPFRAGDLWVGKQGRLELHYDRLRGKWYGHIPVRVKWPRKGLPHQSTRKRASIDLGICNLTTCVVEGGDKAYVYSGRAVLSDWRYWTKQIASYESTLKKTNQRDSSKQLSRLYRTRRRRLNHAVKAMLRDLYDRLETHGVTDLIVGDLKHIRDNANHGKVGNQKLHNFWPFAQIRQRIHELGEEYSIHIRFKSERGTSKRCSVCGKKHKNGRVKRGLYKCPDTNVRLNADVNGANNLLEPKVAADSGSRPLALPMLLKWNSQEWEVSAA

SEQ ID NO: 42823 - protein, 346 aa, Okeania sp.
MYCCQQVLVGKNPELIPILTFLCEQSHRLTNIGIYYGRQLYFEARIGIGKYDLERIYKHNYHYKVLYSQAAQQILRTVAELFHSYYGLTKAFIAGKIPDKPRIPNYRKKGGLTTVSYPKQALKLKGNQIRVPLGNTCKRWFGIDSFLIPMPSIRAFSSIKELRILPINRCFYWEFVYKKEVVIKPQLNQELNQENLLGIDHGVNNWLTCVSNVNTSLIVDGKQIKSMNCWYNKQISTIKENQPTGCWLNRLAAITEKLNRQIRDGVNKAARIVINHCLKNSIGTIVFGWNKDRKNQIELGKKNNSEFVPIPTARLKERIAQLCDEYGILFIETPRKLYKCRFIFRW

SEQ ID NO: 42824 - protein, 368 aa, unknown
  TnpB Polypeptide
LSFNSTSKTFLHENYYEKAKELFDLNTALIQTARDKAIEILKSFEENKKEDSVLRLKKISIRFDKKCYKFSKMTNVLTPYWLTLSLNKRERISLPIVFGERQRQRIEEALRGEWQFTTIEMVKRNGVWYAHFILKKAVEVPDKPETVIAIDRGEHNLAVAVAMSVNNPSKPMKGQFWSGEEIKRIRGLYNHIRRKLQRKKLLKKVKELRERERRKLEQQLHIIANQIVAYANQFPKPVIVMEDLTSIRNSFRKSKELNRRFHSLPFRKLQKIIEYKALLEGIDVVYLEKSLVRNTSKTCHRCGHVARVKGRIFKCPKCGMKYDRDLNACINIARRIMSSAGWESCEPPKPADEAGGAKPQLNAGNLAL

SEQ ID NO: 42825 - protein, 409 aa, unknown
  TnpB Polypeptide
VRTAYKCRAYPDPVQQQVLTRTFGCVRVVWNRTLAARQARWHLEHSGTSYAESDQALTAMKKDPALAFLNEVSCVPLQQALRHQHQAFAAFFARRARYPRFKSRRSRQSAHYTRRAFTLRGGQLRLARTSAPLRYTWSWPGVDVAALDPAMVIISREPDGRWYVTFTLDAAAPQPLPQTGHAIGIDLGVTRFAVTSDGGTIANPRHLDRQARNLARYQRRLARRQAGSANRVRAAAKVARAHRKVRHARADFLHRASTRLVRAADLIVIEDLNVSGMVRNRHLARAISDCGWGEFRRQLAYKCQRYGRELVVIDRWYPSSKTCSACGYRRAELSLSVRVWSCPSCGARHDRDINAAKNILAAGRAVARGSPGDACGAEVRHSGSSRVRSAVNQEPRPARTGIPALQGEE

SEQ ID NO: 42826 - protein, 497 aa, unknown
  TnpB Polypeptide
MVTIKLPYTSSKSNKEIILKLMKQQSNCMHHVFNKIKDNGNSLEQKDLTVIVNSMNNIDDIDSWFKQSAIFTASAKYGIFKENVKQIENYNKENPGNKKRVPNSFIFGGKKLFIDRILKKIKVKNFKLMRLDPLVSVGEASKGGNRKYLFDVVENNLIMFYPDRHTEIEIRLPKLRKNYKDDLYRIQNLTENKKIPIQVGVDLSYIYISYDENSLSKNVCCSIDKRFMAIDMNPNEIGYSIVDWVDDNNFRIVATGIFSIKSINDKQLKLKVASSDPKNICLSNKREHEIFEVSKELVKIAQHYRVSAFGLENLDLYSKDYTKGKKRNRLIDNFWAYSRFSKNLIKRLTLNNLRYYKVPAAYSSFVGNLIHINYPDPVAASIEINRRVYLSFLKDASVKPRTKFHGLKRIKIKFRSMKIAIFPKFKEVKNALIHTLEVMNKRPLKFLADSDSWKELYSKVKNSRLRYRVSLDLFKFEVFSLGNRKSLVQSLGCFSII

SEQ ID NO: 42827 - protein, 217 aa, Crocosphaera sp.
MFIIEYKLRGKQRQYQAIDEAIKTVQFVRNKCLRYWEDNKGVGQKDVYKYVTQLRTEYPFVKALNSTACQQACERTWTAILKFYNNCKNNIPGKKGYPKYSKRTRSVEFKKSGWKLNRDTKRITFTDGKNIGELKLIGSRDLFYFQEWQIQRVRIVRRADGYFVQLILKLDVRDITPQLEPTKKCVGLDMGLRYLYADSNNNVVEPPKYYRKARKTY

SEQ ID NO: 42828 - protein, 480 aa, unknown
  TnpB Polypeptide
MTFIHAKVEAVVKKKAKKQSKRKKPQKESNIRTDVWQLVMTQEQRRLAVLTVAEYRHFLKPLVLISYWNWGNLSGLNSNERVNALEKLVHQTGDNPNPKYYWYFQKSIGRYPSFRKFPSYLRRAAIQEALGIVSSFVTRWDAWKRGERKHRYDKSPRLTVMCNSYPALYKGQQIKYHSNFNAVELKIWNGADWVWMQGVSIKKHGKSRHTREGAKLLSPALVANKRSVHLSMAVEVNPQSLPDSDYVCAIDIGINTTATCSIVGSYGTVKARKFLNPARDIDRRDQRKQRIATKSKLTRKITNQDLPKGFCQGLYRKSKNINKHIAQTVSRQIVEFAQKHQVNVIVFEDLSNWKAKGGKHGSLQKQRFHQWCKDKLVELTIQKFSELGAKVCKVNAKYTSAYAFDGSGKIKRSNKKYSQAVFPNGKRYNADLSASYNIGARYWYAVLTNSKFTRVWAGRSSSQTLRTPVTLSTLWELSKA

SEQ ID NO: 42829 - protein, 542 aa, Persephonella sp.
MITLQCKLTFENEKDKQKLLELMRQFSSCNRYAYNRLLEGHKRKELKKHLQKVFNLNSRYCDDAIFKAQSLINSCNERGQNPKKVTFGGRKIFEKLTKKHINGKQRKKLKQKWEERRKGCLYSRGDKSKKGNLNTRILIEKEGLKLRINTGERDWITANVRRTVNRPNDKWTGFIARLLEAEKTGEYFPYSVEIRLINSQIYAFISFEEEIPEHPIITKEEGITGIDINARPFHLALATIKPDGNLQAVNRITLHNLINKTKNQREYLSWQIAHQIVETAIIQNKAIAIEKLGNIPKGNKGDGSKKLRKIKQRWIYRGILEKIKTIAKREGIEVIEVNPAYTSIIGMLKYASQYNLDKDTAGAFVTARRALGFKEELPKHYKNLISDESFIQYATNKIEEEKQKTREKLNTEKNQYKKKPLKKKLRELNKHIKILQNLNSEPQTQQPVNQRKEQVRGWQYASYKLWQVVKTALTIPVLGKSLSRDLSPLKSIMISGDWDRVVKRLAPVAWDRGYGVDKYRQLGTYPHLKKAEHKYPSPKCMS

SEQ ID NO: 42830 - protein, 388 aa, Prochloron sp.
MYGCQQNLIKTTECLPFLEYLCRTANKLINCGIYLARQWYFKCGYIIGKYELEKQLKQNQNFKFLFSQAAQQTLRGVAESFKSFKELSKKYKKGELENRPRLPNYRKKGGMGVIAYPKQALKLKEGKVRIPLGLKVKAAFKVDAFFLPFPTNLDFNSIGEIRILPRNGCFYVEWVYQLETHQVEVDKKKVLGIDHGLDNWLTCVSNTGKSFIVDGKHLKSVNQWYNKHFGSAQCRQIARIKEGRPQGFWSKKLASITEKRNRKMRDAVNKAARLVINYCLENGIGRVIFGWNKGQKDGIDIGAKNNQKFVQVPAAKLKERIKQLCEQYGIQFIETEESYTSKASFLDDDFLPTFGAKPSPPVSPPLGGTEGGEESESNSDCIAPLMAV

SEQ ID NO: 42831 - protein, 378 aa, unknown
  TnpB Polypeptide
MQLSETIKLYMTKEQKSLVITTMNQYINTVNSLVSVATNGTSISKYTTADVNASLPSALTNQCIRDAKSIVNKYNKYCRKVSAKNKKLAKQKSNITIKEPTVPVLKRPCCYVNNQNFKIKNNHIEFPVLINDKSKRISIRTSMTDNQKLIFANAKLGTMRIVYKGNKIVAQIIYEVAEPEYIDDGNVMGIDLGIKCPAVSYTSDGNVKFYGNGRKNKYMRRHYKYLRKKLGKAKKSDAIKRISNKEQRIMKDIDHKISHDIVKTAVSHDVKVIKLERLTNIRSTTRTSRKNNHSLHIWSFYRLAQFIEYKAKLAGIKVEYVNPAYTSQKCPVCGNVHHANDRNYTCSCGFHIHRDLLGAMNICNSTEYVGDSNIRHTA

SEQ ID NO: 42832 - protein, 370 aa, Paenibacillus sp.
MNLTLTAKLKIKPTSLQAMLLHKTMAAYRKGCNMVSKLIFERTALNARSLHKLTNTYLRQQFGLRSQMAQSVLKTVLARYKTNESSGHDRTYVQFKRPEYDLVWNRDYSLAAGVFSLNTLEGRVKVAFESKGMEHFFDGSWRFGTAKLVHKHSKWFLHIPMTKEIDEIEDKNLDQVIGIDMGVNFVATAYDSAGKTTFFSGRRIKDKRARYKQLRKALQMRQTPSARRRLKKIGQRENRWMTDVNHQVSKALISRYGAKTLFVLEDLQGVRKWAERVYRNSRYVTVSWAYYQLRQMITYKAVMAGSKTIAVNPKYTSQTCPKCNHIAKENRNKKKHLFCCRACGYRSNDDRIASMNLWQSGNKYIAKDAT

SEQ ID NO: 42833 - protein, 556 aa, Bradyrhizobium sp.
MGSRSGRTPERPLRATWSRPTASPACRRAARIAAAIHCRAVRPRTRGPSSCPALRQQDLGELLHAKADGVIGVVQVPPSDGALLDVIGGGCADRQRHADRRPRQRPYQHARELPGCRFDSSLSVGAAQDNFHAAAQGLPLQDLPRRRSGGALPADDRLLPAGLQSVPGAEERVSPSPEEPLEVRPDQGADCAQGGVRLPVRGPHHPLQQAVYDVHAAFDNYFAGLKRRRELAIRGIKTDPDDFPKWPTFHISAAARRASAIPTPSRSRSSPATSSCRGRLGPDRDAPIDRRQDQERHRVDSRRQMVRVGANGAGDGHSGQPRVPRSGSTSEAPSPSFSPTGRCSAFPARRRPSAGGWRTPTGRRRKKGSKNREKAKLRLARLQAKAARRRRDAAHKATTTIAKNHGMVVIEDLKVKQMTKTGRGTAEAPGTLVMKRANENRALLEIAPRTIRTMLEYKCQWYGARLIVVDPAHTSETCSACGVVDAEARITRARFVGNARGGDFDADENAARNILAKGISSTGGLPGMAWGSSQTTGRKQEDDARKGRNSALQGRE

SEQ ID NO: 42834 - protein, 426 aa, Bradyrhizobium sp.
MLLRKAYRYRIYPDAAQEKLFGRTIGCCRLVYNLCLEQKNEYLRRRKSLSKFDQIKELTALKEEFDFLYEMPHHPLQQAVYDVHAAFDNYFAGLKRRRELAMRGIKANPEDFPKWPTFHKRGRKESFRYPDPKQIKIEPERIFLPKAGWVRIAMHRPIAGKIKNVTVSAIAGEWFVSAQTDLESEIPVNRGPAAGIDLGSAQPIVLSDGTVFGIPRAAPTERRKLEDAHRTVHRRKKGSKNREKAKLRLARLQAKAARRRRDAAHKATTTIAKNHGVVVIEDLKVKQLTKRGRGTAEDPGTLVKKRANENRALLEIAPRTIRTMLEYKCRWYGSTLVVVDPAHTSETCSACGVVDPESRITRARYVCGACGGDFDPDVNAARNILIKGTSATGGLPGMACGSSQTIGRKQEEDAREGGSSALQGRE

SEQ ID NO: 42835 - protein, 273 aa, Bradyrhizobium sp.
MHRPIDGKIKNVTVSTLADEWFVSAQTELETVIPPNAGPAVGIDLGSAQPIVLSDGAVFGIPRATPTERRRLENAHRTVHRRKKGSKNREKAKLSLARLQAKAARRRRDAAHKATTTIAKNHSVVVIEDLKVKQMTKTGRGTAEAPGTLVQKKANENRALLEIAPRTIRTMLEYKCRWYGSTLVVVDPAHTSETCSACGVVDAEARITRARYVCNACGGDFDADENAARNILVKGISSTGGLPGMACESSQTIGRKQEDDAREGGSSALQGRE

SEQ ID NO: 42836 - protein, 400 aa, Thermoprotei sp.
MPEGVYRRALKAKVEVIEGGVNDLLWDLAIHRYVLQRVIDALWELNKLPKRGQVHQLFYLMLRGYGFRAHIARNIYRTALALVKSAKKNGGRKPTIKKMSARVDYQDARVDLDNGVIKVIFRNKWYSLKLIHRREYIERFKYLRWKEIHVKYCNGVLYMSIIFEVKYAPYASRNVLALDINLKQIVAYEGASVRRYRTRFIDALSKKARAEELQKKYPKRWRYNNRILKRIKSLHEKARNIVIGWCRKFAKELIIKAKKHNYAITLEYLTSLHENTIKNGSAITWKLTMFAYGKLRDAVISKSIECNVPVVFINPRSTSSTCPRCSTKLVYNHRLGICLKCNFVSDRDKVGAMNIWFKVLKAYAGMPGSSPSAPPMKGEIRQRRRTRDERMKKVIKSIQI

SEQ ID NO: 42837 - protein, 157 aa, unknown
  TnpB Polypeptide
LPPTDKQVGVDLGLKHMVVLSTGEKVEHPQYWRRYEEKLAYWQRVMARRKPGGSNWRKARLKVAKLHEKIANCRNDFLHKLSTRLICENQVVCVEDLRVQNMQKNRKLAKSISDSAWGRLLRMLEYKAKWYGRTLVRVGRTFPSSQLCSCCGAGMLR

SEQ ID NO: 42838 - protein, 398 aa, Nitrospira sp.
MTRRWTFRAYPTETQAEHLAKTFGCCRLVYNGMLAARTAAFQHGERLTYAGTSAKLTVLKKDPELAFLNDVSCVPLQQSLRHLQTAFVNFFATRSAYPTFKKKNKTRDSAEYTRNGFRFNRASQRLTLAKLGVLELQVSRRVEVDPSTVTVTRHPSGRYYVSMVLEVASLSTKRVTTGCAIGIDFGLSRLATLSTGETIPNPRHLTQKSALLARAQRRLSGKQRGSNRYRAQHRRVARLHEQIADARRDSLHKLSTSLVRRFDTIFVEDLHLRGLVQNHHLARALSDASIGTAISMIEVKAEAAGVSVVTIDRWFPSSKQCSACGYLLDRLSLSVRHWTCPPCGTTHDRDINAARNILAVGQTVSARGGGVSAVRTSVRKAGRLRSVNHPGTKPATAP

SEQ ID NO: 42839 - protein, 398 aa, Nitrospira sp.
MTRRWNFRAYPTDAQAEHLARTFGCCRLVYNGMLAARTVAFQRGERLTQAATDKRLTILKRDPELAFLNAVSCVPLQQSLRHLQQAFVNFFATRSAYPTFKKKHKARDSATYTRSAFRFDRVSQRLTLAKLGMLELCISRRVEVDPSTVTVTRHPSGRYYVSMVIEIEAPATKRSTTGQSIGIDFGLTCLATLSNGETIPNPRHLTQKTALLARAQRRLARTKTGSNRRRTQARRVARLHEQIADARRDSLHKLSTSLVRRFDTIYLEDLHLRGLVQNHHLARSLSDVSIGMAIRMIEAKAEASGVSVVKIDRWCPSSKQCSACGHVLDALPLSVRRWTCPRCHSEHDRDVNAAKNILAVGQTVTARGGGIRAVRTSVRKASRQRNVNHSRTKHRVSS

SEQ ID NO: 42840 - protein, 349 aa, unknown
  TnpB Polypeptide
VYNHVLALKKELWEDYKLSFNPKLKSFKEEWKFLTKVPSQALANSYMDCITAFNNFFNSLKVKSKSKKSYPKFHKKGQKDSFRIAATKTSKGYDLRIEDHEHIKVPKLGSVKFKNYNNIDWSFVHIYNITIKKTSTDKYFASLCCELPEPEYIEPKFDACGFDLGLKDFAIFDSGEVIENPKYYIKTEYRIKKTQRQLSKCKKFSKNYKKVQLKLAKLHEKIKNQRKDFQHKISRQIVNENQIIVSEDLNVKNMLKNHKLAKSIQDASFSFFCNMIAYKALEQHRQYIKIGTFYPSSKLCHCCGFKYKGLKLEERFWTCPECGTYLNRDENAAINILNEGLKILSRNTV

SEQ ID NO: 42841 - protein, 424 aa, Lactobacillus sp.
MEISLTIKAHIKVASSDNAKSLADSMEIYRQGCNFVSQYVFEHDFELRQAKLNKALYSDLRQKFSLRSQMAQSVLKTVIARYKSVQTQLGQKPYKIHDINAPQGKGCYAVQRDLDWLWKPIFFKRPQLDEVRGRDYSFKQNGKIVSVNTLDGRIECEIAMPGFEQYLNDEWTFGTAKILKSGKHWFMHISATKSFPDYEIEQTRHVVGIDRGLRQIAACYDEKGKTLFRSGKAIARKRQHYKELRSHLQAKNTRNSKRRIRKIGNRENRWMSDCNHCLSKTLVNHYGPDTLFVFEDLTDVTFDTVYNRKRESRYEHHSWSFYGLEQKLKYKAHLNSSEVVKVDAHYTSQRCPKCGRIFKENRDHGLHMYICDRCGYRSNDDRIAAMNIQMLGTIYVSGVPNPSYQSKRGTSEAKKAKKSKKQTN

SEQ ID NO: 42842 - protein, 416 aa, Methanobrevibacter sp.
MKRAYKYKIKPTMKQQIMLSQFFGCARFIYNWGLDRKVKTYKETKKNVTYLQLAKELTLLKQTEEHKWLNDCANEALQQSLRCLDNAYTQFFKAKKGFPNFKSKKHSKDVCKFINNVHFDFEKNKVKIPKVGWTKLCPNQDFDLSICKIGTLTVSRDKCGDYWCSIVVEDGKPNVSKAKIQEETAVGIDLGVKDFATLSDGTKYDNPKYFERGERKLKRLQQKFARTEKKSKRHEVMRIKVARQYRKIVNQRLDYLHKLSSDLVKRFDTICLEDLNVDGMLKNHHLARAIQSVSWGEFVRQLTYKSEWYGKNVVFIGRFEPSSQICHKCGYQNKDVKNLNVREWTCPVCGEHHDRDVNAAKNILQFGLHPQALVAIENKIPQGSGIKDGEGNVIGHPVKRQYSKSCNSPQSGTTGI

SEQ ID NO: 42843 - protein, 444 aa, Methanobrevibacter sp.
MYLTTKIQLMQNNKDNINLDILYKLAYHNARLYNVGLYNVRQHFFNTNSYLSYFSNHTECQTNENYALLLTDCAQQTLRLVDRDMNSFFKLLKAKKYGKHSFPVHLPKYKDKEGIMPFAIQGRSCRIQKNGTVAIGLTKEFRDLYGITERRFLITIPRNLRNIPVFKEMRFIPRYGGKEFQVEFVYDSNYIQTPQIDGSKTDGYMSIDLGVTNLFACTTFSNGGASQFIIDGRTIKAINHYYNKAKARLQEEYSHNKSINGMNTKRFIRLSKSRLNKIDAYFNESVKYLISKCFALGISTIVVGYNKGWKQEVETGKKNNQKFVSIPYHRFRQKLSYKCELYGITCVFQEESYTSKASSIDMDEIPVYSEDDGVKYTFSGKRVKRGLYKSKDGLLLNADINGSVNILRKYLNECNAKALCADAVRALVNVPCQRINVLCTSPSL

SEQ ID NO: 42844 - protein, 314 aa, Methanobrevibacter sp.
VLAALRSIRSNKHKNADVPQKKSLSLQLDKRMYSNLSVDGICLSNGNSHKREKCTFVLYDKVRELFNTCTFSDPTVFARDNRLFLSVPFEVVTPPLKGDKALGIDLGMKRLFVTSDGQYYTDKEYLKRRRKLRYLKRCLQSKGTRSAKKHLAKVKRKERNISKDMLNRATNVLLRCDANVYVLEDLKKIKYKTSRTKEGFKRIRHNNALSQVPLAEFREMLTHKATLAGKQVVSVSPTWTSQMDCRTGKRDGERHGCRYYCNDGIVFDADWNAAVNIAQRANHPTSTVLPIDGKMQALVGKALSAASTSRTYCS

SEQ ID NO: 42845 - protein, 440 aa, unknown
  TnpB Polypeptide
MKGKEGRVVFEAVRVALDPSPAQERLLLSHAGAARFAFNAGLAHVKAGIDAGVKPEWSFYSLRRWWNANKDTLAVSDDGVIWWTKNSKEAYSYGLEALAKGLSNWVKSRRGARKGRRVGFPKFKAKDKATPRFAYTTGFRLIEGDPKALRLPKVGRVHCMEDVTERVNGARVLRVTVSRRAGRWFAALAVEREDKPVAKAPKGGAVGVDLGVKTLATLSDGTVIENPRCLAASERRLKRAQQALSRKAMGSKRRANARAKVARLHARVAYQRSDAIHKATTWLASTYSHISIEDLNTAGMFRNHRLAKAVSDAAFGEFRRQLEYKTARTGARLHVVDRWYPSSKTCSKCGRVKAKLSLAERVYRCDGCGLVMDRDLNAALNINVAGSAPETQNAHGGTVKRGDLSDRATLDSVKCEPSKRPGAARLGADERKHVLQAKSN

SEQ ID NO: 42846 - protein, 179 aa, Escherichia sp.
VKRLQAFKFQLRPGGQQEHEMRRFAGACRFVFNRALALQNENHEAGNKYIPYGKMASWLVEWKNATGTQWLKDSPSQPLQQSLKDLERAYKNFFQKRAAFPRFKKRGQNDAFRYPQGVKLDQENSRIFLPKLGWMRYRNSRQVTGVVKNVTVSQSCGKWYISIQTESEVSTPVHPSASM

SEQ ID NO: 42847 - protein, 370 aa, unknown
  TnpB Polypeptide
MVNKAFKIRMYLNKTQRNQVRQNVGCCRFVYNFFLNERINHYNAVKEMKSYQDLAYALPFLKREFPWMCNAESTSLQQTLKDMDLAYKSFFKGNGFPKFKSKKNNKQSFRMVMGIKIIDNTHLKLPKLGIIRVRHGFDLSSINKIYNATISLESTGKFFISISTLSEVKTKPMTGLNVGIDLGLKEFATYSDGTVISRIKFTQKYEKSLAFRQRKLARMKFNSNNYQKQKIRIAIVHEKIKNQRVDFIHKITSSLTDDYDVICIEDLNASGMIKNNRLAKSIADVSFFEFKRQLEYKTNWYGKTLSKIDKWFPSSKNCSNCGNKKEDLTLADRIYQCNKCGLIIDRDLNAALNILTAGTAGLAYSILDGS

SEQ ID NO: 42848 - protein, 372 aa, Methylococcaceae sp.
MKNRAYKYRFYPTDEQANLLAQTFGCVRFVYNSILRWRTDLYYQSKEKIGYLQASARLTELKKIPEFSFLNDVSCVPTQQVLRHQQVAFKNFFEGRANYPTFKKKNRKQSAEFSKSAFKYLDGKIYLAKSKEPLDIHWSRKLPCEPSTIKVSKDYAGRYFVSCLCEFENQLLPKTDKTIGIDVGIKHLFVTDNGLKIDTPRHTVKYETQLAQAQRDLSRKKIGSANRAKARLKVARIHAKISDCRLDNLHKLTRELINENQVVCVESLRVKNMIKNPTLSKHIADASWGKFVAQLEYKADWVGRNLVKIDQFFLSSKRCSCCGHILSRLDLRVREWICPECKATHDRDINAAKNIRTAGLAGIAFGENVNLL

SEQ ID NO: 42849 - protein, 394 aa, Mycolicibacterium sp.
MSRFRLLPTPEQEEGLLAHCRDARYVWNLAVEQQQYWQPGRKAPGYVEQCAQLTEIRGEYGWLRAGSHTVQQQALRDFAQAMRNFFNGTHSRPTWRKAGVHEGFRQVAVKAHHVERLNRRFGRIWVPKVGWVRLRLSRAVPDGVKSYRVKRDRAGRWHIAFANIPHPITSPGDGSVVGVDRGVAVSAALSTGELLHAPSLAPGESKRLKVLQQRLARAKLGSRRREKVKRAIARLKARERDRRKDWVEKTTTDLAGRFDVIRVEAIDARAMTRSASGTIQQPGMGVAQKRGLNRAISRSGWGQLVTRLQHKAYGRVEQVPAAYTSQRCSACGHVAPGNRKSQAVFECEACTAGRCNADVNAARNIAAGRAVTARGDLASGRSMNREPQFSTPAL

SEQ ID NO: 42850 - protein, 464 aa, unknown
  TnpB Polypeptide
VRHTTFRFCLDPTVEQSAALARHAGAARFASNTCLRLVRNALTARRADLGVKVPWTGFDLINTFNAWKKTEDAGRRFVVDSRGGAEVEVIGLAWRTEVCQQVFEEAAVDVGKALSAFTASRKGERAGRRVGFPRFKRKGRAVESFRLRNKHPKGGKPPIRVGDGAPRSVTLPGVGPVRVHDDTRRLRRLITTGRGRILFATVSRRAGHWFVSLNVEAADLHPARRHDPRLVEAGFVGVDRGLHDLAVAATADGAETARIPAPKHLQHTQAKQRRLARAVTRKPRGSKNRRKAAARLGRHHQQTRNRRKHALHAAANTLAQYPRVAVEDLNVHGMLANHRLARAISDAAWAELARLISYRMDWRGGQVVTVDRWFPSSKTCSTCGAVDPDLTLAQRTYRCGSCGLELDRDLNAAINLAAWADAHAARDREANGPDTNACRGDGSGQRARAGETSPSDAGTRHAAA

SEQ ID NO: 42851 - protein, 370 aa, unknown
  TnpB Polypeptide
MEYSYKFRIYPSVTQVQQIQRTFGCCRFVWNYYLAMRKDIYKQDRKTMNYYACCKDMTQLKKTLLWLRGVDATALQSSLQNLDIAYQNFFRRVKQGEKPGYPKFKSKRNRQQRYKSKCVGSNIKVLDKAVQLPKLGKVKCRVSKPVKGHILSATVSQNPNGKYFVALCCTDIQIEPLPSTGAVVGIDMGLKALAITSDGVEYPNHKFLSKSQKKLTKLQRQLSRKTKGSNRWDKAKQKVAQLHERIANQRKDTLHKLSTKLIRENDIICMEDLAVKNMIKNHKLAKSIVDASWGEFRRQLTYKAEWYGRELVVIDRFYPSSQLCSACGAQWSGTKDLSVREWTCPKCGTVHDRDVNAAKNILAEGLRVLA

SEQ ID NO: 42852 - protein, 367 aa, unknown
  TnpB Polypeptide
MEYSYKFRIYPSVKQKTLIQKTFGCARFVYNYFLAQRIEVYKSTGKSPNRFQQDKSLTILKQETAWLREPDKCALQNALKNLDTAYKNFFRSVKSEKKVGFPQFKSKRDRRKSYRTSSNIAIFDSHVRLPKLGLVKCRVSKEVRGRILSATISQNPSGKYFVALCCTDIESVPIPSTSTAVGLDMGLKAFAITSDGTEFPNHKYLAKSQKKLAKLQRKLSRKSKGSNRREKARIQVARLHEHVSNQRKDMLHKLSTELIRQYDVICIEDLTLSNMVKNHKLAKSITDASWGEFRRQLTYKAVWYGKQVVVIGRFFPSSQLCSTCGTQWPGTKDLSVREWICPKCGTIHDRDVNAAKNILNEGLRLLA

SEQ ID NO: 42853 - protein, 337 aa, Actinobacteria sp.
VKLVVQAKLLPTPVQAAALEATLRACNEAATWASGIAFERNVKRNFALREHTYSTVKARWGLGAQAAQHVIKKTCDAYATLKANLRAGNLGKPGSKRYRRAVEKPVVFRPEGAQPYDDRMLSWQIAERRVSVWTVAGRVKDVAFTASPEQLATLALHRKGESDLVCWDGMWFLLSTCEVPEAPLNAEPSDFLGIDLGIVNIATTSDGEIMAGREINRIRVRERKLRTKLQKKNTPSAKRRLKKRRRKEARRAKDINHKIAKHVVAEAERTGRGIALEDLTGIRERVRLRKPQRATHSSWAFAQLGSFIGYKARRAGVPWCTSIPRTPRAPAVARRAG

SEQ ID NO: 42854 - protein, 387 aa, Paenibacillus sp.
  misc_feature (80)..(213): Xaa can be any naturally occurring amino acid
MCYNGHEITKGDKTRMLHHKAFRFRIYPTEEQTTLIHQMFGCARFVFNHFLVRWNDTFQETGRGLSYQTCANGLPALKKXXXXXXXXXXXXXXXXXXXXXXXXXXXXXXXXXXXXXXXXXXXXXXXXXXXXXXXXXXXXXXXXXXXXXXXXXXXXXXXXXXXXXXXXXXXXXXXXXXXXXXXXXXXXXXXXXXXXXXXXXXXXXXXXXXXXXXENVASLRPLRTYEKQLAFWQRRLSRRLKGGSGYRKAKQKVARMHERIANARQDFLHQLSTKWVRENQTICLEDLQVRNLMKNRKLAKSIAEASWSTLRTMLEYKATWYGRTISMVAKNYPSSQLCHVCQSRNPEVKNLNLRAWTCSGCGTHHDRDHNASMNILQEGLRLLAKTN

SEQ ID NO: 42855 - protein, 232 aa, unknown
  TnpB Polypeptide
MEIPVTMNMAQKYAVSRDNPEEVFQFFLKNFGCARKVYNLSIDNYYKHMEAAGYTSGDKIPKVASLKASELKKEYPYLKEADSLGIANSLMDFSEAVRRFRGQGSHREYTKRALRRDRSGTEPLSFRGLKGIPKFHAKALWDFSYRTAAQYPVGKNGVRPTIRLEGDILYLPKLKGGVRILLHRDFPKDARIGSVTVSMDTDGTFYVSIGYTRDIRVEMSLQRAAMYWRHWT

SEQ ID NO: 42856 - protein, 435 aa, unknown
  TnpB Polypeptide
MKQMLTAKLKLHTTPQQFQALRKTQLAYRDGLNYVSRYAYEHGKISSGRVLQRACYDALRLVYGLPAQMACNVPRQVGATYKTLWTKVKQNAAMRTAGITKKRYKGLDQAPKYVSPTLTYNYHRDYSMKPDHQVSILTLDGRVLVPYTGYNKHIALLQAGAQMGAAKLWYDKPHKHFYLLVTLELERADPTPESHKQIVGVDVGQRYLAVTASPTTAAVFYAGKAVRAKADHYARLRKRLQQKGTRSATRRLIVISGRERRLKQDRNHSISRRIVDQHPHSLIGLEDLTDMRERTKRKRGKKASKKQRKANGHAAKWAFAELQSYIAYKAIVAGSMAVKVDAYHTSQACPMCGYASKENRPQKGLLFSCQNCQYSLHADLIGARNVALRTLLARQDWTSTGVLSVRPDVSDDEAKAARRERYAELRWSLDTSSRL

SEQ ID NO: 42857 - protein, 229 aa, Aeromonas sp.
IHQGTAVGLDMGIKRFVTLSDGSHKDPLNSFKAHEKALRKAQQAMSRKVIFSRNWKKAKARIQRIQTHIGSARRDYLHKISTAISKNHALVCVEDLQVRNMSKSAAGTTDTPGRNVRAKSGLNKAILDQGWGEFRRQLDYKLAWNGGHLIAVPPKNTSRTCPCCGHISADNRQTQATFECVECDFKENADLVGAINVLRAGHAQLACEVSGAIRPPAAGTHRSELSVIA

SEQ ID NO: 42858 - protein, 408 aa, Aeromonas sp.
MQILKAYKFRLEPTEQQAQRLRQLGGCARYVWNHGLAETKRILDAGEKLPSAFELNRMLTSWKKDPEMAFLAEAYTDNLQQKLKDLHGAWMRCFDKKLAAKAPVFKKKSDNRDAIRFVNFDKYCRLEKGRVKLPAGLAWVKFRQSQPVEGKIKNATVSQAAGHWYISFQVEQETLEPIHPSGSMVGLDAGIAKLATLSDGTVFEPVNSFKTNQTKLARLQRQLSKKVKFSSNWKKQKAKIQRLHSHIANSRRDYLHKVTTTISKNHAMIVIEDLKVASMSKSAAGTTSQPGRNVRAKSGLNRSILDQGWFELRRQLEYKQAWRGGQVLAINPAYTSQQCACCGHTAKDNRQTQSQFKCAACGYEANADVNGARNILAAGHAVLACGGVVQSGRPMKQEPGTARAAITQ

SEQ ID NO: 42859 - protein, 370 aa, Viridibacillus sp.
MTKHNKAYKFRLYPTEEQALLIHKTFGCVRFVYNKMLTERKETYEKYKEDKEQLKKQKFPTPAKYKGEFEWLKEVDSLALANAQLNLQTSYKNFFSGQNDFPTFKSKKDRKSYTTNLVNGNIMLLNGHIKLPKLKLVKVKQHREIPSHHIIKSCTISMTSTGKYYVSILTEYEKVIVQKEVESVVGLDFAMAELYVSSENEKANYPRFYRQMLDQLAKAQRVLSRRIKGSSRWNKQRIRVAKLHEKVANQRKNFLHYKSKELATNFDVVAIEDLNMKAMSKTLNYGKSVADNGWGIFTTFLKYKLEEQGKQLIKIDKWFPSTKLCSSCGTEKFMPLSERTYECSCGTVIDRDYNSAINIKNEAIHLLTLA

SEQ ID NO: 42860 - protein, 323 aa, Viridibacillus sp.
LKKSTHQWLKEVGSNVMKQAVKDADMARKRWFEGVSDKPRFKSKRKSKISFYVNYESLKRTKEGFQGEKIGVVKTYQPLPKLPRGEKYSNPRISYDGRNWFLSVGYEIEYKKVELTDEKLGIDVGVKELAVVSNGKFYKNVNKTKEVKRLEQKLKREQKQLSRKIEANIVGHTKNRKPIYKTPLKDMKNIQKQNAEIRQIHKKLTDIRTNHLHQCSNEIVKTKPSRIVMECLNIKGMMKNKHLSKAIAKQKLYEFKRQIQYKCQKYGIEFIEADKWFPSSKTCSCCGQIKSDLKLKDRLYVCSCGLELDRDLNASINLANYPI

SEQ ID NO: 42861 - protein, 402 aa, Escherichia sp.
MKRLQAFKFQLRPGGQQERQMRLFAGACRFVFNRALALQNENYEAGNKYIPYTKMASWLVEWKKDTETEWLKDSPSQPLQQSLKDLERAYKNFFQKRAAFPRFKKRGQNDAFRYPQGVKLDQENSRIFLPKLGWMRYRNSRQVTGVVKNVTVSQSCGKWYISIQTESEVSTPAHPSASMVGLDAGVARLATLSDGTVFEPVNSFQKNQKKLARLQRQLSRKVRFSNNWQKQKRKIQQLHSRIANIRRDYLHKVTTIISKNHAMIVIEDLKVKHMSKSAAGTISQPGRNVRAKSGLNRSILDQGWYEMRRQLEYKQLWHGGQVLAVPPAYTSQRCACCGHTAKENRLSQSKFRCQVCGYTANADVNGARNILAAGHAVLACGGMVQSGRPLKQEPTEMIQATA

SEQ ID NO: 42862 - protein, 405 aa, unknown
  TnpB Polypeptide
MRVNRVEQTQIDKNHPMWSVIDQYSYYSKNLYNYANYIIRQDFIRTGNYIKYHDIDKFLHHEQPYKQLMSQASQCTLQMLDRCWKSFFVTSKEYKKNPDKFLGRPSLPKYKKKDGRYPWILKNNQIYFKDGYLWFKLRVFNGYKFKTHLTDNDRIISIRFIPRGCVYVLEIVYEKEIPAITDQEAKRIISIDLGVNNFATITNNIGESPIIINGKGIKSINQFYNKQRAKIQSELKKVNNKEWSNKLSKLTLKRNNRIKNFMNNASKYIIQYCIKNQIDTIVIGKNDGWKQNSKLRDKTNQHFIQLPDESFLQMLEYKGQDIGLTVIKNNESYTSGTSFLDDELPIKENYNKKRRIVRGLFKSNSGRLINSDVNGSLQIMRKVFPNIFKDYGIEGSLTPIIINVI

SEQ ID NO: 42863 - protein, 372 aa, unknown
  TnpB Polypeptide
LKTYKYRLYPTKAQKQKLDENLNLCRVLYNTALSQRKTAYRQQRISLNYYDQASELKEVKECLPEYKYIHSQVLQDVLKRVDKAFQNFFRRVKLGEKPGYPRFKGYGWYDSFTYPQSGFSLSDNSKGSQRLKLSKVGSIKIKLHRAIKGKIKTCSIKRELDNWYVCFSCEVQPEPLLKTQKSVGIDVGIEKYAALSDGVLIENPRFLRQSEAKLKYEQRLLSRKKKGSNSRIKQREKLAKLHHKIKNQRNDFLHKESHKLVKNYDVIVLEDLRIKNMVKNHHLVKSISDAAWAKFTEYLSYKAESAGKKVVFVNPRNTSQSCSSCGEIVKKGLSVRTHICPYCGLILNRDVNAAINILRLGTSPGGATALAG

SEQ ID NO: 42864 - protein, 378 aa, Halorubrum sp.
  misc_feature (209)..(209): Xaa can be any naturally occurring amino acid
  misc_feature (378)..(378): Xaa can be any naturally occurring amino acid
MEVRRTAPVKLVVPDERYDDLHESARQFFHCANRAAEFCWDDDSYANCVTANSTARDALYEQLREETDLTANLVQEAIRRAVQATKGCVERWKQGKRVSQPEFTSWSMVYDKRSATFYRDRVSLSTVNGRVECDFELPADSPTPYEQYVLSEDYEFRASTLQYDKATNEFYFHITTRKCDTDESEVSEDTEHQTVLGIDLGVNSLAVAXDTDESEVSEDTEHQTVLGIDLGVNSLAVASTGTFWQGDDYDHWCREFEKRRGEMQQRGTQAGHNALIRLGKREEAWRKQYIHTVANEIVSEAVDHDCGVIVLEDLTDIREQLPQAKWHHIWAFRRLYEYVEYKAPEQGVSVKQVEPNHTSQRCSRTDCGFTHESNRDGX

SEQ ID NO: 42865 - protein, 319 aa, Aquibacillus sp.
LFFQLPQLKKELDWLKEVDSIAIQSSIKNLADSFSRFFKKQTNAPRFKSKNNKVQSYTTKYTNDNIAIVGNKIKLPKLGLVKFAKSREVEGRILNVTIRCNPSGKYFVSILVETEIQALPKTNLSVGIDVGLKDFAILSNGTKYENPKFFRTLEKKLAKAQKTLARRKRGSSNWHKQRIKVARIHEKIINLRKDYLHKISYNIVKNHDIVGIEDLQVSNLLKNHKLAKAISDVSWSQFRTMLEYKARWYGKQVVVVAKNYPSSQLCSCCGYQNNDVKNLGLRKWDCPSCGTHHDRDLNASKNIKDEAIRLLTVGPTGVA

SEQ ID NO: 42866 - protein, 441 aa, unknown
  TnpB Polypeptide
MQVTSSYGVEIRKQNIPIRHTLRIYRSAVSYLIQVYTQAWGELSEIPNAKKRFNEAEHLVHGTKKNQACYDFDLHFPKLPSYLRRSAIQHALGSVASYETRLELWKNGKLTGKPKLTQENHAMPVFYRDVMYREAGEKEEAAYLKLYDGHDWKWFRVRLLHTDMEYLRKHWAGEKASAPTLEKRHHKYFLRFSYTEEKNLSKTAVKAQTICSVDLGINTDAVCTIMQADGTVLGRRFISFPSDKDRLYRVLGRIRRFQRQHGARQTHNRWAYAKRLNMELSRKVSGAITAYAREQQADVIVFEYLGMQGKKMGSRKQRLHMWRKRDIQKLCEHRAHRSGIRVSRVSARNTSRLAYDGSGIVARNPENHSLCTFTTGKQYNCDLSAAYNIGARYFIRELIKPLPETERSSLEAKVPAVKRRTSCVYADLRLLSRELGSRYAA

SEQ ID NO: 42867 - protein, 409 aa, unknown
  TnpB Polypeptide
VYRVRVDKRDDWLTRALQDQTDPTKPRKVKYCRIVREMRKGKERFLLQLVAEGTSPLKHAYAGKDLRMAIDPGLGSLTYATEDGTIAKVQIAPSADTDHRAVRKLQRAMERSRQATNPDNYETVEVVRHDKKHKSLKVKSGRLQWRFSKRYEKLRSELAEMLRLCAATRKREHGEVCNWLLGHAGHIIVEDNSYKAFQRGRFGKIIGRHAPAALYAQLTNKAESAGLLVEVVSPKKLKPSQHNLLTDTFVKHELWERRVRLGNDDDDRWIDRDAAACLNLLYADLEKQTYAPERIREAVPAGVTAWLDAGVVVIQAREGITERESGGSDGGGFRPLPYKGCVSKDFVVGVTAIGDNPEAKASTESKPSHSVARLFREMKKGPPSADGSPLVRQGSELVKSCGRCRAWRP

SEQ ID NO: 42868 - protein, 432 aa, unknown
  TnpB Polypeptide
MPFIKSLDQPNSALRSLRIIIARRVVGTTLVPMKLRTSGRLSGRLSSVTCSGKPADLASNPSGVDSIPSKARTIRKSCTSPSVGPFIVWRKHVMPYMKPDTGYMKEALASDRHVKYCRIVRRTLNGVKRWFVQLVVEGLPPVRKVYAPKCEVVGIDPGSSRIAYFHERHAAIVEVAPHVDLKEPKIRLLQRRIDRSRRANNPDNYNPDGTVKKGSSTWNTSNRGRRTAAKLAEHHRCLAATRKRDHGELVNDLLQIGGTIKIEKNNYRSFQRCFGRSTNRRGMGEFVEHLKRKAESAGCEVIELNAYKLKMSQYDPATDAYRKKPLKERWHRWGNTGTLVQRDAMSAFLACHATEKGHDRALLLEKWTTAEALLSGSGLCRHEPCSDPEVSKDASGLTKPNCGSKAERGRGLPRTLCTDGDVQAALPPERAV

SEQ ID NO: 42869 - protein, 425 aa, unknown
  TnpB Polypeptide
MNKKNFGEIFLLAKKVRLLPTAEQEQQLWKSAGTARFVYNWTLDKQIQYMKTTGKLNKLKDNDLRKDLTQLKQTEEYEWLYEVSNNAAKQAVKDVCGAIDRFHSESKKHGYKYRKSAVKSGKELDFTDFEDFPRFKSKRRSKVSFYHDTEKLKVYETEVCIEKVGKVKLAEPGRIPVGEKYTNPRITHDGKYWHISVGVEQEAQKSELTGEVIGIDLGIKELATVSSMDKPIENINKTKEVRRLKKKLKRKQKQISRKYDKNKKQIGKRGENRYKIRKNSTNFFFHKTKNIEKLERETKLIHRRLSNIRLNHIHQATNTIVKTKPSRIVVEDLNVSGMMKNRHLSKAIAEQRFHTFVKILSYKCEMNGIEIVKADRFYPSSKKCSFCGEIKKDLKLKDRVYTCPKCSFTIDRDKNASINLAMYIA

SEQ ID NO: 42870 - protein, 373 aa, unknown
  TnpB Polypeptide
MHKATFQYRLYPTPAQETSMRRTLDECRWLYNRLLEERKLAWEETETNIGLYDQINRTVTLKAERLTLGAVYSQVLQNVAVRIDLAFKAFFRRVKAGDKPGFPRFRGAGWYDSFCYPGSGHRVDGSRVVLSKIGHVKAVIHRPLEGTVKTCCVKRTRTGKWYATFSCEIEDTPLSATDSAVGTDVGLASFATMSDGSDIANPRFFRKDERALAKAQRRLAKEPRPAKGQRATPERRKRRKVVARVHERIANRRKDFAHQQSRKVVNRHDTIAVEDLSVNRMVHNHCLAKSISDAAWSMFTSCLSYKAASAGRRYVAVNPAYTSQDCSRCGHRQKMPLATRVYCCPYCHLELSRDHNAAINIVTLGLQSLGAHP

SEQ ID NO: 42871 - protein, 592 aa, unknown
  TnpB Polypeptide
MQTTLTANLLENQNDIDLIKNQLDRVVVEHSLIQRKLYKDIISYKLKNKIKDLPNTKINELKSSYQLKYNINARQYSSIYLDLIGKINSVLKLNKGYISDTKINIKSLGKTIQIKNKALTSAIKSLEIHNKDLINKDNISTKTKTKINILENNINNLRKKLFYLSDKLTNAKNKLNKLELIESTGNPKLCFGSNKLFRQQFEIEKNLLNPKYKNLTPFKTFSSWKKSWLESRNKSFFLVGSSDESCGNQNCQIKQIINNFYEIKLNINPKESKLTNRYIKFKIYLHNDRNNILDNAINLKQAITFRFNKVDKVDGYKISISLDKAKQKTKIISNKLLGTIGVDINADHLAIAETDRFGNLLKVFNLPLDLKNKTTEQSKALIGDAVKELTDYAVKVKKPVVIENLDFSQKKKELKNSFNKTYNQMLSSFAYSKIIELIKSRCFDKSLEIIEVNPAYTSKIGKFKYQDLYKLTTHQAAALVIARRALLSYCKTIKNIKGTNNEIIIENKEKKISNRRSKYYCFDLPVRNNQRKRCNYWKDIELNYGKMKKHSRLLKNKNLILGKQDLPSEITLVVHDLGPNCGSNPNLFCSPF

SEQ ID NO: 42872 - protein, 465 aa, unknown
  TnpB Polypeptide
MFSHVKKWVKEDIKKKITRTKSLKIELKPTKKQIKILNKYIDDSRYTYNKCVEIYNETGMFKKEKLGPLITSKVVRGGFKDIPENDKIIPYWLFITNFQYKEDNYIIPKNFFFIPPKIPKTVYNTPSTIRKLSLKEFEGAVKSAITNKKNKNIKSYYMSFKSKKKLFNQQFGEEKTTSYLTKINDDYKLSICKLKNINVKINNKDKKQKELLQILKTKKVKKEIRYIFQKDIKIQQTKLNKFYLIIPYNEEVKNEYINNRMCALDPGFRTFMTGVDLKGNMFEIGKNVYDKILKVKYKISHFQGKFKRINSKRGRKSHKEYRAWMISKSMFNFFNLKLKNLIKELHNQTINYLTKFYDIIILPNLRTQNLVDKNKPSWFNKMMLSLNHYTFRMKLNEKCKSLNKTLVVVEEPYTSKTCSNCGSYKPDLGKSKVYNCKHCKNTFDRDLNASCNILKYTLLGKLKHY

SEQ ID NO: 42873 - protein, 488 aa, unknown
  TnpB Polypeptide
MLTTTIFRLYPSTSQTTSLNEIFTIYNRVKRKGYKLLFNGAPEIQQKLMQACHNNPYVNTIIIENKTKLAQQKTWVQKKAQYLRYKLAVVKDKIANTKKKNPRDRSLRGLYALLSSLQNRVANLTLKPIVFGTKPLFRKRLLGLLSREEFRIRRDASFACIGKVQYGVKNLNLKVLPVRHLKIRTFSKEQGKKWLRIPFSVNPSQASRFREILQLDKYTVVVKRKVVKGELRYFAHMSYESPTPAVTCAFENGGIGLDFNYDCLALVNMDRDGRLLSYQSIRLRNLHSYRKGRRDDYASFKLGKVINYCLNKGKGLIIEDLSFEQSFSYNKKRNRKITQLKTSMLPLLERKCARYGIAVKKVHPAYTTIIGALKHGWSYNLSEHVLASYVIARKGLGFTEDLPACYEWLLAQVGDVVKPRLKPSSPYRQWAQLYDLFKHYGVTPFRSPDPGTNLKRNLLLALDTVLDGLNPATGVPPDNLTAGLLACG

SEQ ID NO: 42874 - protein, 466 aa, Thiorhodospira sp.
MKVTRILRAKRPNKGKVAALREQARRLGQVRSDVWQRFGSLHGVGLSDRQIRDAWLSEGRAFPVSANAWKETLRDAKGDITANMEAAKVKARRSIWRHTQDKIEQKRLFTALKRTDWTTDPYLRRVMRKHWRRGHNHTHNQIIVRADNYTTFHLGGRVWIKIPGLVKGTRIAIPLDTTVAPTGTLRIILTDEDRIEVHYTIEADVTQNSGTRTIGVDKGYSEVMVDSDGEHHGQELGAILTDTSDKLKAKYQRRAKLRARANNTRNPRKREHIRRFNLGRKKLNRQMSKTHARIRDIVFQSVHKVVDKAAVIAAEDLAAPMAGKSFGKNVNRRLTSWTKGVIAEALDSVSSRRGSTVVLVNPAYTSQMDSRTGCLDGKRQGDQFYCSDGVVLQADQNAARNVLARLSDPDIERFTPFKRVKAILLERTERHWLGLLNQDSSCSPARVLSTESELPKNHPEQLCSGF

SEQ ID NO: 42875 - protein, 145 aa, Lelliottia sp.
VDLGLKDYATPSHGEKLAQGNFYRDLEPVLGKAQRAHKKARVRAIHAKIKNRRKDALHKFSTALVNSNAAIFVGNVSASKLAKTKMAKSVLDAGWSMLKTQLEYKAIARSVVFEVVNESYSTQVCSCCGCLPASSPKGRAGLEIR

SEQ ID NO: 42876 - protein, 434 aa, Cyanobacterium sp.
MKNYGCQQNLINPNPDSLAILEFLCEESNKLHNCGVYLGRQLWFKGRRYLKKFDLNKLLKNNNHYRVLYSQVAQQLLLSVTESFKSYYELQKQYHKKTITDKPRPPKYRKKGGFCGLTYPKQALKLRGNQIRLPLGKTVTRWFGLSEFFLPMPTNLSFSTIKELRIVPRNRLFYVEYVYEKKIVMQKNDPEKVLAMDHGIGNALSCVTNMGKSVIIDGKKAKSLNQWYNKKVAKLKEGKPQGFWSDDLARTTEIRNRQMRDFVNKSARYIVNFCRHHRIGTIVFGWNQGQKQSVNIGKKNNQSFVQIPMGKIKDRIHQLCDEHGLKFIELPEAYTSKSSFLDNDLIPNFGEKPEGYQFSGKRIKQGLYRSKQGFLVNGDVMAAANILRKYVSIQPVNISLAKVSRSVLTLPQRINIFNRGFKPIQYSFFESPLL

SEQ ID NO: 42877 - protein, 408 aa, Cyanothece sp.
MSIHQMKLRYRYRIYPSKQQKQQLAKLFGCCRLVFNEALAHCQQEYREGRKKPNNKQLSSRLTSLKKTEEKIWLREVSAVPLQQSLRDLDVAFKNFFNSGTRKRKGKKVKPPKFKSRKSKQSAKFTDNGFKVNQHNVYLAKIGKLKINWSRELPSKPSSVTVIKDSADRYFLSFVCDVNPIPLLPNNNSIGVDLGIIDFATLSNGEKIKAPKPLKSNLKRLRKLQRNLSRKKKGSKRRGVARKKVAKLHAKITDIRTDFIQKLSTKLIRENQTIALEDLKVSGMVKNRKLSRAISDLGWRSFRTMLEAKGEMYGREVRIIDRWEPTSQTCSDCGEKGGKKELSVREWTCLFCGAIHDRDVNASTNILKVAEGHSETKNGRGEKVRLSKKKAHLDETSTTLGYKQLSLF

SEQ ID NO: 42878 - protein, 358 aa, unknown
  TnpB Polypeptide
MKRACKVSLKFVTDKKQSRIVALLQSYRYAVNEYIKIFWNSKHTRDSVALALLGGSRLSERYKQAALKQAWDMVIATKKSAKAMGKHCVMPCFNGKAVLDSRFITIENGKHAFDLIVKLSTLKTGNRMVVPTKHTAMTRKWLSKPGAKFIQGCALSDNSLTLWVGVLAQSEKQDGRVLGVDMGVNKLMADSDGNFYGKDFKAISNKIRRKKPKSKAKQRAIKERDNFIGRSVNQLPWSKLKAIGVEELTGIKTGKKQNRGKSFRKAMAPWIVRQVVNRISNKASENRVRLVKVNPTNTSRTCPICGGVSKENRKGEMFQCVACGYKGDADYIGALNVLAKTFVTLGRLQSPRLKQKVA

SEQ ID NO: 42879 - protein, 424 aa, Cohnella sp.
MDTLQANIGLMNERQLGAHQKRLQKQLLKPIDQRKDSHCRLFELPTRASPYLNYAFLDCLFKVMEQADYRALPSQCSQWVMKGVFANWQSFFASIKDYLVHPDKYSGWPRIPGYTRAKAKEVVLTNQDCEIKDRKYLKLPMTKQRLNIGKLGCMDGKLKQVRILPRYGQYVMELVLSVCPTEVADSKKEHVLAIDLGVDQLATLVTNTGHKPICVKGKQIKAFNQYYNKLKAHYTRILREGKQPHEGAHTSKRLERLHLKRHRRIKDTFHKASRYIVRFAAEQEIGTIVIGYNQTWKMAPGMGRRNNQSFCHIPHQMLVSMIRYKAAALGIEVILTEEAYTSKASFLDGDPVPKYEEGVIRIFSGRRIHRGLYRSRNNSLIHADVNAAANIMRKVFPKATADGIAGLGGNQSVNVSTPLMKTVL

SEQ ID NO: 42880 - protein, 440 aa, unknown
  TnpB Polypeptide
LGVRWRSWSQSVWWCLAKQEETEEVERGKEHHFFPSQEEEEQRTPVVRGDNMLLCKKIKIEVSEQDTKALEFMQEKCRGLYNWWVMKLRSGERWPGWRKAKKTLRASRKYDPELNAVYGKLLQEVFFRLDHAMQGFFRRVAAGERKPGFPRVKPRHQFFTLCYPAMYLDTIVGNTIALPTGGGHSWGPKGYPNIIAHLTEEPPDHFHEVAVSRDTRGNYYCSFVYEDAVQENHDDEHKPGKKRKKRKRYPIREDGIVAFDLGIKTLATGYNDQGRFYHIGGFKGYRWYNKQLDKIRSKRDKCKKKSRRYIHLSKVYKRVSERKRRKQRDCLHEASHLIAHRLAERAVVIGDLSQRQMIIPKKVQETSKERNKRYIRNRLVYNDWGLYGFVQMLEYKCLRFGKALSIISERDTTKTCHVCTGSWLPAVYLVCARESICLNT

SEQ ID NO: 42881 - protein, 271 aa, unknown
  TnpB Polypeptide
LPRAKSITLAQTGWKYEGGNRVWLFGRCYRFHQSREIVGIIKTLTIKRSPTGRMEVMFSCLCEEEPVVRSKTGHTAAFDFGLTQFLTGHNGHDIPAPLPLRHSLRQVRKANRALSRTLPGSAIGNKPDTRWQRCTGALPTSGRPGIGTLPMRCVSSMTTIYLEDLELRGMAALWGRKVSDLGFGRFVQILHQTATKLGTHIHHIDRFFPSTKLCHVCGTLNAFITLRDRVWTCACGTIHQRDRNAARNIYREGASSHAQGRCKTTSVAATA

SEQ ID NO: 42882 - protein, 511 aa, unknown
  TnpB Polypeptide
MKLDSNNHSVFMLHYHLIMCIKYRNKVIDDKISNHLKEIFERISASYNITLEEWNHDTDHVHILFRGHPNTELSKFINAYKSASSRLIKKEYPQIRKSLWKEMFWSQSFCLMTTGGATVDIIKQYIMSQGKKMANKAIKYRIYPTTEQSIMFSKTFGCCRKVYNLMLSDKIEGYKATGKFPIVTPAKYKKDYPYLKEVDSLALANKQMDLQAAFRSTFSKSRKKKNGFPRFKSAKHSRKSYTTNNQKGTVAIMDKRYIKLPKVGKVKAVIHCIPDDNWIIKSATISQESDGKYYISVLFEFEKVENTYIADKTNAIGLDYASDGLYVDSNGNVGTNHKYYRESHDKLAKAQRKLSRMQGSKKQEDKSNNYIKQLRKVNKIHRHIANQRLDNLHKISTEIANQYDVVCVESLNMRSMSNKGFGNGKATLDNGYGMFLSMLEYKLSDRNKYLVKVDKWFPSSQICHCCGVLHPKMKDLANRKMVCDCGLTINRDQNAAINILNEGLRLLSEVA

SEQ ID NO: 42883 - protein, 394 aa, unknown
  TnpB Polypeptide
VQLVEKHVVLDDRFYNICNKSALLYNFVTYHYRQAIFGKQEYFSEFEMSTICAEFNQEDYRALPSQTSQQVIKQVFKNFKSWIVAKKEYVKNPSKFLGKPKIPKYKDGKKQNIVVFTNQQCKLKDGLIHFPKMVNLAPIKTKVNNFCQVRIVPMATCYIVEIVYERKEINLGLSKENVLSIDLGLNNFATCVTNVGLTPFIVNGRPIKSFNHWYNKKKAKFMSYVRDKGTSKKLQQLNNYRNFWIEDKNHKISRYIIEYCIANNIGRIIVGKNDSWKQSINLGIKMNQKFVEIPHAKLIQKLEYKSQLVGITFEITEESYTSKIDHLAGEEMKKQERYLGKRVKRGLFQSSIRKLLNSDVNGSIGIGIKVIGNSFVQRIINSGQVFCPKIVNIF

SEQ ID NO: 42884 - protein, 394 aa, unknown; identical to SEQ ID NO: 42883
  TnpB Polypeptide

SEQ ID NO: 42885 - protein, 385 aa, unknown
  TnpB Polypeptide
VKLTLKIKLLPTDEQVNLLFDTLKEANAVCNAISDVAWEKRIFNNFKLHHEVYHAYKATFKLSSQVLVRCIAKVADAYKLDKKVKREFRTLGSIGYDSRIMTYKPNNIVSLWAIGGRIKIPFVCHNPDYLPYIKGEADLVYKKGKFYLFQTVDVPEEYIEDVEEFIGVDFGLQTLAYTSDGINHSAEWLNTYREHRQKVRSSIQAKADTSKRSTKRNCRKLSKRLSGKERTTANLVNHTISKSIVKSAKEQGKGISIEDLTNIRFTSKRRNKKFRTKLGKWNFSDLRAKLEYKALLNGVKLVVVNPAYSSQTCHSCKHIGKRTNKVFKCTNTNCNVGSIDSDYNASKVISLLGRTVNCAGESNNMCCSIAHVYLGSKPIGLLANG

SEQ ID NO: 42886 - protein, 385 aa, unknown; identical to SEQ ID NO: 42885
  TnpB Polypeptide

SEQ ID NO: 42887 - protein, 449 aa, unknown
  TnpB Polypeptide
MARKNKMEFCFAVHMRMFPSHRQEQILWKNLNASRFIYNQLLANSYTDSAINKLNKLYPIPKNYWKYRTVKGKKTAITKSKKRAVGLDRITVEKYPWLGDKDLDSLMFYNTEIHYQSAWQMFRKVHQSGIPKFKRKDRSVQSYSTSAIKQKGATLYTKSSIRFLDHSHLQLPKIGRIKVKRTRPLPNNNAVITTATVKHFSDGTWFVSLLLRSNQSFVKELPLATDPIGIDLNLTEFLVDSNGNKVDNPRYYRKSRKHLARLQHELAIKYRRAKKDKRNLRDCKNYQKLRQKVASLHKHVLNQRNNFTHVLSTALVKNHDLVVAENLQGKNMIKNHALAMSISDAGWRTFLNQMEYKAKMYSKTFVEIDPKYTTQRCHACGHIKKGKDRISLSGNKAHQTDHFTYICYNKECPLYMQKQDRDVNASKNILDKGYSVLLGFASPKTKISR

SEQ ID NO: 42888 - protein, 395 aa, unknown
  TnpB Polypeptide
LGGVALLPLDICSTLCNTTSMRKSFQYRLFPNKKQVKALENTLEECRWLYHHLLEKRRDAWEQEGQSLSLYQQQETFSILKQERSSLKSVHSQVLQNVAVRIDLAFQAFFRRCKAGEKPGFPRFKGRGRYDSITYPQSGFSIAHDDRVCLSKIGSVKMVYHRPMQGKIKTCTVRRSSTGKWYVSCSCEIEPEYLPENRESVGIDVGLKTFATLSDGQEIENPRFFRAEEKAVARVQRKHSKLGKGTPQRRKHRKAVARVHERIAWKRQNFTHQQSRKIVNQFGVICVEDLEVNRMVHNHCLAKSISDAAWSAFFAQLSSKAEGAGRQLVKVNPAYTTQTCSRCGHRQKMPLSERVYHCPCCLLSLDRDVNAARNILALGLQCRVVPEAPGLSRGE

SEQ ID NO: 42889 - protein, 395 aa, unknown
  TnpB Polypeptide
VKEIKYTYKFRLKPTKEQEILLSKHFGSVRYVYNYFLNQRKEEYLNNKKSITYNKQAGFLTQLKKEEETEWLTEINSQSLQYSLKCLDTAYQGFFKKRTQFPNFKSRKAKNSFTCPQFVKTEGKLLFIPKFQEGIKMIMEREIKGTIKKAAISKSSTGKYFVTILTEKTYKPVKKTNKSIGIDLGIKDLLVLSNGSKIKNHRFLKHYERQLKLHQQHLSRKTKDSSRYEKQRIKVAKIHEKITNSRMDLIHKITLNLVKEFDTIYLEDLNVKGMMKNHKLAKAISDVSWGKFIDTLTYKAEWNDKEVIHIDRFFPSSKACSSCGWINNNLTLKDRQWVCKCGEIHDRDVNAAINILKEGCRKDISGGTSDYKRRAEIRLSSESTGDEAFKEKELI

SEQ ID NO: 42890 - protein, 359 aa, unknown
  TnpB Polypeptide
MCRTLDDCRWLYNRLLEERRLAYESSETSLSLYTQHARIPLLKKERPTLTGVHSQVLQNVAVRLDLAYKAFFRRARAGETPGFPRFRGKGWYDSFCYPQAGRKGGYWLTDTEHVHLSGIGIVPLVLHRPLEGDVKTCCVRRTSTGKWYVSFSCEIETQVLPASAEQVGIDVGLASFATLSGGESIANPRFFRKDEKALATVQRRLSKQVKFSPAWRKRKRAVAHVHERITDRRKDFAHQHSRRIVNQYGVVATEDLSVNQMVHNHCLAKSISDAAWSQFTTYLQYKAENAGRSYVAINPAYTSQDCSRCHHRQKLTLADGDTCCGLELDRDHNAALNILALGLESMGMAPRSPLLEQGE

SEQ ID NO: 42891 - protein, 450 aa, Moorea sp.
MQLGYVYKLIPSSEQVTTMNRWLDMLLAQYNYLLKDRNDSYEQVKSPKMGDYCDLKTRGEVCPLTCSVNKSTSVGYPWKKSQKNPRRSVYEVQSSTLPGLKRERPWYKEINSTVLQQMLRQLDTAFSKFFFGVAGYPKPKRRSRYRSFKYAPGQVKLDGNRIYLPGIGWMRFHNSRPIPAGFTMKSVTVRRKSRGWFVSIQIEDKSVPLPPVKTADEINPNHVKGCDLGIRKLVSTSDGETIGNPANTKKYKRQRRRLKLRQRSASRKQKGSNNRKKLFRRVASLHERLTNKRSAYHWEVAKKLVNGADALVFEDLNVKGMKSRCKPNKNENGGYDPNGQSAKRGLNRVISDAAWGELVKKVEVVAGKSGIPVIKVNPKHTSVECPRCHHISADNRDGEKFVCTECGYHDDADVNGGVNIKNRGLKRLGINPIQLPSVRGKVTPTEITAH

SEQ ID NO: 42892 - protein, 390 aa, Coriobacteriaceae sp.
LPPRGGTSRTRRACRDGQGVRIPHISERIPAGAAAEDLRLLPLGLQQGAVHAPGGIRRRWEDEGHQLLHHADTPVEEIRGPVALGGRLDGAPAVAARPGQGVQELLPKPRQGRLPQVQVQARRQKVVSHQQRHHRRRQAYQAAGARPGQGPRQQAGRGTHPVGDGEAGRERQILRDRVLHGRARAADAAGPRRGHGDRRGHPRPDGALRRRQGRQPEGPRQGGKEARTRAEAALPQAEGVRQPVHEKVANRRKDAIHKATTSAVRESQAIAVEDLDVRGMRGDHRLAKAVSDASMGEVLRQLEYKCTWYGRGFVRVDRFYPSSKTCGCCGAVYDGLTLAMREWRCPECGCVHDRDLNAACNIAREGGRILEGTAGRAGTGAKALTLVEQA

SEQ ID NO: 42893 - protein, 219 aa, Bacillus sp.
LTETEVLPKPKTGSSVGVDVGLKHFAILSDGTVFENQKHFRKLEKKLVKAQRILSRRKESALKRTCKLDDAKNYQKQKVEVARIHEKIRNARSDYLHKVSSEIIKNHDVIGIEDLQVSHMLKNHKLAKAISEVSWSQFRTMLEYKAKWYGKQVIVLSKTFASSQLCSRCGYQNKAVKNLAVREWDCPSCGTHHERDLNAGLNLRNEAKRISTAGTVEIA

SEQ ID NO: 42894 - protein, 375 aa, Dictyobacter sp.
MESGSPVLDFIIEVEKEAPPEWDGMGRVLGADWGVHSLLTATAVDETGAQVGRPFFLETGGFDGRQARTRRQIDELKKKVARFEQERDAVSQGHSKRAWYEIRLACYRREVDRCWRKYEQRNRALAHLASNVLLLLCRLHGCQLVSMESLKTLKTTGRGVRGRWRNYRNNATIRGEIWRLLRYKCHLVGLRFQTCPPRGTSHTCPHCGTSARTYRSPDERGETVPWGRWLWCETCSFNGDRDYCASLNIARLGMAYLLHMKHTGKARACSITDPRVKPVSYTGAGSALLLPPTGPTPPDIFGERSVTFLVGWVRLSCNRHCRRRCSCDCMDSCILLRIVTDFSNGSVARRKLISQNSEKRRTRDRLGRAEMLNSS

SEQ ID NO: 42895 - protein, 373 aa, Thaumarchaeota sp.
MKAVKTVVFGYQANPQTRELLCGARDMINEAIRTCIAENIRGRLELRDRIYKEIQEQYGVVSCFPYSVAEVAWSIVKKHKHWHRRPYAKRFMFKMDSANFSLNYSILSLPFRKGERVLIPLQYGEYQRSFLMDKTLKRGSVTITETSIIIAFSKESTLAEPSRRVGYDVNEKSIVGSDGTIHDLSEVARLHTLYGIRRSKFYEEHAPDRRLKRKYASSRREEERVDQALHRVSTLIVEKARANNEAIVLERLKGIRYAHQRGNGERTAKRRRIAQWPFRKLQSYIDYKAGWAGVPVEYVSPSYTSKTCNICGGINRNLKLTDRSWLCPHCGAMLDRDLNAAINIERRGKIRCLGEARPEARGTDEAVKGNETG

SEQ ID NO: 42896 - protein, 370 aa, unknown
  TnpB Polypeptide
MKKSFKYRLFTNKTQEAKLNELLSSARFLYNNALEHRIVCYKQWKKSINYYDQSNALKEIRSFDDGIAKLNFGASQNTLRQLDKAFQAFFRRIKSGDTPGFPRFKGKDRFNSITFPTYGDGIKLKNGKLYIQNVGYIRINLHRNLEGKIKTVTIKRQNDRFYASFSCDEVPQNILSTSTKEIGIDVGIKSFAVMSDGQVIDNPKYLKQSESKLKEIQRQQSKKRSKNLKKKLARLHEKVSNQRKDFQHKLSRKIINEFGYIYVEKLKPKEMVKNNFKVLNKYINDAAWTQFFNFLSYKAENAGRKLIKVNPKNTTQTCSGCGKIVPKDLSVRIHNCPYCGLILDRDYNAALNIFRLGHSLCFKQEAICFS

SEQ ID NO: 42897 - protein, 390 aa, Phormidium sp.
MRQVVKVRLYPNQQQKQLLEQSFGNCRWLWNQGLNWMNQTYKETGKGLSSYDIKKKIPSLKQEYDWLTLTYSQCLQQVCLNLGTAFNNFFEKRARYPRFKSKRGKQSIQYPQHVKVLDNALKLPKIGEVKAVLHRPIEGKVKTVTVTKNRCDQYFASILLENGKPKPDSSAYGKALGVDLGLNHFAVTSDGSKFENPRWMAKHEQNLKRKQQQLSRKQKGSQNRDKARKKLAKVHNKVARCREDFLHKLSRRIVDENQVICVENLNVKGMVKNHSLAKAISQVGWGMFLTLLNYKAEQDGKIYIEVDRFFPSSKTCNVCLNQINSLPLDVRYWTCSHCRTHHDRDINAAINLREEGLRLLTGRINPLWRPPGTAPHLRDAGQSLLPRCKT

SEQ ID NO: 42898 - protein, 443 aa, unknown
  TnpB Polypeptide
MQKRKFTVVTQLHETNNTNLIEYFDTTRVLYAKAMRETFHVLKRVDNLNKSSYNTYLQNKYDITRRTANSILSDAQGRLNALTELKKYEKTQLIRKINHLENSIIPKLVEKRNDHNEKLRQKLSVSLVKHRNLRRKIVAKKSKLNHLKQKLENLNYQTETGLFKLCFGTKHLLQRDYEKFINQRDSQMSFIGSKDEKAGNQMLQLTYNSKNNQFDIKLRKDFGFKTAKGADRYVYGKVYFRHHKNRVISILRQGNSPLSYKIIKKNNRFYLYCTFEIQVCDEDFVTHSSHGTIGLDFNKGFITLSETNQYGHLVQTQFLPYRFKSGNKTKTDLQAIANHVVILARTTGKDICIKDLNFKNKKAQTESKSGKKYNNMLHSLAYSQFMTTIESCAYQNQVVVNKINPVWTSWLAKQLYCPTMKLNVHTGASYVIARRGQGFNDSV

SEQ ID NO: 42899 - protein, 654 aa, unknown
  TnpB Polypeptide
MENPKEKPPEFFKSTKTSLKSILKHPEINTTKINDVVIKAHKIVIHTLQFLKMYTLHHYQTYSHTIHIIDKVLILNIMKVVCGEKTEMRGVKPKKETIELKDKLTAFYTEHYKPYTQPEQLDYEYMSNVLSYLCEDIMTMYENNIQLHYVDYVERFVNVVWKKKMMVEKIRKIFSTKKEREARIRQLEKEIRKIKNDLLNVDSSIAYTSHSYYHKWITQQKKHILPNKEKFQKQSIYYDLKCKPMDYFPCMIAMMNLVENELETISNVFPLRSSIAPGYIRLDTITLVYLLLRKEQGKKSDFSNQGNTKKHEDKIWKFFFRTEKKVFRKTDFSFHHMISTDGVGVSILFIRDDLVGKRLPSAKKGVSKELYIDELNDYSTLQNKKIVGIDPGKSDLIYCVDDASKDANVFRYSQDQRRKETKMKKYNNIILGMKTKKIQGKSVIDYETELSLYNRKTLCMDKFKAYINEKNRINHLLFDFYSKHLFRKLKFGRHINTKRNEQKMIRDFRKMYGNPEEVVICIGDWEQRKQMKYKEPTLGKGMRSLLRKNKYKVYLVDEFRTSCKCSKCDGGVCEKFMVRKNPRPNKDDMRLVHGLLRCKSGCGLWNRDRNGSSNIYKIAYQAIHKLERPSYLCREIKSNQAVLTNCYKQNIHKV

SEQ ID NO: 42900 - protein, 364 aa, unknown
  TnpB Polypeptide
MKRTLKFSLNLANTGKIEVLNKLTNEYKKAVNFYLQVLSSTNKYILSEKEVKSFNSPLSYRYKQCAKRQAIKIWKSWRRNKKKGKLPEFDGALILDNRFIKIEKAKASTFDYWAKIATLNKGHPTLIPIKSYNYANEYLQNWQLVNGGRLKIEDNKYLLLLTFKKKTPLKKKEGKTIGIDIGIKKLIATSEGKLYGREIEKLMDKIQRKQQDSKAFKRAIKERNYYINKSVKELPYNEAKTIVVEDIKDIKKNTKKKRRLRKQFRTKFQRWTYPLLTSRINQLCEINGVHFLTVEPAYTSQTCSKCEFVHKLSRNGEIFKCRNCGYIVDADYNASLNILNLGIAQQSMVAESARANEVDICLLN

SEQ ID NO: 42901 - protein, 515 aa, Kibdelosporangium sp.
LKQLTAQDEAVLRLVGDHLGSLAASDLKVRCAAGLEHDSDQWATRKRGLTEHSSSRWAGSITKSTHDQWASAHRAQFAHIQRLEAGIRMITRRLSLPVGQQGTKNTPGGYRSRREWFAKTRRLHVLQDRVAALYPKRDAGIVDVVRGGRSLLTTRHNLDAAGLTEPEWRRRWKSARRFLQADGESGKRFGNETIRITPDGEVSLKLPTPLVGLANARHGRYVLGAPVTFSYRELEWHNRVETNQAVAYRIHEDVVRGRWYITAAWHRPPTVSTPLRVAIADGAVGVDANEDHLAAWRLDRHGNPVGQPRRFDYELSGTADHRDAQIRHALTRLLHWATSTGEPAVAIEDLNFDREKTREKHGRNTRFRRLISQFPTRRLRNRLVGMAARYGLTVIAVDPAYTSTWGAQHWQKPLCTARRTTTRHEAAAVAIGRRALGHPIRRRTAPPRDDQSDRRGHRTAQAPSGIRGHEEARPHQHGPRTRSVQPGGGPKAGDQDSQDRSGRPAEHQYLLPLSR

SEQ ID NO: 42902 - protein, 417 aa, unknown
  TnpB Polypeptide
MNRLMKSHPYKDLPAKVSQQILMILDKDWQAFFEAVKAYNIEPTKFTGSPKLPKYKDKVKGRNILVYTIQAISSKQLKKGIIHLSGTNILIKTLVKPEQICQVRLVPKCDSYVIEVIYNACAERSRSKPESTSDENQKELVASIDLGLNNLVALTSNQPGFVPLLINGRPLKSINQFYNKRKAQLQSRLKESRKTSRRIQRLTRCRNQKIENYLHQASRSIINILRSGKIGTLVIGKNVQGQNEINLGKQTNQNFVTVPHARFIEMLEYKAVLVGIKVIVQEESYTSQSSFLNLDPIPVYGNSDTQKKVFSGQRIKRGLYKTSCGQLINADVNGSYNIMRKAIPNALCNGIESCVVQPRRLNPLEVKAKGEGFNASHGTVIDDYTFTSYKDTHQVRKPLEILRFWDDRLITRLQKMI

SEQ ID NO: 42903 - protein, 345 aa, unknown
  TnpB Polypeptide
MLVRKVIKAKIMAEANNGKLEALESEYVNFQKALRGEEAKLYSATKQQAERLLRKIKKQNGGKLKQKEYPLILRNDVYNVWITENKLSKYWIKIPVYGIRGGIKLPIKPHCEIDMSWKFKEAKVSRRKNGWFVHITVEKEVEIRQEYNNILAIDLGIRRIATVVSTADIRPKFYGKELRRVRGHYFYLRRKLGKLKKFKAIKKIGRKEKRVVDDLLHKISREIVNRAKEEHAVIVLGDLKGIRKQDKGRKFNRKLNSFPYYRLSKFIEYKALWEGIVVIKINEANTSKLCSRCGSQGLRHNGKFVCPKCKVELNADYNGALNILKRTLGYISRVGAALTQPELVG

SEQ ID NO: 42904 - protein, 371 aa, unknown
  TnpB Polypeptide
MYSSTTIHIKNLSADDIKTLNLLSSMIAELYNNCINFIKSNYENDNYIPDDVSLYREMSKTTAFSNLGKSYVYTLNIATQNFKTSIRKHLKLPNSQKQYHGITLKGNEAHGTYVKIPSTKYTKELIIPIPPIYQNLEVSIFHIKRCSADYWELILTYKSKLQIPDFKKVNFVGVDLGLENLITAVCSNGNTVIFDGRKCKFIHYQKLKATSKKQYYRLRNQMTDYINKVINAFIQFCIENEVKAVLVGNGFSRYYREGYMDKYCKEIPYDDLQAKLKDKCLKYGIKHYTTSECYTSKASFIDNDITPLDLRGTKKFSGKRKKRGVYVSKDGYILNADVNGAYNILNHSHECDLSHLQNNPKLIKQPKRIRF

SEQ ID NO: 42905 - protein, 229 aa, Streptomyces sp.
MQLRYAFRLYPDAGQRTALARAFGCARVVFNDAVRAREDARKAEQPFPTAGQLSRKQKGSKNRAKARLKVARAHAKVSDARREFHHQLSTKLISENQGIAVEDLSVAGLARTKLAKSVHDAGWSAFISMLAYKAERYGRTLIRIGRFTPTSQTCSACGAVDGPKPLNVREWTCTACGSVHDRDHNAAINVKTAAGLAASACGALVRPGVTPAQREETGSHGVPTGSSAA

SEQ ID NO: 42906 - protein, 410 aa, Nostoc sp.
VLHKAVQVRLYPSKEQEIQLAQAFGCARWWWNYALNKSIETYKETGLGLTRAALNALLPALKKAEDTIWLADCYSQVLQATTVNLTTAYKNFFDKRAGFPKFKSKHGKQSIQYPQNVKIVDGNVKLPGNIGIVKAKIHRLIEGKIKTVTVSKTPSGKYLASILTEVEGENPVITFGKIYGIDLGLKHFAVVTDGEKVSFYDNPKHLAKHEKNLKRKQKELARKVKGSNSRNKSRKVVAKVYERVSNSRQDFLHKLSYKLVSDSQAVIVENLHVLGMVRNHNLAKAISDVGWGTFTNFLAYKLERKGGKLVEIDRWFPSSKLCSNCFYQINDMPLDVREWTCPHCGTHHDRDGNASINIRAEGIRMLKAEGSAVSAVGGVVSPKLGRKSKFGHAPVITEADTVLGTPSQCG

SEQ ID NO: 42907 - protein, 400 aa, unknown
  TnpB Polypeptide
LAVKSVWQYYAPSREILVLLEVFRRMVNESIRIGIANNVSSLRKLSLLSYNRLAQYDSPSYYKLCAISRAVGILAARKKSVRRGYAVKTPYAVRQQLVSCYGFKTKNGQLEISVSRGKRLSIPLTKHTSDIISQPGVTVRSFTLTRDRLSLCIARDVAPVECASTVGVDRNLRNLTVGNDVETRHYDLSETVRIAKTTVRIIASFRRDDARIRTEIASKYGQRRTARTDHVLHNATKTIVKLAARRREAIVLEEIRGIRALYRKGNGQTRKYRGRMNGWSFREAQRQIEYKARWAGLPVVRLSRRETRCSSLSCPRCGERLQSDRRLARKLWCGNCRIVIDRDVVAAVNLSRRGRVRFARSRPLILLEAQGGAVEAVKGNPTPTVIPGVDAPKTTQPTKS

SEQ ID NO: 42908 - protein, 180 aa, Burkholderia sp.
MILVYRYRVKSLNGLLNKQSRAVNYVWNFCNDTQKHALKWNKKWPTGFDLNVLTTSSSKGLGIHSGTVNATCEQYAKSRSQYRRPYLRYRGRKSLGWVPLKGRDLKREGEAFRFAGNTFRVFNSRPLPEGKIKDGTNFAQDARGNWFLNIVIEMPDVQVRPVRSGVGIDLGLKDFATLST

SEQ ID NO: 42909 - protein, 445 aa, unknown
  TnpB Polypeptide
MPDFLASGRTGRSRKERLVQYNVVTSHRSYEERVKAANGESSKYVSQGWKRTVNGSAPGYGEDYVNLGAVDKQYAAIENDPFTDGEIILKMVIQGEWHRLIFDFDNERFTEGKVTLPLIKIQDGQPVFIFTVVTDNPVVQFSGDHVIGVDVGINNYATVVVRDVKTGRTVYETTLSQRVHSLWNSVRASQRQVRDLRNKAATLLCDRQARMAALDEAQLHREAASRKKRELAILAAQEIADLSHLWDNAVVAVEDLSWVRNTMQNGRWNRGALVQWLTHYVTQNGGWVVAVSPANTSQLCHTCGIKVSHPTHKDSVCPEHGVMDRDVNAASNIAARAASRVAKARVTRAKNRKLMPQQPLRTPPARDSLKYPGRDRTKNKPTPKRKNHRRTVMEVNLPVCPARAQAQRLEASVLADQGARVALGTNKAALKQGNMAYKCRLCDLI

SEQ ID NO: 42910 - protein, 396 aa, unknown
  TnpB Polypeptide
MRKLIKGIKIMLVPNNKQNTLMFQNAGTARWAYNWALGREKENYANGGKFISDNDLRKELTQLKKTDEFGWLNNISNNVPKQAIKDACTAYQRFFKGQAKFPQFKTRKKSPPKFYQDNVKIQFTGTHVKFEGLAKSKKGNKQQLNWVRLAEHNRIPFGKDVKYINPRISHDSLNWFISVGIECPNNIETSLNKGIGIDLGIKDLAICSDGKTYGNINKTKKMRRLEKQKKRLQRQVSRKYEDNRDGSKYIKTKNIIKLELKIKSVQHKLNGVRNNYIQQMTTEIVKTKPSFVSLEDLNISGMMKNKHLSKAIQQQSLYEFGRQLKYKGLWNHIEIRIVDRWYPSSKTCHECGKVNKLLTLSDREWICIGCGSVLDRDLNASLNLRDTENYKIFKVS

SEQ ID NO: 42911 - protein, 888 aa, Streptomyces sp.
MTHHLDEAGLTECVWRGRWEAERWFCQADGGSGKRYDNETFRITPDGEVSIKLPAPLTHLANAPHGRYVLACRIVFAHRGREWADRVAANRAVAYRIHFDTGRDRWYVTAAWQIPPTPTLPIEAALAHGVIGVDMNADHVAAWRLDVHGNPTGSPRRFFYDLTGSAHHRDAQVRHALTRLLHWAQACGVKAIAVEDLDFTAEKTREKHGRKKRFRQLISGMPTGRLRARLASMADQTGIAVIAVDPAYTSRWGAQHWQKPLTSMTRTTTRHDAAAVAIGRRAQRHPIRRRTAPPPPHRSDAVGHRTVQADRRVPGREETRPRIPGPRTRSVGAGRGANAGNQNVQHRPGRSAEHEFWQQDSPPLSLWERSGPASGACQEHGRGGRPGSRCAQHTAPEAIRLRPRLLEQRQLLRRDAPLGPHDQHDVTGGRQFGRRQRRVAALVQHGGEVRPGQQGGDLLGRRRLRDLREAHPAGLLAGLPGRGPPPAQRLGPAVALPLRDAARRRPRHDRVDPDLGHRLDGELAAVALGQGLDDGDPGLLRGLLVHRVELEDQPVLALRVEHDAVRPAARSVREDDVLTGAQPLHGDGVPPLRPVEDVPAAAARVEVLDHEHRRGHSAPPPVNEARAAASSPASTSTSCPAGSSRAIRCPCPAHSAMPCASPALAAALRSGAVRWWISGYAAGAYGPCSRRNRLTRPRAGRPENARVSSVRTNSGLVSACLCRAFAPDSWVARKAVPSWAALAPAARTPAIWPPRMMPPAATIGMLTASRTWAINDSSPMPDPSVSGMSRWVPWWPPASTPWAMTPSAPARSTARASSGVVAAARTKVPTRCRASTTSPLGTPKWKDTTGTGLSRSTTSLASKPSSRPLSGSPSSASYQVASPASWWA

SEQ ID NO: 42912 - protein, 580 aa, unknown
  TnpB Polypeptide
LSYPLRLPDEIQAEALRLLDVSREAINLTVTALWDRLDEFATRTNTYAYKQVEEMIAPPQVHGHRQWRCEAEQAGRILRGQAERKQQFAVILPLLSQGMIQPKTEHKWADKNRKVIKQAVASLREANADGGKVVELQSLLEQACNFYLQNGCFPGTYEEMQPIPVLKAGILPYAGDDGAVMGQTYRMRIDLDQKTLTLALRTPDEQGAWTRTWREKTIQMTLPDLVVERAKQGSPLAPTLREIVEANGTLYAVLDFIVQVPVEKQASFEEIQTVLGFDWGVRVLVTASVVDLDGHQIGRPFFLDSGPFDGRQARLRRQIDQIKAKVDRLEQQRDRFPAGDKRRKPSEEALPILRREIARCWRKYEARNNDLAHLAANVLLVLATAFDCELIAGESLKSMKSAGRGRGAKGRWRNWRNNSQVRGELWRVLRYKCFLAGIRLEWQHPRHTSHSCPRCGEPARTFTSPHHRDQVNDWGAWLCCSHPKCLWNGSRDYAASLNIARLGAALIRHVHTTGRVKHSVITDPSVQPVSYIGTWAALRLPPMSLRGHLMHSGRIYCNGWRLSVKLRSSYATPIMLRFCG

SEQ ID NO: 42913 - protein, 479 aa, unknown
  TnpB Polypeptide
MGSQGSNCWASVVVNRRGYQYVREDIWQAGGWKPRQDSTRSSPGDSMIRAYRIALRPSRVQRVMLAKAAGCARAAWNWGLGRKQAAWKLRKAAIEAGVNPTDAPKVPSAIDLHRDLVLLKKIPVEDGGFPWMYESSKCAPQEALRDLDVAFTATFRRLKAGENPGFPRFKSKRPGEGHFRVSCSVTVTEQTITLPKIGAVRIQPGDRGYAPAGRYTSGAVVQEHGEWFVSVLLEITDAPEIARPDDAPRVGLDIGVRKLAVLSDGTIFENPRALKAAERRLKKAQRTLSRRRKGSGRRRRARTVFAHRHRRVVRVRKDAIHKATTAITRTCPIVVIEDLKVRNMTRATSGKGRRAKAGLNRSLLDAGFGEFRRQLTYKIQRAGGRLMVVHPAYTSQICSRCQVRTDCGSNEIFTCTACGFTDDRDFNAARNIRARSFEQVVAASWPETENARGGEVRRPGKARSHTPTKRERGHRGVHG

SEQ ID NO: 42914 - protein, 438 aa, Idiomarina sp.
MIIRKAYKFRLEPTATQAARLTVLCGHARFVWNQGLRYCLGKLDSGEKIPSAFELNKLVTQWKKEEELTWLKEAYTDNLQQKLKDLHSAWMRCFDKSIAADKPRFKKKGKNQDSIRFVNFNKYCELDGKRVKLPSKLGWLKFRKSQEVQGNIKNCTVSFKSGHWYISFQVEQEIDEPKHNSTSAVGIDMGVAKFATLSHGSCLKPLNAFRKHEKRLAIEQRKLSRKVKFSANWKKQKARVQKLHTLIANCRKDYLHKASHQISKNQCASVASQTVTQGMSHPMVNGCKALYLPERETSKGKIACIEKIRERKLSSSICVEAKTDMAKPDWLNPRQDWDNADPMPTTTNGYVCTSEIYVVCIPEYHCAEIIRDKRNSRTGCLSRSRNGCAATGGSSKGSNPYDDGASIVADDLTVNTGHVMMPEGKGKQDKLRKEGELW

SEQ ID NO: 42915 - protein, 396 aa, unknown
  TnpB Polypeptide
MIRAQPFPCSLAKADADALNRESGRVYTNMLVWHCRIYRRTGHWLSEYAAKRLEDYLGGATILHAHSRDAAQEGFYGACKVAKSQRRMGMDIRYPHRRHFYRTTTWKNTGIRVRDGALLLARARGLEPIRMPLPANLSAYLADAYKQIELVWDRADRHYRWHVTLEDGAEPAPAPGNALVAVDLGEIHPAALTDGEAAAVITARRLRATHQYTAKRLAEIQSKQAGKKKHSSRWKRLQARKNRFLAEQKKRTRDSEHKVSRVVVDWAKERKAGTLALGDVRDVADGKRLGAKSQQKIGLWSHGKVRDYITYQAKAEGIAIELVDEHLTSKTCPACGHQYKPRGRVYRCPTCGLVAHRDVVGSVNILLRKVHGAVGVYPAAAPGCDDVSLPCLAGKA

SEQ ID NO: 42916 - protein, 319 aa, Micrococcales sp.
VAAALQGTHRPPRWPKAGQDQGLGIVGPQVLRVRQDNRARCPVLVPKIGWVWFKRCPALAQWKSYRIACDRSSRWHIAFVLTPGPIPAPGSGGVAGRVRGLTVAMALSTGQMACPNGLRPKQAEPMGRLQRRFARASRGSRRRKKVRTWIAGRKARDAGRRKDWVQKTSTDLARRFEVIRVENLHIKAMTRSASGTTAKPGRTLARTPASAGASSSPSGDCSLPSSSRRRPAESKRSTPPTRRRPATPANRSHATVAKDKDFVCVSGKHRANAEVNAGRNTAAGHGMTARADRRFLARFVKRKTQHALPRSHGSCNPGH

SEQ ID NO: 42917 - protein, 402 aa, unknown
  TnpB Polypeptide
VKRLQAFKFQLRPGGQQECEMRRFAGACRFVFNRALALQNENHEAGNKYIPYGKMASWLVEWKNATETQWLKDSPSQPLQQSLKDLERAYKNFFQKRAAFPRFKKRGQNDAFRYPQGVKLDQENSRIFLPKLGWMRYRNSRQVTGVVKNVTVSQSCGKWYISIQTESEVSTPVHPSASMIGLDAGVAKLATLSDGTVFEPVNSFQKNQKTLARLQRQLSRKVKFSNNWQKQKRKIQRLHSCIANIRRDYLHKVTTTVSKNHAMIVIEDLKVSNMSKSAAGTVSQPGRNVRAKSGLNRSILDQGWYEMRRQLEYKQLWRGGQVLAVPPAYTSQRCACCGHTAKENRLSQSKFRCQVCGYTANADVNGARNILAAGHAVLACGEMVQSGRPLKQEPTEMIQATA

SEQ ID NO: 42918 - protein, 487 aa, Actinomadura sp.
VAEDHRDGEPGRALPARPAAGRPGAQHVEAADRGDEPGDECGDAHGSSVFIRYLQRGDPVLEGGEETGGAVRRGDSPGFVGGGRYGAGVSRYRLCPTPAQEAGLLVHCAHARFVWNLAVEQHGWWTPRRGPAPGYVAQARQLTEARAANPWLAGGSQTVQQQALKDFAQAMANFFGGTHRRPTWRKAGRHEGFRIVGARGRAWEVRRLNRRNGQVRVPKVGWVRFRWSRPVPDGVKSFRVTRDRSGRWHVAFAHVPGPVPAPGNGAAVGVDRGVAVSAALSTGETLNVPGLTAGEAERLNRLLRRLARAKPGSNRRARVKAAIARLKAREADRRKDWVEKTSTGLARRFDVIGVEKLDVAAMTRSARGTLDTPGVNVRAKAGLNRGILANGWGRLAARLEHKAPGRVVKVDPAYTSQTCNPCGHRAPDNRESQAVFQCTACGHRANADVNAARNIKDTAVGRTVAARGGTPLGGPVNREPQPALLPA

SEQ ID NO: 42919 - protein, 246 aa, unknown
  TnpB Polypeptide
LVYPQSGWRILAREIRTSGNKKLVLRLSNLGVFKLIVHRDFPLEKVKRMAVKLTRSGKVYVSFIVEDYGFPKLPNTGKAVGIDVGVEKLLVTSDGEFLPNLRPYERALKKVRRLHKALSRKKFLSKNWFRAKIKLARAYEHLADLRRDLYMKLGKYFAEHYDAVVMGDISVKQLVGGVSRGLRRSLQDAAFGMMRIVIRYQMEKYGKEVVFVDPRNSSKACAKCGYMKIDLALSDGVFECPVWLEG

SEQ ID NO: 42920 - protein, 321 aa, Natrinema sp.
MTLSSSVGFLPDLKGRDIRLVPPVKYDTRTMTLFDDGTVSLSTVDDRIRCDLTLPDDEGGYQHQYLNNEDWELTESTLSRRDGDYYLHLGFRKPKPEKQVEKQGDDEDKTVHSVDLGIVNIATTSTAYFASGRELGHRHREFERIRGNLQQTGTQSAHRTIQQMSGRESRYVRDVLHRVANDIIEEALEHSCAYIAFENLRHIRERAPPVKEFHQWAHRQLVDLVEYKADAEGICVEYVDPENTSRRCPECGHTSEGNRARQAEFECEKCGATANADYVGAKNVRWRYIRRSLQSSRRTGDGQLALKSGTVTPNRGFVPSD

SEQ ID NO: 42921 - protein, 411 aa, unknown
  TnpB Polypeptide
VGCPALSDCGSTVRAVSRYRLYPMGPQEAALSEHGAHARFVWNLGLEQRSMWRKGRGPIPGFAEQCRQLTEARAASGWLAAGSQTVQQQALRDLDRAFADFFAGSHRYPRWRKAGQHEGFRIVGAQALRVRQDNRRWSSVLVPKVGWVRFRRSRALGDARSYRITQDRAGRWHIAFAVVPAPIPAPGTGEVVGVDRGVTVSAALSTGELLHAPGLRPTEADRLRRLQRRLARAQRGSNRRKALVVKIARLRAREADRRKDWADKTSTDLARRFDTIFLEDLRIVSMTHSAKGTVEAPGRNVRAKTGLNRGILGSCWGLLAQRLDDKAPGRVVKINPAFTSQTCSVCGHCARENRESQAVFSCVACRHTENADVNAARNIAAGHAVTGRGDTAALGRSVKRQPRHARLLRVA

SEQ ID NO: 42922 - protein, 383 aa, unknown
  TnpB Polypeptide
MLVKPNRENVERAIKRFYDNCKKKVPGKKGYPRFKKHSRSVEYKQSGWKLSSDKKFIKFTDKKGIDLRSRYANGQVKLKGTWDLWRFDQKLIKRVRIVKRADGYYVQFCVKVDNSEQLEATGFTVGLDVGLKEFYTDSDGYSESNPRFYRKGEKRLKFYQRRVSRKKKGSSNRKKAINRLGRQHLKISRQREEHAKRLVRSYRKIVEPYYKRFNPFMQSRTPIKAPLSKVSSPARCVIRSNDLVAYEDLRVKNLVKNHCLAKSINDAGWYKFREWLEYFGQKLGRITVAVNPAYTSQNCSSCGEVVKKSLSTRTHVCKCGCRLDSPKATLRERDHNAAKNILTRALSTVGHAGTYQNAWGDLSSTLPGSGLVEQDGSMNQESP

SEQ ID NO: 42923 - protein, 262 aa, unknown
  TnpB Polypeptide
VLDLENKTIKLPKLKNIKIRGYRNLKYINGRILNATISRESNGKYYVSVLYEISEKVKEVTPTSIIGIDLGVKKLLTLSDCNSYENNKYIEKYEKRIKRTQRELSRKVKGSNNYYKCKKKLAVLHSKLANSRKYYIHKITKNITNEYDIITCEKLHTKEMIIHGKKNTLSKNINDACFNEILRQLEYKSKFKGKKFYQIYEYYLSSQICSRCDNQDKKYKNLNERIYECTKCHLELDRDLNASINIMFEGLKMYIENSANSV

SEQ ID NO: 42924 - protein, 161 aa, Clostridioides sp.
VIAVKKAYKFRLYPNKKQQELINKTFGCCRFVYNKYLAKRIDVYKNNKETFTYKQCSSDLTNLKKELKWLKEPDKFSLQNALKDLDNAYKKFFKEKAGFPKFKSKKINRFSYKTNFTNGNIMYCGQHIKLPKLGMVKVRDKQVPKGRILNATISKEPSGRY

SEQ ID NO: 42925 - protein, 379 aa, unknown
  TnpB Polypeptide
MKRSLKFSLGLANTNKLKQINRLAQEYKRAVNYFLKRLFQKKDLSEEFLKSYNSPLSERYKQCAKRQAFKVFKSWCRNKKKGEKPKLRNSSLVLDYRFIELQKSTNSNSFDYWVKIATLDKGKPILVPLKSYDYATQYFKNWQLLKGGRLLKKDNNLSVYNVQADWFLELIFEKETPIKKEEGKTIGIDLGIKKLVTTSEGKEYGKEIENLMNKIQRKQQNSKTFNKALKERDYYINRVVKELSWNKLKAIIMENIKNIKQNIKKEKRLSKQFRSKFQRWTYSQLLKRIKLTAEATGVHLQLVNPAHTSQTCSKCGFIHKLNRKNEIFLCRNCGYTLDADYNASKNILLSYLAQQPMVAGSIKATALYLKGLGPAYFFK

SEQ ID NO: 42926 - protein, 395 aa, unknown
  TnpB Polypeptide
MLRGVKIALDLTDEQEQQMWKSAGVARWSYNYAITRDNEHYLNYLEDNTLPKALTEGQIRKELTVLKNTTHPWLKEVGSNVIKQAIKDWNDARSRFFKGLGKAPKYKSRITSKPSFYVNYESLRRVEGGFRGERLGFVKTTQPLPRIPKGSYYKNPRISFDGKYWYLSFSYEVPEISVELTDLIIGVDLGVKTLATLSTGEFIENINKSRRVKQLEKQLRREQRHLARQLQANTKEYLTTANGGRKPIYKRPLELCSNIQETKRKIKLIHRKLQSIRINHLHQTTSYLVKQLPKGIVIEDLNVKGMMKNRHLARHIQNAMLYEFRRQLEYKCLQYGIYLVVADRFYPSSKTCSYCGSIKSNLNLKERVYKCSSCGLEKDRDLNAAENLAYYFYKG

SEQ ID NO: 42927 - protein, 412 aa, unknown
  TnpB Polypeptide
MRSQKIRLKPTKDQESLMWWYSKVARNYWNLLVDIDKRNNIGEFDEILSRNGNRTYHSNFYDREIYNLSSSDYRNLAKIVVANNYEESIDNWSWYYKSNQSFIYSFIARELVTIRRQNKGKLNFRSIRKVQPNFNVVCSISSNKKRPSRIYLKDNGKLQIPTLGDMKLGSVRTDFDLSCKKQVANISFDGKYWYLSYTEGIEVQVTDLPDYTEGVGVDLGIKNLATVSDGTLVPSIKTFRRVRILNKRLKRLQRKVSRKYLINKCNKHNKTKNIIKLERQIKLIHRSIKNIRINHIRKFISDLVKKQPQYIAIEDLNVKGLMKNKHLAKDVANCSFYTIREHLIRKATERHIAVRLVDRFYPSSKTCSNCGSYKRDLKLSQRVYHCDNCQEKVDRDFNASLNIARTDRYVLA

SEQ ID NO: 42928 - protein, 427 aa, unknown
  TnpB Polypeptide
METRRTYKYRLYPKREQAEALDYQVSEARHLYNAALQERRDAYRGHGISRNYYDQCRELTMVRAAGDIGLVNAQVGQDVLRRVDKAFKAFFRRVKAGEKAGYPRFKGRDRFNSITFPSWGNGCHLTETGRVKVQGVGILKVKMHRPLVGQVKTLTIKREAGKWYACFSLVVVTPAPTAINEAIGIDVGLSTFAALSDGALIGNPRHYRHGQAALRVAQRRVSRRKKGSHRRRKAVQLLQKAHKHIRDQRSDHHHKVSRQIAQQYGLVAVEDLNVKGLARGMLAKSVHDVGWGEFLAKLAYKVEETGGRFVEVDPRNTSQVCSGCGCLPDVPKTLSNRVHFCPRCGLSIDRDVNAARNILALGLSVAGGTWHSSACVPAEAVSLVGGVVTAPVYPRCPHSSRRSSHSRTSTDPQRLRWRHNDRGTEVA

SEQ ID NO: 42929 - protein, 471 aa, Moorea sp.
MYKTIPVKANLTEEEQAFWVFQCQQANSLVNCAIYYSKQKHYTWLEQQEEAFTTYWREDDLRYGWKTYKCSVKYAELCKNLKENPHYKAMAAQSAQQTLKTVAESINSYNQLVGHYYKGKVDRPKLPRYRKKGGLAAVTFPRQALGYKSGLFYPSISKETKPELITEITLEPPDFIDPDWVKQITVRPYLGQLWIDWVIDDEKQPISDNPNLDYSQAWSFDHGGTNWLTGLSTLGKSLIIDGRKLKSMNQGYCRLVAKYKQGKPEFYWDSKLDRVQRKRNNQIRDAINKAARFIINRCLNDRIGNLIIGWNEGQKSRSNMGKRGNQNFVVIPTKRLIERLKQLCPEYGIKLTITEESYTSKASFLDDDPLPKYGEKPNGWFPSGCRVRRGLYKTSEGYLVNADCNGAANIARKVATQLNIDLAKVGRGSLTLPHRYEIFKSLNRSYRTRSVREASAKADRGAVSTRLVTTL

SEQ ID NO: 42930 - protein, 483 aa, Moorea sp.
MKVDTAKKRSTQIVPVIGMSELVQAELLSTMKKLGIVRSESYNKLGSISHWGLDWKKAYPEVRIFRTPDTLGLPAKLMEWTVSDVAKAITAQQAACADAVIKKVYKRFPGKDNQKTIKELCKQLKSLAFLDSPLLHRFVRKEFQRGHSWVKNQIVYQQGGYNCRRLYRNTYQLELAGLRRGKRNKIIVRSNRKIKGQIRLIYNQSLSRFEVHFLVDHGQVKIPVKRRSLGLDKGYTEAFYDSDGQAHGKELGEVTTKKSDRICAKNRNRGKLWALHRKLEKTDPAKSARILENNLTRKTENKRYRQDQLEIKAIIGAASKSVFGGESLKVFAENLTQPIRNKRQSKAMSRKLNSWMKGKLRDSLQKWANWTGSVVTEVQPSYTSQIDSVTGTLLGKRSGDSFTRFNGVVLQADYNAAKNVLARGTDKEITRYMSKTEVQAVLLRRTARFLEGMGLSLLDAVELGWLNCKHSKTRAFKQLLNGI

SEQ ID NO: 42931 - protein, 399 aa, unknown
  TnpB Polypeptide
MEYKTYNIELQMSENTRNHWMSLLAQTREAFNFCAQLVTEKNTPLNVKTFHNECYDAIREKYKMIPAQGVIKTYKEVLSALRSIKRNKHEDAKTPQRKQLALHLDKRMYSKLSIDGILLSTSEKGHREFCTFVLYDQVRELFNTCNFSDPLIFARNGRLFLSVPFEVATPPRVGDTSLGVDLGMKRLFVTSEGKGFVDKEYLAKRRKLRFLKNKLKKKGTKSAKRHLKKLSHKEYNLSKDMQLRAAKALIESTDASYIVLEDLKKLKQRTSKTKNGGFKRKKHNSAISQVPFANFKEVLTHKAALVGKQVITVSPIWTSQTDSRTNKRDGVRQGCRYYCSDRVVFDADWNAAVNIAIRSKHPISSALPIDGRLTFLVGKALLAASSSVTFNGGGQAHTL

SEQ ID NO: 42932 - protein, 379 aa, unknown
  TnpB Polypeptide
MVIRAYKFRLYPNTAQAEMLERHMGCARFVFNWGLEQKSKAYSQRQEKLSCLALMNRLPELKAKLPWLCDVNAQSLQMALRNLDVAFTNFFKKNADFPTFKSRKGRQSFQCPQACSVDFEKGVLHLPKVKGIRAKFHRQFEGKIKTVTVSRTPTGKYFASLLVEQEGEEPTLAPVTDNTVGLDMGLKHFLITSDGKKIANPRHLRRSSKKLGRVQHAFARQQKDSNRRQKRKKQLARLHEKVASQRADFLHQVTHRLISENQAEAYAIEDLAVKNMVKNHKLARSISDASWGMFFGFLSYKAPRQGKNVLTIGRFEPSSKRCSVCGHINHDLTLKDREWDCPDCQAHHDRDVNAAKNIKAFALIKHHSKSESTAGSVET

SEQ ID NO: 42933 - protein, 170 aa, Nocardiopsis sp.
VSGGTGNTEQTIDLLPETSRGLDEQRRGQHGSLVHTGSAGLRRGRQERLDDLLCRFREHSPDVRLGIRARIRLRKPQRVTLHSWAFAQLGSYIADKAERACVPVVRVDPTYTSQGCSECDHVDRKNRPDQATFVCTSCGFAEHADVNAGRDIAKRGVAVWAVSHAADDAA

SEQ ID NO: 42934 - protein, 461 aa, unknown
  TnpB Polypeptide
  misc_feature (287)..(288): Xaa can be any naturally occurring amino acid
MYGCQQNLISPNDELRAVLEFICSESHKLTNCGIYYARQLYFKTKKLIGKYDLEKEYKTNPHYQVLHSQAAQQILRSVAESFKSFKELDKKYSKGELHFKPKLPKYRKGAKSAGQNTLSGVSPSGTLRERGASPEEILCSGYALVTYPKQALKLVDDTIKIPLGNTVKRWFKLDSFTIPIPSNLQFEDIKELRILPRNLCFYAEFVYKQKPSPDLSLNPQYALAIDPGINNWLSCVSNVGTSFIVDGRKVKSLNQWYNKQISTLKEGKPQGYWDDQLAHITEKRNRXXDAVNKAARLVVDHCIKHDIGTVVFGWNQGQRQEATLGKTTQSFVQIPTAKLKERVKQLCEYHGIRFVETEESYTSKTSFLDGDFLPTFGAKPEGWTSSGKRVKRGMYRTAKGQLINADLNGAANIMRKVETQLGLSLVKVCRQVLTLATRFRIWETKTKKRNGTALASRAATV

SEQ ID NO: 42935 - protein, 382 aa, unknown
  TnpB Polypeptide
MSNVKLTQKFKLFKLRKRKKELLDATIARFKECVNEWLKAIDQLEEYPNRKNVHEFAYRNVRKKFEDLHSNVVQEAMNRAIEIYRAWLRNPNKGDKPCFKADIISFKSVDIKIEGHFISVPLLNNERVWLPMHVPSKFKQLLKQKIGRVQISRLRDEYYVFISFEVPEPEPYKPRGWFGVDIGLRHIVVVSDAEGKINKFYNSAIDWKKALEYRKADMQRAKDKRYKKGAWRVLRRLSGKIKNLQSYINHCIAKELVLMAKERRCGIAIENLKGLRKGKVGKRHRKRLHKWAYRDLIDKIVYKAKLHGVPVVFVNPKGTSRTCSRCGAKGIIKGRTFVCKKCGLKLDRDLNASRNIAKRAFLSAFQASSPQGVCPGRGIENG

SEQ ID NO: 42936 - protein, 387 aa, Thermoprotei sp.
MWNNNVASWTKAKKLLYRKFRERCPDIPTHYIHEAIRDASQRLKSFMKLKKKGLAKTDKPAVRRWSVGCDNQLWKLTLEGVRIAAHKGWVNIPLQFHKLFWRYYNNGWMLRSSARWKLIGDKLFLYVVFAKDIKIEEETSTKKVYGIDINENNVTIYEYPSSKAVTIVTNFSKIVLGYTYRRTKIQQKWSRIYGVKGNRRLKIALRKLREKDIKRDIKQKLARIITNTVKDGVVVLEKLPKRFQDKVLERNRKLNGFDAHRLKQSSIRGVHRLITEKLEEFGIPYVLVNASHTSSTCPVCGSKLAPMTGHTQRNEWKPRPMKCLKCIFIHDRDVIGAMNLVRKYLLDVGGYAVCLLKDAHDPHVEWFVATMKHGVEAQPVLARPTMT

SEQ ID NO: 42937 - protein, 464 aa, Streptomyces sp.
MAGQEGSPAERPARVTGDEARRIKREDLGIPGRSKHEKRAAVPVKGRTKAAGTRERTYRFRFHPSPGQADQLVRTFGACRWVYNRGLDLRREGWERHRVSIGYAETCRALTGWRRAEETSWLREVSSTVLQQSLRHLDGAFKRFSREAARYPRGKKKGRSRDSATYVRTGFRWLEDPERPGTGLVTLAKQSEPLDVRWSRALPPGAHPVKVTVTRDRAGRYFLSVLVEESVSRLSPVVGKAVGLDVGITSLVTLDDGSKVDHPRLLRRYRARLARLQRQLHRKRRGSRNREKARLAIARLYARISDVRRDLLDQLTIRLVRENQVLVVEGLDIEGLKRRRSGMDKRLRARLNEGITDAGWGALLRRLAYKAEWYGRTLVVVDPRYPSTRICSRCQSVEGPTDLSVRVWTCASCGATHDRDGNAAVNLREEGLRLYRLVVGADPGERVAPPLIRAVDLATYGQAV

SEQ ID NO: 42938 - protein, 367 aa, unknown
  TnpB Polypeptide
VEKAYKYRIYPNKKQREIIAKTFGCCRFVYNTYLAKRIELYEQNKESFSYVQCSSDMKNLKSELVWLKEVDSTALQSSLRDLDMAYQKFFKEHSGYPKFKSKKTHRYSYKSKCTNGNIQYCDKRIKLPKLGMVKTKNKLIPQGRILNATVSQEPSGKYFVSLCCTDVGIKQLKKTGNSVGIDLGIKEFCITSDGEVIENPKYFKKSLNKLAKLQRKLSRKSKGGSNRNKARIKVARQHEKIANQRKDFLQKLSTELIKQNDIICIEDLQVSNMIKNHKLARNITDVSWSEFVRQLQYKANWYGKQVVKVDKFYASSQICSVCGYINKETKNLGVREWNCPCCNTHHDRDINAAINILNEGLRLLEVA

SEQ ID NO: 42939 - protein, 311 aa, Shewanella sp.
LKQYDSIALQQSVINLHQAFDNFFNPKLKAKYPQFKRRHGKQSSYHCVGVKVLDGAIKLPKMKPVEANIHREIVGTVKSITVSMSKTGKFYASILADDAVDAPSPIHTVNKVTGIDLGLSHFAIESNGRKTANPRFVKRAEKNLRRKQRQLSRKAKGSANRAKARLRVAKCHEKVANARADFQHKLSRTLVDENQAVIVETLKSANMMKNRKLAKHIADASWHSFVVKLEYKLKEQGKHLIKLDQWYASSKTCHCCGHKMDDMPLSVRQWNCPSCGTTDIDRDLNAALNIRDKGILELKAAGRSSLLMEAA

SEQ ID NO: 42940 - protein, 406 aa, Okeania sp.
MKLVERHVITKSHNLWLEIDQKAFLSKNLFNLANYYYRQYFFENKKKLNFNELYHQVSKSDDYQALPTKVSKQIIRRLDSAWKSYFSALREWQKQPNKFLGKPKIPKYKHKTKGRNILPYPNESIYKKTLKKGICHLSMSEIKIPTSQTEIIETRIIPKSSCYIIEIVYEKQEEITKNQQIAGVDLGVNNLIAVTTNQTGISPLLIKGRPLKAINTFYNKQRSYLQSQLKTNHNQSNSHRLKKLTHKRNSRVGNYLHTASKRVIDWCINHEIGILIIGQNQNWKQEIKFGKKNNQQFVNIPHYKLIEMLTYKAQLRGIKVIITEESYTSQSSCLDGDDLPKYGEKKPKFSGKIVTRGLYKTRENKLLNADVNGSFNMIKKVIPDVLDQGIKGLPFNPVVVEPLAFN

SEQ ID NO: 42941 - protein, 432 aa, Okeania sp.
LNARYRYRIYPNHIQITKLNQLFGCCRFVWNQSLAYCNQLYADGQKKPSYVDLTKQFITQAKRELVWLKEVASTPLQQSLKDLDQAYKNFFNSCTGKRKGTKVKPPLFKSRKSRQTARFVGKNYQVGQDKIYLPKVGKIKITWSRPLASKPSSVTIVKDSSGRYFASFVVDTCAEHLPKTENSIGIDLGISTFATLSNGEKFEAPKPLKKNLNKLGKFQRKFAKTDLGSKRREKARVRVAKLHAKVKDIRTDFLHKLSTDLVRKYDTIVLEDLNVSGMVRNRKLAKAISDLGWREFRTLTEAKCEKYGRGFGTISRWEPTSQKCSNCGFKGGKKDLNVREWTCFNCGTLHDRDINAAINILEVIQPKTKVETTEAKVIETPVQLSLFNEVAEGHSETIKRTGSHRKSSPKKDANGNDVSTRPESFLQLSLFD

SEQ ID NO: 42942 - protein, 469 aa, Frankia sp.
VRPAVRPAGGGELGRPRGRRRHRGLRRVKTLQAYRFALDPNDTQLAGLRRHAGASRFTYNWGLARVKAALSQRAAEETYGVTGDGLTPVPWTLPALRLAWNAAKREIAPWWDECSKEAFSAGLDQLARALKNFTDSRRRKRKGRRVGFPRFKKRGKTRDSFRYTTGAYGPADATYVKLPRIGRVKVHEPTGALTGRLAEGRARLLGATVSRTAGRWFVSFTAEADRDVPAEPSRRARAGGTVGVDLGVKHLAVLSTGETVPNPKHYQRAERKLRRAARAHARSKPGSAGRRQRAAELARVHARIADQRRDGLHKLTTRLAKTHDVVVVEDLNVTAMVRNRRLAKAVATAGFGEIRRQLAYKTGWYGSTLHVADRWYPSSKTCSGCGWRNPSLTLAERTFHCQSCGLAIDRDANAAINLAHLVAASTSETRNARGADRKTALVRQVAAKREPGTARAGQTGSAPPQGEAA

SEQ ID NO: 42943 - protein, 393 aa, unknown
  TnpB Polypeptide
MLIEAIKLTAKFKLKETPKGLGDLFQTYREIVNFLITYAFENNITSFYRLKKETYKSLRKEYPKLPSHYLYTACQMATSIFKSFRKRKKKGKAKGEPVFKKEAIMLDDHLFKLDLEKRLVKLSTPNGRIQLEFYPAKYHEKFKDWKVGQAWLVRTPKGVFLNVVFSREVEVRELKAFVGVDLNENNVTLSLPNGEFVQIITHEREIRTGYFVKRRRIQQKIRAGRKRKELLEKYGWREKNRLNDLYHKLANKIVELAEKYGGIALEDLTEIRESIRYSAEMNGRLHRWSFHKLQSIIEYKAKLKGVKVVFVNPAFTSCLCPVCGGKLSPNGGRVLKCSKCGFEADRDVVGSWNIRLRALKMWGVSVPPESPPMKMGGGKPTRYEINTLHSLYG

SEQ ID NO: 42944 - protein, 380 aa, Clostridium sp.
MGNIKSQWSNIKNKIKEQIKVNGNLSDEDKHYINYIVKFNSYYHKVLTNQKFDIPKIFKDKNLNFKYLNNIIRRYTRKYKGHIPYSKVGKTFSIDTGLYSYKNRYINITSTKKGKRLSIELADNNKYDRTMIAKIIDNRIVINCPLKIKTRKNKNTNTIGIDKGYRYLFAVSSENFYGENLNNYLSKETERLNKVNAQRNRFWALYNQYIEQDNIKKANIIKENNLGKVKYNHNKLKHDQTVKSYINYSLNQLIKEEKPTEIVMENLDFVNWNGRYPKSIKRKLSRWIKGYIRERLEYKCDFYNIKHTYINPAYTSKVCNVCGSFGKRDGDIFICPKCGKLHADTNASKNILNRKYDKNITLYTNYKKVKEILENKLKVS

SEQ ID NO: 42945 - protein, 382 aa, Chloroflexi sp.
MVQAHAASRGNEKWLKCEDIEKQFKKKYALHSTCVQGLAQKLKANIATARQLRLLQKQANQPITAKYPYREKKYQTVIWKESALRWRADGRLSLSNQRGTPPLILALPNRYRGADICRAELTWRADHYELCVTIDSGIEIQETQSSGLVAGVDLGEIHIAAVATEKGDTLLVNGRALRSSKQLRNKRHADYTCLLSKCKKGSKRYRKLLKSKARASAKCYRQQRDILHKASRHVVNFCAANTVNVLAVGDVGDIQNSVDLGKKTNQKISQWAHGRFRRYLAYKGASLGIRVEDIPEDYSSRTCSQCKNVKNNAPKGRVYTCSGCGAIIHRDLNGACNICSRAKYGLYGCVQAHTQMYLRPIRRSRAFDTGRKLPTQVGTPRL

SEQ ID NO: 42946 - protein, 187 aa, Clostridioides sp.
LGIKEFCISSCGEFIENPKYLKKSLNKLAKLQRELSRKTIGSLNRNKARLKVARLQEHIANQRKDFLQKLSTKLIKENDIICIEDLQVKNMIRNRKLSRLISDVSWSEFIRQLEYKANWYGRKIVKVGKFFASSQICNKCGYKNEEVKNLNIREWICPSCNKTHDRDINASINILKEGLRLITIQNK

SEQ ID NO: 42947 - protein, 408 aa, unknown
  TnpB Polypeptide
MILSHKIRLSPTLGQTAYFWQACGVSRFAYNWALSEWEKLHSKNEKVNGRILKKKFNAIKKKEYPWSREVHRDCTARSFDDIQAAFSAFFRRIKRKDKPGYPTFKKKGRSKDSFYIANDQFEIHGRKIRIPSLGWVGMREDLRFKGKIMSATVSRTADYWFVSVTVDTKVSSKPPKTKGVVGVDLGISAFATLSNGRKIKHSERMGRVEGGIMRSQQSLSRKQKGSSNRRKAIVRLARKHYKLACLRSDTIHKATVDLVDNYSVIVIEDLNVKGMLRNRRLSRSISSQGWFEFRRQLEYKCRMYGRKLVVADRWFPSTKTCSSCGQVRKIGLSERTYKCECGLEIDRDLNAARNLQQLGATCPDVMPVETGALAGAFSGETIVCEAGTNHMKLGRSLSQAFESRRPPT

SEQ ID NO: 42948 - protein, 406 aa, Escherichia sp.
MIWPMKRLQAFKFRLRPGGQQERGMRRFAGACRFVFNRALALQNENHEAGNKYIPYGKMASWLVEWKNATETQWLKDSPSQPLQQSLKDLERAYKNFFQKRAAFPRFKKRGQNDAFRYPQGVKLDQENSRIFLPKLGWMRYRNSRQVTGVVKNVTVSQSCGKWYISIQTESEVSTPVHPSASMVGLDAGVAKLATLSDGTVFEPVNSFQKNQKKLARLQRQLSRKVKFSNNWQKQKRKIQRLHSCIANIRRDYLHKVTTTVSKNHAMIVIEDLKVSNMSKSAAGTVSQPGRNVRAKSGLNRSILDQGWYEMRRQLEHKQLWSGGQVLAVPPAYTSQRCACCGHTAKENRLSQSKFRCQVCGYTANADVNGARNILAAGHAVLACGEMVQSGRPLKQEPTEMIQATA

SEQ ID NO: 42949 - protein, 390 aa, unknown
  TnpB Polypeptide
MSKKIRLKPTTEQEILFMKSVDVARWAYNYLLSEKQRVYDEYLQNGKSGRRDISEGEVRKYINNVLKPTTHTWLKEVSNNVMKQAVKDADGAYKRFFSGQSGKPKFKSKKRSKLSFYVNYESLSRQPNGFRGERIGFVKTSEPLPKLKPNEKYSNPRISFDGKYWYLSIGYNVEDIECTLTDKSLGIDLGIKDLAICSDGKIFKNINKTKRVRELKKRLKREQRKFSKMINGNIDKLTVNHKPIYKKPLEECKNIQKQKERIKLIYRKLTNIRNNYIHQTTSEIVKAKPFQIVMEGLNVKQMMKNKHLAEAISDEKFYEFIRQMKYKSQRYGITFIQVDRFYPSSKMCSRCGNIKRDLKLSDRTYKCDVCGLVIDRDYNASINLANYKAV

SEQ ID NO: 42950 - protein, 226 aa, unknown
  TnpB Polypeptide
VRNRRVTAGLESPTYQVQFQALRYTLHRATGRLLRRGRYSSERIRRLYRKRTRRRDHAQEALCRGLLERMYEEGVDTVYIGGLTDILETHWSVETNAKTHNFWAFKQFIERLACTAQEYGISVEVRSEAWTSQECPQCGSTERTTRHQGTLTCPCGFEGHADLTASETFLKRHTEKAVRPMARPVRFEWDDHNWSESPRSHESPKEQRPDPSIVHNSGNIASGESA

SEQ ID NO: 42951 - protein, 384 aa, unknown
  TnpB Polypeptide
VPKSLRCCRYRLYPTKTQAEGLAATLDVCRAFYNALLDERKVGYENGHKVTKTEQLRRVKELKATGLPLYVHSHVLQVVAADLDKSFQNFFRRVRGGETPGYPRYKGRDRFDSFGLKEKGNGFRLDGRRLEISGIGRVAVRWHRELPEDIKTVRVTRRAGKWYACFACEVEDEPLPATGEAVGLDVGLSHLLATSDGEFVENPRWYRAGQKALRRVQRAVARKRKGGRNRRKAVLRLQRHHERVKNRRKDFLNKIAHRLISRYDVIALEDLRIRNMVRNRHLAKSILDAGWNYLAHRLEGKAAEAGRRVEFVPPAYTSKTCSRCGTVFEDLTLSDRWVECDCGLSLDRDHNAAINILFRASLGHSDWAITQGVGLSVAQEAVGL

SEQ ID NO: 42952 - protein, 524 aa, unknown
  TnpB Polypeptide
MVSQLKYKKDTTDTTTELYESFSQMREYMTDALPARDYLCLGYITNLNKLQLTMANNHLKLNFYNRFRKYLKLRTGETDNAVVYRWLKDIYEPKYGGKNNFILYMREWLKYTPTEANIVKHSNHFVKIYYSILKEFEKYPDTKGIRTFTLLPHKHGFTQSHITICNAGLENTLKYIAKKLKVENSEVESCLDVNKFAENSEEYWRELFNINKYETKNKKFGFTILTDGKSVVLQMRKPTQPERPVSEYTEQQYDNFIGIDPGIRALITSYDTNDKIIQVSTKEYRHKSKMIYACKKRVSWYKRWDHYEDWKLIPTIKTSKTSVMKEYFKYVFPRMRTFTEFHIEKGFRNLNFTSYCRSKATLAKICERIGGGKNVKTLVGFGDFSQQHGLVKSHPTTPILRLKRELRKYCKVVGIDEYNTSKTCSSCSNPIELYRNRIRRKKKGVLEPIARMSNIHSVIRCKTNECKLCCLDRDINASKNILGLLLNQYRGEERPVCFKPAKIGVIPCKSDKRPKACDSPLLTC

SEQ ID NO: 42953 - protein, 391 aa, Halomonas sp.
  misc_feature (56)..(56): Xaa can be any naturally occurring amino acid
MSTEMLKATKVRIYPTPEQAEFLNRQFGATRFVYNKALHIISSQYRRHGAKLRAKXKPLLTVAKKSRKYHWLKNFDSIALQQACINLDKAFQNFFDPKLPARYPKFKRKHGKQSSYHCMSVSAGESWIKVPKMRPIKARIHREITGAIKSITLSRTVTGKYYASLLVEDSMEAPTPLHTVDAVLGVDMGLTHLAIDSEGNKTDNPRFLKRAQSNLRRKQKALSRCQKGSKGRAQARLKLAKAHERLANTRANFQHNLSRQLIDENQAVVVETLKVKNLLKNRKLSKHIADASWCSLIQKLEYKAKEQGKYLIKIDQWFASSKTCSCCGHKVESLPLSVRNWRCPACYAERDRDINAAINIRQQGIIKLRAEGLSVPANGGLLKSGRAPVAA

SEQ ID NO: 42954 - protein, 325 aa, unknown
  TnpB Polypeptide
VVATWSKGEYASLPTFSTPFLDYNQRNATLNDDHATLSTVDGRVTVEYVLPDEDRDTPHSEYLRSEEWEQTGATLHYCRGDFYLHVRTKADVDDPEPAKDGTVLGVDLGVENIAVTSTGVFWTADELNHWRQEYVERRQSLQECGTRDAHENVQAVGRKETGRFEQYIHRVANELVEEAVKTGCTIIAFEDLTDIRKRMPNARSFHEWTFHRLYEYVSYKAEESGFTVEQVHPKNTSRRCSACGFTHEKNRPSHDTFCCQSCGYRNHADYNAAKNIGYRLLRNQTGGEGGAPVGVRLNTGMLNANGIQPVPDSVRAGVHGESPHL

SEQ ID NO: 42955 - protein, 420 aa, unknown
  TnpB Polypeptide
MRDWLDMLRPLYNWFLADRIDGYHQSLLQGEYCNLRTKSVRTPLTCSLNKSSMLHNPWKQDGKRRGPGLMQDAYLPELKVARPWYKAIHSNVLQMLIKRLDAAMEGFYKHGRGFPNFKNRSNFRSFQYKPNDVKIDGSKVYLPSVGWMRFHNSRPIPEGFNIRTVTIRFKTDGWYMSVRIEDKSVPEVLVPSDSDIKTVVGLDMGIGKLVYCSDGSAIDNPRFATSKKTRQKLKIRQRRVSRKKKGSRKQRRCQQQVSQLQQQIASRRESYQRQIAFRIVSKADGIAVEDLNIRGMKARCKPKYDEQKGRFLVNGQSAKRGLNRSISDAAWGELTRKIEYAAAKRGKKVYLVNPRHTSQECSTCHHIDADSRDGERFICTACGHIDDANLRAARNVKAKAIKQYGLTIKHGTPGLGETVH

SEQ ID NO: 42956 - protein, 511 aa, Scytonema sp.
MATLTGSRSWGKPPRSRCLTYVKGLPTPAEELNAISLTEFEMFLAAYSPVFHKAACETANHLLANKNFNKSSWNTYLQVNYGISKRHANGVIAHAQGAVDAAKKHRERHIKTLEGKLKSINSWMIKSEKKLSDSFKFYRKNNWQRVRTGCKFPIFSDLQSRQTNWQSLHFQIHHKKRRESQLTKQIEHLKIAPIHAVIPKNQAFVVGSKDETLGNQVCQWDGDILKFRVPACLESRFGKYVQTKLGNFERNINRLPKDGSKTWHFYHKDGKWNAAVQFTPAPIKRVSRHSAYGCIGIDMNPGSIGWAYVDHDGNLKAHGQILLQMGLPSGKQDAQIVDACLQLVTLADTLACPIVCEELDFSTKKEQLRERGRKYARMLSGWAYSRFYELLESILNNRGIYLIKVNPAYTSVIGLVKYARQYGLASDEAAAMAIARRGMRLKEKMHGSITAYLSVKDGKHVWSLWFQLNKTLKSRTDIKSRHSFYSISNWGLVVKEPESQGDGTKRKRASN

SEQ ID NO: 42957 - protein, 259 aa, Clostridium sp.
MIPSLKNVRLKEFGYLPVGENVVSGTVSKKANRYYVSVLVKVEEKYQVNSNEGLGIDLGLKDFSIMSNGITKKNINKTKRVKKIEKKLKREQRKLSRKYESLKLRNKNIKKEGGNATRQNIQKQIVKVQKLHQTLGNIRENYLNQSVNEVVKQNPSFVTIEDLNVRGMMKNKHLSKAISKQGFNMFRVKLTNKCNEYGIELRIVDRFYPSSKLCHECGSIKKDLKLSDREYICECGYKEDRDLNASLNLRDAKIYKIAN

SEQ ID NO: 42958 - protein, 172 aa, unknown
  TnpB Polypeptide
MHKISTEIVGYCVEHRVGILVIGVNKLWKQKSDIGRRNNQNFVSVPHFQLRQMIEYKALRAGIDVIEQEESYTSKADITASDYMPVYGKEKYRPVFSGRRIERGLYSCKEGYCINADCNGAANILRKAIPDAWKNVSDFHFLATPESIGFAILNPADSHKRYKQHNNWIFVP

SEQ ID NO: 42959 - protein, 382 aa, unknown
  TnpB Polypeptide
MVFRAHKIALDPNNVQYTHLMRCAGVSRFVHNWALTRWNEQIAAHKLDYSIGKPSIPALQCELHRARAESFPWMSEVADCIPSEAIKDLGRAFSRYYKGCSSYPRFHRKGVRDSFRLSRGFFQVRGTRLYIPQIGWIRMREEIRYPNAQPMSITISRRADRWFASILCKIEKTQREGSADAHQRIVGVDAGVHEYVCSDGTRFDVPRAYRNAEKALRRAQQTLSRKEEDSANYAKQQMKVARLHRKVADIRADWLHKMSAHIVSQNATIVIEDLDVADMIQNRSLAKSVSDASFGEFARQIKYKAEEIGHTVIVADRFFPSSKLCSVCGVVVSHLGLNERIWVCPNCETPHDRDLNAAINLSRYAARSAVSACGELKTVGGQ

SEQ ID NO: 42960 - protein, 366 aa, unknown
  TnpB Polypeptide
MFYGNHARLYPTRKQEILLKRTFGCCRVVYNHFLAERIRVYKEKGISLNYANTCKMLTSLKQDKDHLWLNEVDSMALQCALRNLDDAYQNFFSGSAQFPKFHSKSHDESFRTRNQNNGIRIVGNTVRIPKVGFVKFAGLKEFEGRILNATITKTASGKFFISLCVESQQVVLPNAGGKLGLDVGLKDFCTDSNGNTVANPKYYRQCQRQLAREQRKLSRKQKGSKNYEKQRIRVARQHEKIANQRSDFINKLSHKFASENQVVCIEKLNVTGMLKNRHLAKSISDAGWFKFDRRLKEKVAEYGGIVQEVPTFFPSSLTCSNCGYRNAEVKNLGVRKWVCPVCGAHHDRDKNAAINILKKGLEMLAS

SEQ ID NO: 42961 - protein, 429 aa, Streptomyces sp.
MRAAEALGAAGSLGGAAGPPQPYRRGPQRHGYPDHAQRDALARAFGCARVVFNDAVRAREDAGAAGDRFPKAGELSTRLITRAKQTEARSWLGEVSAVVLQQSLRDAEAAYKNFFASLKGERKGPRLGAPRFKSRKDARQSIRFTANARWSVTGNGPLSLPKIGAVKVKWSRTLPATPTSVTVVKDAAGRYFASFVIDTDPAADAARMPDSGQAVGIDLGLTHFAILDDGTKIDSLRFLRRAEKKLKQAQRELSRKQKGSKNREKARLTVARAHARVADARREFHHQLSAKLIRENQAIGVEDLAVNALARTRLAKSVHDAGWSQFVAMLVYKADRYGRTLTKAGRFVPTSRTCSYCGHLDGPKPLHIREWTCPACGALLDRDINSARNVKRAAGLTVSACGAPIRPELVLAQRNEAGSHGFPPEGGAA

SEQ ID NO: 42962 - protein, 470 aa, Ruminococcus sp.
MGLIAAALGSLSSSLADQWKEFFYCDSLDADTLVVKGQKRTKGNNKGNDNIISNGSLIAVADGQCMIIVEQGKIVEVCAEPGEYKYDTSTEPSIFAGSLGQSILDTFKQIGKRFTFGGDTGKDQRVYYFNTKEIPGNKFGTANPVPFKVVINEQLGYKLSVDLRCNGTYSYKLVNPLLFYANVTGNVAQSYPRSEIDATLKAELIDALQPALAVLSANGVSYDQIPAHTKELKDALNEVLESEWGKRGVAVFSMAMGVPSIPEDQRKKITEWEEIGMTTDIRTAAARRAGAEANAIQDAAKNPNGAFNGFMAFNAANGGGGTNAASLFAMADQQAPAAPAAPAAPAADSWKCPNCGAITTGKFCSECGSKKPEPKPAADEWTCPNCGHKATGKFCPECGAKKPAETPDGWTCPDCGTVNKGKFCQNCGTKKPAGVKLYKCDKCGWEPEDPANPPKFCPECGDPFGEEDVQ

SEQ ID NO: 42963 - protein, 476 aa, unknown
  TnpB Polypeptide
MILLAVELHQLRLEVAANLGEDAAQVVENGFGEHATPIFCHKDQMDVHLEYAVPAVSNILVIVHRPNYTLEMKRQQAYKYELQPNGDQQRQMRRFAGSCRFVFNKALSLQELRYKQGEKKLGYAGLCKLLTEWRNSVETAWLADAPVHPLQQTLKDLERAYTNFFAKRADFPRFRKKGRGDGFRYPDPKQIKLDQANSRIFLPKLGWLRYRNSREGRGTVRNVTVSQSSGKWYFSIQTEREVEQPVHPSGSMAGIDMGIVRFATLSDGTVFEPLNSFKKHQQRLARYQRAMSRKQKFSNNRKKAKAKVQKIHTLIANARRDYLHKATTTISQNHAIVCIEDLQVRNMSKSAAGSSEKPGKNVRPKSGLNRSILDQGWFEFRRQLLYKQAWRGGSVIAVPPRNTSRTCPACRQVSADNRRTQVRFACVECGYENHADHVGAINVLAAGHAVIACGEPVQSGRSAKQEPTEATQAVSA

SEQ ID NO: 42964 - protein, 437 aa, unknown
  TnpB Polypeptide
MKTGEIACAVPDLHDYRLYDHRTGEPLDPVEAETLLWLHLDHCRQCQNRMIHDPRNRNLKRGGNAGRGNEWARKNVACTSLPSKFRNLSHQNRVNQTEAARLLLAWREREDIATAIDAIGWEKATYGNVQKRLSRDIDRELFTNVLNSGGHPSLPTVERTQFPYAYSNNNSCGMCVIDQPAGVIRYERMAVYDRFVDVEIYAPHIMRLHPNLTKVSRPTLRWNGDCVTWDVIVFEPKPRKEGVDKVSHVVGFDLNADWHGGISGARLSYNGTVSRELVAGIDTRRQQTVLEELYVQYQRCLKKLDRLMPWQRPHDPGDPQQGAAHPEWRRLYEQSLNLRDKMYRIKTLLDWRYAHDITDHAKPGELIAVEKLSPFDAAGRVEFRHGSQLEKLEHVASKTGQRVVQVNPAHTSAHLPVVRYRQQGRQSQTIPVRRMQT

SEQ ID NO: 42965 - protein, 373 aa, unknown
  TnpB Polypeptide
MKLTAKVKLEPSEDQCTALLATIHRANQCCHWLSQQAWNTKKFRAYDLHHVAYRRAREKFSLGAQMVVRCIAKVADAYQSDRDRKRSFRLLGSVAYDARMLRWRVENQVISIWSLSGRLNIPFACGPRQRELLRLQHGESDLIYSRGTFYLAATCEIEESMPADATDALGVDVGVVNIATDSDGQRYSGSQTRSIRHRCRRLRAKLQKKQTRAAKRRLQKLSGKEQRFATYTNHVISKQIVACAKRTKRSIVLENLRGIRLRIRARRKQRAVLHSWAFSQLRFFITYKAALAGVLLVLVDPRDTSRECSRCGHIAKENRPNQSSFCCAVCHYSAPADCNAALVIRSRAAVNPPRASARLSDVCSSTHTLVKSL

SEQ ID NO: 42966 - protein, 459 aa, Okeania sp.
MVEKAYKFRFYPTPEQENLLRRTFGCVRLVYNKALAARTQAWYELQQRLSYKQTSAMLTCWKKQEDLDFLTEVNGVPLQQGLRHLQTAFPTESYANTNFFSGGAKYPNFKKKRNGGSPEFTKSAFKWKDGQVYLAKCVEPLPIRWTRQLPNDSLPTTITVKLDSSGRWSVSLRINDTTDLKLKAVKKLLGIDLGITSLLTTSNGEKVTNPKNLNKLHKKLRLAQKSLSRKSKGSSNYQKAKLKVARIHGKIKDSRLDYTHKLTYVANLTVPLQLIRENQTIVVEDLAVKNMVKNHNPLLSPPRRGARGGDSDANWGELVRQLEYKADWYGRKLIKIDRYFPSSKRCSNCGHVVEKLPLNIREWDCLECGTHHDRDVKASINILRMETRVGDRRKGTPTKKAAGLAVSICGATVRPEGSKSRKAGAMLAQLLRRRKQKAPINDEGGISPCLVEQRREDVN

SEQ ID NO: 42967 - protein, 362 aa, Anaerolineales sp.
MKLIASLKLQPAEEQAQALLETIERVNLACNYISEAAWQHQRFGKWALHKLCYYDVKERFGLSAQVVVRAIAKVADAYKLDRKTKRVFRRRGAIAYDDRILRYKADSTVSIWTVRGRQRIPYTCGEHQRELLKTRQGESDLIYYKGQFFLNATCNVEEPPPYNPQGFLGVDLGIINTAASSDGEVFVGGKVNGLRKRYRKLRARLQSKGTKSAKRLLKKLSKKEHRFVTDVNHCIAKRIVAKAKAASFGIALENLKGIRRRTTVRRHQRATFSSWAFHQLRQFIVYKARLSGVPVVFIDPKSTSITCPVCGFVDKRNRPSQALFSCLSCGFAGPADVVAASVIAGRAAVNQPNAAGECLAAS

SEQ ID NO: 42968 - protein, 367 aa, Clostridiaceae sp.
MQITVKFKILPSKEERQYLEETLNEYISTVNGIVQNIINNNIINNKNIKLTSKDIEAKLPSAVKNQAIQDAKSVYRKYKKTKKLSILKKPVCIWNNQNYKIKDNYLSFPVWIDGKVQRIKVKALLTDYQKEQLKNKAGTLRITKKSDKWVAQISVEVPEEQCRGTNIMGVDLGLKVPAVAVTSDGKTRFWGNGRQNKYVRRKYKSLRQKLGKAKKLKKIKQMADKEQRWMKDQDHKISRQIVNYAVENNVSVICLERLANIRNTARTSRKNEKNMHTWSFYRIVKYIEYKANLEGIRVEYVNPEYTSQRCPHCGSLNKSKDRKYVCKVCGYRTHRDRVGAINIMLAPVADGVAKAIVCQPKMLYALS

SEQ ID NO: 42969 - protein, 361 aa, unknown
  TnpB Polypeptide
MNKAYKFRLYPNKKQEVLFAKTFGCVRFIYNIMLGDKIEYYKETKKKLNNTPANYKDKYEWLKEVDSLALSNAQMNLQKAYNNFFRSPKVGFPRFKSRHQNHNSYTTNNQKGSVRIESGKLKLPKVGFVSIRQHREIPKGYQLKSVTISKTAAGEYYASLLYEYEAEIVPVEIKQVVGLDFSMKELYVTSEGETASYPRYYRQSCERLAREQRKLSKCEKGSQNRRKQRIKVAKIHARVANQRKDFLHKQSRQITNAYDAVCVEDLNMKGMAQALHLGKSVHDNGWGSFVNMLSYKLEEQGKRLIKVDKWYPSSKTCSRCGNVKAELSLSERVYQCECGFVCDRDINAAINIKYQGLLQAA

SEQ ID NO: 42970 - protein, 626 aa, Micromonospora sp.
VFADRVGWLADLVRGMADGVIAAHWSDADLAVFGGGVGVDGRRLPSSGWMALRRLGWGAVAPAGVVVSDRVRRIAEEEAARALRLGCHRRAVVAALLATWPADPFARTGEEWSALRAQLPEGTDNATIRNRTRQITAYLGRHGRLPVDLCELEGPPVVARQVSLAAADRQQVVVDRVDDRIVRVWSQLPMCAAPASYRDWVWHAFDLVLPAPVPARVKVCSPTLRPRDGKVRVDLPWQTPRTPPPVDGHARALGVDWGVNTLLTATVADLEEGSVVVRGRPLRFDATGVSAKLVRLRRHREHLHTKADHLARLRDGRPTHVPADPELTAKLAVLEAEHSAVCARIRHLNTALAWSAARWLVDHATAVGATAIYVEDLATLEAGGRSRSLNRRISGAVRGTVFTAIAHLAAKAGIAVVTVPARGTSSGCPRCGAVVKHVKTPERSVAGYRWATCSCGLSLDRDHAAAQRIAARGLANQAKTRRDRNGNTAIRTATDTPVRRRPRRPTPTATIRPVRDRRKTAPTPRQVRPATVKTSRLLPLRRQVPAPAEPPPGTAGKRPAGRTPQETQPSGPVRQVPHTVPTTAQRHPHRVRGAVLGRGFHRHVRATPITHRDGSTGRESGSLRIT

SEQ ID NO: 42971 - protein, 402 aa, Shigella sp.
VKRLQAFKFQLRPGGQQEREMRRFAGACRFVFNRALALQNENHEAGNKYIPYGKMASWLVEWKNATETQWLKDSPSQPLQQSLKDLERAYKNFFRKRAAFPRFKKRGQNAAFRYPQGVKLDQENSRIFLPKLGWMRYRNSRQVTGVVKNVTVSQSCGTWYISIQTESEVSTPVHPSASMIGLDAGVAKLATLSDGTVFEPVNSFQKNQKTLARLQRQLSRKVKFSNNWQKQKRKIQRLHSCIANIRRDYLHKVTTTVSKNHAMIVIEDLKVSNMSKSAAGTVSQPGRNVRAKSGLNRSILDQGWYEMRRQLEYKQLWSGGQVLAVPPAYTSQRCACCGHTAKENRLSQSKFRCQVCGYTANADVNGARNILAAGHAVLACGEMVQSGRSLKQEPTEMIQATA

SEQ ID NO: 42972 - protein, 407 aa, unknown
  TnpB Polypeptide
MRTAYKCRVYPTTEQEALLSRTFGCVRVVWNKALAWRHERYASAGTSTSFAEASRFLTSIKQQPEFSWLNEVSSVALQQTLRNQQSAFTAFFNGVSKYPRFKCRTGRQSAQFSRSAFRKKDGEIWLAKFSEPLKFVWSWPDIDFVELEITSLTISLDPDGRWYVSFSCDSRIDCSLTHNQSAIGIDLGIKDFAVTSDGEKIANPRYLERKQKNLARYQRRMARCQKGSQNKEKARKKVARAHRKIRSARTDFLHKTSTQLVRNHGTLVLEDLHVAGLMKNRCLSKAIGDTGWTTFRQMIQYKANRANRRVITISRWYPSSKTCSNCGHLLDKLSLSIRTWQCPSCRTLHDRDINAAKNILAAGLAVGTGNSSHACGGDVSHVGPTQVQSPAKQEDVRVTAQSLNFGD

SEQ ID NO: 42973 - protein, 541 aa, unknown
  TnpB Polypeptide
MPEIYQTYVTQISNKYDGEIPALLMLEEFSPIAAQMSKVALLGLQNQMKKDKLNTQIQRQFNVNKRHANSIINFVSGALASAQECHKAHLETLSAKIKATKSSIEDLKRRLKAHKEYVQAVSKRSLAIKTPEKTKAGKPKKVPALMKLPEFEEACPINGKKFYGMTYLQIAKQNLHQKKRQLNMYLARQAKVIKAGVRVNLGNLGSIPFIGSTGESNSNQICQLIPDVIPSLKIRVPYFLEESFGEYVVLPLYKINPFGYDKILSAWALNAALTYVFSRNKKGKWVVAITCNVDFFLRIKDHSFGCIGLDINPGSIGWCSTDRFGNPSAWGKVNLDLHSCSTAQTEARLADAVTEITQRALATKKPIVIEKLDFSQKKQQFKKGRKYNRMLSGFAYRKFSQLLKARCLKLGIKVMEVSPKYSSQIGVVKYMRRYGMGSDSAAGLVLARRGMGIYHERLPARYAFQTSTQTEARQHVFAYWQRFRKYYLEQGSRNAWFAPNLTGSTGDSSMNTGNTTNKVVKRILKASVGGRECKPRLAVKV

SEQ ID NO: 42974 - protein, 416 aa, unknown
  TnpB Polypeptide
MKVKVTRTFTFKYPLPFIEKFGYDTEPIASLFKEFRVIATHLYWCRRLGIDPFEEVIDKLYSLPSYFRDCLLDVNSQKYLFKELVRTHRPKRTLIRLNPKVSVDIYPKQKNCIIVNLERRELWVRGFYRKRTLKLPLSRKACNYLKKVLTSNPSKIATLVLRDGVFEVHLHFSRKSSIPRIRLPLSRGKWIIAVMDMNSRYGMVCTWLYLDCDKREWKITRVKKYRRKNLTSLLRYVSKIQRARDRLRNIGSLDHSRKLLYNKIVKSCLKKQRAINKDFIAKTTKEIVLRTRRIAKRYSAQPLIIVDKPIAEGLEGSSLQRTLLRFAKILKCKALWYEVPILFLRLCSSYCPYCNEKLTFRKHKHHRIGKCNKCGFKSDRDTIPVHFFVNRFSVLRAEKQVLKANPYIIYGVKGDN

SEQ ID NO: 42975 - protein, 436 aa, Oscillatoriales sp.
LLTNYVYKLRPSQKQDLKMSNWVDMLRSHYNWCLNDRIAQYSQQFIQGNYCDVRTQSEACPLTSCVSKNGATGEPWKTGKTDKVKNPRRNPGDIQITALPELKAARPWFSGIDSTVLQQNVKRLDTAYKNFFDGRGFPKFKNRSNFTSFTFVMGVKIQGSKIYLPKLGWMRFHNSRPIPDGFIIKACAVRKRQNGWYVSIRIENKSVHDYMTKPLKDVVKVIGCDLGITKLVHLSDGTQIENPKFSTSKKAKRTLKIRQRRVSRKVKGSKNRKKAAKKLGLFHQKISDKRQAYQWKVANKIVSRNVEAIALEDLNISGMMRRCRVKVDEKTGRFLKNGQSRKKGLNRSISDASWGELILKIEYLAAKQGKVAIKINPKFSSQECRNCGHTDKSNRDGEKFICTECGYHEHADIGAAKTIKDRALEIVRGPGRETWC

SEQ ID NO: 42976 - protein, 451 aa, Paenibacillus sp.
LYPYLEQVCQDAKNLYNTTNFYIRQVFTAFGQNQPLQPLQQQVMNLLQTHIDAMNKRLREKNRSRPFQLPSQESPFVNYRFLDALFKVMGQVDYRTLPTQSSQGVMRVVFQNWKSFFTSIQDYRNHPEKYSGKPRIPGYARSQAKEVVFTNQDCVIKERKYLKFPKTRLQLNIGKLGYTDGQLMQVRVVPGFGQYVVEMVFACRIEERELDKEHVLAIDLGVDNLATIVTSTGSKPVLVKGKVVKAINQYYNKMRARYTGILRQGKQPQKGVHTSHRLERLHLKRHRRLKDLFHKASYHIIKLAVEQNIGTIVIGHNNGWKQSSDIGRRNNQSFCHIPHQLLLSMLQYKAAEQGIAVILTEEAYTSKASFLDHDPLPLYDEEGTWTFSGKRIHRGLYESAKGLIHADVNGAANIMRKVFPRASAKEANGIEGLDGPKTINVSTPLVLSILK

SEQ ID NO: 42977 - protein, 442 aa, unknown
  TnpB Polypeptide
  misc_feature (185)..(185): Xaa can be any naturally occurring amino acid
  misc_feature (247)..(247): Xaa can be any naturally occurring amino acid
MKAWGGRLIGLHGKSWLVFSKDRESQRAKMNRSHVIRLHATPEHEVYFRKACGVKRHAFNWALARWKEARAAGKRVKMNDLKAEYNQIKGEQFPWCYEVTKCAPEQAFADLGQAFANYWRMKEEGTQPKLKHPRKDGEEAGFPRFKSKKRDTLSFYLANDKFSVDGHTLHVPKLGDVNMTEELRXQGKIMSATISYRAGWWFVSIAVEVEHETPTHPGGTVGIDLGIKTLATFSDGTVVENQKHYRXGLGRIQGLSKGLSRKVEGSQNWWKHTRKLAKAHYHVACQRQDTLHKMTTRVARTYALIGLEDLNTKGMLANHSLAQAVSDASFFEVKRQLLYKSEQYGGSVQLVDRWFPSSKTCHACGWVKEDLTLADRAWTCEQCSTIHDRDLNAAIMVETEAVRSITDVPVVASSGHKFACGAGSSGSCESETSCCEAGTTVL

SEQ ID NO: 42978 - protein, 366 aa, unknown
  TnpB Polypeptide
MYKQTNLVKTLKVRVKDKHKTILNRMAFESNQVWNAANAETSEWCYIPIPEVGYIRNNISAFDLQKQLKTIKQDRDFIIGSATIQEVIAIHAKARKQFKKDKLKWRTSGGARRSLGFVPFKARAAKWVNGQVQFAGNLFGVWDSYGLSEFSFRSGSFSEDSRGRWYFNIVVEVPQLVSAGTGEIGIDLGLKTTATCSDGTILPRKSFYRNSESKLGKAQRANKKKRVKSIHAKIKHQRHDAMHKFTTELVMYNGLIVVGNVSSSALAKTKMAKSVLDAGWSMLKTQLDYKSKGMLVEFVEVNERYTTQMCSSCGEISVNSPKGRAGLGIREWPCAVCGTVHDRDINAAKNILRLGHQTLAVGIPVL

SEQ ID NO: 42979 - protein, 372 aa, unknown
  TnpB Polypeptide
VKIILKAYKYRIYPNKQQIELINKTLGCTRFVFNHYLAKRIELYKTEKKSLTYNNNANDLKNLKKEHEWLKEVDSISLQQTLKDLDKAYQNFFRRIKQGETSGFPKFKSKKNNKQSFRSQCVNNNICIINNKIKFPKLGLLKFKNSRKFSGQIKSVTVSKTPTNKYFISILVETEIIQLPKINKSVGVDLGLKDFAITSDGDVYKNPKFLKSLEYKLKFQQRKLSKMKLGSGKWKKQKLKVARIHEKIKNKRKDFLQKLSSQLINENQVICLEDLQVKNMLKNHNLAKAISEVSWSEFRRMLEYKASWYGRIISIIDKFFPSSQLCSDCGYQNKDVKNLGLREWICPNCGEKHDRDINAAINIRNEGLRLLG

SEQ ID NO: 42980 - protein, 510 aa, unknown
  TnpB Polypeptide
MKKKKKYSQTKYKELVDRIKIHSEKIPLYNLFIDKKNDKIKTNSYYDMFVKNNHTTDNNKYDFKNDLEPVDKIIACRKIILQPNNKQKNKLIDMLDGYRIMYNSTIKFFKQRRYKYVREECHEEKLKKVNKYKGMEKEVLKVINDMIGKIAKKEERDTDIEKLKNNNEITTDFKKIRTYFLNEKMNEIKKNYNIPSHVLENAIKLACASYKSCLTNLKNKNIRHFVLRYIKKSKNSHIMDIEKSAFSRDGKTIYPSYLGDEMKNKENIKYEVEHACKIHYNKDKDEFTLLVPIIKNKKILETEDWICIDPGIRTFLTCKTNKGIVEIGTNISKKLKSKLKSLDRLDKIEDKIEKKEIKWKIDKRGKEKIMKIEDIEKKKRKTRISIRNTVDDMHWKVCDYLCKSYDNIVIGKWSTKDTIRKTDSVLNKMTKRISQNIGFYRFLQRLKYKSGVYERKLRIQEESYTSKTCTRCGWKNGNLGGKKIFKCKMCKLETDRDYNGSRNIMIKSII

SEQ ID NO: 42981 - protein, 418 aa, unknown
  TnpB Polypeptide
MEVRRTAPVKLVVPDEYHDDLHETAEQFLYCANEASDYCWDNTDYEDCVTSNVTARDALYDRLRDETDLTANLVQEAIQRAVHAVDSGVDRWKKGKRTNKPAFTSWSMVYDKRSATFYRNKISLSTVNGRVECDFELPADSSTPYEEYVLSDDYEFRTSTLQYDQVTDEFSFHIKTRKVDTDGEAVEIEGSDDAEHQTVLGIDLGVNSLAVASTGTFWSGDEYDHWIQEFEERRAEMQQRGTQAAHNALLRLGKRERAWRKQYIHTVANEIVDEAVAHDCDVIVFEDLTDIRERLPHADWHHLWAFRRLVEYVEYKAPERGVVVEQVEPAHTSQRCSHTDCGFTHEDNRDGEQFRCLKCGYEINADYNGAKNVGLRYMRKRQHRLRSSPTSGSADAPVDVRINGGTLNGDGYRPPAES

SEQ ID NO: 42982 - protein, 454 aa, unknown
  TnpB Polypeptide
VRSVKAVKTLRHKITSHSKIFDETVEVYRKALTYIVDVMDREFPDLEGWNSKSIVSAVERPIHATKKNPCPKYEDFDRLFYKFPSYFRRSAIAEAFGILQSHRHRYERWLKEKREAEDEGRRFRKRPPKLQLNHRAFPVFYKDVMFQRTGDTTARIKVYHKNDWVWLGIRFKGQDLRKRGVADWKENNPALVKVGKKYFLHISYQKDVKPNNTPLSERKICAVDLGLNHSAVCSVMDATGTVFARKFINQAKEKDRLYRTVNKLKKVQRQSGCVKAPRYWRRINGLQRHIVNHTASEIVKFAREHGADVIVFEYLGHMKMPKGFNGAKRLRFKLHYWCKQAIQRRVEEMARCVGLRVSRVNAKNTSKLAFDGTGEVERNGKKDLCRFPTGKVYHADLNATYNIGARYFLREYRKSIPEREWLSAKAKVPSLTLRTRQTLASLISFHQAMRRLGA

SEQ ID NO: 42983 - protein, 406 aa, unknown
  TnpB Polypeptide
MDRTVRIQLHPTPEQAQALHRTLEQFTQAFNMVCAYGWQEHEKNGVKLHHGTYYDTKAACPGLVSDLLIQSRMKATEALKSAFTWQKRHEAAYAKKVAKARKRNKPVPQFKPVKCPQSNLCAVRYNVHTYSLNWEAQAIRVSTVQGKMSIPFTVPHFSAQYIGCKIATADLIYRKGKWWLHVVAAVPEPVVEKSPLVVGIDLGLNRPAVTSQRQFLGSSHWKEVDRRSFRIRRKLQSNGSKSAKRHLKKLSKRQARFHRDCDHVLSKRIVQNTPPGATLVFENLTNIRARSDIGKSKTHDTKRRLHGWSFAQLNDFTAYKAQERGIRVERVDPRHTSQMCSNCGYQHRANRRSQSFFKCRSCGYSLNADLNAAYNIRDKHIASLATLGISLSGAPPSSGVSSQSHD

SEQ ID NO: 42984 - protein, 403 aa, unknown
  TnpB Polypeptide
MNNKNIAMKLTEQIQLKKTPQLSYLCHLSKNLYNLATYYVRQEFFYLGNWLRYSDLWHMLKDKDIYKKLPSQTAQQTLKMVDRAWKSFFKSVRDWKEHSKKYFGCPRPPKYKKKKGEYTITFTNQQCRIKEGRLHFPKKVAMPPIKTRLKNSLRCVRIIPKGIYYILEIVYEKIGENLNLDKKRVVGIDLGLINIVTVVNNAGLKPFVVKGGVVKSINQFYNKQLAKYKSIKAKQGYEFETKKLLTFTRKRNNKINDAFHKISRNVINYCVENNFGTIVLGYNKTWKQNIKIGHINNQNFVQVPFLKLLKQIQYKSELVGIDVIKEKESFTSKCSFLDGETVLRRRHYAGTRFTRGLFKTKSGVIINADVNAGYNIIKKAVPNAVSADGIEGVGLHPYSIAIS

SEQ ID NO: 42985 - protein, 414 aa, unknown
  TnpB Polypeptide
MITKNQQIKYSLSATGEKRKTQTCKVYELKLCENKLNKIQIDFLHRIFLEAKWIYNDILSFNDLKNYDCKKKELEILNKEKEKEIRELKVLGSQIKQELLQRTWGSIKSLSTKKKKGKTKQVGRLKFKSQINSIPLKQYGITYKFQKGNLKIQNCKSLFQIKGLKQIPENAEFANANLIRKPSGYYLKVTCFLPIESKNISKEIVGIDFGIKDDLVLSNGIKFQTKFPTSFQIKREQRKLSKKKKGSHNYWKQKNKVALAYEKQNNKKQDTKNKIISYLKNNYSHIAIQNENIKGWHAGLFGKQVQQSILGGIISELKKLPQTHIVDRFFPSTKLCPECGQLNILTLADRMYNCSCGYSQDRDIHSAKNILLETIPMEYRNFKPVEFNTSAIDYLKSFVSVNYEAGRYNSLELC

SEQ ID NO: 42986 - protein, 482 aa, Scytonema sp.
LLTNYVYKLRPNVSQSEKMDNWVDLLRSHYNWCLNDRITQYNHQFIQGDYCDIRTRAVACPITCFVSKNGATGEPWKDGKLDKEGNLKNPRRSAGDIQITSLPMLKQARPWYAEIDSTVLQQNVKRLDVAYKNFFEGRGFPQFKNRSNFTSFTYTVGTKVQGNKIYLPKIGWMRFHNSRLIPDGFTIKAITVRKRQDGWYISVRIEDTNVPNYISRPLAEVEKVIGCDLGITKLVHLSDGYQIDNPKFSTNRKTRHLLKVRQRRIGRRVKGSKNRKKAAKKVGRLHKRIGDKRLAYQWYVANKIVSRNVDAIGLEDLNVAGMLRRCQVKVDEKTGRFLKNGQSRKKGLNRSISDASWSELTSKIEYLAEKQYKVVIKVNPKHSSQECRNCGHTDKLNRDRERFICVSCGHMSHADLGAAKTIRDRALSLVRGDSAKPADNTSKSSEGTVKRLKNRKETSARPLGKRVEPGNLSNQDIKTAMS

SEQ ID NO: 42987 - protein, 210 aa, unknown
  TnpB Polypeptide
MEQITITAKIQIVATETDKVLLDETMSVYRNACNYVSDYVFHTHDLKQFSLNKVLYFTLREKFNLKSQMAQSVFKTVIARYKTILENQNEWIKPSFKKPQYDLVWNRDYSLTQNRFSINTLNGRVKLSYFADGMSKYFDHTIYKFGTAKLVNKHGKYYLHIPVTYDVEESNISDICNVVGTLKSLTAIRRYTCLLVKTVVTNLMMTALEL

SEQ ID NO: 42988 - protein, 402 aa, unknown
  TnpB Polypeptide
MRKINRTYKFRLYPNKAQTELLAKHFGCTRFVYNYFLNQRKEQYRLTGKSDNYYAQAKTLTILKKQEETAWLKEVNAQTLQFAIRSLEAAYNNFFKKRAKFPNFKSKHSKNSFTVPQSASVAGGRLFIRKFTEGIKCRVHREIKGKIGKIIITKTPSSKYLVSVFTEEEYETPLKKTGKSVGVDMGLKNLLITSYGETFKNNRYTRRYEHKLAKAQRHLSRKKKGSRGFESQKLKVARLHEKIANSRADYLHKCSISLVRRYDTICIEDLNVKGMVKNHRIAKSVTDAGWGSFVTMLTYKAEWNGKKIVKVDRFFPSSQTCNVCGHVNKDIKDLSVREWECPICHTHHDRDVNAAINILRIGLNNNTSAGTVDYTGGEEVRANLLESHSSMKPEANEFLVHW

SEQ ID NO: 42989 - protein, 350 aa, unknown
  TnpB Polypeptide
MIVTEVIKTGILKLTKSKQEALDHEYNGFQWWMQFGIDKNILSQHKRAKGWYYAKDEIKYKDYPLVIPNEQIWFRNKKTKLTPYWIKISVRKRKGIGIWLPIKPHKEPLDIKYLKDSLLIKNKKGNYELRLVYQYEIKKIKYKIITAIDLGERNIATVCNSRCLKPIFYGRNIRGIRRHYAYMKKKLGQKKLLNKIKAIGNKEKRIVEQELHKIANEIVRFAKEMKSLIVIGDMKGIRRFRYRKLNRIIYSMPFFKLTNIITYKANQQGIQVIKINEMNTSKTCSRCGEMGIRRFQGLFKCKSCGYEINADFNGCKNILKRSLDYMFNDGVIGLNPKISAMQEISSMKSL

SEQ ID NO: 42990 - protein, 456 aa, unknown
  TnpB Polypeptide
MLTGIRYQAKPTADQAERLAQWIGCARVIWNAKCDEDSYLRTFARKYLPVGTFPKPDKSYSQYKTALTPWLRECPSQILRNSATVWAQTYQDFFKGRCGRPRPKNRIRGNYVWLTRELFQLTKEDGVWVLRIGTKTNDLGVLKVNWHRKPRADRLPNSIWIRVEHGRWTVSFSYDDGKLDDNHLTSDQHLRWLRQCSTEQLESLITPLDRGVARPVQTHDKTYTVSDRDLAKQRGREKYLKRCQRKLARQKKGSNQRKKTQARIARLHRKTANVRDDFLHKTSRSVVDSAKVIVLEDLKLSNMTKRAAPVAGPAPGRWLANGRRAKSGLNKALLGVGLNRLETYLTYKAKRQNKPVFKVNPMNTSRECAACGHTHPDNRRSQEAFRCIHCGHSDNADRNAALVIRKRAIQLIQHSGTELVGTQKNVLRPGAYRNPRKTPAAHAAGATGGASKKTAA

SEQ ID NO: 42991 - protein, 397 aa, Streptomyces sp.
VKLVVQVKLLPTPGQASALEATLRACNRAATYASQVAFAKDLKDRNGLQREVYADLKATFGLSAQPAVRAVKKVVDAYATLQANLRAGNLGPPTSRRYRRAAGAPIVFRPEAAQPFDDRCLSWQYDAHTVSVWTVDGRMKGIRFACSPDQLKKLVEYRRGESDLVRRGGKWFLIAACDIPEPEPYEPVDFIGVDRGIVNLATTSDGTNYQGRRLSRYRRWQTRKRAELQAKRTRSATRRLARRAQKERRHATHVNHKISKEIVSVAVGVPPARAKPRAWGSTGRGIAVEELGGIRERVRLRRDQRDTLSSWPFHQLGQYLAYKARRAGVPFIEVDAAYTSQRCPRCGHTERANRPDRDHFRCRRCGLAGPADHVAGINVRDRARSAWVFVTAPAPAP

SEQ ID NO: 42992 - protein, 294 aa, unknown
  TnpB Polypeptide
MQHTAYCFRIYPTDKQKELFVKTFGCVRSIYNKMLADKIEHYKKTQKMLNNTPAQYKKQFPYFKEVDSLALANAQINLETAYKNFFHNPKTGFPKFKSKKNSRRTYTTNLVNNNIELKEGKLKLPKSGWVRVKQHREIPEDYKLKAVTVIESGSGKFFASILIEYEEEITNKEPKSFLGLDYSMHDLYIDNEGNKGEYEHIYRQSEKKLKRAQRKLSLMNKGSKNRAKQRIKVAKVHEKIANSRKDFLHKKSRQIANAYDCVCVENLNMKAMSQCLNFGKSVHDLAYGKFIEFL

SEQ ID NO: 42993 - protein, 221 aa, Okeania sp.
MVEKAYKFRFYPTPEQESLLRRTLGCVRLVYNKALAQRTQAWYEKQERVGYKQTSAMLTNWKKQKDLDFLTEVSSVPLQQGLRHLQSAFSNFFSGRAKYPNFKKKRNGGSAEFTKSAFKWKDGQVYLAKCVEPLPIRWSRQLPQNCVPTTITVKLDPSGRWSISLRVSDTRNLKIKPVLKQIGIDLGITSLLTTNDGEKIANPKNLQKLHKKLRLAGKSLI

SEQ ID NO: 42994 - protein, 427 aa, Aquificae sp.
MQIIRFHIITQKVPAKYYPLLKELRLEAGKIWSDSLNLFFNLLKKNGNTPNNSTRPLGGVNALKSQVQKAIKSSILHSQTTQAIQDRLFGALKSFFKNKKRNPNVKPPKPRKFYNLIWKNQAVRYQNGKLILPLARTTGIRLSIPLRKRKKEWLEELLRNGAEIRQAEIVFKAFEYRLILLVKETVEINPPDRNKVVALDLGEIHPFVSFDGKEVLIWNGRLLRSYKQLRLKLIALKQKLLAKKQKGSRRWKRIKRSFERQIAKVGRKIEDLEHKLTRAFVNYCKAKGIGTVVIGKVKGIREKAKYNKNANQKIHLMWRFGRLLQKLKYKLEGEGIVVVEEDERYTTQLCPVCGNKYKPKDRNYICPKCGFSYHRDGVGAINLFKRFMEKVSGRLILPVGGLTRPQGVSYSLSSSGWVLPTLRNPLL

SEQ ID NO: 42995 - protein, 342 aa, unknown
  TnpB Polypeptide
MIRTFRYRIKDSSAAPQLTKLAQACSLVWNFCNESQEHALRWNQQWPTYQDLCKLTAGSSKELGLHSQTVQAVCEQYETRRKQFKKRKLRWRGKRSPGWIPFKASGIKIMDDTVCYAGHTFRFWNSRELPGPVKCGSFSQDSRQRWYVNFVVEVPETEATTGTKHIGIDLGLKTLATCSDGRKIEAPRWYRNQQRRIAEHQRKKRSRQARNLQAKIAHRRKDFLHKESDRLTKECELIVIGDVCSSKLTKTNMAKSVNDAGWAMFKTLLSYKAIARKVVYREVSERLSTQTCSGCSAIGGPKGREGLGVREWVCGECNAVHDRDVNAAMNILRMGHHTLALK

SEQ ID NO: 42996 - protein, 383 aa, unknown
  TnpB Polypeptide
MSEVVVFHRAYRYRLRSHRKAEAVLRRWAGCCRKVWNLALAEQQARRERGEKHAGFVGMCQWITAWRKATETASLAQVPVHVLQNVVRTLDGAFQRFFRKEGGDPKFKRRGDPIGLRETDVKCFTVDAANGRIRFPKVGWLRYRPSRPIEGRPITVTLRAETDGWYVSIACAFEPKALVRGTKACGIDRGVANFAAFDSGQQIAPRDAHKRSLQRLRRYQRADFLHKLSTQIAREHALVCLEDLKVRSMSASAAGTQESPGKRVLQNAGLNRSILDQGWSMFKNQLAYKLEWRGGELVLVPPAYTSQRCNACGHTQTDNRKGEAFRCRACGHVDHADVNAAKNILAAGHAALAGNGQALVEGEVLQSDRPMKREPTEGLRHAA

SEQ ID NO: 42997 - protein, 413 aa, unknown
  TnpB Polypeptide
MLYPNKTMIKVLDSLCDYRRYCWNQGLNLWNDIYNQRVKNVPVDLRKKSQLAINDKTIVFSEEEQKLLTLFPSPSHCDIRNKLVANKKDWQYKLSSRVLQWAVKDLANSWSAFFDNKKPKKNGSKKKNRKVGKPSFRSKKNPKQGFKTDRARIKNGKLVLDKPRAYKDNWYGIPFRGYDLPDGKIKHCAITKIGNSYQATITIDCPEQLLPKTGKKTAIDANINHFDYTDGSFVVFPKQLDRLYAQIKHYQRLLARKRHKNGKKATQSKQYFKVRTKLQKCYQRVTAIQNDLLHKFTTEIYHEYDTVVIEDLDVKTMQMSKKAKNLHRSLFGRFRLQMEYKALKFDKQLIVADRYYPSTQRCSQCGHVKTGDDKIELDGNKKHGTKHNEYICYKCGFVADRDQNAVANLLALA

SEQ ID NO: 42998 - protein, 392 aa, unknown
  TnpB Polypeptide
MPSETIKLTAKFKLKETPKGLDDLFSAYREIVNFLITYAFENNITSFYRLKKGTYKELRKKYPQLPSHYLYTACQMTTAIYKSFRKRKRKGKAKRGPAFKKKVIMLDDHLFKLNLEKGVVKVSTPNGRIALELYPVKYHEKFRGWKVGQAWLVRTPKGVFINVVFSKEVEVREPEAFVGIDLNENNVTLSLPNGKFVQIITHEREIRTGYFVKWRRIQKKLRTGKKRKKLLEKYGERERNRLNDLYHKLANKIVELAEKYGGIALEDLTEIRESIRYSAAMNGRLHRWSFRKLQSIIEYKAKLKSVRVVFVNPAHTSSLCPICGGKLSPNGHRVLKCKCGFEADRDVVGSWNIRLRALKMWGVSVPPESPPMKMGGGTLTRYEINTLHTING

SEQ ID NO: 42999 - protein, 421 aa, Burkholderia sp.
MKRHQAFKFELRPNGAQVRLLRQFAGTCRFVYNKALALQNERFERGEKRLTFGQMGLMLTQWRADKTIPWLKAGGTAQTQQQALKNLEAAFVNFFLKRADCPRFKKKGDGDSVRFPQHFKIDHQNGRVWLVKLGWMRYRNSQSIVGTVKSVTVSLRAGKWFASILAEREVEIPLPESRSAVGIDLGVTTFAALSTGQTIAPLNSYKKHQDALAKAQRRMDRKVLNSRNWRKEKARVSKLNARIANVRRDFLNKASTAISKKHAMVCVEDLKVKNMTRSASGTVDAPGKSIRQKSSLNRVILDQGWCTFRRMLEYKVFWNGGIFIAVPPKYTSQTCPACGHVAAINRSKQQFACVECSYHNHADVVGAMNVLRAGHAQLACRVNGAAIPSATGTHRSDLAISWPGAVEVAESRWMSRGRYSS

SEQ ID NO: 43000 - protein, 387 aa, Nonomuraea sp.
VFDVKLVVQVRLLPTPEQAAALEATLRAVNAAACHVSAQAYDQQTFRNYDLRKRTYTHIKDRYALAAQAAQHVIKKVADAYATLRANLRAGNLGQEGSPRRTRATSKPITFRPDAAQPYDDRCLSWQINVRTVSIWTVAGRMRNMAFTASPDQITMLSAHRKGESDLLFRDGMWFLIATCDLPDRPVTAPDGFLGVDLGVDLGIANIATTSTGSRHCGKGLNAVRHRQRELRRRLQAKQTKSARRLLKKRRRAEARFAANTNHVIAKQIVTEAERTGNGIALEDLQGIRDRVRLRKPQRVMLHSWSFHQLGSFLSYKAARAGVAVIYVDPAFTSQQCSSCGHVDRRNRLDQACFSCTSCGFAEHADVNAARNIAARGVAGWAVSHAA

SEQ ID NO: 43001 - protein, 525 aa, Ferrithrix sp.
VDQAAFDAVDTCVRHLASIVATSSLKAKIWRRYPNGAERHYAYACLERSSALGIIMRGGTPDITMRQHSLTKKERKAIASYLHRALRKALAHTWPTVRLVRSMALDETLYSSFVIERPGKEHPGKTPKRRQYVQVIGPRPRERITIPLSGVSRVSGNIRVVLDEGSTRAFIHVAYEIQPLPGPATGPDVAIDWGITEVCTDDSGIKHGASYGAILKRATEQRKRTGQVRNKLWAITKKDAGSKRAKRIAKYNLGTKKQARRRARTQAALQTVAGAAIKEVIYGEGNRTRARGKVPQLPAHRPRRVIVEDLAQLRGKAKSKKISRLCSSWARSENEERMAVHAYIGRSDVRVVSAAYTSQTCPDPHYGYVSQDNRSGDWFHCRNPYWECNRQGDADHVAAVNLKTRINDPEIHRFTPHIEVKKILDARFVCRRESRTKGGDASPASRGQRDATSTSGAQGASVDGAATAHGRTSIPRRSDPDVGGGTTTDLHRVRSIWRGPGRLSSARAKTKGVPSVPLQKFTEKQ

SEQ ID NO: 43002 - protein, 527 aa, unknown
  TnpB Polypeptide
MFVSLQFKLELKTEDKEKLIKLMRKQSSAIRVAYNMLKELEKEKTKNPHIQIYHRLRQLFPDLPTKYIDSAIYKAKQYPKDKIVVFGGKRFFEKLCKNHLTGKLREKLKKQWRELRQGTLISIGSKADKGNRLTRFEDLNEQLHLRITTGNREFIYAKVLREPSNSKDKWLTFMAMLLESRQTKNYFAYTVELKLRNGEVYGSVSFKIPTPKVKHTKENGVIAIDTNASPIHLAIAEVSKTGELLSYQTISLHYLLGLSRNTKDHQEWILAHKIVDLAIEKGKAIAIENLKKLKKGMRGNGKATLRKILHNWNAKKLLQKIKRVAMLKGVEVVEVNPAYTSVIGMLKYAPQLSIDKDVAGTYVIGRRALGFKEDMPENYEKLLRDRTYLEFALKRYEEREKELTELVEKETNEYKRNALKSELRSAENAKKLLTNLIQSLQGESSSCEGANGRNPEQRRGSKASSSAWQVLKVALLFPILGKVLPRDLSPLKPVLVEGVWDRVRSRLVPLSAGGTVPMRDFWNSLNQ

SEQ ID NO: 43003 - protein, 397 aa, unknown
  TnpB Polypeptide
MQQLLTIVCKINPTYTQAAKIDATLKAFADACNYINETVDPKLTNNVRIQTLVYKDVREQFGLSANLAIRAINRVAGNRKTAKKDDKPVLKFKPTSADYDARIFAFRESDWTVSLTLNGGRERFKLQLGNYQIGKLTGSSPTSATLAKHRDGTCSVNIQVKTTAPEIKSIDLVIGADLGRTDICVTSTGTKHTGKQITQKRNKYAKTRALVQTNSTKGTRSSRRSCHRLLARLSGREKKFQSWHSHKISKQLVTQAIESSSVIALEDLTGVRERINKQPKSNKERRLSNNWAFYQLRQYIEYKAVGAGVKVVLIPPAYTSKTCHNCNHIHPDPNQSYRHGKYFRCGHCLWTGDADLNAAMNIKQWGVTVNTPEQSSLSCLVSLVGQVESPRYITLSN

SEQ ID NO: 43004 - protein, 285 aa, Escherichia sp.
LQQSLKDLERAYKNFFRKRAAFPRFKKRGQNDAFRYPQGVKLDQENSRIFLPKLGWMRYRNSRQVTGVVKNVTVSQSCGKWYISIQTESEVSTPVHPSASMVGLDAGVAKLATLSDGTVFEPVNSFQKNQKKLARLQRQLSRKVKFSNNWQKQKRKIQRLHSCIANIRRDYLHKVTTAVSKNHAMIVIEDLKVSNMSKSAAGTVSQPGRNVRAKSGLNRSILDQGWYEMRRQLAYKQLWRGGQVLAVPPAYTSQRCAYCGHTAKENRLSQSKFRCRYVDIQRTPM

SEQ ID NO: 43005 - protein, 513 aa, unknown
  TnpB Polypeptide
METKDATACVKTKIRGIHFFVLIKYAQEFVNEGKVFVENYNKITWPLWEFYRKIIRDYPGTKLTKFGMLFQTDDESIIGLDGNTYELSEKVTNRKVGNKSWFTKSEQLADDEIDYSAGKKIKDTQIKDMLQSLFPEMSGSYIFDMRDYITNRILSRKRQTTKAKTFNEVLLEMDRPPLLRNPTIHSKRKRFQIIPNKETLNTGVITYRNQKDEEISTPYVSTTPLSDVVDASELFNRNIGANFKISSKKRHKYYRLTVQCKKQQTFEYEPIGWIGIDINVAAAFWLTFYNLLTGKGFSWPRGTYAQSLIDARAEITKLIDDGSKGQCTSKTRSGLRKKRFAIHKKQRKLVRKIFIPFLKSLKIAKLGLAIDMVSWGAGSGNNGMQSSICEILPDLCREIGVPYQEVKPAFSSRDCSECGHRHTENQKKKMKETFLCKKCGWTLPMHQDAARTIAMRAKNNNDLTTVPSLAPVEDYQEIVKEVTEEINSAPSDSDGTIKRDDQGEITSPVANQQ

SEQ ID NO: 43006 - protein, 355 aa, Corynebacterium sp.
MSNVKRRQTFRSYPTGQQAKELSRLFGCTRVVRNHFITIMQQSHQHGDTLSLSTAEKAATTTLKRTEGYGFLNEVSSVALQQAARNTTRSFREFFRACAGSRSRVGFPRYASKRSRQTASFTKAANFRIRQPPGCRWGFIRLPKITGELKFRACRDLDWDTVGTVTVTRRPSGVYEVSVTHDVEPVILPETVTACGVDLGLVSLAAVVSSNGDRHLVDNPRFYHSAKRKLASAQRSLSRKTAGSANRNKAAVRVAKLGRKVACQRKDHLDKLSRDLVNDNQVIGIEDLSVAALSRCLRLSTSVYDAGWAMFRDMLTYKATDAGRTLVVADRFYPSSQTCSVCGRRDGNKPLSVRS

SEQ ID NO: 43007 - protein, 439 aa, unknown
  TnpB Polypeptide
VAKQIASYGVEIKHVKKIFYPTITLFRKATTFCVDVFEMEWSDITILDSKSKINYAERLIHTTKNNIAKYPDFDRRFYKMPAYMRRAVISAALGSLASYHSNLDNWLISGQHGRKPRLQNKLNKMPVFYRDSMYKGDGSDKVSLRLFQNGDWVWVEFALKHTDMQYIRKHCDMEHMSCPVLEKIHHKWFLRFSFEEEYHLNRKKYSEQTILAVDLGINTDATCAVMKSDGTVLARKFINFAGEKDLIYHTLNKVKGVSQKSGPHNTTKLWRYATMHNEELGRKIAGAITAYAVQMGCDVIVFEHLDTSGKKRGKRKQRLHMWRKNTIQRIVEHKAHKNGIRISHICAWNTSRLAFDGSGIVLRGKDAGFATNELCQFSNGKVYNCDLSAAYNIGARYFIREIQKSISARKWSLIQAKVPECGKRTLCTYNTLLEIRRAA

SEQ ID NO: 43008 - protein, 408 aa, Deinococcus sp.
MIRNKAFKVRLYPTAAQTELINRTLGSARFVYNHFLARRIAAYQENKKGLSYGQTSSELTLLKQAEETRWLSEVDKFALQNALKNLDTAYKNFFRAASKMGKKVGFPRFMKKRTGESYRTQFTNNNIQLAQNKLKLPKLGWVKTKGQPDIQGKILNATVRRVHENHYEASILCEVEIPHLPAAPKYAAGVDVGIKDFAVITDGQAFSHAKNPKYYRSTLRKLGKAQKTLSRRKRGSARYGKAKTKLAQIHKRIVNKRQDFLHKLTTALVREYEIIGTEHLKPDNMRKNRKLSLSISDAGWGEFIRQLEYKATWYGRRVSKISAYFPSSQMCHDCGFKNPATKNLAVRTWTCPNCGEFHDRDENAALNIRREALVAVGMPDTLNAHGDGVKPTSVGSGLRSENRSTSVE

SEQ ID NO: 43009 - protein, 394 aa, unknown
  TnpB Polypeptide
MLKAVKVRLYPTDAQQAHLAQAFGCARWVWNQSLAAMSIAYKETGKGLSALDMKKQIPFWKAEHEWLKTCYSQCLQQSVLNLSQAFINFFDGRTGYPSFKNRHGRQSLQYPANVKLLSQGEIKFPGYLGTVKAKVHRDIEGKLRTVTVSRMPDGRYYASLLVEDGLDSPEPSSEGKTIGLDLGLIDFAVTSDGSKYQNPRHLKKHELNLKRKQRKLSRKKDKTTNKRRKARIAVAKVHSKISRVRSDFLHKLSRKTVNENQVIVVENLAVKNMVKNHNLAKAISDAGWGMFCTMLKYKAEFDGKTYLEIGRFFPSSHLCSNTLLQIPKMDLCVRSFDCPRCNQRHDLHVNAAINIRNEGLRILALGISATALGRNVRPKRYGRKSTTVEAVAVE

SEQ ID NO: 43010 - protein, 527 aa, unknown
  TnpB Polypeptide
MECVRRAVAVEVESPPPELYAVEEPYRKIVEEVAAYVAERGRLEKEKYNELYRRFRKQYPLPAQLIQQAMNQGVETGKSFLKLKKDGRVHKPRPEVRRVSMRFAKDSWNYKKAISSTAPVRLALSLPGGRREVWIRPHRRFWFYWWRVLRKEAELASTLMLKRRRGRWFAIFVFDVVPKREPPAEVVAFDVNENTVAVARLSLLATVDRIASWNRQYVNPAVYSIKTDFGRLARRYEAVRDKKLEELKQRYPFAGRDEEERRQNVADTREFRKFARRLRERRRKEGRIKQIASEMTKNPAVIITEELGKNPQEEMIGLEEKKVEKRELRHRITQTPFRKLIGTVEDEAREAGSVVVYVSPYRNSKVCPIHFAFLRDNGSWHALYCPHGHVVDRDVAAVLNMFWKVTQAGTAKGIWWDLKDVKRRLEKGRGLVPKEAVMRRNPLVPWPIARAVWASLKTLKASPQWPAVLARAAPMTPARGADEDGTRAPPRGVETPALQDGEEVRELPCLVLTLGSQGPSSPTGTSL

SEQ ID NO: 43011 - protein, 307 aa, unknown
  TnpB Polypeptide
MLEQEKRNLLKFPAARGHYLPVGPVSGRLKQVEVKPYYGDFLVICIFETGEDCAPLPICASCGIDLGVDNTAALVSSNGRCVLYKGGALKSANQWYNKQMADYRSLAMKGHTPKEAAKLDLLHTKKMQALSRRRNQFFHDTMHKIASDIVKFCLDTGITTIVLGKNKNWKQKSNIGHVNNQNFVQIPLETLRWMITYKAESAGLIVVEQEESYTSKASLVDGDEIPVYGKETEKPVSFSGRRIKRGLYRTGSGQIINADLNGAGNILRKYIPDIFTDRKDFTFLDQILVRNYPDLNKRIPVKGIEAV

SEQ ID NO: 43012 - protein, 396 aa, Okeania sp.
LKVKPELAKEIEKTLVKYANACQFVHENSDKKLTNNVAMQALMYDTVREKFQLSAQTTIHSIRRVCSNRKTSITNHFKKELTFSPTSVDYDSRTFSLDTKKWIVSLKLLSKRTKIELLIGNYQRGILKGSKSKSAVLTKRKDGSYYINIHINNIAPEPTDTDKVIGIDLGRTDIATTSSGESWSGKDITSKRNHYSRMRAVLQQKATKGTRSSRRRCRQLQKRLSGQERRFQKHINHEITTSLVRKAATKKAAIAIEDLTNIRARTNQQRRTKKERRLSNNWAFYQFRMLLTYKCVLNGVKLILVNPAYTSQTCHKCLHIHPTKGKSYRNGKNYHCNHCGWTGDADYNGAKNIAALGLTVNQPGGSWLSCEVSSSDFVPRQLTIWDMLEGYEKPAS

SEQ ID NO: 43013 - protein, 441 aa, Enterococcus sp.
  misc_feature (163)..(180): Xaa can be any naturally occurring amino acid
MEQLKAYKFRIYPTEEQEIFFAKSFGCVRKVYNLMLDDRKKAYEEVKNDSSKKMTFPTPAKYKKEFPFLKEIDSLALANAQLNLDKAYKNFFRDKSVGFPRFKSKKNPVQSYTTNNQNGTVALIDSKFIKVPKLKSLVRIKLHRQPKGIIKSATISRHSSGKXXXXXXXXXXXXXXXXXXALIDSKFIKVPKLKSLVRIKLHRQPKGIIKSATISRHSSGKYYISLLCKEEIIELPKTNSTIGIDLGIMDFAILSDGQKIDNNKFTSKMEKKLKREQRKLSRRALLAKNKGTNLFEAKNYQKQKRKVARLHEKVMNQRTDFLNKLSTEMIKNHDIICIEDLNTKGMLRNHKLAKSISDVSWSKFVTKLQYKADWYGRKIIKVDKWFPSSQICSECGHKDGKKSLEIREWTCPVCHTHHDRDINASINILTEGLRLHSMGLA

SEQ ID NO: 43014 - protein, 237 aa, Streptomyces sp.
ATRLIDTDPAADAGRMPESDQSIGIDLGLTHFAVLSTGEKIDSPRFLRRAEKKQKKAQRELSRKQKGSKNREKARLKVARAHAKVTDARKEFHHQLSTRLISENQGIAVESLSVAGLARAKLAKSVHDAGWSQFVNILEYKAARYGRTLIRIGRFESTSQTCSTCGTVDGPKPLDVREWTCTACGTVHDRDHNAALNIKTAAGLAASACGAPVRPEPVLAQHEEAGSHGFQTGNRAA

SEQ ID NO: 43015 - protein, 286 aa, Streptomyces sp.
MASRGSATATRRSASHPRARSASSCPPLSPGRRTPSTAGTSLPHGCSSHTGQASGPTAWKQTGPSRTASSNPVGEPKTFGYDLSGTAQHRDAQLRHALIRLLHFAARHSLAVAVEDLNFQAAKTREKHGRHKRFRKLISGMPVARLRARLVSMAAELGVAVVAVDPAYTSKWGAQHWQHPLTSKNRKTTRHHAAAVAIGRRALGHSIRRRTAPPPHDRSDRAGHRTVQASPVAPGREGPRPRIPGPRTRSVRAGNGAKTGDQCAQHRSGHTAEHGTWQQDPPPLSL

SEQ ID NO: 43016 - protein, 424 aa, Streptomyces sp.
MKSRAKEAGPRERTYRYRFYPTDAQAEQLSKTFGACRWVYNQGLDLRNQSWEQHRISIGYAETCRALTGWRRAEETSWLREVSSAVLQQSLRHLDTAFSRFFRGGARHPKRKKKGRAKDSATYVRTGFRWFEDPERLGTGLIHLAKQTEPLDVRWSRALPAGTLPVKVTATRDRAGRYFLLVLVEECIAPLPPAVTPTSKAVGLDLGIAHLVTLDDGSKIAHPRLLRRYRARLAALQRQLHRKKKGSSNRNKVRLAIARLYTRISDVRKDMLDQLTTRLVRENQVLVVEDLDIAGMKRDRSGMQARKRARLNEAISDGGWGELLRQLTYKAEWYGRTLVIVDRHFPSTQRCSACHTISGPKGLSERVWTCAMCGAEHDRDVNAAVNLREEGLRLYELVAGELPAGKAPPPMIRAAEFAGYATAA

SEQ ID NO: 43017 - protein, 367 aa, unknown
  TnpB Polypeptide
MLKAYKYRIYPNNEQKMQIAKTFGCCRFVYNQTLAYRKEVYEQEKKSVSKIDCNNYCNRELKNTYEWLKEVDKFALTNAIYNMDSAYQKFFKEHAGYPKFKSKHNNRKSYKTNYSNGNIAIDFENGKIKLPKLKKVKVKLHRRFNGQIKSVTVSQVPSGKYYVSILVETEHEELPHKNQNIGLDLGIKDLCITSEGVRYENLRIIKKYERKLSRLQRQLAHKKKGSSNYRKKKKEIALCHEKITNTRKDHLHKISHEIVSENQVIVSENLQIKNMVKNHHLAKSISDVSWYELTRQLEYKSKWNGRKYVKIDRFYPSSQLCSLCGYQNPNIKDLSVRTWICPECGTEHDRDINAAKNILVEGLRQIA

SEQ ID NO: 43018 - protein, 405 aa, unknown
  TnpB Polypeptide
MLVKAVSFRLESELPSQARFLLEDFRLAVNRAIRAGLQTRVTSRNALCKLAYKDFRTEHPGMYAKHLVSVFEVAASTLKNHRRRVRKGKAGQIPYVKRLFMKTENQAYKLDRTNGVVDLPIRAGCHVELRLVLSEYHRGFLEDPSYSLGSLTLFPGRVVIAFRKTEPRPYVAESVVSLDTNERSLDGVFVSEGKGTPIKAFFPQVAAIQQRHHDRRKRLQKKKSHDRRTSRRLCRREGKREHDRVEYRMHQVANAVLDFAEEKRAAIVLEDLKGVFKPREDKALNRRLSMWPRRKLHQFIEYKAQWRGIPVHKVDPRNSSRKCPVCGRLQDSRKGTEFRCECGWRLDRHINASLNLLQTAVSKEMVGGLRFDPGALQHDVMMILYDPERGARSEPNGASCEGASA

SEQ ID NO: 43019 - protein, 672 aa, Mycobacterium sp.
MGFMAPTCTDTRAAPSGGDVVGGLRRRGKSKAPNFSYDGPVAVIRLELDASDDRMRRRLERQWEAVFRLRRALQRDAAAQCRAYWAAHRERAADPKALRQRLGLTRKGIEAAAKGHIEASGWMRNHLTKAIGLHVADEVWETIDRHLFADSSGRRHGRPHIGAWWDFTRIPGRGRSHTKATQTWETYRLVGTLDGHLAAHRHPLLPAVVHTAHQAADQPSGTSILAPPARIPAPLRPASKSWWHHDGALAVVFTGLGAGDLVLPVRLAQGAGQWPHLTHFLADPTIWHKIDLARVADRKAPGGWRYYAHLLVHQAGYQSPSTIARREQIPVGRRAGVDANVSNIAVASFRDGQPGRLLVEQIECTPAQQKAAERAARKARARQKALDRSRRNTNAAQYGPSARQQKRAQRRAAKGLPAREVPNPGGARHARCDGVPLRAYRHDELSQRYRRTRCDHAAEIRRTSQAKQARANALAATIVAAHGNTITVEDCRISTWARLWGKRIALFSPGMLVTALQQECYATGGGFYRASTHATAMSQHCLCGANVPKTLAQRTHECPQCGLRGERDIVSAALAACVKLADPNDPRTARVDYRLAHALRDGLASQQEWEGSVNRHQPPTPSGEGLARTGSHHRVASAEHAAPGLPPNRPRPQRGRRGTSRKQPAPKLIGAA

SEQ ID NO: 43020 - protein, 416 aa, unknown
  TnpB Polypeptide
MRLSFKFKPNFSHKQLKIVKELSWHCSKLYNTVNYQIKNNEEVKPVYTRLENNFKSNWHTNYLHSHNRQQLFKQLSQDWKSFFNSIKDYKKNPNKYKGQPIPPKFKYLNSNPSEIIFTNLATRIKSGNLLLSLSKEVKSKYGVKSLKFQLPLAIESYINLDNLQQVRIKQDNLSNEWYLLVIYKIEPKDKPQGSNIMAIDLGLDNLATVTFKDNPKGYIIDGKAVKSENRYYNKRITKLQKIRMKQVDSQQFKGTKQIKQLRLKRRNFVADYLHKASRKVVNLAIKQRVSTIVIGDIADIKQNNKHNKHFVAIPVQRFKDLIEYKAKLEGIKVVFLNEAYTSGCSAIDLENLNRVDYDKSRRIERGLFKTGNKIINADVNGSLNIMRKYLKNGTPKMVKQIRDIGVVDTPSRLRVS

SEQ ID NO: 43021 - protein, 394 aa, unknown
  TnpB Polypeptide
MSRYRLRPTAAQQALLLGHCAHARYVWNLCVEQESHWRPGRGKMPGFAGRCRQLSQARAAEPWLAGGSVIVQQQAIRDHDQATRNFFAGTHRRPSWRKAGRDEGFRIVHLKPGHVRLLNRNAGQVWIPKAGWVRFRLSRPVPGGVKSFRVVRDRAGRWHVAFAAIPGPVAAPGNGEVVGVDRGVAVSAALSTGELLSVPRPSPQRRRRLVRLQRRLARARRGSSRRARVKLAIARLKARQADARKDWCEKLSTSLARRFDLIRVEGLQIAHMTRSARGTIGQPGRNVRAKAGLNREIAASGWGLLVRRLADKAPGRVEKVSPAYTSQRCSACGHVDAKSRESQARFVCTACGFACNADVNAARNIAAGHAVTARGGLALAGPENREPQLILLPA

SEQ ID NO: 43022 - protein, 405 aa, Bifidobacterium sp.
MDTTTAKRAYRFRFYPTPEQEQTLRRTLGCCRKVYNMALEARSEAWTVRHESVSYEDTSRMLTDWKKTKDYAYLREVSSVPLQQSLRHLQAAYRNFFAKTGDYPRFKSKKNGGAATYAASAFIWDWDKRELTLAKMREPLPVRWSRTLPRKARPSTVTVSLDPSGRWHVSILVEEEVKHLPASPNKVGVDLGTEHFAILSTGEKIPNPRHLNRYQKKLEQAQQTLSRKQKGSNNHRKARLKVAKAYAKVKDCRSDFLHKLSTRLIRENQAVVIEDLAVENLTRRCAPKPDPEHPGRYLPNGQAAKTGLNRSILDTGWRQFRTMLEYKAQWYGRQLTVIDRWYPSSQICSTCGYNSGKKPLNIRQWDCPKCGTHHDRDINAAKNILSAGLAVRACGDPRTAEETLR

SEQ ID NO: 43023 - protein, 368 aa, Bacillus sp.
MTIHNKVYKFRLYPKEQQAHLIRKTFGCVRFVYNKMLAERKEVYEKHRGNKEELKKQEFPTPAKYKTEFEWLKEVDSLALANAQLNLQTAYKNFFSGQNDFPTFKSKKDRKSYTMNMVNGNIMLLNGHIKLPKLKLVKIKQHREIPQDHVIKSCTISMTPTGKYYVSILTEYEKEIVQKEVETVVGLDFAMSELYVSSENEKANYPHFYRQVLERLAKAQRVLSRRTKGSERWNKQRIRVAKLHEKVANQRKNFLHHKSKELVDNFDVVAIEDLNMKGMSRALNFGKSVADNGWGMFTTFLAYKLQEQGKQLVKIDKWFPSTKTCSSCGNVKDLALSEREYVCDCGTSIDRDYNAAINIKNEAIRLLA

SEQ ID NO: 43024 - protein, 402 aa, unknown
  TnpB Polypeptide
MVTQLRGTRYRLSPTGEQRRVLSRWAGCCRYVFNAALAQRQATYANTGRGLSYGALCKKLTVWKTKLPWLKHPPAMLLQQAIRDLDTAFTNFFTKRARSPRFRSRHRWQPSLRIPQDKNTLRVERLSGSVGRLNLPKLGWIRFRWSRPLTGTLRSATLSRDACGDWFVSLLCAKEVPDVVQPTVVDPEHFRGIDLGIARPVTTDEGRTHGIPTPSAGDRRHAAKLARAVSRKQKGSKNRAKAQNRLNRFRRQWRNRRTDAQHQLSNALIAENQGIAVEDLTLPNMTRRAKGTRVRQKSGLNRSILSQSWGSFLAMLAWKGPAAGVIVERVSARHTSQTCFACGVIDAASRPSQASFVCTACGHADNADVNAAKNIRAAGLSSLKACGVQVRPNPLRRLGTGL

SEQ ID NO: 43025 - protein, 411 aa, unknown
  TnpB Polypeptide
VRDLTDNRDLTPGEPQVSGHSYRIAITIQVPETVPGSFFTISIGVRVSPEPAGIELLSRYNVALNYAINKILRLNLKKIGEIHNALYRELREWFGLPSRIALDCYRDALANAKAWRNNPKKGKRPKVKKLSMLLHQGSSYRIEDCYVEIIGGIRLKIIGWDRRYDEYENREARLVYREGKMILWISKKVPKPQPYKPRDARAVDINERKIVYGDDKINKDIGTAVDRAYRWKILAENLQRKYSSPRYPAWRRRKAIHNRIRSYHRKARNILEDWARKAPLKMVRLALKLQHAVAREDLTGLINSLRKIKNKDHRTKLIIMGYSRLEKWIDWQAMKHGVPLAIVNPNGTSSECPKCDSKLEENGYRRLKCPRCGFEADRDIIGKLNIRKRALKILGIKVIPGGVLAPLTAPR

SEQ ID NO: 43026 - protein, 409 aa, Acidobacteria sp.
MSVRTFVYRLKPTRAQHASLQTILNKQRDLYNAALQERRDAWSKNGISITLNDQTKSLTKIRKFDGDYGTAPYNLSKWTLKRLDDAFKAFFRRVKKSGKAGFPRFRGAGRWQSFGFHQKGGLRLKGKKLLFSGGISGGLRVKMHRPLPKNTVIKSAIFTLESGIWRVALACEVPASATNGKDTIIGIDVGAKHLATDSNGQHYVNAKPLDKRQKELRRAARGLARSQRSSKRRKKALTKLQRVQRSIRNHRRTHLHDIANAIVRSGSTIVVEDLKLKNMTRSAKGTLAEPGKNVRQKSGLNRVLQDAAPGSLISMLSYKAESAGGKVVKIDPRDTSRTCSKCSVVDASQLSKSRYQCRCGLDLQRDHNAAINIRHRGIIALHEAARGLGDANVTGCGERRPVKADPLAA

SEQ ID NO: 43027 - protein, 378 aa, Lactobacillus sp.
MALKGIKLRIYPNQEQQLKIKLNFGYNRFVWNQMLNMMIKRYENNPQAPFLNAFALNNLLPQLKREYPWLKEAESTSLQATCKDLITAYQKFFKEHSGFPKFKSRKFPKQSYTFRMGIKLVNDHHLKLPKLGTVRFKCGQAVTGKIKNVTIRLSATERFYAIVLVDTEVKQLSKTNRAVGIDLGVSDLMITSDGIKYPTIRFDKILARKKQYWEKRLARRRLQAQKEIAWDRHNQVPYPRDLSDFKNYLKAKHMVAKYAEKIANQRNNYLHGLTKMLVSQFDVIKIEDLKIKNLLKNHKLARAIANQSWRELRSQLEYKCAWYGKQLVTVNPRKTSQICCNCGYDDGKHTLDIRDWTCPNCHRHHDRDINAARNILNA

SEQ ID NO: 43028 - protein, 452 aa, Bacillus sp.
MDISKTLKQKITNHSRIFDTTCEIYNQALGFIIEVIDKEFVDIDDTSTKSMVPAVEKLIHVTKSNPQPKYSEFNQKFYKLPSYFRRSAIACAFGKIKSYRSNYNNWLEEKKIALSEGKKFTKKPPKLQLQHKEFPVFYKDNMFVRTSENTAEIKVFHKNDWVWVDIEFKEQDIHKRNVWSWKEKNPKLGRVGKKYFLHTSYKSKITLPKIKLNEQKICAVDLGINNSAVCSVMDVSGTVLARKFINQPTEKDQLYTMTNKLRKVQAISGWIAAPNFWRRINGLQTHIVNHTSHGIVKFAKEHDCHTIVFEYLDKMNVPKGFWGAKKLRFKLRYWRKKGIQNKVEEMAHYIGMRISRINARNTSALAYDGSGFVERNPKKDLAVFSTNKVYHADLSASYNIGARYFIRGIQKSMSEKRWLVVQAKVPELSKRTFQTLSSLISLTKALELPLAT

SEQ ID NO: 43029 - protein, 372 aa, unknown
  TnpB Polypeptide
VIKEAIINHVTVRAFSRISNRDVIAKLLFTARMYRLGVIIALECLEKNIPMKECMFKIKRFVSNQKYAHACYERAREMYKSAKKLGKEVRKLKQWLIFEAIGDKLDKGNRNIRLSSPNEVEVVVFTKNYGIERIRVPIKLLKTHVSIIRELFELGSNKLLGYNARCVIRDYSRDKALVEFQFTVPVELYLKYRRVYDKPRGRNIGGIDWNSDRANLAIVSSKGELLDHKTWWFPEVTSHGYPRTARRTQQSQILSEIMDYCYHHGCSVVVFEDPDIIKTRRCTKNATANRKITRWTKRDASQMFVLKALRYGLKPFFVNPAYTSKLAELIAKDVGLDRHTASAYILALEYLGLNPKEIYQNLHRPIKTFTLR

SEQ ID NO: 43030 - protein, 416 aa, unknown
  TnpB Polypeptide
MYLTVKQQVKHLSKEEYRTIRELCHVAKNLTNEAIYNVRQYYFTEGEFLKYEKNYTLLKTSSNYKALNSNMAQQILKEVDGSFKSFFGLLKLAKQGRYAFKDCKLPYYLPKDGYATLVIGFVRLNGNKLVLPFSNSFKKTHKTIEITIPPVLLDKKVKEIRIIPKANARFFEVQYIYKAECIQRNLNTNNTLALDLGINNLVTAVSSKGKSFIIDGRRLKSINQWFNKENARLQSIKDKQHFGKKTTNRQKTIARNRNNKVNDYMNKAACKVIDYCIANDIGTLIVGYNETFQRGSNIGKQNNQNFVNIPYGLLRSKLEYLCELNDIIFVKQEESYTSKASFWDKDEMPVYSADNPTEYQFSGTRVHRGLYKTANGKTFNADINGALNIMRKSSVVDMNILYSRGEVDTPVRIRIA

SEQ ID NO: 43031 - protein, 354 aa, Deinococcus sp.
MGMVYNSNVRISRSSYALLRGLVDCYGHQVSSDLLTRCGHSDKVYRIDAPVTASTRSSLTVGGVTIQCDISRLTPPEQQALPGKPALSFPKTDGEFAALAYCKGQKFADMLRSTLQELRTDTACWPLPIDIKFQSDHIYIYSAQRKIGNATDWFLALDFGVQLRDQPEPLLTGTLGIDTGFTTPFVVAPTSCVADVRTFAVPEPLAQWVQQADLRDTDQWDLARQAFYYASLPAFRFCAQAATVRIEDLSFGRHMSQEYVRRARLCGLTDGIMAALPVYLALQGTEVVRVPPVGTSTTCHICRQPGQRRGDRFTCREHGEFNAHANAAMLIRDGGVLREWGQWPANGTQATGRS

SEQ ID NO: 43032 - protein, 366 aa, unknown
  TnpB Polypeptide
MLLTHKVKHNQNLTQELLAAKSIAKYIVHNQPFFGDIDTEIKQFGLKSLISNQIVKKYKKLSNAKKVKNVNLVVPKRGIKINKELGTIYIPSLHLTLYYYFPHNFERITQIELNEEHAFISTVVTERSQIDTKNWIGVDRNTTGHVAVVADLKSGCVTKLGRSLPHMYRKYANMKEKLEKTNKHEKLKKVKAREALILRDLNHKISRKIVDIARNTNSGIKLENLRGLKKTPELSNPSHYSLNNWTFYQMEQFILYKAKLLGVPVAYVDPTNTSKICSRCGSKGNRIRKSFTCPTCGHVDHADALAAFNIAGKAPIGNESIHRRKRCDGRESRRPSSGKFHKARKVSASTSLSLTSNNFSSFFNMF

SEQ ID NO: 43033 - protein, 521 aa, Thermus sp.
MNPGMPKGEAPKLFLGVHARLVFPDHRDEAAVLDLMRRFSSATRFAYQRLLEGKTREELKRESGPLCTLFGLNTRYADGVIEKAQATLDSAKELGQDPRKVVFGGRKLFEQLKRKHLSGKALLALKREWKEKRQGLLYSRGDATKKGNANLRLESRDGALWLRVNLGNGGYVQALVQTAHPQLNALRERVYASLPYNVTLQLKEGKVYAHFTWSEELPPPVHTKANGVLGVDVNGDPYHLALAVVSPDGNLVRYLTLSLEGVDSAPNKGAKELLLWRIAHQVVAVAEEHGVAIATEKLKRLRNSRRGDGSGRHFRRKQHRFAYRSLLAKVHSLARKRGVEVLEVNPQDTSTIGMLKYAPQLHLSKDVAAAYVIGRRALGFEEKLPKGYRALLRNKSFLAYTEGFYQSRLQELQKLREAEGNPYLRRRLSRDIGKAKAALTLVSSLQGSPGSRKGVTEGRNPSGAHPWRVLRVSLFLPLLGLEVPRDLSPLKPILHGLWEGWKVGSGPHPGGGPGCANVHFY

SEQ ID NO: 43034 - protein, 602 aa, Rhodococcus sp.
MTGPGSAAPRQFAFTTRAHVAVDDITGEPIGLDDVDTRVRWLLDLIAAAGTELTARLWQPDTFDVLAAGVDHRDRRLPAQGHVAASRLGWNPHYPDGVYVPSRVTRVVTAQVMATLRALAYRDTAITSLSQRFDPATGTVAPPTEPGDWVPLGFARGVRRQLIARARREGDAVLAGRLRITDIQEPPQTSAMARLSAADRQLAQLTVAERELVLTVKLPTTAAPTGRAHWRRVRLTATIPAHLHGRAITDWHLPTLVLDQRGLLLRCAATETVPVADVTSGTTAVGVDWSPSTLGAAAITTENLDGLSSDFRGWTYDDRGLGTKLARLQAEGQMLHRKAARLTQLATNAEPEARARLEAKIAVLDAHREAVGIKRGKINRELGFHFARQVTDYAEAAGARVTAVEDLTTLETRGHGRVNNNRAAQSARRHAVTALAHTAAEVGIAVVSVPARGSSARCPGCDEPLSRPGGYHSAWCSGCRVGGNRDHIAGVNLAKRALLGKTTVTRRRGQMPAIRVAEHAPVRKSRDKTSPTPSRPRHRRVRRSLPTATPRAGVTPNRYVPAPQASVWDTVKPAPPHGDAGSPDTRPSLPPATQVADSMRSM

SEQ ID NO: 43035 - protein, 163 aa, Lactobacillus sp.
LSRQYRALKARKQKEGRSATDLNLAKTQLKVQRLYQRLTNIQIDNQNKIIATVVRTKPQWVALEDLNVSGMMKNRHLAKAIAQQGFYNFRVKLITKCQQLGIPVHLTGRFEPTSKLCHNCGTKKVSLKLSERTYHCPNCHYTNDRDLNAALNIRDTENFALAY

SEQ ID NO: 43036 - protein, 419 aa, unknown
  TnpB Polypeptide
MLTITHEYQIKPNRQQEAEMLSWLETCRKVYNYALSERKAWVESRKCAVNACSLRHEYIMPADAPRPTFASQCKSLAFSKKTIPELALPHTHVLQQVLRALEAAFVAMWERGHGFPRFKKRGRMRSFLFPQMGVNPIQGNKTAVSGKNQSPRNCLLKLPKLGVVKMRLSRAIPEGFELKQLRVVKRASGWYAMLILQMDVKVPERMPHGEPVGIDLGLLSFLATSTGETIARPRFFVDLQGQLKLLQRRLKHKKKGSKNWQKLQVRIARLHEHISNTRKDFHFKTAHHLCNSAGMIFAEDLNIKGLARGMLGKHCLDAAWGQFLNILKWVCWKRDVYFAQVDHRGTNQSCPQCLTVTGFKELSERIHQCPACGYQTDRDVAAAQVVLARGVSAVGHTVAKLLVDGGGSGVRMMQESPCL

SEQ ID NO: 43037 - protein, 576 aa, unknown
  TnpB Polypeptide
  misc_feature (454)..(504): Xaa can be any naturally occurring amino acid
MVGDPNLHGRGQMLERSREAAPLTRELVREFFEVQTAEKQLTNAHLSSLLFPVHPRAQNFTESGKRGKKGIMNSRVSRGKPPRIFQGVHARLLFLDKEDERAVLDLMRRFSSATRFAYQRLLEGKTREELKRENGPLYRLFGLNTRYADGAIEKAQATLESAKELGSDPRKVVFGGRKLFEQLKRRHLSGKALLALKREWKEKRQGLLYSRGDAAKKGNANLRLEPKDGALWLRINLAKGGHVRALVKTSHPQLNALRERVYASLPYNVTIRLKDGKLYAHFTWSEELPPPVHTKANGVLGIDVNADPYHLALAVVSPDGNLKRHLTVSLEEVDRAPNRGSKELLLWKVAHQVVALAEEHGVAIATERLKYLRKSRKGDGSGRRFRRTQHRFAYRSLLEKIHSLAQKRGVEVIEVNPQDTSTIGTLKYAPSLHLSKDVAAAYVIGRRALGFEEXXXXXXXXXXXXXXXXXXXXXXXXXXXXXXXXXXXXXXXXXXXXXXXXXXXEPEGGNQGKEPLRRPSLAGPEGRSLPSPSRARGAQRPLSPQAHPTPRFADPGIVEGVEARPRSSSWWRAGVR

SEQ ID NO: 43038 - protein, 400 aa, Lactobacillus sp.
  misc_feature (373)..(376): Xaa can be any naturally occurring amino acid
MMRTVKVKLYPNGTMRRVLAQLCDYRRYCWNQGLATWNAMYDSSQIMADKKLCPTACKVRDELVANKQDWQYQLSARCLQLAITDLGKAWQNFFDQSLPDWGKPHFKSKKASRQGFKTDRAKIVNGRLRLDKPRGIASWYDIPFHGARHLIGTLKVVSIYRENGTYWASLPFEVAEIGSKPRTGQVTGIDLNVGHLNYTGGLFNVCPQRLQRLYQRIKHYQRALARKRVANGRIKGTRSKNYAQTKAKLQRDYRKVANIQHDLMQKFTTYLVNRYDKIVIEDLDVKKMQMTHIASKGLQRSLFGYFRQILTYKCDWYGKMLLLADRYYPSTQRCSNCGHVKKGSDKIGLRGNAQHQTKHHEYVCYKCGVTLDXXXXSRTYYNSHSKIIKKGQAMPSNFKS

SEQ ID NO: 43039 - protein, 431 aa, unknown
  TnpB Polypeptide
MTKGEKIKKAKHETLLKRKTQILKVFELKVNCHHTSKEDFKKLNDCFKQAKWVINDVIGSNDIFHYNYKDHRKVINFDKDKNKVEREITLQTGIHQELVNSVKTDICNLSKAKKKGIQIGALKFRKSVNRIYLRTGMLKIKSSKSVSIPMFKNLKVYGLEQFINIPNFEIANANLIRKSSGFYIMVTVFFPKEISVKTNKTVGIDMGIKTAVTTSDGEKFDCNKQETEYLKYLQRQLHKKQKGSKRYYKLLIQIQKEYEHILNQKDDVANKIVSHLLKNYDVIYFQDEQIAKWKKKKMKQKKNKQMKKCGFSFGRQVQSSCLGRVKGKLVALEKSGRSYKISKWLPTTKFCPNCGCLNMVTLDERTYVCDCGYTRDRDVHASRNVKLFGSTKRAEWLEQPSVEELTSVSLNASRSDLQVSPLKRKQEVTTL

SEQ ID NO: 43040 - protein, 372 aa, unknown
  TnpB Polypeptide
MPNKACKFRLYPTPAQKILLAKTFGCVRLVYNHWLDRKISQYKEDQTTLSYTFCAKELTVLKKTEECAFLKEVDSISLQQSLRHLDQTFQNFFNQPKKGFPRFKSKRNRKNSYSTVCVNQNILLSDGYLKLPKIGQVKVKQHRKIPASYVLKSVTVSQSPSGKYHASILFEYENQVPKRKPHTFLGLDFSMNGLYKDSEGNEAEYPKYYRKWEKKLKREQCKLSHMQKGSRNWEKQRIKVARLYEKVANQRKDFLHKRSREIVNAYDCVCIEDLDMKAMARSLHFGKSVHDNGWGMFTTFLKYKLEDQGKQLIRIDKWFPSSQTCSVCGYKNPETKDLGMREWDCPNCKSHHDRDLNAAINIRAEGMRLISA

SEQ ID NO: 43041 - protein, 415 aa, Alcaligenes sp.
MKRLQAFKYELRPDGQQARQMARFAGSCRFVFNKALVLQKANYEAGGKFIGYVAMAKELTEWRNGTQTPWLKEAPVHPLQHALKDLERAYKNFFAKHAAFPRFKKKGQRDSFRYPDAKQIKLDAANGRIFLPKLGWLRYRNSRDVLGRVCNATVSQSGGKWFVSIQTEREVDQPESQAATAVGIDMGITRFATLSDGTFYAPLNSFKRHETALRKAQRAMSRKTKFSNNWKKAKARVQRIHSRIGNARRDYLHQCSTTISQNHAMVCIEDLQVHNMSKSAAGSVEKPGRNVRAKSGLNKSILDQGWFEFRRQLDYKLAWNGGWLVAVPPQHTSRTCPCCGHVSAENRQTQARFECVECGFEENADVVGAINVLRAGHARLAWGEDVSRAKPAKARRAASVKQEPAEATQPSRVLV

SEQ ID NO: 43042 - protein, 363 aa, Tychonema sp.
MFAIKRALKLNNQEATLLAKHAGFRRVVFNMGLSLRTQMYGEAKLSDNKVINEVKKVLTNYVKKQPQFNWMNQLSSRVYQNALIDLKDAFSRYRSGKSGHPRFNRRRDGQSFTVDSSNGKVLLAAGNTIKIPTLGTFRLHEPLECSVVSQTFTLSKSGSRWFVSFCVDADRLPDQQLQDSVGIDVGIKSFATLSNDRVFDAPKPLKQAKTKLARLQRKASKQVKGSNNQRKTYNKIRRIHARISAIRKDFIHKLTTYLAKSFQLIKIEDLNVKGMMANHKLAGAISDLGFYEFQRQLEYKCQMYGASLVLVDRWFPSSKLFSNCGSKKEMPLNLRTYDCPVCGRSIDRDLNASLNILNSQPSA

SEQ ID NO: 43043 - protein, 424 aa, unknown
  TnpB Polypeptide
MILSYKTRLEPNNKQAHKFKQFAGAARYAYNWAIAKEKEAYELGNGFIGEMELRRIFTRHKEEANWLYDISNDVTKQAIIDAATAFSNFFKGRAEFPQFKTKKKSRPAFYQDVFKFKATDTHIRVEKISDTQKKNKQKINWIKVSEKGRIPTISKGYQNPRITFDGIHWYASVGVEVTDKPAEPLNDGIGIDLGVKDLAICSDKHTYKNINKTDRVRHLEKQRRRKQREISRKYLMNKDGEKYVKTKNIVKAELALLKLNHKLTNIRRNYIHQVTNEIISRKPKFIVLEDLNVKGMMKNKHLAKAVQQQSFAEFARILEYKAKQNNIEVIYADRFYPSSKTCSCCGAIKHDLKLKDRIFKCNSCGLVIDRDFNASLNLYLYGIRTASSAGIYVCGVLHQTEVASAKQGTKKQKLNRNLSKGVNP

SEQ ID NO: 43044 - protein, 402 aa, Escherichia sp.
VKRLQAFKFQLRPGGQQECEMRRFAGACRFVFNRALARQNENHEAGNKYIPYGKMASWLVEWKNATETQWLKDSPSQPLQQSLKDLERAYKNFFRKRAAFPRFKKRGQNDAFRYPQGVKLDQENSRIFLPKLGWMRYRNSRQVTGVVKNVTVSQSCGKWYISIQTESEVSIPAHPSASMVGLDAGVAKLATLSDGTVFEPVNSFQKNQKTLARLQRQLSRKVKFSNNWQKQKRKIQRLHSCIANIRRDYLHKVTTAVSKNHAMIVIEDLKVSNMSKSAAGTVSQPGRNVRAKSGLNRSILDQGWYEMHRQLEYKQLWRGGQVLAVPPAYTSQRCAYCGHTAKENRLSQSKFRCQVCGYTANADVNGARNILAAGHAVLACGEMVQSGRPLKQEPTEMIQATA

SEQ ID NO: 43045 - protein, 348 aa, unknown
  TnpB Polypeptide
MILTYRYRIKEASCSRHLECQARAVNLVWNYCGGIQEASRRHNKPWPSGFDLIRLTSGSSKLLGLHSDTVQAICKQFALSRNAHCRRPRWRGRKSLGWIPFQSDRAIRMDGDAAIFLGRRYRLWLSRPINGEICCGNFAQDARGRWYLNLDLEVPKDSEHGTREVGIDLGLKSLATFSTGEKIEAPRFYRKYEQALVTIQRAGRKPRLRTIHAKIRNCRKHFLHELSTLLVRGNRRICVGKINSSGLARTSLAKAVLDASWSQLRSQLRYKAMRHGAEYIEVDERLTTQVCSACGACGGPKGREDLVVREWVCGGCGVRHDRDINSAINILVSGRNVGLQGTEIASLS

SEQ ID NO: 43046 - protein, 484 aa, Kribbella sp.
MARFKIPDGWVMQAYRYALDPTPAQERSLASHAGAARFARNHMLRLVKAVLDQRAAERSYGVAEADLTPGLGWSLPALRRVWNARKNSAAPWWKENSKEAYNTGLDSLARSLEAWSKSRGGRRAGRPVGFPRFHTKRARASVRFTTGPIRLEPDRHHVTLPKLGRIRTHESTRKLGLRIESATARVLSATVARDSDGRWYASFQTLVQRTTTRPAHAGIRHAVVGVDVGVKDLLVVATPDGAEVERVPAPRSLARAQVRLRALQRKASRQQAPYDPQSKQKRLPSKRWRRTQALIGKAHARAASIRRDTVQKATTRLAQQVLVITVETLNVSGMRTAGGARKRGLNRALADAALAQVRRMLAYKTIWYGSRLVEADRWYPSSKTCSGCGSRKPRLLLAERSYVCEHCGLVIDRDLNAAINLARLGEAHTLSERSPAGSGPVAGRGATQETEPAPAGDAAGCETSTPPQHPLDQTGTASPQGEAA

SEQ ID NO: 43047 - protein, 374 aa, unknown
  TnpB Polypeptide
MPSAASAQRQTQIVSEQMKSWLKACASYRKNPEKFKAHPNLPGYKKRYRSFIVGRNGYKIENHRLYLTGGKEYGFAPIKIRCCETQAFNSKISETVVGDVRIVPLGNSFVLELTFECEDAQVERLKLDDSAACSIDLGIDNFATMISTKAEAPFLLVKGGKVKSINQWWNKQVAELKSLGKFGHIAAKSRRRYSQMEDYLHKASRLVIEYCLTYDIGTVIIGYNPQWKTECNMGKVNNQKFVAIPHARFIDKVKYKAQAYGIKVIVREESYTSKASALDFDAVPDYRADGELVKGKFSGNRVKRGLYRAADGTEINADIIGALNIARKELGDEWLKKQLKANGGRMNRPVSVRDIGQTLKEGLRPLETASVRAR

SEQ ID NO: 43048 - protein, 371 aa, unknown
  TnpB Polypeptide
MKTAYKFRMYPNKQQESMLDVALETCRHLYNTALADRKNCYELEGINRSYEDQAATLTLEKKEGKWQGVFSQVSQDVLKRVDKAFNAFFRRVKAGEKPGYPRFKGHGWYKSFTYPQAGFKLDGSKLTLSKIGSIRIFKHREVEGRIKTCTIKKDLLGHWYAVLVTEIEDIPVVEPKITIGVDVGLKSLVALSTGETVEYPQYYVQAEEKLAVAQRNLSRKKKGSSNRKKAKAKVAKLHQTIQHHRDEFLHQVSRKLVDSADLIVFENLNISGMLKNYQLAKHIQDHAWGKLIQFTQSKAAKAGKVVELVDARYTSQKCSQCGILVPKTLADRVHHCPKCGLEMDRDLNASINILTLGLRGRASRDIIKAGP

SEQ ID NO: 43049 - protein, 317 aa, unknown
  TnpB Polypeptide
LEKPINCFTIFLKEKYYLPSKIAIDCYREAIAIAKSWLKNPRKGGIPRAKTPRLWLSHKYSYRIKDNYVEIIGGYKLRIIGWDRRYDQYQNKEARLLLKDGKFILEISKHISKPVKYIPKGILAVDVNEKHIVVGNSHFEYRFETAIEKALNYKQLAENLQEKYSSTRYSAWLRRRGIRERIRYFHRKAKNIIEDWVKKISHKIVLLAKHYQYAVAREDLTNLIKSLRKLPKEHKVALLILSYRRLKHWIDWQCEKHGVPIIIVEPKDTSVTCPICNLRLVKNGYRKMKCLKCRFEADRDVIAIQNIERKAKMWGAL

SEQ ID NO: 43050 - protein, 475 aa, unknown
  TnpB Polypeptide
LKQKKTNHHSQIHLLQADIKKKRLLLHAKMLKFQRITKRIHIMGERLSRNTFKLCFGSRDLFRQQPGFHTDAYRLTKEQKVYDSKEQWLDDWRKARNNILYSVGDKNKPQGNAELQYYPETKTLRVRLVEGVYQQRLAVKALELDTPVQELLNHKIIKHSSLRTQARFMDIQDVSFSQKHLAKLQQVFALPSDQRQPITAKIIKRQCPNGRDTGYYLQLSFDEVIQPSFQFTTPYTMGVDLNVKGLAYCIVKEDGNKLKNDSTRLYPSHGFIPWDLNGKTSAQRSWIISNTIEKLLDVSCHFGIGTLAIEDLDFNATKATMNHGYKAQPNYNDMVSQFATSQFKDLLIRKTERLNMKLHLVNPSYSSIGGFTKYGYSNKLPVDVAASLWLARQSLYGKTFKTEQHIEYKKFSKESVTFPYVFQPKQSKRLEKLDHWRHMSNALGTKRSEWIRKMHTLLRPEVDQPPLISDHDFGR

SEQ ID NO: 43051 - protein, 364 aa, Staphylococcus sp.
MLERYWKALDNGKYIDHKNMISILKEIKNDDKYSFLNEVSRKTLVGKIDDLRETLIKYHNHEIRKPKFKSKKREPKRFPIRYDRMHFNKEKHVKVEKLGYLRISNGTYKNNKSVLENESIKPLNPKCYYDGKYWYISFSIEVDNQYKKEKDNTNEVIGIDLGIKTLATCSNGKSYKNINKSSKVKKLEKKLSRLQRQLSRKYEMNKQGKKFIKTNNIIKLEKEIKLLHRKLSNIRNNHIHTMTKEIVEQYPSEIVIEDLKVKNLLKNKHLSTSISKANWYTIREYLTYKCEDKGILLTVANTYYPSSQTCSNCGNRLTKQDKLSLSQRTYKCSCGINLDRDLNASINLKNYRYSNWYHNHVLTK

SEQ ID NO: 43052 - protein, 604 aa, unknown
  TnpB Polypeptide
MSDDVDDNKKRKDVSKRLETNRNVSFHIIKMKLSRFSKSSSFDLILKDNIKNMNKMRTLAYHLINFHILRCLKDNITLPDLQSLNFYYRCLATVSKLNNRSSKERENDELLKTYNPYMNTKDIETPYRDYSGNLINNMSLEMKIAVTNHIILNFTKRLQRYTILKYGIKNIDNLYDTTLYYVSNKNEQEIKDFVKIIPTKKNIKDNLNHIIQLEYEIQKYFDSLEPDTKGVRNFSITPIKGSYVDGYVKVCTSCLKDLTKTNKDLKDLNKDTLWRTLFNLNEVETCNRKFQYEILTDGYGVSITTNKSLGLELYQVDEDDKISCKCGCKVKKSGYKKHLDSSTHIKKMTTKRKLDDTEEQFDRIVGLDPGVNQIYSAVDQDNNFMNCSSKQYRTKSKIKHSVEWNKRRCKEVQETLDTLKSFKTVDIDRYKNAFEQYSKTYNELTIFYNSKAYKKWKFKTYCFRKKTISSMCKDICKNKKTLVGYGDWSKNQGIIKKHPSTPNKKLREALIRYKDCKVVSVNEYRTSKECSICHNVVKNVSKIHQVVRCTNNECSMCWQRDINASRNIIQKLYSENLGLNPPQVVAQPRLHATASRGDRDLLPV

SEQ ID NO: 43053 - protein, 406 aa, Tolypothrix sp.
MSSLYSFMLYTISMSEYTVRKLKIGNNQQMGELALAAGELYSRTVVSFWRTVRNKGLWLKPSSMMRWHNSDSLHAHSADAVVQSFYASLKSWRSRRKADPNAHPPRRRRRFFKVQWKSSAIKVKNGKLQLSNGKGNAPLIIDWNWETPKLVEMGWDGEQYEIRACYAVTPVQPANSGTVAGIDLGEIHLAVAHDGAQTFILNGRLLRSKRQYQNKLKAKLASLVDTKKRGSKNRKRLVRSKQRQLAKVKNQIKDILHKQTSKLVSTLKSRGVQTLAIGDVRDIRARIDFGTKSNQKLHQWSHGETRTFLTYKAQRMGMKVEIQCEKYTSQTCPSCGQRHKPKNRTYKCKCGFEFHRDGVGSINIRRKYLGCFDVPVVGVMAAPTGLRFRPHSKCSSVCLGTCERSR

SEQ ID NO: 43054 - protein, 560 aa, unknown
  TnpB Polypeptide
MARNNKITTSVKVLIDTSKLSYKDKKKLRQILGRDSRIISRYIGVIENNRKELVEYKEKKNGKISIKIDKGKLDQLTCTTSERKIVNHDFKIQFPRISLNELKECRDTAVGMYLSYLELEVKGNASIPTAKSSVPRSIGYRRFKLCYHERTLTIMDSMDTNPSMINNGKRKVQHNKLTLNFDLKNYHICKIMEGSLQAVRIVRSRKKYYAIFAIRHEVKQLTSKFYPKKSNKELAIAGIDLGINRDAVISIITVHGVSHHKFIKLERIENTKLSILKLDKRIAEIQHKAAKRSTDNEQTDGLYSLLRELRSERAELKYEISHQLSAEINKYLLSLTDQYDLWIGIGKLKGIRRGQRRGNGNKRHRKRIHRWAYGQLTWMLEYKLSKSGYKRRFLTIPEGWTSIKCWKCNTKGKRPKQEFFKCKNRTCKWMGDADFNGATNIAKRAAKYFKLTTHLKSSLFEVRELGSAEPKTMKVFNKINTRGSSNLSDNISDRNAVFSDLTVDKNHGNTSSLISFFETSSEGEDDRSTDLLNQAVDKNKSRTLLASQEVVATPDSVCGT

SEQ ID NO: 43055 - protein, 351 aa, Alteromonas sp.
MHTKTLKLRVRDKHCSELKQQARQVNFVWNYINDLSSRSIRERGVFLSAYDIQKYTNGAAKELGLHSQTVQCVSKEYVTRRKQFKKRQLNWRKSRGVRRSLGWIPVNTGAAKWKNGQIYFNGKHYSVWDSYGLSKYTFRTASFSEDARGRWYFNVVVSIKAEPSKGTSLLGIDLGCKDSATASNGEQLTNGEYRKLQQQLGIAQRARKKQRVKAIHAKIANRRKDNIHKFTRKLVNTSSAIFVGNVSSQAMVKTKLAKSVLDASWGSIKTVLEYKCAHAGIHFEEINEAYSTQTCSCCGTIPTSSPKGRIGLRIRQWTCSDCGTQNHRDINAARNIAAAGHRRLEGGIPVL

SEQ ID NO: 43056 - protein, 377 aa, Bacillus sp.
MLVNKAYKFRIYPTKEQETLIAKTIGCSRFVFNHFLGHWNDSYKETGKGLTYNSCSAELTKLKKELVWLKEVDSIALQSSLKNLADSYSRFFKKQNKAPRFKSKKNQVQSYTTKETNGNIAVVGNKMKLPKLGLVRFAKSREVHGRVLNATVRRTPSGKYFVSILAEVDVIPLEKAESSIGIDLGITDFAIFSDGRKIDNNKFTTKMEKKLKREQRKLSRRALLAKQNGINLLDAKNYQKQKRKVARLHERVMNQRDDFLNKLSTEIIKNHDQICIENLNTKGMLRNHKLAKSISDVSWSAFVSKLEYKAKWYGKTIMKVSKWFPSSQICSDCGHQDCKKSLAIREWTCPICHQHHDRDINASKNILAEGLRALALA

SEQ ID NO: 43057 - protein, 282 aa, unknown
  TnpB Polypeptide
MVGDSRTRTVPVKLDVDESAAELLHQTTDHFLDAANYVVDVAWEPDWKITSKTELHDLTYYDVRDDSPLPANLVQAARNRAAEAVKGVVERWKQGKKSSKPHFTSRFASYDARTVTVNDDHATLHHRRTSNRGVCSPRRTTRYATRSVFVQRRVRNERCNSPLSGVEDCFYLHVRTKPAMENDAEHGDTKHVSVLGVDLGITNIATTSTGRFWSGDELTHWHREYEKRRGDLQQTGTRWAHKNVQQVGRKQTGRFEQMLHTISNELVEEALRMVVRTSCSSN

SEQ ID NO: 43058 - protein, 612 aa, unknown
  TnpB Polypeptide
MSSLVRTFQLRLPRGPHETVLGHMAEHLAMVERHLHVALTRAGHETEAEIAAAGGSAAFEALLDSQRDADGKRPTGPLQRRKTAIKSTFIAEYGISARHFNSLLALLEGRYDSVREADKARLETLQDKRDRLQKKIASRAKKIAAFARVAREVAERAKLGKGPTKAQAKQLLSRQDSVRARFVQHQQKRRARDLAGKIARLQAEISRTTPRIVFGGSELLRARERIGKRDLPALVAWRKRWEKARAGGFLALGSKDETAGCQTCVGEIDAAGRLALRLRLPDAISTDGNRHLHLRDLDLPAFGREEVIAALMAHRVSAADRRAISYRFTRDADWPEGNSLSAWRICITIDQAVPEITSRVFERRLNRRGEPGSAAAGATEDFQGAIGVDINPDHLAWAAIDRHGNPVAGKSGMIALPLRGKSAGHRATLIGNAARDLVAIAVELGRPLVLEQLDFRSKKREMAEEGAGYARMLSAFAYASIQAAIRRRALRFGVELVDVNPAWTSLIGRTNFARRYGLSGHVAAAVAIARRAARCSERVNYIHGSRGRHNTLPTQSESRRHVWRQWALVRKDEVQARRRATGSRPAAGATTSSPPLTPDRAKGGAVRLSPQG

SEQ ID NO: 43059 - protein, 378 aa, Domibacillus sp.
VVKKMIRSRKVRLKPTKEQEQQLWKSVGTARWVYNWVLIRQKANYEYGGKFISDNDLRKEITQLKQTDEFKWLSEVSNNVAKQAVKDACDAYKRFFKGQSQFPKFKSRKRSKASFYNDTSKLKVKKNLVLIEKVGWVKTSEQLPMNVKYTNPRISFDKKYWYISIGIEQKFEQEELSDQIIGIDLGIKELAVCSNGQVFKNINKTKEVRKHEKRLRRLQRSVSRKYEMNKKEGNRFVKTSNLIKIEKKMQHLHRRLTNIRDNHLHQATNAIVKTKPCKVVMEDLNVSGMMKNRHLSKALANQKLFEFIRQMKYKCEKYSIEFIQVDRFYPSSKTCSCCGTIKKDLKLSDRTYACECGLKIDRDLNASINLANFEKLAV

SEQ ID NO: 43060 - protein, 443 aa, unknown
  TnpB Polypeptide
METATKTLEATLAPPTAHKEGKLCDLLETYREGLHEAFDAGCDTMSATSEVVTPYDLPYQAKAALCNYVPQLHGAYGAQELDDDHPVRLTNQAAEFDHSPAREYEFTWWAPQPGRGTNFWIPLRINPEQEGLWHDLVDGDASAGQLRLQRNRTSWTLHVTVEFPVEEPDYAIDGDDVTHIGLDIGETALITGCALKDGSPTGPFVCDGSRAKHLRKEMHTTLKRLQERDAAEWRINERFDHYQNALTDIVEKASRQAVEYARGFEKPVIVMENLTYIREEMDYGSYMNRRLHAWAFARLQNRVKDKAREAGIPVEYVRPEYTSQTCHACGYIGNRATQGTFRCTNDECRVTEFQGDINGAINVARRADPWGESVPLKPAGSDSPRGGSACDSTTTSFETAKPSRDHERRNASFERHREMSEKHSQMTLSAFHGSEPSTSDNRT

SEQ ID NO: 43061 - protein, 367 aa, Pseudanabaena sp.
LDKEQVPIPLKFLASEFLDIIPPFHRFRTLPTVEREWLSGVSNIPLQQSVADLGVAYKNFFDFLKGKRKGKKVGSPRFKKKTNRQSARFRIGGFSLKGEDVYLAKIGNVKPIWSRELPSEPSSITVIRDGANRYFLSFVVEIEPIQVEAKNQSIGIDLGVKTFAYMSNGQTADSPNYSRLDRRLRRKQKQLARQVKDSKRREKTRLQIAKLHNQITDTRKDFLHKLSAKVVSENQAIVLEDLNVSGMVRNRKLARVISLQGWREFRTLVEAKSDKFGRELVVISRWEPTSQVCSDCGYRWGKLDLKVRTFTCLNCGSTHDRDENAAKNINKVGIGHCHDSKWTQRQSKTGSPASVGEASRITVALAR

SEQ ID NO: 43062 - protein, 386 aa, unknown
  TnpB Polypeptide
VNIIIKGYKYRIYPTKAQQKQIKIMFNGKRFIWNRFLALNKERLKNNERILTYNQMSSLLTQLKKEQEWLCQIANSILQNTLKNLYNAFQDYFKKIRGFPKFKSYKNNYQSIKINFTNNNIEVIEKEIQYTLTSKYKKQNCRIKLPKIKKVKIAYSRQYEGRILSATISQVPSGKYFISLCCTDIKSNKFQQTNNKIGIDLGIKEFAIFNTGEKIDNPKYYRKYEQKLKKKQRKLSSKQKGSKNRNKQHIKVAILHEKIYDTRLDFLHKLTTKLVKNNDIICIEDLKVSKLLQNKKNKKLHKSISDASFYEFKRQLQYKILWNDKILSIIDQYFPSSKLCSDCGFKYNDLTLDIREWECKNCGSIHDRDINAAINILNEGLRLLVS

SEQ ID NO: 43063 - protein, 373 aa, unknown
  TnpB Polypeptide
LKFEPENPGAVLDTMAMANQSFNICTEIGFKKQTSSKNKLHHLTYKAIRKKYPKLPAALVQTIRDNACEALKGVELETQPMKKQYSSVRYDKRTANLKLNDGLASISSITGRVKGKLIVAGYFKKYLSWKASGCTLQFKKGKFFLHVFVENETPKLIGENKVLGIDRGINNVAVCSDNSFINSKEIHRSKGKYAHLRKQLQAKGTRSAKRKLKRLAGREKRFVRNESHIIANEIVSKPYDIFALEDLTNIRVQKRLGRNFNRKLSNWNFSELEQIMSYKAENLGKRIMKIDGRYSSQKCSKCGHTERSNRKLSEFHCKECGLKLHADLNASRNIAQAGISGLSRVSVSHPIVAPMTCASGEIVTSQRYSVVGS

SEQ ID NO: 43064 - protein, 445 aa, unknown
  TnpB Polypeptide
MKLINSSKAKIVDCNFLVLSQTVDKYRNAVAFFVNVIDKEWNRFKELTTKESYNLVERLTIETKKNPTPLYNFKNGFHKFPSYLRRSAIADSYGIVSSYYSNLENYNKEKEIALLDNKRFTKKSPKLNKWHFKCPALYEGNMYEKLDDNLVRIKVFKNNDWVWQIIKLRNTDINYIKNRFSNDKVLSPILIKKGRKFYLQYAFEKKVILPKLKYPNIKVCSVDLGLNHSAVCSIIDSKGTVIDRLFINQPIEKDRLNRLLNRYRLKCKHGGINKKPKIWGKINGLNTQIVNDTVNKILNFAISNNVDVLVFEYLEFQSKKFGSKAIRLQLWAKRRIQEKCQHQAHNYGLHFSRVSAKNTSKLAFDGSGIVVRNSKKASLCKLKNGKEYNCDLNASYNIGARYFIREIEKTISEKEWLQYEAKVPCIARRTHCTLSTFKNLIVAMA

SEQ ID NO: 43065 - protein, 402 aa, Escherichia sp.
VKRLQAFKFQLRPGGQQECEMRRFAGACRFVFNRALALQNENHEAGNKYIPYGKMASWLVEWKNATETQWLKDSPSQPLQQSLKGLERAYKNFFQKRAAFPRFKKRGQNDAFRYPQGVKLDQENSRIFLPKLGWMRYRNSRQVTGVVKNVTVSQSCGKWYISIQTESEVSTPVHPSASMVGLDAGVAKLATLSDGTVFEPVNSFQKNQKTPARLQRQLSRKVKFSNNWQKQKRKIQRLHSCIANIRRDYLHKVTTTVSKNHAMIVIEDLKVSNMSKSAAGTVSQPGRNVRAKSGLNRSILDQGWYEMRRQLEYKQLWSGGQVLAVPPAYTSPRCACCGHTAKENRLSQSKFRCQVCGYTANADVNGARNILAAGHAVLACGGMVQSGRPLKQEPTEMIQATA

SEQ ID NO: 43066 - protein, 444 aa, unknown
  TnpB Polypeptide
MKLTSSYAIKLNGDLKALENSISIYRSALRFIIPIVNTHWVELNEYEFMTQRMAHTEKLIHSTNKNKAHYNFDEEFPKFPSYLRRDVINRALGIVSSYRSNLENWEQHRNEQAPKLSLTHYAYPAYYKRDLFRNFDPIRKTIELKVFKHRDWVYEVYQLKSSDCTYYQTYLTGKKQNVPIIQKKGRRFYATFSYEEETTLIPEESIHKVCTVDLGLGTDATCSIMDKDGTVYARTFISFSKEHDRLHTQIGRIKRNQKRGSRHNKTLWRKVAGISQDIADKTAKAIFEFGKANGVDAYVLEYLDFIGKNTVKRAHFWRYKRIYKVLTHKAHQHGLRVARVNARNTSRLAFDGSGWSKRGREISSDTPYSLMQFTTGKIYNADLNASYNIGARYFIRCILKTVTATQRLVLEAKVPQATKRSTCTLSHLINLRSELAVLTARTQA

SEQ ID NO: 43067 - protein, 372 aa, unknown
  TnpB Polypeptide
VKQTRALVSQLNYQRELYNAALEERIGAWEWERRSVSYFNQCKTLTGLFEVRPEVLRCGVVLCRGTLKRLDRALIAFFRRVKEGETPGFPRYKSAQRFDSLEWGDRSGWKLKPEVRRLRLLGIGEIKTNYHRPCVGVPKAITVKREGTKWWLTVRCVDVPANPLAPTGRKVGLDLGVANLVATSDGDLIVGDQFGARASEQLANAQRSLARKQRGSNRRRRQVDEVVRLHRKVKNQRMNAAHQLSRSLVNDYDLIVVEDLTIKNMVRRPKAKLDPDQPGAYLPNGAAAKAGLNRSIHDAGWATLLSLLSYKAESAGRTVVTVDGRYTSQTCFECGHVEPGNRLSQAAFRCCSCGHEAHADVNAARNILRAGS

SEQ ID NO: 43068 - protein, 372 aa, unknown; identical to SEQ ID NO: 43067
  TnpB Polypeptide

SEQ ID NO: 43069 - protein, 348 aa, unknown
  TnpB Polypeptide
MTSPRQYFKQACGIARFTWNWALEEWKRQYENGLKPRAFALKKQFNAIKPVDFPWMYDVTKYASQQPFIFMQTAFNRFFKGLGGYPQFKKKNHHDSFYVGNNHIKLDGKYIKLPKLGWIRMREALRFSGKVISATISNKANKWFVSLNVELEQMPKSCESQAGVGVDLGIKALATLSNGKAFEAPKPLKKFLKKLKRMQRSLSRRVKGSHNRQKLKQKIASVHAKITNIRQDSLHKITRYLTDSFGGIVIEDLNVSGMLKNRKLSRAITDIGFYEFRRQLEYKSKYKGNYLLIADRWFPSSKNCSNCGQKKEELKLSERVYHCSACGHEQDRDLNAAINLKNLLYQSG

SEQ ID NO: 43070 - protein, 409 aa, Okeania sp.
MRTAYQYKLLPNKEQIATIEMWLELLRRQYNYRLGERFSWWSENRCPVNACPLVMPIPQLRDNPDYYSQKRDLVNTKDKFPEYKLIHSQVLQDCTKRVKLAFDRWFKADKNGTRLGKPRFKGKGRYRSFCYPQIKQDCIEGNKINLPKIGKVKLIQHRPIPEGFQIKTVTISRKADGYYVTLSLEDKSVPQFTTEVKPTSENTLGIDMGLKDFLVTSNGESVPIPQYYRSSQKRLKTLQKRLSCKKKGSKRWLKALLAVAKQHKKVADKRKDFHFKTANELLSKAEVIAHENLNIKGLAKTRLSKSINDAGWGQFLSILTVKAGNAGQKTIAVNPKNTSQDCSNCGEKVPKELDIRTHSCPHCGIVIDRDLNAAINIKNRAVGHSVLKARGARRDTGARKREVHTIASA

SEQ ID NO: 43071 - protein, 569 aa, unknown
  TnpB Polypeptide
MRSIADPFVVRLPAGARVRTRLRLTPVDEAVLRAVGAHLGRLAGHDLAWRCRLGRSDDQRTVRKHAATSQSSSRWAGTITRTSNDQWQRGLTNLANHQLGLRRAVRSIRTRLAVPVGGKQGRVHGYATQAERCAKQRRLQHLEGELAKVEDRLSSARVSVCRGGHRLAKLRHRLDHVDVKLTEAEWQACWQARRWFLTADGDATKRWGNETIRVHPEQQWLELRLPTPMAGLSNTPGRACTYRLACPVTFHHRRDEWAVQAATGPVRYDISYQPGRNRWYLDASWQTKATQPPAPDELRRSRALGVDLNADHLACWVLDSSGNPVGRPHTIPLYLDALSTSTRDGRLRVAIAALLRPARTNGCRSIVVEDLDFTDARLTGRETLGRGRRARCFRKTISGMPIRRFRSFLAGMAANADLWVIAVDPGWTSKWGQRYWLAPLNRSTKSSIAITRHHAAAVVIARRGQGVGARRRQGVAGHDQRIVAGELPARPDQRLPDHKGPGPPGGQRAAARPWKTRPAERSKLGNQVVQDRSGPPGRPYVLLNSVGTVPERSRRLTTLLTPSACMETP

SEQ ID NO: 43072 - protein, 426 aa, Microcystis sp.
  misc_feature (321)..(324): Xaa can be any naturally occurring amino acid
MEKAYSFRFYPTPTQESLLRRTLGCVRLVYNKALHERTQAWYERQERVGYVQTSSMLTDWKKQEELNFLNEVSCVPLQQGLRHLQTAFTNFFAGRTKYPNFKKKHQGGSAEFTKSAFKFKDKQIYLAKCTEPLPIRWSRQIPESCEPSIVTVRLHPSGRWHISIRFDDPTIKPLPVTDKAIGIDLGISSLVITSDGDKVSNPKHFNKHYRRLRKAQKSLSRKQKGSKNREKARIKVARIHAQITDSRKDHLHKLTTQLVRENQTIVAENLAVKNMVKNPKLSQAISDVSWGEITRQLAYKCRWYGRNYIEIDRWFPSSKRXXXXGRQVRKILRERSRNPNREVWESPSVLRRRGCQGSLLIKIGGTGQSYFFLPPNRDQKPPLRSPSSFCPFWSGISVLELITLSSSRLLLITVASLGLVCQARLI

SEQ ID NO: 43073 - protein, 385 aa, Clostridiales sp.
MRKLLKSFKTELNPTQEQKTKINKTIGTCRYIYNFYLAHNKERYENGGKFMTGKSFSVWLNNEYIPNNPDKAWIKQVSSKSVKKSIENACTAFMRFFKNQSSFPKFKKKGRSDVKMYFVKNNPKDCACERHRINIPTLGWVRLKEKGYIPTTKDGWKIKSSTVSKKADRYYVSVLVDIPSNPIGNNSNAGIGIDLGLKDFAIVSNGKTYKNINKSARIKKLEKQLRREQRRLSRKYENLKKGEATQKANIQKHKVQKFHHKIDHIRTNYINKTIAEIVKTKPSYITIEDLNVKGMIKNRHLSKAVASQKFYEFRTRLKAKCDENGIELRIVDRWYLSSKLCHCCGTIQKDLKLSDRIYRCRCGCVEDRDLNASLNLKDAKTYVIA

SEQ ID NO: 43074 - protein, 379 aa, unknown
  TnpB Polypeptide
MKVIRTTKIKIKGSSKAPEVIKNYLQALNWLSPLAFNSKEMNANRLAKAYYPVLRTQFQLPSQLACSICKHITATYKTAKSNKKWKLAVFKSATLPIVWKRDFNKSGKGVTLWGETLSLHHPYIPTNTWKDSKLKKIKDKLYLILSYEKEVPEPKTEGCIVGVDSGIKRMLVASNSSNTTPFFFPGGKLNHLRKCIRLRRSKIQAVGTRSAHRLLVRLAHRERAITEHLLHVASKALTQYAVQSNARVVVFEDLSNVREASLKKGQDLREKVCRWPYGSMQFKAGYKLAEKGIRTETVNPSYTSQGCPRCGHIAKGNRVGLQFRCVACGHRGDADLNASENIRNRYILREQGFRRMGSVNTHERSDCVVPDMVLHNSNT

SEQ ID NO: 43075 - protein, 382 aa, unknown
  TnpB Polypeptide
MLKTFKYRLYPKRSQETKLNETLDICRFVYNKTLEIRKDAWETEHKTVSYFQTAKLLSPWKEQDPSLDTVHSQVLQDVMIRVDLAYKAFFRRLKSGDKPGYPRFRGKFRYDSFNYRQSGFNIHPDSTLYLSKIGRIPIILHRDPAPGKMKNCTIQRTRTGKWFASIVIDTSRPKDLPKTGKIAGLDMGLKTYIMASDGYKVPRQRFFKTDEDALAKAQRRFSKFPKTESSPDKDKARKVVARVHERIKDRRDNFCHQTANKLVHRYDFMAVEDLDTKEMLEQKKWSKSIADASWAQLLQRLSNKAVEAGKTVVTINPRNTSQMCSQCRALVPKDISVRVHDCPHCGLKIDRDLNASLNILRLGMQSVEYRDFAVKQCLDPVS

SEQ ID NO: 43076 - protein, 376 aa, unknown
  TnpB Polypeptide
MRKTFKYRLYPTKLQTTKMNNILEQTRWVYNETLALRKNAWESEKISIPLYASQKELTKWISEKPELKAVQSQVLQNAQVHVDLAFKAFWRRCKAGENPGFPRFKGKGWYHSITYPQSGFRIHSDGVYLSKIDRVKIALHRPIEGNIRTCTIKKTPTNKWYVYFSCETERPEPLPKTNKIVGIDLGLLTYVQCSDGSKINKPRFFKEDQKALVKIQKRVQNKITKHTEALIHERIKNKREDFCHKTSKKLVDKYDFIAHEDLNVKNMLEQKKYSKSIADAAWATLIQFMTTKAENAGRVIVAVDPRGTSQRCSQCGTVVPKTIEDRVHNCSHCGFKTGRDLNSALEILRLGLESVERPLPRRKAKALVMTHGSPRL

SEQ ID NO: 43077 - protein, 445 aa, unknown
  TnpB Polypeptide
LWALLVAGGDVWACVLELNALRRRRGDLALVSYQGLCRELAVSGSGTFGELDSVGARSVLRRYSDAWFGAARARRDGETLARFPRRKHRMMPVRWYAGTFTLTGRRLRLPVTKGAPTLWVRLDREPPYPAEQIRSVTLCVDAGRLVIDVCAEVPVAAHAAGCGPDPARVAGVDLGIIHPYALSGPDGAGLVVSGRALRTESRLRLADTKARRRAVAGRAPARGQRGSRRWRQYRARTRRLEARHRRRLAQARHEAARTVIDWALDHRVGTLVVGDPVGVLDLRSGARRNQRVRDWRPAQLTSVLADKAEAVGISVVIVDERTTSSTCPACARRVPKPRGRRFACPYCALFAHRDLVGATNIAAKHPGGGQPVSIPETITHRRAGRHLPGAGRSRRDPRRTRYNTNRTRPESWPAAARPDHPSGSRSTATTAVEDPSTQTHQHCQR

SEQ ID NO: 43078 - protein, 283 aa, unknown
  TnpB Polypeptide
VPTNPHESIPDDAEVEDSKIVGEDGEYYAHRSVKQRVELQDEYDGVLAMDVGSTWVATSVALPSRDTTFYGEEIRQLRRHHQELRTRLQEKGAYETLVSAKDREWRAIDDRLHKISREIVEDAKEQNALIVLGNLEGIRNQDMGSEMNRRLHSMPHYTLIQYIKNKARFAGIGVKIVDEYNTSRTCWRCGEKEETERVGQGRHLCGEYGLDDNVDKNGATDIGKKGLDKDIQSPLSSLGGVYEPSLELGDDDETAAQIRVRLRDDSETPPSTSESKDERSMVG

SEQ ID NO: 43079 - protein, 590 aa, Streptomyces sp.
VSRKLPLGEGETVRTACARGLLRAGVVEKTGEVLSAAVLAQRVGWAADLVCGMAAGLLAGHGNAADVDVLASGEDAGGRKLPSQAWMALRRLGWTAAPAGGVKVNDRIVRMAQEQAGRALRSAHWRAGLTSAVLQTWPCDPGRRTPTEWDQVREAVPGGRYLPSSVIRSRTRQITTFATKHGRLPTDVSELEAPPGAARMLLLLSACDGQQATIERSEDDPQRAPLPTRPDPRSYRDWTWVACPLTLPPTVPPGAVLHLPTLRITGNKVRADLAYTHAVPRTSRTGHTVALGVDWGLNTLLSAGAARLHDDGWITALGHGAQFRAAGVLARQHRLRRLSEHLHTKADQYQRLIDADEQHELSGKHDVLRDEIRFVSDRRANLNDALARAAARWTVDQAITAHATVIYLEDLRSMEAKGMGRTTNTRMSQTVRGQIADRIRHLAAEAGIAVVTVPPRNTSKHCPNQAVITPTADTRRADQSKGPTRRRSTRPAPRRRRAPSPTGPQGTAGQRPEGHAPTGRRTLPRAAHRHQSVTTISTPSPRLRPGGPPSSRHRPRGTARGAGFHLHAHATPPRWAEPTPDATSDMGSPN

SEQ ID NO: 43080 - protein, 372 aa, unknown
  TnpB Polypeptide
MRTVVKTYRFKLYQSKKNKHLNDSIDIAASVWNYCIAMHRHYYRAFGKHLSANRLMKHITNVKKTLHPEWKALGSQAIQDVAERIDRSYSAFFNHVKQKRHGRKSPPHFCKRERYKSFTLKQTGYVFHENSNCVTIMGRKYKYFKSRSIEGSIKTLTVKRNTLGEFYLIVVTKQECNDVLPRAGRAVGMDFGLKHFLNLDDGSVIDSPQWYKASLNELRTAHRAVSRCQKGSNNRNRAIRNLGRVYQRISNRRRDWFFKLANQLVGEYAIICIEDLNIDGMKRLWGRKISDLAFAEFVSILEWVASNTDTTVVKIDRWAASSKVCHVCGTINASLSLKQRIWECECCHTTLDRDTNAAINIRRMGLAQLKSA

SEQ ID NO: 43081 - protein, 485 aa, unknown
  TnpB Polypeptide
LPADECPHGYLWLFEIIRLLQKNLFYLKSIILLVRNRKERCYMRTWKIMIRPDKDAVLCRYFEENTTAAKCMYNAANFYIRNTMTGIRKSPEERTSHETEVLHYVFTGIQKANAHSYEVYCKKQEGYKKTGGMAGAVAMSKLKYKVFPYPTREKWFLSYTVLDAIFKYTDHPTYRRMNSQVNQNAIKKTVKSWKSYFQLQKDYAIHPEKYKARPRIPGYIKQPAMTAAYTNQTAKFIRKDGHVYLRFVNHKPPVLIGKESLYSGMTYVKTEVKLQYGGYSILLTFKEDIVLPEVPKSPKRILGIDVGVDNFCAVANNFGDIPFLIKGGAIKSMNQNFNKERSRLLSEVTKDSDSTHSKKETKRLHALSRKRETRLRDFFYKTAWYLVRYAKQQQAEVIVAGHNEDQKQNICIGRQNNQNFVSIPFCRFLDILRYTAAKAGIPVVIREESYTSRASLLDLDVIPTYKKGDATNYTFFRKESTPWSV

SEQ ID NO: 43082 - protein, 352 aa, unknown
  TnpB Polypeptide
MKHTKTLQVRVRDKHAPLLRQMARSVNFVWNYLNELSHRSIRERGVFLSAFDLHPYTKGAGKELGLHSQTLQCVAAEYVTRRKQFRKRRLNWRKSGGARRSLGWVPFNTGAASWKNGQVFHNGNCFKVWDSYGLGQYRFRSGSFSEDARGRWYFNVVVELDTQLLNGQGAVGIDLGLKDVATCSDGQRLENGRFYRGLESKLAIAQRASKKARVRAIHAKIANRRKDALHKFSRSLVERCNTIIVGDVSPQKLVKTKMAKSVLDAGWGQLKTMLAYKCAHAGIVFRVVNEAYTTQTCSCCGALPDSRPRGIAGLGIREWICECGVTHDRDVNAARNILALGHERPGEGIPGG

SEQ ID NO: 43083 - protein, 352 aa, unknown
  TnpB Polypeptide
MKHTKTLQVRVRDKHAPLLRQMARSVNFVWNYLNELSHRSIRERGVFLSAFDLHPYSKGAGKELGLHSQTLQCVAAEYVTRRKQYRKARLNWRKSGGARRSLGWVPFNTAAASWKNGQIYHNGYYFKVWDSYGLGQYRFRSGSFSEDARGRWYFNVVVELDTQLSAGQGAVGIDLGLKDVATCSDGQRLENGRFYRDLEPRLAKAQRAGKKARVRAIHAKIANRRKDALHKFSRSLVERCNMIIVGDVSPQKLVRTTMAKSVLDAGWGQLKTMLAYKCAHAGIVFRVVNEAYTTQTCSCCGALPDSRPRGIAGLGIREWICECGVTHDRDVNAARNILALGHERPGEGIPGA

SEQ ID NO: 43084 - protein, 398 aa, unknown
  TnpB Polypeptide
VSRFRLYPTPAQEAALLEQCKHARYVWNLALEQWSMWTRGQGWTPGFAAQCRQLTEARAAFDWLRAGSQTVQQQALRDFQQAVKNFVGGTHRRPSWRKAGHREGFRIVGLQASRVAKRNRKWAEVNVPKVGWVRLRLSRAVPDAKSYRITRDRARRWHIAFAAIPQPIPAPGTGEVVGVDRGIAVSAALSTGELLTCPGLSDRERDRLKRLQRRLARCRRGSNRRRRAKDAIAKLHARAGDRRKDWVEKISTDLARRFDLIRVEDLRVMQMTRRPKPIPDPDRPGAYLPNRRRAKAGLSRGILANGWGELVVRLQHKAIGRVEKVKSAYTSQTCSACGYRAPENRKSQAIFRCVACGHLANADVNAAVNIAAGRAVSARQETPPRVLPKREPQHATSA

SEQ ID NO: 43085 - protein, 482 aa, unknown
  TnpB Polypeptide
VAKSYGAQLISIKLPQFETEVLRFICQRSNSLYNQAIYFVRRNHEMTHPGLLPNVPYGVMCSELKEEWNYSRLCAQAAQQTLKSVHEAFEGYKGLMSLWNAGGLEIKPKLPKYRKSGGLYPVTYPAAAVTFYLDREEVRIPLGNGIKQEWGCAELFIPCPYGIKPEAIKEVQILPRNGEFYAVYVYKAQSFIADVDFSKALGIDPGLANWLTCVSTEGKSFIVDGRQVKSLNQWYNKQVATLKEGKTQDYWDEKLAALTEKRNRQLRDAINKAARFVINRCLADGIGTVVFGWNQGNKDGIDIGKKNNQEFVQVPTSKLKVRIAQLRKQYGLCFVETEESYTSKASFLEHDFLPTYGGEKPAGWKPSGKRGEKKSCVRHNLGRGGYQTASGMRINSDCNGAANILKKVATQLGLNLAKVGRAALTGGGASPAPLCHNDIILIRCLDFIANNVKRHVFSLPRNNRLESLVLQPREKSILSISC

SEQ ID NO: 43086 - protein, 410 aa, unknown
  TnpB Polypeptide
MIVRRVEKHIIKSNNPQFDLFISFCHASKNLYNHANYIVRQEFINNDKWIRYIELDQILRADKEYPDYANMPMAQSAQQTLKLLDENWKSFFRSIKDWKKYPEKYLGRPNFPKYLKKDANFVLILTNQNCFIDEDNLIHFPKCFEGFTLKPQFINKENFVSFQQVRFIPHKHRIVVELVYNVKVINTDTITDNNRYIGIDIGINNLATVSNNVNLPAFIINGKPLKSINQYYNKRTAHYKSICKQMNDREYSNRLHSVTDKRNVRVNDYLHKASKKIIDFCKDNNINTIVIGKNDEWKQKINLGHKTNQTFIQIPFTKFIQMIQYKAEEQGIAVILTEESYTSGTSFIDNELPTKESYNKKRRIKRGMFKSNNGTLINADLNASYQIIKKVFPIKWDSGCVLHPIVVDLK

SEQ ID NO: 43087 - protein, 395 aa, unknown
  TnpB Polypeptide
MNMDRTINLKLELSGEDKETLRQTMVLSNQVFDEIALYGFEHQTHSKVSIHHETYYPTREKHPELPCSLLQGIRDVACDALKGVELKRLPKSKPYSAIRYNKRVCNISLIKKRVTLSSIKGRVKASFPIPKYYEKYLLWELRTSTLSYNKQRNTFYLNVTIHKQSPETIGDKVLGIDRGIVNIAVTSSNKFFNGKPIKNVRAKYAHLRAKLQNKGTHSAKRLLRKISRKEERFVTNVNHCISKEIVAMPFDVFAIEDLTSIRVQSRTKGIEFTRKLNNWSFYQLEQFLRYKAETIGKSVISIDPRYTSQKCSACGHIYRGNRRGNSFHCVKCGFQIHADLNAARNIAEIGKSGLGRLTVTQPYMTCDEVEACKGTEIEHSHKAPPIGRGSLQVNT

SEQ ID NO: 43088 - protein, 419 aa, unknown
  TnpB Polypeptide
VNSYGVSKKVKLYPNQTMAEVLDSLCDYRRYCWNQGLDVWNDLYDQRVEMVSADLREKSQLAIKDKSIVFSKEEQELLNLFPSPSHHVVQNILVADKADWQYKLSSRTLQLTVKDLAQSWSAFFNSKKGSKKKKRKVGKPSFRSKKNPKQGFKTDRASVKNGKLVLDKPHAYKDAWYSIPFKGYDLPDGKIKHCAITKIGNSYYASIIIDCPERSLSKTGKKTAIDANVNHFDYTDGSFAVCPKELDCLYAQIKHYQRLLARKRHENGKNATRSKQYFKVKTKLQKCYRRVTAIQNDLLHKFTTMIYQTYDIVVIEDLDVQAMQMKKKAKNLHRSLFGRFRVYMEYKAIKFDKTLILADPFYPSTQRCSNCGHIKTGDDKIELDGNKKHGTKHNEYICYSCGFVADRDQNAVLNLLALA

SEQ ID NO: 43089 - protein, 258 aa, Streptomyces sp.
MAGNQVKWAFKYRFYPTGAQAAGRWFASILCEDRPALPAPVSAAVGIDAGITSLVTLSTGEKVTNPKFERKDRVRPARAQRNLSRKAKGEGTNRNKARWKVAKVHARIADRRRDHLHKLTTRLVCENQTLVIEDLAVHNMVKNHSLAPAISDASWSTFRSMLEYKASWYGREVVAVDRWFPSSKLCSVCGALRSKMPLRVHTWRCSSCGTAHDRDVNAATNLKAAGLAVSVCGAGVRPQRSTPGGQSATKQKTPRREP

SEQ ID NO: 43090 - protein, 341 aa, unknown
  TnpB Polypeptide
MLAKEKQVDYIALPAQTSQQVIKLLYKNWKSFFLSCKAKDKLKASPRIPKYKHKTKGRNVVVFTNQQCKIKDGYIHFPKKANIPPLKTNVTNLCQVRIVPQCSCHAIEVVYEKEKETAEWLDESAYLSIDLGLDNLATSFDPQNNHCFVINGRPLKSINQYFNKKRALLMSYIGNRGMSNRIGKLTLKRNCKVHDYMHKASRFIINYCKTYGIGTIIIGNNDNWKQNCNMGKRNNQNFVSIPFEKLISMIQYKAEEVGIKVIITEEAYTSKVDHYSNEVMSHHESYIGKRIQRGLFRSGTGKLINADLNGVIGILRKVVGESLWQVADRGVVATPKRISFS

SEQ ID NO: 43091 - protein, 399 aa, unknown
  TnpB Polypeptide
MYREIKNPIMVLTRNYKFRLYPNNSQEYNLQNNLAVCRWVYNKFVEYSKNGFVSRNDCNYYLTELKQSEDWLYQYHSKMLQAVSAQIDGAQKTLIELNKKGYRTGKLRFCRYYDYRTFMYNQTGFNLEVHGDKTLLYLSKIGYIEIRQHRDIPFNANIKQVIVTKSKSGKWFVCVTIDIKESIIDIPKILFSKSVGIDVGIKSFVFDSNGYHTPNPKNLQKMLKPLRRIQRKVSRKKKGSNNRLKAIRHLQRIHEKITNRRKDFQHKLSAQYAKNNDIVFVEKLEKLNMVKNHRLAQSIMDASWGTFLQKLEYKCKMLIEVPARNTTIDCSRCGNAVPKSLAIRIHRCDKCGLVLDRDHNASINILNKGLNRLPQELREVTLVENPKGSMKQEKTTALI

SEQ ID NO: 43092 - protein, 431 aa, unknown
  TnpB Polypeptide
MQVSYQYKLKPTKVQAFVLDRWLSMLCAQYNYLLADRFDWYERNRSPIHACPLICHLPELRDNPDYFSQKKALPQLKVTHPWYSKIYSQVLQDVVKRVKATFDRFLKGDSNGKRSGKPRFKPHSRYRTFTYPQIKDGCVQGNLINLPMFGKVKVILHRPLPDGFKIKTASVTKKADGYYVTLSLEDNTVPEIKPDINPDSITGIDVGLKEFLTNSEGDAVPIPQHYRKAQKRLRVVQSGMHCRFPAGIEFRQGRQRVSRRKKGSNRRLKAIKQLGKQHKKVADKRKDFHFKTAKQLLSRYDVIAHEDLNVKGLARTRLAKSVLDAGWSSFILILTSKAENAGLLVVPVNSNGTTQDCSNCGVKVPKKLHERWHSCVCGCELDRDLNAAINIKNRAEGHPVLKAQRLLCDSRIGWEAHTKLCLVLGVCHQVQ

SEQ ID NO: 43093 - protein, 440 aa, unknown
  TnpB Polypeptide
METVLRYRYRAYPGAVETRALSRTFGCCRVVANDAIAARQNAFETGLPALSSKVLSARLTASKLTPERAWLAEVSAVPLQQALKDVDVAYRNFFSSRKGKRKGPKMGPPKFRSRHTTRQSARFTKNARFKIEGAVGDSSDGWARLFLPKIGWVPFVLSRPLPSNPTSVTVVREADGRTYLSFVVTVIDVQQVAAGRVCGIDPGLSTYATVLSVDTSTGVETEGTIETPMFLRRRARALARSQRTLSRKKKGSRNRVKAKIRVAVLHRKVREARLDHAHQRAAEIVAAHDIIAIETLHVAGMVRTNLAKSVHDQAMAQFLRLIVEKAGRAGRTVVPVGRFYPSTQTCSACQALTGPKGLAGLGVRHWTCTTCGVTHDRDVNAARNILTEGLRLLALTGHPSSVADGQSETPNACGVEVIPPETVALDVEPGRTHGGQSCAA

SEQ ID NO: 43094 - protein, 338 aa, unknown
  TnpB Polypeptide
MAQSCIKTTIARYKTVKQQLFQNPYWYKDENGDWKRITKTLEWLWKSVSFGRPQVDLVRRSDYSFADGGKTLSLNTLGGRVKCPFFGEHFASYLDGSYDLGTAKLVKLNGLWYLHIPVTKAVEDFEKENVKHVVGIDRGLRFLAVSYDEQGKTAFVSDKKIATKRRKFQEVRRQLQSKGTKSAKRRLKAISGRENRWMSDVNHQISKTLVQKYGENTLFVLEDLTGVSFEESNLSRGKKQNYDLRSWSFYQLEQFLSYKARENKSEVLKVSAKYTSQRCPKCGTIHKENRDHHNHFYSCQCGYKSNDDRVGAMNIQFLGTLWISGDNHPRYERITASE

SEQ ID NO: 43095 - protein, 485 aa, Mycolicibacterium sp.
VSAMLTAEMTRHTTFRFCLDPTVEQHSLMSRHAGASRFAFNQCLRIVKTALTQRDAGRDTEVPWTGFDLINAFNAWKRSEEAGRIFAVGNDGVVTALVTGLPWRTEVRQQVFEEAAVDLGKGLKAWSDSQSGQRRGKRTGFPQFKKKTNTVPSFRLRNNRPKGQLLPIRVGECNRPRSITLPGIGQIGVFDDTRRLRRMLTNNRAKIRFATLTRRRGRWWVSLNVEAVDLHPGRHHPSRDPADDTGWVGLDRGLSAFVVAATADGKEVARIAAAPKALAKGMVKQRRLAKSLSRKQKGSRNRKDAATKLGRHHHHVANVRRHFLHDVTNALVKAHDRLVIEDLNVTGMMANHRLAGAIADASWTEFARLLEYKQAWRSGDIVQADRWYPSTKRCSACTAVNATMTLADRVFTCGCGYVADRDTNAAVNLALWGQNHHPPPDPRTPKRRGRATNARRRDGADQYPSCIGETSPDETGTDVHAARGG

SEQ ID NO: 43096 - protein, 268 aa, Hyellaceae sp.
LKQIKRVRIVRRADGYYTQFCIDQERLEEKEPTFKTIGLDVGLNHFYTDSDGQTIENPRHLRKSEKSLKRFSRRMSKTKKGSKNRAKFRNKLARKHLKVSRQRKDFAVKLARCVVQSNDLVAYEDLRVRNMVKNRRLAKSISDAAWTTFRTWVEYFGKVFGVVTVAVPPHYTSQNCSKCGKVVKKTLSVRTHICPHCGHTQDRDWNAARNILEKGLRTVGHTGTSSLELETPLETSTSALEGKLLKVSRVAERGSPRSDSWNPHATRS

SEQ ID NO: 43097 - protein, 516 aa, unknown
  TnpB Polypeptide
MVKKGEYRTFLISMPPELIPIYDFVQKKLNQFLSEPVFRSKLLALDFTQHRGNVWRDIRDSVGKEELTSWKEEIPNPVWYFYMLCDNLLRIIKAKDDAIACFNTLKNNGNKIDQDLFESLNERGIYPTVGFLRNLKRSDEPPTIARKATFVMDYSISAEQNCQRIADNIFEFNYESGKYLTYEVVIPLSVRKNLTGRIAKPRFIKRKSDGRYVGHCSYQVGTPTIKGQNILGVDLGKKKLFSSVVLYSDGNYSDEIINSRLSHRIDEKLKRKLKDLRHLLEKNKTLDDLIDGDINLFNSHLEEIRQNRVDQILELRENISNTKRYIAKLIASEIVSIAKENDCKEIHVENLSWLESRGGRWNHAEVQDFITEFAELEGIKVIKIYAKHTSSAHPITGELGRKSGRNVRFSNGDVIDRDLLASINIAKRNKKNQKENKVNKLRKNHTSTPKKVKKPSNRKVSLAIRQKLLTKQRGTEIVVLYPRKTGNRTWEVLDISSKPHKLSLMSHLSYQCQFVI

SEQ ID NO: 43098 - protein, 468 aa, Rhodococcus sp.
VRVSCRCLPVSSATQGRSGGGDAMSSMIRAYLFALDPTAEQEAQFRSHCGAQRFAYNWALAQVKANWNQRAAEESYGIAEADRTPWINASAYSLRKSWNQVKDAVAPWWGENSKEAYASGCANLAAALKNRRDGRTRMPRFKSKRSHLSCRFTTGAFGLGRDRRHVQLPRIGQVRTHESTRKLARKVEDGTARVASATLSYQRGRWHVSFTVELPDTLSPTRTGTRVAGVDLGIKELAVLSTGEKIANPRHLDRAQRELRRAQRIMARRDGPDLRSGRTPSNRWRTAQARVTRIHARVAGRRLDAQHKLTTRLVGEFDTIVIEDLHVAGMVRNRRLARRIADAGWGEIRRQLQYKSDAVGVRLVVADRWFASSKTCSGCGTAKTKLMLSERTYTCTVCGLVMDRDHNAARNLAALAGSGTGELLREQPDGTRVRPGSVPGSETATGRPQRGQRHVREDVAHGTELYVS

SEQ ID NO: 43099 - protein, 392 aa, unknown
  TnpB Polypeptide
MIDRSLGAVRWLWNTSLGIRSEAYRECRLSLTGIDISRWLTEWKRTPGHTWLADVPATCLTQCLRDQDRAFGNFFAHRARYPKFKLKRTGGSLRFQDIGVAWSEGILRLPKLGALKLAEDLPGVSKPDTVTLSKDPAGRYFVSFSSEIEASSLSLPIVNRPVGVDLGLTHLATLSTGEKIPNPKRLQAHLRYLRQQQRCLARRQKGSKRREKQRLRVAKIQARIRQERQAAIHAFTTRLVREHDLIAIEHLNVRALGRGLHARAIHDAAFGEIRRQLLYKGDAAGRVILQVSQWFPSSKTCSHCRHVIDELRLDERRWRCPKCGTHHDRDINAACNILQEGMREIAGCDDRVLRVNARDACFDDFEFIEQVLAEEARNGHREQACLEQASSR

SEQ ID NO: 43100 - protein, 374 aa, unknown
  TnpB Polypeptide
MNTKHKAYKFRIYPNESQKVLLAKTFGCVRLVYNHYLDLKTKSYEESGKSLSYTECASDLVQLKKEKEFLKEVDSIALQQSLRHLDNAYKNFFRDKKVGYPRFKSKKSHQHSYTTVCINNNIKLEDGKITLPKVGKVCIKQHRSIPKNYQLKSATVSLTSTDKYYVSLLFEVEKNIKKVEIEKVIGLDYSMHDLFVASEEDVQVDQKHLHHYRKSLEQLVKEQRILSHRKKGSKRYEKQRIKVAKIHEKIANQRKDILHKSSRQIANAYDLVCVEDLNMKNMSQALNFGKSVTDNGWGMFVRFLEYKLEDLGKQLVKIDKWFPSSKTCHICGCINEELTLNIREWECPACHHVHDRDQNAAQNIKKEGMRIAFQ

SEQ ID NO: 43101 - protein, 415 aa, unknown
  TnpB Polypeptide
VKSFSLTRSSLTSWCSGKKQPETAFLREAMSQPLQQALRDLDRAIGDSFRPNSDPAHKGWPKFKAKDIGDGFRIPQFAPEHIDDANGRVKLPKIGWIRYRRTRPIAFECADGMLVPGVVKQIHVRKDCGHWFVIFTVEFEVKVPDMKALDVGIDVGVVHAVATSDGRFYDLDTAKIRSIEKRIAGLKRKLSLNQESRKKLAKLGLAEPFDKKQPSRKRRRLKERLQNLYRKIRCIRQDFHRKTAHALAQEYGCVYVEDLKVKNMTASAKGTVANPGKNVKQKSGLNRAILRTGFYSLRQAIEWQLLKMGGVVIPVDPRGTSITCPHCQTRDKRNRPTQAIFKCVNESCGFKANADVVGALNVLRKGRTGPSAHNKKHIAHVVSIGEQGFRAEDSMPSMGAILKPRDRVAQGIPAL

SEQ ID NO: 43102 - protein, 473 aa, unknown
  TnpB Polypeptide
MGYYKMKDNEMNLVYKYYGNFTAKENYIFRQLVFNSSMIYNKVNWYFLHHKFDSKLQPQIVKYLTKYDEHGKYFIQQECGKIVDGLINDWKSFFAADKEYKKNRKKFTGKPRRPKCQKVKDKMNEVIFDERTIRRLDIVKKGKLDKHGCGVIIDNKISFSLSKKAKRKFKMKNLEVNLFNFKFPKGLNENLSNLQQVRICYDKKIERFYLAFIYRVEVFTLNKKNNDIMAIDLGQNNLITGVFNESPYRFILDGKELKSKIAYVNSRIDRLKSKEMKKIKDMKKFKLTKKMKKLYSYWRNYTWTYIHKCSNKTIKKALENNCNTIVIGDFKGVKRNKKHMKYFATIPYVTLINQIKYKAKKVGIKVVMINESYTSGCSCIDDYEISKECYNKKRRKKRGDFITNNGFHINADVNGAYNILRKYLENNIPQCLIEDTYKNLYLTYLNMYLRFKGNAALTSGVNRIIYSPVLMHL

SEQ ID NO: 43103 - protein, 411 aa, Moorea sp.
MLTLTYEFKLIPSQEQIAMIEDMLAVCRKVWNYALRERKDWINSRKCAVNCCSLQQEYIIPADASYPNYNVQAANLTKVKKTNPELKRTNAQVLQQVLKTLERAFNNMKKRSYGFPRFKNKYRMRSFVFPQFKVNPVTNDWIKLPQIGLIKIRLSRPIPEGFKIKQVRVVRRASGYFAMLTLQSDVSVPDTTVWGHPLGIDVGLDKFLATSDGELIERPKFLSKLHGELKLLQRRLKLKKLGSANRHKLNQKIAKFHQKISDTRKDYHFKLAHHLCDQAGMIFVEDLDFRTWAKGMLGKHTLDAGFGQFFNILAWVCWKRGVYFGKVDYRYTSQICPNCGTHTGKKDLSERIHKCLECQYEINRDVAAARIVCQRGIAAVGQIVEEIDCVGGLPGVDHNLGKCCKSSKPKL

SEQ ID NO: 43104 - protein, 366 aa, unknown
  TnpB Polypeptide
VEKAYKYRIYPNKKQKEIIAKTFGCCRFVYNTYLAKRIEMYEKNKENFSYVQCANDMKNLKSELEWLKEVDSTALQSSLRDLDMAYQKFFKEHTGYPKFKSKKTHRFSYKSKCVNGNIQYCNKYIKLPKLGMVKTKNKLVPQGRILNATVSQEPSGKYYVSLCCTDIEIKPFEKTGNSIGIDLGIKEFCITSDGEMIENPKYLKKSLGKLVKLQRELSRKSKGSSNRNKARIKVARQHEKIANQRKDFLQKLSTELVRNNDVICIEDLQVKNMIKNHKLARAIVDVSWSEFVRQLQYKAQWYGKQIVKVDKFFASSQTCSVCGYVNKKAKNLSVREWDCPQCGTHHDRDVNAAINIRNEGMRLVNA

SEQ ID NO: 43105 - protein, 362 aa, unknown
  TnpB Polypeptide
MRLEDEERKLCIDAIEFALEKGYGRGKGRRRRLEELLRRLKTKFELEEIWESKGRICDEDTMKEVLRIGFGIENPIKLGTGDRLTYWAGRSAWKGLPRVVFCATKQNSGYATLRFVVPYDVALSMKGALEELLELDERSSGESEPDDIPDVPLEIVPAREGRIVGADPGVLSLLTLSDGTVIGENFHDYIKRWAPEGSKGIRNLKAKITVLLKRFDWSRYSAVFVGETFGSKAMRFYWPHSRWKGEMLEWPSAWLKKKLKEVLEERGVQLIEVSERGTSSHCPRCRGELSQRKNGSVLRCRRCNFEAHRDRIAALNILARGLGLNFVPPSLARRGYVRSAEEAERMREIGMKVVARAFGGAK

SEQ ID NO: 43106 - protein, 364 aa, Thermoactinospora sp.
MRISIDRMVHLLPCSIRQDARERGLPYISDAELSKRVITEAKQTPQRAWLGEVSSVVLQQALADLNAAYRNFFASITGKRKGAKVAPPKFRSRKDRRQAIRFIHNARFQITVGGKLRLPKIGDVKVRWSRRPPSEPSSVTVVKDASGRHFASFVVEVGEQSLPETTAEVGIDLGLTHFAVLSDGRKIDNPRFLRRAERRLKKAQQALSRKEKGSNNRAKARAKVAKAHARMADARRDFTHKLSTRIIRESIQAVIVEDLSVKGLARTKFAKSVHDAGWGQFTAMLAYKAARHGRTFTKIDRWFPSSKLCSACGAVAESMPLNVRTWACSCGAGHDRDVNAAINILAAGQAERLNACRGTVRPSA

SEQ ID NO: 43107 - protein, 373 aa, unknown
  TnpB Polypeptide
MKTAYKFRFYPTRQQEAILDLTLETCRRLYNIALADRKKAYEVEGISRTYEAQAAMLTAERKNGNYQGIYAHSLQDVLRRLDKAFKAFFRRVEAGENPGYPRFKGKDWYKSFTYPDAGTGYKLQGSKLVLFKIGSLRLFKHREVEGKIKTCIIKKDGLGHWYAILVAEVDDVPKIEPKNAVGVDVGLKNIVALSTGETIRYPRYYVQDEQKLSVAQRNLSRKKKGSNNRQRAKIKVARLHQKIQNRRDEFLHQVSRRLVDSSDLIVFENLNISGMLKNHHLAKHIQDHAWGKLIQFTQSKAAKAGKVVELVDARYTSQKCSQCGMMVPKMLADRVHLCPNCGLEMDRDTNASLNIRTLGLRGRAYGGTAIAGQ

SEQ ID NO: 43108 - protein, 1652 aa, unknown
  TnpB Polypeptide
VDRWRFYLEIAYMISLLTQRTAPKEESRSMSALVQEVLPVLTGAGDFAAMQDAVAKVNVAVASLEQDLKKDAAVQEYRELIQKNEWVEVIDRLYHRLVVETESTMSRTPRNKTAAKKAEKEMPRQTYFRKLQGALMIFLQNRLGIILMLRHFYRTHYFYLPPEVPDFLPPRFLKEASAREEFKVLLEQEAIARRYLGRVPTGSKRRVRVVVPLEVAALLSRVVITKEKGVPEIALRPEPLAGPRGVLRETLPKSGLPDWDDRIVLRFYQENGAEMCYAINRHVWHAAQHDFNHRLGNHAYNCQILAARMAHDKSRPHGVDRIVDAIAAISHQQFVQIQEGSERAANIARAILTVLADSFAALASFAFTGRLPRGFVTALKRLPTYKSLLEGVTGAEIASAARHLRNLLDAAEGEDVTTANEEDLEPAEDSTPVPATPPRSVSFDTHFTYELGKTLNRRRLRPRLNYLLRQMTTDYRPKKGTASTSQENQRVLDILGWTRAKGLLLHLGRERDLDQLRTFADAWGQDPRTLVKKIPAAAREFLKQFTAGYPCFARYPPFPNGRVPVTTDRILERLREHSPAAPPDAPGTPQGQLTRDALLLAVMKALVMTAEQDPEKGREQGPFFPVTDNVKAKLLKMIYAHEFLLQKTSAADKKELDVNDVPAGGLRFLIDAPALIPSPALTKTLGWAVSDIVLNPFVTDNAMAFPVPRDGSTETRTLEQCEKDRMETFANARKNFGDAVQEVLGILAAAHAVGAQEKHWDTFVSLVDDQWNKRMAQVVAGNDDYLPLVNLFPALQEPAKQSLASFVTTVSQALKEKEAGLRRSLKPGKDKLKPLPLRLSSLTPTIGVIPPLGKIEQGLRDGRAVPFTEVLQLIDETKTRWQVPTAGGTTETLTAAYRPGSIPFCITSEPITQEEIRALDPYFVSYFGGQNPVRPEVDVPMHHVPGGRASKQGKQLGEWATGYDTKAGDLQRDVADTRTRMHQLRAFKIGIEQRLASRAETVITLVRLGYTVKKVAAELLARDMGVQENGSGSTAGLTRAEQAAIQKFLGSWTAGKNDPAKVNELAIVVQGESEAAPGLRVDRFLIPRVTALESLLDGLKVKTWPAKDYHKAAARGRKLAGIIGLHVSRLGYRARSASARRDFYRNTGERMTRAKKDEARAGAEFPRAAEVEALAFLRAQPLFKAFRDGDLFPCEIRLAKGVPVPGKSKDGTLTVYQSKGRLVEKVLKGTIDAIQIQVPLYPSGTVSANVLVKGPTLVAHSAPGHVEALAEDYEEHLDKTLVASFDDNRLNCPRTITPSLVQMVAGYSGGKRGVDPASPVEKWELELADWARLADVYNYAAKEPHEYMGLKKRAERGERGDGDLKLVTPAKSFWNKVLAAAFAPAGTILAIREGEKEFDQKAFRPTDAAPYDLDAPEARVPLDFRDKVGALMKYWGEKHAHLERHKATVLRKMRRLWKVVKTQPAGTHTPERGQWLRLRTQLYLLNRRAEHVRDADLEYLFRVVHYCQARSGAAYVVHENLSLSSGGEEGMGGLVASMLKDFKPAEEFLTRQFKALERDGDATPNVDGVSPAYTSLTCNYCARLGVSGELDNSASADYAICSTCGHVYDRHGGSTGNIGDRFVQTRFGAKKKKRVSKNAREKKEGDSKEPTG

SEQ ID NO: 43109 - protein, 437 aa, Okeania sp.
MAEKAYKFRFYPTPEQENLLRRTLGCVRLIYNKALAARTQAWHERQERVGYTQTSVMLTLWKKQEGLDFLKEVSSVPLQQGLRHLQTAFTNFFSGQAKYPNFKKKRNGGSAEFTKSAFKWKDGQVYLAKCSNPLPIRWSRQLPPGCVPSTITVKLDPSGRWSVSLRINDTRDLNLKPVNKQIGIDLGITSLITTSDGEKFTNPKNFQKLHKKLRLAQKSLDRKTNKKSNNYQKARLKVARIHAKIKDSRLDYTHKLTTQLIRENQTVVVEDLAVKNMVKNHKLARAISDANWGEIVRQLEYKAEWHGRELIKIDRYFPSSKRCSSCGHVVEKLPLNIRKWDCPECGSHHDRDVNAGINILRMGTRVGDRRKRSDPATTPASLRNADQERERPRSKAAGLAVSVCGATVRPEGSKSRKAGAKKQKVSNSDARESRAFS

SEQ ID NO: 43110 - protein, 412 aa, unknown
  TnpB Polypeptide
MYGCQQVLIKPDKDLRAILEFVCEQSNKLANCGTYYARQLYFKTGKLPTNCDLHKLLKGNPHFQALYSHVAQQTLTSVAESFKSFKALSKLFKSGKLANKPKLPQYKKNSLKLATFPKADVKLKDGLLRLPLGSKVKTWFGLEAFYLPMPNNLNFADIREIRILPRNRCFYAEFIYKVEVEKPVLDPIKALGIDHGINNWLTCVSNIGTSFIIDGKWLKSANQWYNKSVATIKDGKPQGFWSNRLARITEKRNRQMRDAVNKAARIVVNHCLNNGIGKIVLGWNIGQKDSAGMGKKNNQKFVQIPTAKLKERIKQLCELYGIEYIETEESYTSKASFVDRDYLPKFGEKSEGWKESGRRVKRGLYRTGSLNWYINADCNGAANILRKVATMLGLCLNGVGRGALAAPQRIKI

SEQ ID NO: 43111 - protein, 500 aa, Klebsiella sp.
  misc_feature (57)..(82): Xaa can be any naturally occurring amino acid
MYIWLFIQATSIHTECKMLIQKAYKYRLNPTDAQAQRLRQMCGCARFVWNYALAETXXXXXXXXXXXXXXXXXXXXXXXXXXQATSIHTECKMLIQKAYKYRLNPTDAQAQRLRQMCGCARFVWNYALAETQRILEAGQKLPSTFELNKMLTGWKKLPELAFLSDAYTDNLQQKLKDLHGAWKRCFDKKLAAKAPVFKHKSHGNDSVRFVNFDKYCQLEYRRVKLPSGLGWVTFRQSRAVVGKIKYATVSQHAGGWYISFQVEMEVEQPAHPSTSAVGLDAGISKLVTLSDGTVFEPVNSFKQNQSRLARLQRQLARKVKFSANWKKQKARISRLHSHIANIRRDYLHKVTTTVSKNHAMIVIEDLKVSNMSKSAAGTVDEPGRNVAAKSGLNRAILDQGWYEMRRQLEYKQRWRGGEVLAVNPAYTSQKCACCGHTSKENRQSQATFVCVACGYEANADVNGACNILAAGHAVLACGGTVQSVRPMKQEPGTERSVVTH

SEQ ID NO: 43112 - protein, 473 aa, unknown
  TnpB Polypeptide
VQHVNEATNNTAVAANKAALISATGAALTRHVAYRFALDPTRAQEQELRAYAGAARYAYNHHVARVRANLSQRQAEASYGVDPGELTPPLSWGKVSFINEFNAFKNGQLPTSDVSDDGTRGLPWRGEVCADVFECASVDAAAALANFADSRVGTRKGKKAGMARFKSRHKTTPSFRLRSKTEPGKTARLRVTGPKTLRLPRIGQIRVHGSTRTVRRMLTAGRLRLHGCAVKFERGRWWVSLQGVAAQFNRDRRGPTASDPALTVRHPVGAGIDRGITSLAVVADTEGTLLHVAKGVKALRHAQDGPRRANKTHSRTKKGSNGRQQARERLVKIHARVANLREHAAHEVTTWCATNPTRLALEELYIAGMVQNHALALAVSDSGMGPAGRMLEYKAGWYNLKLVPVDRWYPSSKTCSGCGNVKDTLSLSQRLYVCAVCGLSIDRDVNAAINLARWPDCNTAQPGTAAVPAPSSA

SEQ ID NO: 43113 - protein, 458 aa, Caldivirga sp.
MGSGGSTSPAIPGEGIYPVEFSNKRTNVVKLLPNGAQERKLRKLADATAKLWNELNYERRQQYFSGNGVDFRGTWVKYYGKYKGILGVNAQAVMQKSNEAWNSFLHLLRLKKQGKLPPYMNHISPPGYWKDKETRQRKLIIVIRQDRYIVDERRHVLILKDFKMAIRFTGRLRWYGKQGRLEIHYDETRNAWYASIPVEVGVEEAKTGRRSKFIVHGERKVIQVESPKGSKVASIDLGINNLASVVVDDGTWLLYKGVRAKEDYFYLQRLISRIQSLRGTLKDKLLSDAVDELNREVRRLHGKLRRLLHLYRNFASHLLRTLHELGVSTIYLGYPLNIAQERGNKFTVNMWSYRKLMEAIELKAQEYGIKVFEVVKYKTSRVCAYHNVEVKRQPRGVVHCPKGHKLHSDLNGALNIMKKATGKIPITIKKPQSFIVGHNQVAPTKREVTPKTPGTPTL

SEQ ID NO: 43114 - protein, 400 aa, unknown
  TnpB Polypeptide
MLLCRKIRLQVSEQDAATLEMMQSKCRGLYNWWVMQLRDGKRWHCQDAKKALAESRKFDPDIDQVYGKLLAEVYFRLDKAMKAFWRRCAAGEKPGFPRVRPRHQFFTLCYPAMYVQVAGNTMLLPTGGKGKDKPYPTIVAELTESVLPGYKEAAISRDARGHYHASFVYEVQEAAQQPGQVVAFDLGIKTLATGVNSRGRFYHIEGFKGAQWYNQQLDKIRSKRDRCKKKSRRYIHLSQVYIRVSEKKRNKQRDCLHKASHLIAGKLVERTVVIGDLSQRQMVVKAHEEHQKAKHRAVFNDWGLYGFVQMLTYKCLLAGKALVLLDERDTSKTCSGCGHQQPMPLYKRTYRCGNCRLMMDRDENSAVNLLQRFLARLGPHTADAVRCAGVFTAINTFPHV

SEQ ID NO: 43115 - protein, 395 aa, unknown
  TnpB Polypeptide
MKGYNIKIYPNKEQKILLDKHFGAVRWTYNQMIIVNQKRYHRTGKGLSGYDMASYLPKLKKQYKWLSEVNSQSLQIACQQLDKAYTRFFKKQGGYPNFKKKNGKNSFSCITSCQLLEKHIKLPKLGLIKFRGGTKPQGVPKTFTISKDATGYYASIVFDNGKQEIQKQQINNVIGIDVGIKDFATLSNGIVIPNQKFLLQSQKKLKKLQQKFSRQEKTSKKRQQTKILIARLHKKIANQRKDFNHKISRAVVNMCENQTHIATESLNIQEMMANHKLAKSIADVAWSQFLNFLEYKAQSVGKYVLKVGTFYPSSKTCSDCGVVNNTLTLAMRVWTCQECGKAHLRDFNASKNIAMESARNWWSNHQSGEKINLEMVLQNIKSSSLIEADKLYLKV

SEQ ID NO: 43116 - protein, 397 aa, Thermoflexales sp.
MVATESVVVKIAHPTQRKAAWLREMAQACSGAVQCALDAAEQLRTSSRAKLHRATYREIRTRFGLPADYARMAVNAAVSLARSYAGLRRSPHQHRTSFPKVNGAQGIGLGVNAYQLVRGGNRWILRCSTGVRGVYVWLPLCVPSKFQERLVGAHGDAQLFERDGTWYVMLPVRTATPTPTTCSGEPTFIGVDLGVVRLATVAGSECVRIFDGKAVRQQREHYADLRRRYQRHGRRDRVKAMGRKERRWMRDMNHRISRQIVDLAGAYEQPVIVLERLDGIRERVRGSTAFNRMLASWAFRQLVEFVAYKAAREGIAVVFVDPRGTSKTCHRCGHSARANRRDQGHFRCVACGYASNADLNAARNIAALGPAALAHGAPDTPPGEAGTENGGSRSDVV

SEQ ID NO: 43117 - protein, 312 aa, unknown
  TnpB Polypeptide
MANEKLQKDVDRLTKQLQSLPASDPARTKIQKRIENKQKNHPIMPTSDHWMLTYETLDAVMKNTKNPDYYAMPSQANQQVLRKVLKDWKSHFELLASYRQNPGKFKAQPKQPGYIRTPYTTVTFTNQVAKRSDIKGKMHITFPRCLVPLCVGKPEGSYVRTEVKPCYGGYMVYVTFQDAVKMPEAPTNPTRILGLDPGLDNFLTALTNFPAAPFIIDGHWLKSINQNFNRRRAALMSELTKGMDSTKSVKNSARLNRISKKRACQIDDFFYKAAHYIVDFCLKNKVEVIVCGHNKRPETGNQSWLRQQSALC

SEQ ID NO: 43118 - protein, 598 aa, unknown
  TnpB Polypeptide
LAYIVRVTQEHLIKSFRYRIYPTPEQEAAFRRIDGCCRLVHNWGLEARLKQIKSAPRDADGKIIGKLLDYTAQQNALPALKSEKEFLSEVPSHCLQAALRNLDNAYQRYWSGLSEEPVWRRKGEPERLRFPDKNQFSINKIEEVEPKRIPYLRAVHDWKSACGKIEKQNARRAKKGEAIESLPDAPIRPRYHRSDIVWLCAPKFGMSGKDGGAIAMTMHRPIPRNGEILSCSIRREGPYWYASFPVAIPVGEKRVQGNVLANALVQAGEMDAIHPKGTKQKAIIADRDRRKREHKEKLRKEKVYLNTKALERTRVVGIDRNIGKPVVTSLGDFLGRASLTPKLDRKLTRLQRDLARKLEALRKENKIEPGGSLKGIKFGANVMKLKRKLNALHGRIARIRKDMIHKITAYLIRVGDIFVIEDLKLQNMTASAKGTVEKPGKNVRAKSRLNRGMLDKGHGEFARQLDYKCRFANRMGGYRKAVIRVNPAYTSQMCSACGHTQSENRDDEKFLCLSCGHKAHSDENAAQNIRVRGLGHLASVVGRDLEEILSVMDSKPRPGDHRLLPPEDWAVGLPEGPGESLGKTEEKKTTGCLSELAV

SEQ ID NO: 43119 - protein, 428 aa, unknown
  TnpB Polypeptide
MTSAKNAAISQSLKKTREKRLSQDCRVFKIKIDASSLKKEQEEALKMQFVEAKWLVNEAIGSGDVFKYEAGKTVVHRDKDGNEVVSEIKHLGSQMKQAVVDELRSNVKTLSSLKKVGKKVGKLKFKKQVKSINLKQYGTTYKIVGKRKIKIQNAPGEIRVNGLDQILSHKGKPKYELANAKLLNTPRGFYLAITCYSKKKERKCNGEIGIDFGISTTITLSDGRKFNASVQETDRLKKLQRKLARQKKGSKRRYKTLCLIKQEYQKMSNRKNDIANKLVAEIMKYEDIYLQDENLTGWKIRFGKQVQHSVLGRIKAKLKPKARYVLSRWEPTTKLCVECGQLHKLTLADRTFTCDCGVPPEDRDIHAAKNMIAMSKNKILGLGRPELTLAETLLDLNASAVRAEVVEARRSVKGLRGVSRQEDATSLA

SEQ ID NO: 43120 - protein, 428 aa, unknown; identical to SEQ ID NO: 43119
  TnpB Polypeptide

SEQ ID NO: 43121 - protein, 439 aa, unknown
  TnpB Polypeptide
MRVIQAFRFELDPSREAQIALGKHVGAARFAYNWGLARCLEAKERGKQIPSAVDLHKDWNKWKRENAPWWVEVSKCAPQEAFRDLERAVRNWREGRANFPRVKRKKALADNKARLTGHIRVTPRHVQLPRIGKVRTKERTDKPLELLQSGKARILSATISQEADRWFVSLTCEVERPDSEPREVQGPEDVVGIDVGLEAFAVLSDGTRIESPKPLEKALRLLKRRSKQLSRKQKKTVVERDPETREERKRTVFSRNYEKAMLRLARLHRRIRNIRQDFLHKVTTELAKAKPVLVVEDLNVRGLARNGSLSRAILDVGWGAFRRMLEYKCAWYGAVLFIAPRYFPSTKRCSRCGWVGPALPLSQRVFHCEACRLKVDRDLNAACNLREYGLTHLTGSTGSSSGSDACGDPSGGGTARGGRSTSHGSMKQEAARHEFHPSW

SEQ ID NO: 43122 - protein, 320 aa, unknown
  TnpB Polypeptide
MVEDSATRTVPIKLDVDGSAADLLHQTTDYFLDAANYVVDAAWEPDWKITSKQTLHDLTYYDVRDDSPLPANLVQAARNRAAEAVKGVVERWKQGEKASKPHFTSRFASYDARTVTVNDDHCTLATIEGRVTAEFVLPDEQRDTPHSAYLFNDDYDLKGATLHYDEVEDCFYLHVRTKPTVENDDAEQGDAEHVSVLGVDLGITNIATTSTGRFWSGAELNHWHREYEKRRSDLQQTGTRWAHENVQRVGRKQTGRFEQMLHTISNELVEEASKTTVRISCSSNSTASANAYLTRRRFTSGRSTDSTSTSRTKPSRKGLW

SEQ ID NO: 43123 - protein, 147 aa, Bacillus sp.
LSRRTVGGANWHKAKKKVARIYEKIANARRDFLDKVSTDIVKNHDDIIGMEDLSIANMLKNRSLAKSISEVSWSQFKSKIEYKAKWYGKQVVTVAKNFPSSQLCSFCGYQNKDVKNLGLREWDCPSCRTHHNRDINASINLKNEAIR

SEQ ID NO: 43124 - protein, 261 aa, Staphylococcus sp.
IGSYYLIGTIHVQRHRIQLPKLGWIKLKERGYIPTNSIKSATIVKEYDRYYVSVLVDQPSSPIFKPKQTDGIGIDLGLKEAVSTPSGVRIKSFKTNQTIIKLDKSLKRQQRKLSRKKKGSHNWYKQLLKVQRLYRRIKNIKKDIKRKGILSIVRTNPQFITIENLNIKGMMRNKRLANSFQQIGLGYMVEWLKIKCRDYGIELRQVDRFYPSSQICSDCGHIQPMPLNQRTYHCNHCGMIKDRDTNASVNLKQATDYTVIV

SEQ ID NO: 43125 - protein, 411 aa, Nostoc sp.
MLVFEAKLKGSNEQYEKLSAAIRTARFIRNSCLRYWMDNKGIGKYELSAYCSVLAKQFLFANNLNSMARQASAERAWSAIARFYDNCKKNVAKKGFPRFKKHQTHGSVEYKTTGYKLSEDRRTITFTDGFKAGSFNLWGTRDLHFYQLSQIKRVRVVRRADGYYAQFCLDVERVEKREPTGKTIGLDVGLAHFYTDSDGQTVENPRHLRKSEKALKRLGRRLSKTKKGSKNRIKARNSLSRKHLKVSRQRQDFAVKLARCVIQSSDLVAYEDLMVRNMVLNRKLSKSISDAAWSAFRDWLEYFGKVFGVATVAVPPHYTSQNCSNCGEVVKKSLSTRTHKCHHCRFVLDRDWNAARNILELGLRTVGHTGTLNASGDIDLCIGGETLQCKPSRGKRKPKERSLESPWLKLQ

SEQ ID NO: 43126 - protein, 203 aa, unknown
  TnpB Polypeptide
MNRSNLKLALKGARLSKSEGILAHFEVIRSLRLCYHSDDLISRSTKVKAKTRKRHHKDCNRLRLRIRNLVDELHHKVARFFVENFEVILLPTFEVSEMVLISGRKIKSKSVRQMLTWSHYRFKMFLKSKAFEYGKPVIDCCEAYTSKTVSWNGELIDNLGGKKVIKSEIGGQQMDRYLNGSGGFFLRALVDTPSFKDSLSVHC

SEQ ID NO: 43127 - protein, 260 aa, unknown
  TnpB Polypeptide
MKQQVKQLTKEDYKNLKLLSHIAKNLANEAIYNIRQYYFTEGEYLNYQKNYALLKNSLNYKMLNSNMAQQILKEVDGSFKAFFGLLKLAKKGKYNFKDIKLPKYLPKDGFTTLIISFVRINRNKLIIPYSNSFKKEHKSIEINIPPKLVDKKIKEIRVIPKSNARFFEVQYAYEIEEVQSNVDKNKALAIDFGINNLATCVTSTGKSFIIDGRRLKSINQWHNKENARLQSIKDKQGYKNKSQTNNLLILKKEIIKLTII

SEQ ID NO: 43128 - protein, 387 aa, Actinopolyspora sp.
MIGMRTAYKCRAYPDSEQAAQLGRTFGCVRLVWNKTLDQRHRVYHTEGKKTSYTETDAALSEWKRTSELAFLSEVSSVPLQQTLRHQHTAYQNFFAGRAKYPRFKSRTGRQSAHYTRSAFKLRDRSLTLAKQTTPLNFVWSWDAETLRDLNPTMVVVSREPDGRWYVTFAVDTDDPEPSASTGESIGIDLGVKDFAVLSTGETIANPQHMDRKARNLARYQRMMARKQRGSNNRRKAKRKVARAHRKVRHARQDFLHRTTTNLVRRADVIAIEDLNVAGMTSSARGTVESTGRNVGAKAGLNRAVLDAALGEFRRQLEYKTTRAGKTLVVVDRWYPSSKTCSACGHLLSNLKLSVRAWSCPDCGTRHHRDHNAAKNIRAAGQAVAGP

SEQ ID NO: 43129 - protein, 371 aa, unknown
  TnpB Polypeptide
MRKTFKYRLYLTPAQETILLKTLDECRWLYNHLLEQRKTAWEGHQQALSLYEQQADLPALKKKRPSLKIAYSQVLQNVAVRIDLAFQAFFRRVKQGETPGFPRFRGKGRYTSLTYPQLANGCVRLQDDRLHVAHVGDLKIVHHRPLEGTPKTATISVSATGKWYVCFSCEVADPTPLPKTGREVGIDVGLTTFATLSTGEQIANPRFFRTDEKALGRVQKKLSKAEKGTPERKKRRQPVARVHERIAWRRATFAHQQSRRIVNQYDLIAVEDLSVNRMLHNHCLAKSISDAAWNQFATLLSYKAAWAGRTFVQVNPAYTSQDCSACGHRQKMPLSERTYTCPCCGLVIDRDLNASLNIVRMARLGRQSQAS

SEQ ID NO: 43130 - protein, 413 aa, unknown
  TnpB Polypeptide
MRGSTTSRAKVVPRGAYMLTLKARGVLVAGSMNELREELYLTRRAIQYVIDTLWELDKLPSINQAHQIFYRILRKQGFRAHQCKQIYKYALSLVKSARNNGGRKPVLRKLSARLDKYDTKVDLESQIVILKLRSRVFKIKLLHSREYIRKFVGRKWYEVIIGIDKQGRIWVNIPFRWICEPYKPRSIISLDINLKKIVTYYGRGIRRIDTRFVEALHLKHLAEEVQKRHSYAWRRNRKWLEVIKALHRRSRNIVVDWTRKFAKYIVLKAKRTKSAIALEDLERLWFNASKKSSSLADKLSRFAYRKLRLAIMTKAIEYSVPIVFVDPRNTSSICPRCGCKLSYNYRLAVCPRCGFTADRDTVGAINICLKALKHIAPRPGSWGTHPMTNETRAKGGLLIDEPMTIHIKTYTSI

SEQ ID NO: 43131 - protein, 544 aa, Caldisericum sp.
MITLQCELELSKTDKELLLKLMRKFSSCMRYAYKRLLEGKVRKDLKKELQPIFNINSRYVDDAIMKAQSVINSYKELNKNPTKVIFGGRKLFNQLKSKHLTGKRYKELKREWKEKRLLLYSRGDKTKSGNLNIRLIKENDNWYLRINTDNRQWIKAKIIRKVKRGTDKWIDFIWRLTEAELTNNYFPYSVEIKQKNGKIYANISYEEIIPEIKYTKENGIVGLDINASPIHIALANVSIDGNLIRYKPISLHELIGKTKNQREYLLWQIAYKVINYAKENEKAIAIERLEGINKGYRGDGKPKLRKRFEHWSYKSLLTKIKILGQRNGMQVIEVNPAYTSIIGAYKYCPQYLIDKDIAGAYVIGRRGLGYKDDIPENYLKLLSNKEYLEYSIAKLEEKKEELKELLKNEKNIYKRKPIKQEVSKINKDIKLLKLNIQNLNSNPKTQKQVNQRKEPVRDEYFKYSYKLWRVVKAAFGIPILGKSFVRDFSPLKTLLTDWDRIPRRLVPVLGAGTMVSQIPPVGYMANLNWRTKSRPTKSVSFIHF

SEQ ID NO: 43132 - protein, 422 aa, Escherichia sp.
LALGTTWLERINGGDHPRFLVGLLRTGLGRLVVLGSGGKRLFITLAFCHCAAAQFVPDTPAGDFPPLVAVAGDSNSDAVATGYLNCPFWHSGFGSSQPLQQSLKDLERAYKNFFRKRAAFPRFKKRGQNDAFRYPQGVKLDQENSRIFLPKLGWMRYRNSRQVTGVVKNVTVSQSCGKWYISIQTESEVSTPVHPSASMVGLDAGVAKLATLSDGTVFEPVNSFQKNQKTLARLQRQLSRKVKFSNNWQKQKRKIQRLHSRIAYIRRDYLHKVTTTVSKNHAMIVIEDLKVSNMSKSAAGTVSQPGCNVRAKSGLNRSILDQGWYEMRRQLAYKQLWRGGQVLAVPPAYTSQRCACCGHTAKENRLSQSKFRCQVCGYTANADVNGARNILAAGHAVLACGGMVQSGRPLKQEPTEMIQATA

SEQ ID NO: 43133 - protein, 267 aa, Cenarchaeum sp.
VVETAKTILESWEMRSFKIVDVTRYVNKDTKPSDHMFELHITVQVPAEPHRAIGVVRGIDVGGKHLAVTVDTNAVHNTRHIDILREIDALKRLRDHKKKGGLKWCIINYQIDRKANNIATNTINQTVSRIASGVDAVAVESLSIKGMTAHGGNYKRRMNRTMRESRLGEFLRKLAQRCERAGILLYGVVAKHTNQTCHTVDAKSRISRDEFIYTRVFHADVNAAWNILYRVAGNVILRRSGRRATNQRLRCFVLYTKAVIKESGTQM

SEQ ID NO: 43134 - protein, 407 aa, Lentzea sp.
VDVGDAPVTRAFKFRFYPTDSQAAELLRTFGCVRKVYNLALAVRTEAWVQRQERVNYYDTSAMLTAWKKTEELAFLTEVSSVPLQQTLRHLHVAFANFYSERARHPRFKSRKKSRRSAEYTTSAFRYDDGRLTLAKMRDPLNIVWSRRLPDGVSPSTVTVSQDSAGRWFVSLRCQDPTVTTLPPTTSAIGIDVGLDHLLVLSAGEKITNLRLERRDRKRLARAQKALARRACGNGANRIKARRKVARIHARIADRRRDHLHKITTRLVRENQTLVIEDLAVRNMVKNRRLARAISDAGWAQFREMLEYKAVWYGRDVITVNRWFHSSKLCSACGVRRETMPLSTRRWTCTCGVEHDRDINAARNIMAAELAASACGADVRPQRNTPSGRLAEKQESPLPSGRGEVNP

SEQ ID NO: 43135 - protein, 504 aa, Lentzea sp.
VIAVLARYRYRIEPTAVQREALSRTFGCARVVFNDALRCREEARAAGQALSSAEVQRRVITAAKTTEHRVWLSEVASVALVQSVQDSHRAYRDFFDSLSGKRRGRRVGKPRFKSGKDHRQTFRLTRNGFRLRPGGRLYLAKIGDVAVRWLRDLPCEPSSVTIIREPDGCYHASFVVEVEPTPLPLVERESGVDLGVTRLATIACTGGTRRDVVNPRHLARAQRELTRAQRALARKVKGSSNREKARRVVALRHGKVARARRDVHHKLALELVRDNQAVYVEDLNIAGMVRNRRLARAVQDAGWGQFVQLLKQKAERHGRAVHTVSRWLPSSKTCSVCGNRMAIMPLSIRHWTCPGCAVAHDRDFNAARNILAAGRAERSNACGAEVRPPFGGRRASKQEALHSRVGNPREWRARQMVTNNEAESRYEIHVDGRLAGFLEYRDVGGVLALVHTEVDDAYAGQGLGGKLAKFALDDVKARDVKISPLCPFVAKYIDKHPEYRVTIR

SEQ ID NO: 43136 - protein, 272 aa, unknown
  TnpB Polypeptide
MRAAMNDEHNKGCLVVYTGIAKLYTPALKSKTVLDILKIEADEIAGIAAADWLKLEDISEEACSELEKTLTAAVMKWLEKHSLKPDFYVGIKEFYSDSNGNVVSNPKYLEKSMRKLMREQRKLSRKEKGSKNRNKQRVKVALVHEKITNQRNDFLQNESTKLIRENQTICIEDLKVKNMMRNHKLAQHIGSASWSKFFDMLTYKSVWYGNDIVKVPTMYPSSQTCSCCGFKNPLVKNLAIRKWECPECHTKHDRDTNASINILNKGLQMQSA

SEQ ID NO: 43137 - protein, 456 aa, Acidimicrobiaceae sp.
MDRPRVHLRGRVARRPSGCVQYPVSVRWPPVCLQLGARPSEGGHGRPKDRPLSRLGAVESLRPPEAIQRREADHGSVVVGELEGGVFHGDRRPVCRPQELVRLQGRKTEGQEGRVPQVPIQEERPGQGALLHRPHEDRSRPADSHPAGGGSPPVEGEHPPYRTLGSSREGPCPERHPPREVGPAVCLLLLHSRKPPVSSSGQGGRAGVDLGMRVLATIVDSDGDITEVPNPAPLRATLTERKRVGRQLSGRIPGSRGHDAAKAKLASLDRRCVHLRKQASHQLTTMLADTYSEVVVEDLDLAAMKKSMGRRAFRRSVSDAALGQIRPQLTYKMAWRGTTLTIADRWFASSKLHHGCGCRLIEPKKLAKQLVCVVTGEIVDRDINAAHNLRDWPDTASQDSSGAVGAVAPPASESSDGQDIGLSDAVGGSVRPEPRRRPHPLRPEPTREPREGVQHE

SEQ ID NO: 43138 - protein, 242 aa, Sulfolobus sp.
LKIFKLKELRRYETGLGRIVVNYSIRREEITKGHSTKDELIKKKLRKLRERERKIDVLRKTAKRITELARDLKAKVIVGKFSSKAKEKMEGDKNGRLRHRIHQWSVVKFVEMLKTQPIDVEEVSESYTSSTNPFDGKKLRKGKQEVEKVVKVFNPFLMTGTAHEGGGIRVFKVNARYLESGQVLLERDSIAPLNIMKKVDGRVVVFPSTSPNDLRMTVYDPLRGVPVAELKVIKSKEELRPG

SEQ ID NO: 43139 - protein, 384 aa, unknown
  TnpB Polypeptide
MMRAQRIRVYPNKTQQKRIDETLELHRQVYNELLDLRIKTYKETGKTLCRTELRKHLPKVVGHSIQLRAVSRRLDLAFEAFFRRCKDPIEKKKGFPRHKKFGKLRSITKDQQLRIKGNLVYFPDIGRLKLTEPVKGKPKTMCLKKEPSGKYHLTFLSEVEVIPILAPDKAIGIDLGITHAIATSDGQFFDSPKPLKANLAKLRREQRSFSRKKKGSKNREKQRIRVARCHEKIADIRQDWTHQVSTFLTRNYRTIVCEELNIQNMLKNRKLARAISDIGWGCLKQKISYKASSAGGKLVEVNPYNTSQLCSACGQLVPKTLNERTHNCQNCGLVLDRDVNAAINILNRGIGRATPKFKPDREDVRPVHRHGLFSLTQEAYRAIA

SEQ ID NO: 43140 - protein, 498 aa, unknown
  TnpB Polypeptide
MTSKVEEKASEDRIFGSYLFKNYANKGKIEKIKSVLKEYRKTAKDISKFLWDIFFRTGNLPHRKKINVKHIESFLSERYKYVCLWQTYDVLSSYIANIQYQFANVVLNSSLSKEDKLIFLALNNVKGWLIYDKDEIEIYEKREKRKVKVLEFHKKLAKKIFKHLLSKNKRPRFSNISMHLDGKVVEISKKEKDGAKAFGYWIKVSTLEKGKPVYIPLKANTYAEKLEGRFLDYCQVVENDGKIEFRIIKELKKKEYVPVIDEIAIDLGLRPLFATDKGGLFGRNFFDTLKAFDKKITKRMANLQKRNIKPRSDKKYRKLVDDLREFLKNEINRLINIIIKIYKPKRIVIEKLDFRSPELSKRMNRMIQNFGKRYIKEKLQKLQELYGIEVVEINPAYTSQECSCCGYIDKKNRKDTQEFECKVCGNKMNAQINGAKNILKRSSLGNLTKKQVLKILIERYLERLKGCKSAPLDVIKDNPYFKDYLDSILNPRQGLTSS

SEQ ID NO: 43141 - protein, 500 aa, unknown
  TnpB Polypeptide
MTSKVEEKASEDRIFGSYLFKNYANKGKIEKIKSVLKEYRKTAKDISKFLWSIFFKTGKLPKKKKINIKHIESFLSERYKYVCLWQVHDVLSSYIANIQYQFANIVLNSNLREEDKLILLALNNVEGWLKYDKDEIEVYEKKGKRRKVKISEFHKRLARKIFKHLLDRNRKPKFSNISMHLDGKVVELNKKEGNGAKSFDYWLKASTLEKGNPVYIPLKANTYAEQLEGKFLDYCQVVEDDNGILEFRIIKELKKKEYVPAVDEIAIDLGLRPLFATDKGDLFGRNFFDTLKAFDKKIVKRMASLQKRNIKPRSDKKYRKYVDNLRDILKNEINRLINIIIKVYKPKKIIIERLDFRSPELSKRMNRIIQNFGKRYIKEKLQRLQELYGIEVVEINPAYTSQECSCCGYIDKKNRKDTQEFECKVCGNKMNAQINGAKNILKRSSLGNLTKKQVLKILIERYLERLKGCESAPLDVIGDNPYFKDYLDSILNPCQSLTPS

SEQ ID NO: 43142 - protein, 367 aa, Clostridium sp.
MLKAYKYRIYPNSEQRIQIAKTFGCCRFVYNQTLAYRKEVYEKEKKSVSKTDCNNYCNRQLKKEYEWLKEVDKFALTNTIYNMDAAYRKFFKEHAGYPKFKSKHDNHKSYTTNITNGNITVDFKCNRVKLPKLKDVKAKLHRSFSGQIKSATISQVPSGKYYVSILVETEHMELPHTNQNTGIDLGIKELCITSDGKKYKNPKIIRKYEEKLIKLQRQLAHKEKRSQNYYKIKKKIALCHEKITNTRKDYLHKMSHEIISENQVIVSENLQIKNMVKNHHLAKAISDVSWYELTRQLEYKAKWNGRKYIKIDSFYASSQICSVCGYQNIETRDLSVRKWECPVCGVKHDRDINAAKNILAEGLRQIA

SEQ ID NO: 43143 - protein, 182 aa, Burkholderia sp.
MILVYRYRVKSLNGLLNRQSRAVNYVWNFCNDTQKHALKWNKKWPTGFDLNVLTTGSSKELGIHSGTINATCEQYAKSRSQHRRPYLRYRGRKSLGWVPQKGRDLKREGDAFRFAGNTFRVFNSRPLPEGKIKDGTNFAQDARGIREWACSDCDVVHDRDINAALNILRCGRASPGVGILRL

SEQ ID NO: 43144 - protein, 420 aa, unknown
  TnpB Polypeptide
MEMLLSHKTSIKISQEYSNIIGHMCYAASKLWNICNYERRHYKELGLEKYPDWYYQKKAHKGNLWYKQLPSQTAQETCKQLDKAWKSFYVLKKTGGIKDPNPPRFKQGNIPVTYMQMGIRHEKGSDQLRLSLPKELKSYMEETYGIHEKFLYLENKIFRNMDHIKQLRIYPPENGKYDLIVIYEIEEPEQLSQNGHYLSIDLGLHNLMTCYDSGNGRTFILGRKYLSLERYFHKEIARVQSVWYAQQSERGIKYPKSSKHIQRLYRKKQNAVKDYLHKVTRWIAEYCRKEDIRCMIVGNIRNIRKEKDMGHKTNQKFHGLPYNKLYIMLEYKLKLYGIQLIKQEESYTSQCSPLSPEVSKRYAEASNRKERGMYITDGVRYNADAVGAFNILRKYLSVSGKQKELSVTGLKNPEIIKVAA

SEQ ID NO: 43145 - protein, 365 aa, Ruminococcus sp.
MERAYKYRIYPNKKQRELMTKTFGCVRFVYNHYLAKKIELYQNSKESLSFYKCSADLTKLKEELTWLKEVDKFALQNALRNLDSAYQKFFKEHSGFPKFKSKKTHSYSYRTSITGKNIEFCGNSIKLPKLGRVKIRDRQIPQGRILNATISQVPSGKYYVSLCCTEVETKHYESTGSAIGIDLGLKEFAITSNGDKVENPKYLKQSLQKLAKLQKGLSRKTRGGANWNKERIKVARLHEYISNQRTDFLQKLSTKLVKDNDIICIEDLQVKNMVHNHKLARSISDVSWSEFVRQLEYKAKWHNRQVVKVDMFYASSQICNVCGYKNSETKDLSVREWICPCCQTEHDRDINAARNILQEGLRLLA

SEQ ID NO: 43146 - protein, 387 aa, unknown
  TnpB Polypeptide
MSTRTIALTLKPTDAERAALERLRRAFADACNAISAVAWDAQEFNSVRVQRLCYYDVRARFGLLAQHTIRAIGVVCDSYKADKERLHTFKPTGAVVLDTPRLYSIAHNRASIATLDGRQSIRLGIGGRQRLQLATAATLAEADLICDRKGRWRLMVCAHYPDPEPVTTTGVLGVDLGRRDIAHTSDDESFSGEQVTAVRDRYARTRQMIQHNVSKGTRSSRRRGRAALVRLSGRERRFQRDINHVVSRSIVQDAAHTGRAIALEDLTGIREPTNRQPRSKTERRRSNSWAFYQLRGFITYKCVGAGVPLVLVNPAYTSQTCHCCLHIGERSGKRFHCVNPFCLWSGDADLNGAYMIAIRGAQVSCPGGPPLCCALQLGDRATTSLRL

SEQ ID NO: 43147 - protein, 336 aa, Streptomyces sp.
LVVLLPASHPAPLGQGVPGVLPPGQGRADPGLPPLQGRRALRHRHLPQGRRRLPMGLHPPHDPVTRVRIQSVGHVRVHQHRPVRGRVKTISVKREGTRWYIVLSCDNVPAEELSATGAMVGIDMGVAHFLTASDGEHVANPRFLTAMAEELAEAQRNLATFPKRTRQRTKHHRAAARKVAKLHAKIRRQRADFHHKTARTLITGHDVIAHERLNTAGMTKSPAPKADPEQPGVFLPNGAAAKAGLNRSILDAGWAQFLGILANKAESAGRLVVPVDARNTSRMCPECEHVTKGNRVTQAKFACTACGFTANADHVGATNVLNRAGLVLCAAAQPPT

SEQ ID NO: 43148 - protein, 415 aa, Planomonospora sp.
VFEVKLVVQIKLLPTPEQAAALEATLHAVNAAATTVSRTAYGKSVFGNYDLRRHTYGELRATGLSAQIAQHIIKKVADAYATLRGLIRTGRLTGARARKAESEPITFRPDAAQPYDDRCLSWLHEQQTVSIWTVHGRLKDITFTGSADQLTTLARYRHGESDLLLRDGKWFLIATCEMPETPLNANPAGWIGVDRGIVNLATTSDGTNHSGDGLTRYRRRMARVRAELQARGTKSARRKLKKRAKRETRHATHTNHKIAKEIVADAQRTGRGIAVEELAGIRERVRLWPSQRATLSSWPFHQLGAFLAYKARRVGVPYTQVDPAYTSQMCPVTWCGSVGRGNRPSRDLFSCRSCGFAGPADHIAALNVERRAGVAWAFVDTPNDPAVESGVSASRSCHPGRRERRKPKAASALGR

SEQ ID NO: 43149 - protein, 349 aa, Nonomuraea sp.
MRSAFKMRAYPTPQQEAVLNRTFGCVRLVWNKVLAWRQARYRTEGVTTSYAESDRYLTALKHDPDLAFLSEVSSVALQQTVRHQYAAMTVSRDPCGRWYVSLAVEVADPEQAPPAGRAVGVDLGVTDFAVTSDGEKIANARHLVRRERRLARYQRRMARRQPGSNNRRKARAKVARAHRKVAASRADFLHKTSTRLVRDHDVIVIEDLNVTGMVRNRRLAKAISDASWGTFRSMLEYKAVRYGRRLIVIDRWCPSSKTCSACGHLLAVLPLGTRTWRCPSCRALHDRDVNAAKNILAAGLAVPACGDDVRQSGSSGVRSSMKQEPRPVRAGIPVLLAGSSQDSLIRGSR

SEQ ID NO: 43150 - protein, 292 aa, Bacillus sp.
  misc_feature (284)..(284): Xaa can be any naturally occurring amino acid
MLINKAYKFRIYPNKAQATLINKTIGCSRFVFNHFLSLWDNAYRETGKGLTYGTCSAKLPAMKKEFVWLKEVDSIAIQSSVRNLADAYTRFFKKQTSAPRFKSKKNNVQSYTTKQTNENIAIVGKKIKLPKLGLVRFAKSREVKGRIVNATVRRNPSGRYFVSLLAETEVQELPKTQSYIGMDVGLKDFAILSDGTTYKNPKFFRSLEEKLAKAQRVLSRRMKGSSRWNKQRVKVARIHEYMTNARKDYLDKISTEIIKNHDVIGIEDLQVSNMLKNHKLAKAXTARTVELA

SEQ ID NO: 43151 - protein, 340 aa, unknown
  TnpB Polypeptide
MDFSKWLNNRFIPSSPEYKWIKEVSSKSVKQSILNAEKAFQRFFKQQRGFPKFKKKNKSQAKMYFVKTDAKTVIPCERHRIKIPTLGWVRLKEKGYIPTVKQGYVIKSGTVSHKAGRYYVSVLMDVPDTKKSQLNDFGLGIDLGVKEFAVISNGIVKKNINKTTRVKKIEKQLKRAQRCLSRKYEGLRKRSHNRKGEATRQTIQKQVLRVQKLHQRIDNIRTDFINKCVNEIVKTKPSYITVEDLNIKGMIKNRHLSKAAASQKFYEFRTKLEAKCKELGIELRMADRWYPSSKRCHQCGWIKKDLKLSDREYICECGYRADRDFNASLNLRDALTYKIA

SEQ ID NO: 43152 - protein, 261 aa, unknown
  TnpB Polypeptide
VLITQTVAYTSDTEIGLKNLSERGNSIQKSERLERLYYRAMDRSRRATNPQNYDKDGTIKKGRKSWDYSNHYKKLKTKHSERCRINAINRQLAINEDANHLRSLGDIFITEPKNVGKLMKRAKETTRNNKGKFNKKKRFGKFIKNRCPSGFQTTIEKKFKVSGGTYLEVPNHYRSSQYDHTAGDYIKKKLSDRMYHLMDGTFVQRDWYSSFLLYCYDDKTKNINTSKCITKFEECYNKEKALIKWIKANKIKVLNSGIKIA

SEQ ID NO: 43153 - protein, 450 aa, unknown
  TnpB Polypeptide
MSSYAMKLNGDLTALDDSITIYREALHFIIPIVNTHWDEMKDFEYGNQRMVYAEKLIHSTKENKARYHFDVEFPKFPSYLRRAVLNRAIGIVSSYRSNLANWEEKKVELEAKGEKVPQVPQLGTRHFDYPAYYKQNLFRNFNPVAKTIDLKVFKNGDWVYETYTLKTSDCTYYQKNLANKKQNVPVIKKKGRRFYVAFSYEENVPLIAEESIEKICAIDLGLGTDATCSIMDEDGTVYARTFISFSAEHDRLNTRLGRIKRNQKRGSRYNRTLWRKVSGISQDIADKTVKAILEFGNKHGVDVFVLEYLDFKGKNAVKRAHFWRYKRIYKVLTQKAHQHGLRIARVNARNTSRLAFDGSGWSQRGQEITPDTPYELMRFTTGKLYNADLNASYNIGARYFIRHFLKTVTATQRLALEAKVPQVAKRSTCTLSHLINLRSELAVLTARTQA

SEQ ID NO: 43154 - protein, 414 aa, Moorea sp.
MISAYQYRLRLTKSQVAKIEKWLDMLRYQYNYLLADRFNWYEQNRCSIYSCPLVCHLPELRSNPDYFSQKRTLPQLKQDRPWYREIHAHVLQDCIKRVDLAFKRFLKGDSNGKRSGRPRFKGKNRYRSFTFPSLSKTPISGNILTLPKFGKVKMIYHRPIPNGFKIKTATITRKADGYYVTLSIQDDSVPDIIPMLRRSRYANDSVVNPVGIDMGLKSFLVKSDNTEVPIPQYYRKAQKRLKKIQKAVSRSKKGSNNRKKAVTKLGKAHKKVADTRKDFHFKTAKELLDSHDLIAHEKLNIKGLAKTKMAKSVLDAGWGQFLYILSVKALNAGLVTKAVNPRNTSQNCSNCGKKVPKKLKDRIHSCPHCGYVADRDVNAAINILNLAVGHSVSSKACRVTEPLGGVGKKPALSR

SEQ ID NO: 43155 - protein, 649 aa, unknown
  TnpB Polypeptide
MGGRLRFGSDFHGQCQIVPETPGPASFVHRGRIDRRGRLMGWNRNPGRAAYGKSRGTGHAHPSRTGATVAGRVTSRTTHTGRNPDHIGADDRRQGETRLRYGRRPGLLRAPIPGRAIRVRRQYACRLGLQWFHQFPGGGARYFNAGRNRPPPFGLSLLSLHARSDIIGIMSQKVVIERVQVRGAAPYLGMSATPDGQQVPLYSTNPDIVMRWLCDGWRCRYNQLRSRRTRWDRNTQSAVPLGGKPDMRSDRQVRLECSWFAAIPAMVLQSPNRIENTDWWSANKRRKTLKKKHRNPGMTPRFKKRRDDLYFVCWHNKGSNANYRRLNRRHGEVVITGQNPGAYRLDGQPCRYSIHIRVRVSQPVRDYTSVGVDWTRRTLVFINNPLPIKRERTGAMVGLDRGCVHTLATSDNRFLDLPKQRLERIDREICRRQKAQARRVNMSGKTVREYRRNPSHTYERTGREISRLYAKAHRIIDDWQHKTTSMLVREYDLIVLEDLNLQDMSRKAKAKPDPDRPGAYLHNGQSAKRGLNHALRSAGLAGIVEKLEYKTRLTGQNRLILVNPAYTSQTCSKCGHCAKENRESQADFECRQCHARMNADLNAARNILKRGLDHLLGLDEAEHARTESDVPTAYSSRDASALTCGTSTR

SEQ ID NO: 43156 - protein, 545 aa, unknown
  TnpB Polypeptide
MKASEIACGIPDLRDYRLYDHRTGNPIDPVEAETLLWLHLDHCRQCQNRMVQDPRNRGLNRSGNAGRGNEWARKNIALTGLPSKFRNLSHQNRVNQCEAARLLLAWRAREDIATAIDSIGWQKATYDNVLALMGEDIDRQLFTNVLDSGKHPALPTVEHTRFPYDQSNNNSCGKGVIDRGRGVIRYERVAVYDRFVDLEIHAPHVMRLHPDLTRVSRPTLRWNGECVTWDLVAFEPKPRKNDVNQVGHVVGFDLNADWHGGISGARLSYTGNVSRELVAGVDTRRQQETLERLHVQYQRCLRKLDRLMPWQRPHDPDDPVQVDAHPKWKRLYEQSLALRDKTYRVKELLDWRYAHDITDHAKPGELIAVEKLSPFDAAGRHEFRHGSQLRKLEHVADKTGRRVVQVNPAHTSDTCPWCGTVNDVGKSRRYQCADCKRTIPRDHGSAINIAKRGARYLGHKVQPTPRKGRATPKRPPRKTMAPDTRVRTLLDRKTSGTGKGPDSLRARTTPLEWHSPSTATIRDKRNRNIPAHQRERMHPGLRQEP

SEQ ID NO: 43157 - protein, 207 aa, Helicobacter sp.
LCLVCELENNPNKQTACDKSVGFDFGLKTFLTGSDHTKIESPLFFSKYLSLIKRLSRNLSKKIKGSNSFKKAKNKLAQLHQKIKYLRTDFFYKLALRLSREYQTIFIEDLNMKAMQKLWGRKVSDLAFSEFVKILENKANVVKIDRFYPSSKTCSNCLFVNEEINKDFRKIGKTDDERKYHCKHCGLVIDRDLNAAINIRRVGASKP

SEQ ID NO: 43158 - protein, 566 aa, unknown
  TnpB Polypeptide
MAIRKKQEPDEYQKALRKFHKKSNRHVVVFEADISEDEKRRIFSDADHLRQCGNELLGIMERNLEQLLRTKRYRALQKLYGKVSDPIHALEKKEVLSDEETQKLNHLKKERAEITNSMNQMRESYQVTWDFCRTKMMELKETYHLQSIFALSRAEDIWAAIETILYSSGRKLHFKKRGDLPEIRAKQSTRGLVIDSSQSGLIVKYGKVTIPCKYKAKDLWLWDEEKAILAYLAEPELQDAHAVDQMSKGIITDTYRPCFASLVCKKIRGRLRVYVHITVEGKAISKRRKDSTPRHYYGKGNIGCDIGTQTIAYTSNTEVGLENLAERGNSIQHVERQEALILRAMERSRRAMNPNHYNENGTVKKGHKQWNFSKRYQKLKQRHQELCRIAAENRALAIREQVNHLRSLGDCFITEPPNAKKLQKRANPENPVDKNGRMKRKKRFGRSIKNRCPGYLQAKAKQLFESTGGMYVEVPILYRASQYDHTSDSYIPKKLSQRMYHLTDGTKVQRDWYSSYLLYCINKTYTQINKLKCRSNFATMYQKEKNMIEEIIRSRKKIMNSGIRTV

SEQ ID NO: 43159 - protein, 381 aa, unknown
  TnpB Polypeptide
MGSRVVKRAYKYRFYPTPQQAELLNRTFGSVRYVYNRALAERSRAWTQEQKRVTFAETCRMLTAWKNDPDTAWLYEVSNVALQQGLQHLQNAYVNFWAKRARYPQFKSRRKSRASATFTRMGFSWRDGQIRLAKCAEPLDIRWSRPLPKAANPSSVTVGRDSAGRWHISILCETTVRNGPATSTVLGIDAGITSLVALSTGEKVANPKHERRDRKRLALAQQRLSRKQKGSANRAKARVTVARVHARITDRRRDHLHKLSTRIIRENQTVIIEDLNVRGMVRSHSLARAISDASWAELRRMLEYKADWYGRTVIAVDRFYPSSKTCSACGHLAASMPLNVREWECASCGAAHDRDVNAAKVIRAAGLAVQACGDGVRPARA

SEQ ID NO: 43160 - protein, 353 aa, unknown
  TnpB Polypeptide
MSQQVKITRARLHGSAVYLGDVTGPDGAQMPVWSANPDEVLSWLCDGFRFRFNQRRSTRCRYLTCEDRAGERVVVSDPAGVPVLVPIGNTVTDITDAQARRQHSFLAAMPGYVLEATLKTENTDWFSATKRRKTNVAHGRKPGAMPGFRRKDSDQRFVCWFNSGRNAVFTRTGRRSGMVMISGANPPAHRAPGAGPDGKPLKLAWRITLHVRLSQPIREYTSVRVNWTRRELVFVNEPLAVTGRAGGGEVIGIDRGVVHTAADDRGGFYDAPDTAALDKQRKFHQRRMAKSKVIAARQGRRFWESKRYQAHKAAPRTWRLNRCGCVRISRTSSVPNSYAGTISSASRNCPCTA

SEQ ID NO: 43161 - protein, 203 aa, unknown
  TnpB Polypeptide
LGVQTLPSTQGRAANVATKQVRVRADFAHKLSTQLVRGHDFIGIEKLSLHRMTRRGKGAGAAQKRGLNRVLQNAALGKLAKCIEYKADLAGVPFVEVPPAYTSQRCHKCGHTCKGNRESQAVFRCLSCAWSGNADTNAAVNVREEALARWSEHTEQLAGTSGEKPGGITPVSQAGSKSKTDPHTGPAPGPAASAMNRKPPNAA

SEQ ID NO: 43162 - protein, 303 aa, unknown
  TnpB Polypeptide
LTIGSVFPPLKKETPSISRSWATSTMTTSPESGKTSSRLMYRDRMSSPSRLSRTCRQGPIICRKRTNLSLDLGWSTLFASDRGDLFGRTFFSVLKKYDNLLTALAKNRQRQGQRTRSPKYDGLVDNIREFMKNEINRVLNRAVDIHKPAELVIERLNFRSPDLSRRMNRLTSMFGMSLIRSKLDSLKSSIGIKITETNAAYSSQECSACGYVAANNRPTQSEFKCRCCGTGMHADVNAARNHHARSSDMVIDVYQGTQTVLHILTDRFLSDMERTIRHYRMATGLLSSNSYFAGPLAQPKGFS

SEQ ID NO: 43163 - protein, 264 aa, unknown
  TnpB Polypeptide
MTFIIEDMAPLFYPDLPNMAGMDLGTDNIAAIACTDGSSVVYKGGAILSANQFFAKQKASSVSILTKGKKHRHASSAFLSNLSLKHDCFLKDQMHKLSTAIVRYCIAHRIGILVVGTNRLWKQHASMSKKNNQKFVSIPHERLRWMISYKALIAGIEVVWQEESYTSKADCTAGDLIPVYGKEKTHPVFSGRRIERGLYLCREGYCINADCNGAANILRKAFPHAWDACKDFQFLSTPASVGFESLNPSSIPNRQKQRAANKKK

SEQ ID NO: 43164 - protein, 250 aa, unknown
  TnpB Polypeptide
LRRQKLENIVHGERKSIQIEKPKGNKTASVDLGINILASVVVDDGTWLLYKGIRAKEDYFYLEKRISEVQSLADRTKNIGEYDAYEELVGEKRRLLRKLRRRFAHLHRNLASHLVKTLHELGVSAVYLGYPYCISQDKFTVNVWSYRKLMDAIELKAQEYGVKVYEVVEHNTSKLCAHHDTEVKRQPRGVVSCPLGHKLHSDLNGSLNVMKKVKKVVNAVKKPLSFIVDHNGVAPVKGCNTQDPSGTLAL

SEQ ID NO: 43165 - protein, 398 aa, unknown
  TnpB Polypeptide
MKKKMIKGIKVMLVPNNKQNTLMFQNAGVKRWVYNWALGRQKENYKNGGKFISDNDLRKELTQLKKTDEFSWLNNVSNNVPKQAIKDACNAYQRFFKGQAKFPKFKSKKKSPPKFYQDNVKIQFTSTHVKFEGFAKSKKKNKQQLNWIRLAEHNRIPFGKDIKYINPRSSHDGLNWFISVGIEYPDNTNKPLNEGIGIDLGIKDLAICSNKITYKNINKSKKVKRLEKQKKRLQRQVSRKYENNRNGLKYIKTKNIIKLELKIKSIQHKLNGIRDNYIHQTTTEIVKTKPSYVVLENLNISGMMKNKHLSKAIQQQSLYEFGRQLKYKGLWNNIEIRIADRWFPSSKICHECGNINKLLTLNDREWICMECGSVLDRDYNASLNLRDTNNYKIFKLVS

SEQ ID NO: 43166 - protein, 237 aa, Gammaproteobacteria sp.
LSWLIGYTIVPSLQIRADAERRTAAPDAPLRGLQKARHERGENKLGYAGLCKLLTAWRNGPETWWLADAPTHPLHKTSTAISQSHAMVGSEDLEIRNLSKSAACTTEQPGKNVRAKSSLNQAILNQGGFEFRRQLDYKLRWNGGYLIAVPPRNTGRTCPCCGHVSAGNQQTQARFKCVACGFEDNADVVGAINVFRAGHTWFTCEVSGALMPPAAGTQRSDSCRLDVGRCTVGILRL

SEQ ID NO: 43167 - protein, 392 aa, unknown
  TnpB Polypeptide
VELSPLLVKRVDFTNRVRMRTFKYRLQPSRSQRTKLMQTLEFCRWVYNETLATRKNSWEQEKKVLSLYDTHKLLTLWKKQHPELKGVHSQVLQNVQERVDLAFKAFFRRVKMGEKPGYPRFRGYGWYDSFTFKQSGFRLLDSGLFLSKVGTVKIILHRPIDGRIKTLTIQRDTVGNWYACFACEVEVDPLLFNELAVGIDVGLESFATLSNGVKFQNPRFFRRDENELVKAQRKLSKTEKGTPERVKRRRAVQHIHQRIANRRKDFAHKLSHELVNSFGMISFEKLKQKDMLQNHCLAKSISDAAWNQLITYTTYKAENAGRIVVLVDPRNTSKMCSCCGTMVEKPLSVRVHSCPVCGLIIDRDENAANNILRLRLKSLCIVLEAPPFRLRE

SEQ ID NO: 43168 - protein, 641 aa, Ktedonobacterales sp.
MLYFTCYHYRRYQQLKAQSLSFPIRLPEAIQAEALRLLDASHGAINAIVCELWPQLDLFAADRRGPAWKQVEKHLITRNGHGSRQQRNEWESAGRILRAQATRKQIFETVVPLLTDALIRPADEKRPARKDHRAISDQVRALRTQLRDEGEDVDAFMAMTNVLEQACNVFLRTGTFPQTYSELQPVPVHSAGQITFAGDDGMLKGQTYRARIEHRLFCDLASHEERTNASLWLRLKAPDEQHKWAWGAWSVEIPLPEVVCGYLDQGATTQAPTLREVRGDDGQRLVVLDLILEVPAKYVSDLVQEKRILGFDWGVRSLITVSILEKPDVDGEPPRQMSRPVFLDTGALDGKQARLRREIDRLKSCKQRYDTLIEQAQQASKKQRIPLPPHFAEWQTRTEGYEKRIGQCWDMYARRNQEVAHLAANLLILLALLFDCRIICGENLTTLKTIGRGRGVRGRFRNWRNNTTVRGELWRVLKYKCYLAGIRTRTVEPRGTTHTCPRCHEPARTFASPASADRRKAIDWGAWLCCENPACGWNGARDYAASLNIAALGIAFLRTYCETGTYRGFRMTSQEVKPCSYIGQGATQLLLSQGFTTRPIKGKHVYYAGWSYSIRLCTSHPATTLAILSTSQLRKNVLRSA

SEQ ID NO: 43169 - protein, 402 aa, Xenorhabdus sp.
MKRRQAFKFQLRPNGQQERDMRRFAGACRFVFNRALALQNENHEAGNKYIPYTKMTALLTAWKANADTQWLQEAPSQPLQQSLKDLERAYKHFFQKHTSFPRFKKRGQGDAFRYPQGMKLDQENNRIFLPKLGWIRYRNSRGVEGVVKNVTVSLSCGQWYVSIQTEHEMPEVQHDSTTMVGLDAGITKLATLSDGTVFEPINSFKTSQRKLAILQRQLSRKVKFSAHWQKQKRSIQRLHSHIANIRQDYLHKVTTEISKNHAMIVIEDLKVSNMSKSAKGTAERHGRNVRAKAGLNQAILDQGWYEMRRQLEYKQLWRGGQVLAVPPAYTSQRCACCGHTAKENRQSQSQFDCIECGYTTNADINGARNILAAGHAVLACGGRVQSDRPSKQEPTEVSQASV

SEQ ID NO: 43170 - protein, 351 aa, Lactobacillus sp.
MVQAKRKKKQKTIPRNSELIDQLASEYYIKATPELDRAAEIAHKIYNAALYQLRQALFKRKGSIYYEGLDRIFKNKRNANELMLYGQMPTVQCAQQTIKEVAAVWKAWFCALQSYKIAPQKFTGRPRIPRYLKKSRRHTFYVTPQNARVKEVKSADGKDVVARYLIIHSLGLSIKLADGIKKVNRIAIKPLSNGYKLTVAYTPAANQKPYLPDNGRYIAIDPGVDNAFACVSNTGDKALLINGRAIKSVNQYYNKRMAKLKSLQAQYHQLESIINTKQGPKAVYGQTKSMQRLTDWRNAKIRQFAHKASKRIVDYALSCGANTIVIGKNKTWKRSVNMGKKNNQNFIGLPH

SEQ ID NO: 43171 - protein, 221 aa, unknown
  TnpB Polypeptide
VDVGVEKLLTTSDGKFFPNLRPYDKALKRLKISHRRISRKKFLSHNWFKVKTRLARAYEHLKNLRKDIYMKLGKYFAKHYDVVVIEDIQVKQLVDKSDKKLRMRLHDVAFHELKEIIRYQMEKYGKKFTLVNPAYTSKTCARCGYVKKDLTLADRVFITVYSSVLRCDWVADRDYNATLNILKRSGWEPPLVPVELYPLPVAKRYGQGGAMKQEASPFRAG

SEQ ID NO: 43172 - protein, 426 aa, Escherichia sp.
  misc_feature (10)..(42): Xaa can be any naturally occurring amino acid
  misc_feature (247)..(280): Xaa can be any naturally occurring amino acid
LSGLTKTSSXXXXXXXXXXXXXXXXXXXXXXXXXXXXXXXXXLVEWKNATETQWLKDSPSQPLQQSLKDLERAYKNFFRKRAAFPRFKKRGQNDAFRYPQGVKLDQENSRIFLPKLGWMRYRNSRQVTGVVKNVTVSQSCGKWYISIQTESEVSTPVHPSASMIGLDAGVAKLATLSDGTVFGPVNSFQKNQKTLARLQRQLSRKVKFSNNWQKQKRKIQRLHSRIANIRRDYLHKVTTTVSKNHAXXXXXXXXXXXXXXXXXXXXXXXXXXXXXXXXXXVSKNHAMIVIEDLKVSNMSKSAAGTVSQPGRNVRAKSGLNRSILDQGWYEMRRQLEYKQLWRGGQVLAVPPAYTSQRCACCGHTAKENRLSQSKFRCQVCGYTANADVNGARNILAAGHAVLACGEMVQSGRPLKQEPTEMIQATA

SEQ ID NO: 43173 - protein, 366 aa, unknown
  TnpB Polypeptide
MTIGKSKTAQHRESMVNATPQRTLVLPLDISPEQYGIFEGLADSYNRMWGSLVSWCDSNRSVNRTRMQKDNYARLRAEYPELPSQFVCIAMRDAAGAVRSWNSNHPKRRWNLKASRRKKTINYDLRVMSLRGNLLSLSVTHGEKRQRILLPDIPEWFDRRYPERKLNAAKLVLDPDGRNASVMLVYRLPQSTPIEHGDVLGVDLGQHSLTMDSRGGETSYSRMQGIRRRYAHNRKTLQEKGTRSARRRLKAMRHREERFIRDVNHRASKRLANTPNVSVIAFEDLAYIRRQARKGTKTPQHAQPVAVRPTARVHRLQGRKERRQNPNGRPRLHESEMQPLRIRGREKPQSREIRLPPLRAQRQRRP

SEQ ID NO: 43174 - protein, 420 aa, unknown
  TnpB Polypeptide
MLLTERILIKPSHSHYNQVRKLCRLTASVSNQALYYFRQNFFNHEQNKWPQIDKLVKLKHQDMYSAIPNAISQSVIKKIGTDFDAFWKAYRQWQQAPEKFKAKPKIPHYQKLKTAIQPAQGISIKDGQLIFPKKLQIEPLKIHCTKDQAVLAKADKATVKELRYVPHGSCFWLEIVYEQDKVLTEKDVNKRRIKLSQNNVFSIDLGINNLATLVSNKPGFHPVLFSGKPIKSLNQRFNKRKSKLQSSKHHQMMAHMAVKRFCQINDYFHKVSHKIIELCLTEDVGKIVIGINRGWKQKVNIGKQNNQKFASIPFQSLIDKITYKAKQYGIEVIEQEESYTSKADSLALDALPVYGKDKEKVTFLGKRKQRGLYQSKIGKLLNADVNGAINILRKVIGDDFVEGLIDRGAVYTPMRWNPAH

SEQ ID NO: 43175 - protein, 434 aa, unknown
  TnpB Polypeptide
MTTYKVKIKHYNHIFKQTVAIYRNAVDYLIDVCLKEWEDIEAVELSKERVNYVEKLIHQTKKNPNPKYDFNSKFYKFPSYLRRAVIQEAIGKVSSYHSNLKNWKLNPVGKEPSLPKAGFIYPTLYRDNMYNQLDTYQAEVKVFVRNTWDWVTIALRKSDVDYINKRCSNRKKCAPTLQKRGKEWFLDFPFEESVNLSDTDIFNQTIVAVDLGINNPATVTVMKSDGTILGRHFCRLNKEQYSLNHAVNRIKKAQQHGVKHMPRLWARAKGINHDISVKTAQSIADVAAYYNADTVVFEHLDKSGKKKGSKKQRLHLWRCKEVQAIVTDKVHHMGMHVNHICAWNTSKLAFDGSGFVERNIGGNYSICRFTTDKIYNCDLSASYNIGARYFIREILKSLTERKRLDIEAKVPQCSKRSTSTLSTLISLNAVLWSV

SEQ ID NO: 43176 - protein, 389 aa, unknown
  TnpB Polypeptide
MLTTYKIELKPTCNQAWLFDCSAGASRWAYNLFLDINKQRYQDGYWYMDAYEFSKWFNNEYLKENPDDAWIKKYYAKSTKQAFIDADRAMKRFFKNKHGYPKFRSFKRGQGSYYFCSNGKKQPIEFQRHRIKLSKIGWVRFKEFGYIPRDAVIKEGRVKQKANRYYVTCIVEVPDTKHPELNGNPVGIDLGIKEFVILSDKTIYPNKNKSNRVKQIRKRSKRIQKKESRQCLAFKARKQKEGKSATDLNLAKTQLKMQRLYQRLHNIQVDYQNKIVATVVRTKPQYVSIENLNVKGMMKNRHLAKAVAQEGFYNFRVKLIAKCQQLGIPVHLVNRFEPTSKTCHHCGLKKADLSLADRVYKCPNCHYVEDRDINAALNIRDTENFELAY

SEQ ID NO: 43177 - protein, 397 aa, unknown
  TnpB Polypeptide
MIVAHKIALDPNNVQATYFAKAAGVARFAYNWALAEWRRQYEAWKADPSQPKPTEAALRRQLNAIKREQFPWMLEVTKCAPQMAIIQLGDAFKNFFAGRAKYPKFRKKGVHDRFTLTNDQFSVEGSRIRIPHLGWVRMRESLRFAGKILSATISRVADRWFVSITVDTEDPPKRKAENQGIVGVDLGVSALATLSTGEIITGPKPHKALLDRLRRLSRSLSRKQRGSRNRQKAKAKLARLHARIANIRADAMHKLTTDLTRRFHTIGIENLNVRGMMRSRHLARSIADMGFFEFRRQLEYKAAMRGGQVVVADRFFPSSKTCSACGSIQQDMPLSVRQWICPDCGASHDRDLNAARNLATYAASSAVSACGGEGSGRALASAVKPAPTKQEVSFEPA

SEQ ID NO: 43178 - protein, 227 aa, unknown
  TnpB Polypeptide
  misc_feature (222)..(227): Xaa can be any naturally occurring amino acid
MKHTKTLKVRVRDRHRPLLNQMARSVNFVWNYVNELSHRSIKEQGVFLSAYDIQKYTQGAHKELGLHSHTVQKVGAEYVIRRKQFKKARLNWRKSGGARRSLGWVPINTGMAKWKNGQVYYNGHYFKVWDSYDLALYTFKSASFNEDARGRWYFNVVVEVEADMPAGQDKIGIDLGLKDTATCSDGTKLEAGRFYRDLESKLAVAQRAGKKKRAKNIHAKIXXXXXX

SEQ ID NO: 43179 - protein, 383 aa, unknown
  TnpB Polypeptide
VKLTLKIKLLPTDEQAKSLLQTIKEANKACNLISDIAWQQKAFQQFKLHNASYHTIKSATELSSQVIIRCISKVADAYKLDKKVKRTFKPLGSISYDSRILTYKPDNIVSIWSVGGRLKMPFVCHNPNYLPYIKGEADLLYRKGKFYLFQTVDVVEDDVKDVEEFIGVDFGLTDIAVTSDGTKHSAEWLNQYREKRQKVRGSIQRKGTKGRKKSCKRGCAKLLKRLKGKERTTATIQNHTIAKHIVQSAKEQGKGIAIEDLTNIRFTSKRRNKKFRTKLGRWSFGQLRSFLEYKAALNGVKLVVVEPAYTSKTCSICHHIGNRNNKSFKCNNCGHNEDADVNASKNIATLGRVVNHAGESDMYSCSVHYLGSKPIPSALDVGG

SEQ ID NO: 43180 - protein, 383 aa, unknown; identical to SEQ ID NO: 43179
  TnpB Polypeptide

SEQ ID NO: 43181 - protein, 249 aa, Methylococcaceae sp.
MHKSGAAQWLNGQIRFCGIYFKCWDSYGLSQYDFRSGSFSQDARGRWYFNIVVHVEIEERVSGNGQVGIDLGLKTTATCSNGDTLDRQNCYRNSEEKLGTAQRANKTKQIKNIHAKIKNRRADALHKFSNKIVKENSLIVVGNVSASGLAKTTMAKSVLDAGWAMLKVQLDYKSKGMQGVFMEVNEAYTTQACSCCGCISSSSPKGRRDLGIREWICAECGTTHDRDINAAKNILSLGHQRLAVGIPVL

SEQ ID NO: 43182 - protein, 478 aa, unknown
  TnpB Polypeptide
MRTVSSYGVELRKQNIPIRQTLDIYRSAVSCLIEIYARTWDELAVITEPKKRFNTAEHLVHTTKKIQARFDFDLRFPKMPSYLRRAAVQHALGSVSSYKTRLGLWKKTDQKGGGPKLVCDNHAMPVFYRDVMYREDTEEKDGAYLKLYDGHDWKWFRVSLSHTDMEYLRKNWAGKRAAAPVLEKRHRKYFLRFSYTEEVPLTKTPVKEQIICSVDLGINTDAVCTIMRADGTVLGRKFIDFPSEKDRMYRTLGRIRRFQREHGSAQAGERWAYTRRLNIELSRKIAGAVAEYAWENHADVIVFEYLEIRDITDEEISHMDRIFAGVDYGWYPDAFCYLRTYYDSAREKIYLIDELYVNKWSNSKTVDWIKKKGYDDYTMICDSAEPKSVNDFRDAGLPARGAIKGPGSIEYGFKFLQTKTIVIDPKRTPNAYKEITEYEYDRDKEGNVISGYPDGNDHAISALRYAYEPLFNRRGYSA

SEQ ID NO: 43183 - protein, 423 aa, unknown
  TnpB Polypeptide
MLKLYKYKLKPDNNQIILLNKHFGCIRFIYNYFLNERKKEYETNNQTLNYYDNTKALTELKHSNEYIWLNEICAQSLQQSLKHLDGAYNGFFKGRTKFPNFKSKHNKNSFCVPQAVKLINNKLYIRKFKGGIGVIIDRKFKGIIKQCTITKTPTNEYFVSILVETEHVKLPKTNKSIGIDLGLKDFAITSEGFKYKNNKYTKQYEKKLKKAQQHLSKKTKNSKKFEQQRLKVVKIYKKITNSRVDNLHKVSTDLIKKYDIICLEDLNIKGMSTRCKPKQDKNGKYLSNGQSAKSGLNKSISNASWGTFVEMLNYKANWNDKQIVKINRFYPSSKTCHICGYINQDLNLSIREWKCPKCGIVHDRDINAAKNILKEGQKILLNDLTNNIDNNKSSGTDDNRRGDQIRPVITGTIDETSKILSIS

SEQ ID NO: 43184 - protein, 423 aa, unknown; identical to SEQ ID NO: 43183
  TnpB Polypeptide

SEQ ID NO: 43185 - protein, 413 aa, unknown
  TnpB Polypeptide
MQLVEQHIIKQDNQYFKEIDNLCFLSKNLYNSCLYLIRQEFIHNKNNVLYELHHRMKNTEQYWALPAKVSSNVIIAVQHNFKSFFAALKVYNINPSKFTSKPKLPYYLDKENGRFFVSYTNQAISKKVFKKTNKIKLSKSNIEFKTKINDFNVIDCIRIIPKIGYYVIEVVSTIEDIPILLNNDKYSSIDLGVNNLATVVSNIKEIKPYIINGKPLKSINQYYNKKKACLQSILRIRNKKYGSKQLNKLNLKRKCKVDNYLHKASKIIINELINNNINTLIIGKNNYWKNESRLNKTNNQNFVQIPHSRFIDMLKYKCERRGINVMCREESYTSKASFLNLDYIPSYKKNDKTVYVFSGYREHRGIYKIKNSNIKINSDVNGAYNILRKAIPNAFANGIEGIGVYPEIINILK

SEQ ID NO: 43186 - protein, 413 aa, unknown; identical to SEQ ID NO: 43185
  TnpB Polypeptide

SEQ ID NO: 43187 - protein, 382 aa, unknown
  TnpB Polypeptide
MLKAYKYRIFPNQIQINLLANIFGQVRFVYNLGLETKICAYAGNKKNIDCFDLIKQIKELKDNECYWLKEAPSQALQMSLRNLDNSYTNFFKGKGFPKFKGKYARQSFQLPQGIHITKDNKQIFIPKLKYVGIDLDREFKGIIKTVTISKTVTNKYFVSILVENDIKIPNKKPIIDSTTIGIDLGIKDFAITSDGKKFENKDFFKSKQHQLRIEQRSLSRKVKGSNHYYRQKMVVALLHEKIKNQRQDYLHKISKSLIDNYDTICLEDLTVKNMVKNHCLARAISDMGWSEFKTMLEYKANWYGKNVITIGRFEPSSKICSCCGNINKNLTLNDREWTCSNCKTIHDRDVNAAINIKNFGLRNKSGVAQSDGIPCACSVEVN

SEQ ID NO: 43188 - protein, 382 aa, unknown; identical to SEQ ID NO: 43187
  TnpB Polypeptide

SEQ ID NO: 43189 - protein, 407 aa, unknown
  TnpB Polypeptide
MKLVEQHIIKPSSVYYNELYDLLYKCKNLYNKGLYVVRQHYFQYKDDNTVKYKYLNYYSLEKKLRTGNDVDYRSLPAPVAQQVLMMVDRNFKSFFSLLNKKNRGEYSEFVRIPKYLNKNGLFTAVFTTIAFSQKWIKQGVVKLPKQFSFTTRTNKQNIQQLRFIPKNGYIVLEIIYNKKEKNLMSDNGSYLGIDIGLDNLASCVSNNGSCFIINGRPLKSINQYYNKRLAYLKSKLKDNKHTSKQIRSLTNKRNNKIKDYLHKASRILINHVVSKGINTIIIGHNKCWKQEINIGKRNNQNFVSIPFNMFISMVSYKATLEGINVKIVEESYTSKCSFLDNERICKHESYEGRRIKRGLFKTSSGSIINADINGAFNIIRKSEKESFDVTMLPKGRGFWWNPVRIFV

SEQ ID NO: 43190 - protein, 413 aa, Natronomonas sp.
MEYSHRYRAYPTQEVAERLEHHLDVHRQLYNHVRWDYEQAPEDDKPSEYDQNNRLTDWKQRWPVFGELHSKAAQATVARFHRNLSNLRKKKEKGYNVGRLKRQALSDYRSVTYNQSGFDLDEKRGHDKYAYVRFSKIGWVKIRYSRPIPDHVTIKEVTFKKETTGEWFVSFGLETDDTNLPENPDVDSLNTSNSVGIDLGIQNYIHTSDGKTVDWLDLEDDYKRLRREQRKLSRKQKGSNNYEKQRRKVAKVKRHIKRKVLDYQHKITTCLVREYDAVFVEDLNVQSMIRGDGNARNKQDAAWRQFITLLEYKADLYGCHVVQVEARGTTKECASCGVETAKPIWVREHSCPSCGFETDRDANAAMNVLKRGFSELGLGWPESTPVETVTATDTPDFQRVSASHVLETGSLPS

SEQ ID NO: 43191 - protein, 374 aa, Enterococcus sp.
MKVLKAYKYRLYPTALQEEFIKKTFSCVRLVHNLLLQERIQLYKELKKTPDLKVKLPTPAQFKKEHPCLREVDSLALSNAQVYLDRAFKKFYREKSVGFPKLKQKKNAVRSYTTNNQSGTIKLIDKKYLKVPKLKSLIKIKMHRPVMGKIKSATISLTPSNKYFVSILCEEEIPTVEKTYSAVGITLGASEFAVLSNGRRIDNDKFTKDFEQRITREERKLLRRKEIAKLKGNELSQQKNYQKQKLKVAKMREKLMNQRVDFLNKITTEIVRKYDLICIEDIHQADFFRNNKLHRGISDVSWALFVSKLEYKATWYNKRLVKVTSCGESSEHSDNNALSKIFTQDINEKKGQKDPETAASIQVLIKGLRDTKNG

SEQ ID NO: 43192 - protein, 421 aa, Chloracidobacterium sp.
MNFPLPGLPAIPSLAHPAVGYKIRTMKAYKFKLKPSAKLIAIFDMWLRLLCELYNAAIQERRDAYRINGVCVGKKEQSAQLPDIKKERDDLARIHSQVIQETLKRVDLAFKNFFRRVKEKKEKAGFPRFRSHCRYDSFTYPQSGFKMDQKRKKLHLSKIGSVKLHLSRPIEGVIKTCTIKREADGWYVIFAVEENERKPVVVAPEDEVGIDVGLKSFAVLSTGEPIENPQLYRQAEASLKRAQRRVSRRRKGSHRRKKAARLLAKKHQTVARQRRDFHFKEAKKLVVRFRVIKFEDLMMGNLMKNHHLAKSICDAGWSQFISIAASKAEEAGGRVIVVNPAGTSSRCSRCGQKHKMPLHIRTYRCSSCGLVIDRDHNAAINIKERKGRAVLSGRRRVAVVEEPRTCRATDPESPTITGTRA

SEQ ID NO: 43193 - protein, 567 aa, Mycobacterium sp.
MARLKVPEGWCVQAFRFTLNPTQTQAASLARHFGARRKAFNWTVTALKADIKAWRADGTESAKPSLRVLRKRWNTVKDQVCVNAQTGQVWWPECSKEAYADGIAGAVDAYWNWQSCRAGKRAGKTVGVPRFKKKGRDADRVCFTTGAMRVEPDRRHLTLPVIGTIRTYENTRRVERLIAKGRARVLAITVRRNGTRLDASVRVLVQRPQQRRVALPDSRVGVDVGVRRLATVADAEGTVLEQVPNPRPLDAALRGLRRVSRARSRCTKGSRRYCERTTELSRLHRRVNDVRTHHLHVLTTRLAKTHGRIVVEGLDAAGMLRQKGLPGARARRRALSDAALATPRRHLSYKTGWYGSSLVVADRWFPSSKTCHACRHVQDIGWDEKWQCDGCSITHQRDDNAAINLARYEEPPSVVGPVGAAVKRGADRKTGPGPAPAGGLAAANTPNPSGAAIPAFKPLGGRELGAGMSAGLGQAQLVGSMSVPPTWQGSIPISMASSAMSGLGVPPNPVALTQAAGAAGGGMPMMLMPMSISGAGAGMPGGLMDRDGAGWHVTQARLTVIPRTGVG

SEQ ID NO: 43194 - protein, 388 aa, unknown
  TnpB Polypeptide
LLPTESWQPQQSSPNRSSYNTWHSPHQTRSWCTSVHNTNKSAGRKGKEPKLQASRSAMPTFYKDNMYEDNGDGTARLKLYHKNDWVWVKVRLRKQDIDYIREHWDKADASAPKLVKRDRRYALCFAFEETVAYGTKPLTDQTILAVDLGINTDAVCSVMRPDGTVLARKFIDFPSEKDRLNTQLGRARRGQRENGHRGGNRHMKKAVRINEDLSKKIAPAIVRYAVSVGADIIVMEHLDFIGQKPKHKKHRLHMWRNRDIQKSVMHQAHRNGIRVRFVNARNTSRLAFDGSGEVARNSTNMALCRFRNGKQYNCDLNASYNIGARYFIREYLKPIPETEWSLIVAKVPELERRTNCTLSTLFSLYAVLNCQSVSVSESWPHGGNESGA

SEQ ID NO: 43195 - protein, 314 aa, Fusobacterium sp.
LEKAYKFRFYPTKTQIKILNSTFGCVRYVYSHFLDLKQKLYKAEKKSMSYSECSKELTVLKKEKEWLKDIDKFSLQNSLKDLDKAYKNFFSGKGYPKFKSKKDNRKSYRTNYTNSNIEFLDKWIKVPKLGIKDFAITSDEAIIENPKYLQKSLNKLVILQRKLSRKPKGSSNRNKARIKVARLFEKISNQREDFLQKLSTMLIKKYDIICMEDLQVKNMVRNHKLARNIVDVSWSEFNRILSYKSKWYGRTIVRVDKFFASSQICNCCGYRNEEVKDLSIREWTCPVCRAVHNRDINAAKNILKEGLRILGISA

SEQ ID NO: 43196 - protein, 198 aa, Lactobacillus sp.
LHFLAACYDEAGKTLLYSGEKVLRTRRKYKKLRAELQSKGTKSAKLRLKQIGQRENSWMSDVNHCLTKTLIDHYGANTVFALEDLTDVRFATEQTAKDKRYEMVSWAFYQFEQFLTYKANLNSSIVVKVPAKYTSQRCPKCGRIRKENRDHKQHLYVCDRCGYKSNDDRLGAMNIQLLGTLYRSGEEAPQFNKQASAE

SEQ ID NO: 43197 - protein, 549 aa, unknown
  TnpB Polypeptide
MTTVKVPVRWDAMTDRQKTRLSRITSRDTRVIKAYLGVIERHERDLLFRKSKRRLDAGKLDELTLRTDTRAVPHDFKDRFPNISTNELQECRETAIAMWKVYLALGRKRPLQARGYSSKKLPRHMFTRMFKFTYTPESTIKHWLILRDSLDSVREGRKTHDRLAVPLSPSSYHLNHLRSGEVKSIQIVKDRNRKWWVLFKVKVRLEAVDGRDRPPAVIGIDLGIKKAVCSAVLTQKGLRHIRYWTDREKARHIERYDKMVASLQQKRDTSPSDDVTRRLRTIRSRRANISFDHDRVLVKRLAEHILELSQEYDLYVAIGRLKGIRNRARKGDGKGRRFRGMISRWSFARITNSLQHKLSANGFDPKRVRAVSEAWTSIKCHKCGSKGYRPKQSYFLCHTCGYQDNADKNAAINIALRLIRLIPSLKGENGLGTWLPPVRRASPKTRRTRSKGVSSAPEKPPASTAGSSVADCTDQTSLEGPASSTDRAMPKTMEKPSAIVGSGDHDSTVQRTEATSVGRSHAPVSHGKTRAHPAGEVLPVAGDGSHEEG

SEQ ID NO: 43198 - protein, 308 aa, Lactobacillus sp.
  misc_feature (300)..(303): Xaa can be any naturally occurring amino acid
MVLKGIKLRIYPSPAQQLKIKLNFGCNRFVWNQMLNMMRNRHENNPRAPFLNAFALNSLLPALKREYPWLKEAESTSLQSTCHDLVAAFQKFFKETNVGFPKFKSRKFPKQSYNVKFSGTSLAIKGERTIRIPKVGLMPFRAGRKITGQLKNATIKLSTTGKYYAVLLVETEVGSLVKTGQMVGIDLGVADLMITSDGQKKPTIRFDKLLAKKKYYWEKRLARRRHQAQKEIAWDHHNQVPEARELSDFKNYQKAKLMVAKYNEKIANQRQNYLHQLTIQLVKQYDVIKIEDLKTKNLLXXXXQPVLA

SEQ ID NO: 43199 - protein, 368 aa, unknown
  TnpB Polypeptide
MKLVATIKVKIKHNKELLDMSNTFLQAVQYSIDKGFEAKVSNRFKLHHLVYKDLRQWLPADFSCEAIAKASENLKAVKLKKKPIMKSCPISFNRNLFTFSFDKVRIATFTPRQRKNIAINIPEYYWKYLDWRYQTLEIIKDRKGRLFFHITFSRDVNTTTSCRNEKIVGVDVGVNNLAVTSDGEVFSGYKTKIMQYQYLRKKLQRKGTKSAKRKLKAISGRQKRYMRGVNHIISKEIVASANTIVLENLKGIRKSRNKYSGKRLNRWLNSWSFYQLQGFIKYKAEREGKRVIFVSPYMTSQTCSNCLKIGSRYFDSFFCSHCGFSSQSDFNASCNLRRLHVTKPNVSNGEGKGQLTTEPEFRDKSPLL

SEQ ID NO: 43200 - protein, 464 aa, unknown
  TnpB Polypeptide
VHVIPLAVHLHQPRLKIRAYLAEDTAQPLDSVFIEDLPAVFGYKRPNARASEKHSTHNGFVVRLQAFRYELRPDGKQASNMRRFAGSRRFVYNRALALQKERYQRGEKKLNYAQLCRELTAWRNSAETPWLAEAPVHVLQQSLRDLDRAYTNFFQGCADFPRFHKKGQRESFRYPDPKQFRLEQGNNRIFLPKLGWVRYRNSREAVGLPKNVTVSLSVGRWFGSIQTEREVETPTPPSISEVGIDLGVVNFAALSTRETIAPVNARATQQKRLARYQRMMARRTKFGKNWCKAKAKVQRVQRKIADTRRDFLHKASTTISRNHAVVYLEDLEVKNLSASASGTKQQPGRNVKAKSGLNRAILDQGWGEFRRQLGYKLAWRGGALVAVPPHYTSQTCPNCGHVSAENRQTRAIFCCVRCGYVDHADIVGAINVLRAGQARRACQANGAVMPPATGTRRREALCAP

SEQ ID NO: 43201 - protein, 384 aa, Bacillus sp.
  misc_feature (258)..(295): Xaa can be any naturally occurring amino acid
MLRSYKYRIYPNKEQQMFFSKTFGCVRFVYNKMLADRLKSYQESQDKLDKSVTYPTPAQYKAEFPFLKEVDSLALANAQMNLNKAYANFFRDKSVGFPKFKSKKDNHRSYTTNNQKGTVYIESGYIKLPKLKTLVRIKQHRQFFGLIKSTTVSQTPTGKYFVSILVEENVQLFPKVDAKVGIDVGLKDFAILSNGKKYENPKWLRKAERRLALLQRSLSRKKKGSNNRNKARLQVARLHEKIANQRNDFLHKISNEIXXXXXXXXXXXXXXXXXXXXXXXXXXXXXXXXXXXXXXMQKNHKLAKAISEVSWAKFREHLDYKAIWKGRDLIVAPKNYASSQLCSCCGYKNKEVKNLSLREWTCPECNSHHDRDVNASINLLKLAT

SEQ ID NO: 43202 - protein, 420 aa, Cyanobacteria sp.
  misc_feature (372)..(385): Xaa can be any naturally occurring amino acid
MLVFEAKLEGKKQQYERLDEAIRTARFIRNSCIKYWMDNKGIGRYELSAYCKVLSHEFPWASSLNSMARQASAERAWVSIARFYDNCKKKIKKKGFPRFKKHQTHGSVEYKTCGWKLSEDRRTIAFTDGFKAGSFKLWGTRDLHFYQLEQIKRVRVVRRADGYYVQFCLDVERIEKREPTGKTIGLDVGLTHFYTDSDGQTVENPRHLRKSEKALKRLGRRLSKTLYGSKNRDKIRNRLSRKHLKVSRQRKDFAVKLARCVIGSNDLVAYEDLQVRNMVKNRRLAKSISDAAWSAFRNWLEYFGKVFGVATVAVPPHYTSQNCSKCGEVVKKSLSTRTHKCQHCGFVLDRDWNAAINILEIALRTVGHTGTXXXXXXXXXXXXXXSRLAERGSPNSDVWNLRAFTPERMSIDICDPKESL

SEQ ID NO: 43203 - protein, 352 aa, unknown
  TnpB Polypeptide
MIARILKLKLTKTQETQLNQWLWNLTGVYNWAIKKIEHDANDKIYHSTFDFVNMTANHSKKMGIPSHTLHGVSSQACNAWQRCFKKLANKPHLKGFRNKLNSIPFPDPLKPPKDNKIGIPGIGKVRYHKQDLPEAKIKCGRMVKRASGWYLCLWLDTEHKFPVKQTDKAVGIDPGFDTLLTLSDGTKIENPRELRKGSRRLEQAQRSCKKKLVARIQERQANRRRDRNHKISRKLVENYKTIYYSDDNFKAMAKRFGKSISEAALGNLIGMTTYKCRIGGRKIVPINSFRTTMTCSACGALTGPTGFAGLKVRYWVCSACGAHHDRDINSAKVVFNVGVGTTHERTAIQKIA

SEQ ID NO: 43204 - protein, 403 aa, unknown
  TnpB Polypeptide
VNILCAFKTELDLNNIQKTACARHAGAARWAYNWGLARKIDAYQNKEKVPTAIDLHRELNALKKGELAWMYEVSKCAPQEALRNLDQAYAHFFRRMKEKKAGKKIEVGFPKFKSKKNGLGSFRLTGAIHIFEHAIQLPRLGRLRLKERGYLPVEGVHILSATVSERAGRWFVSVQVEMNQPEPLETDKPVAGVDLGIMALATVSDGTKIENPHALKNDLSKIRRLQRMVSRRQKGSANREKARQKLAKAHMRVANIRKNALHQTTSLLARTKSAVVLEDLNVNGMVKNHHLAQAIVDVGFHEFRRQLVYKGQWYGCKIILAPRFYPSTKRCSKCGHIKGEMGLSERVYTCDHCGHMIDRDLNAAINLKKLTTGSSPESYACGESVRPGFQAVLVEAGTEHRST

SEQ ID NO: 43205 - protein, 495 aa, Escherichia sp.
  misc_feature (318)..(412): Xaa can be any naturally occurring amino acid
  misc_feature (472)..(475): Xaa can be any naturally occurring amino acid
VKRLQAFKFQLRPGGQQEREMRRFAGACRFVFNRALALQNENHEAGNKYIPYGKMASWLVEWKNATETQWLKDAPSQPLQQSLKDLEWAYKNFFQKRAAFPRFKKRGQNDAFRYPQGVKLDQENSRIFLPKLGWMRYRNSRQVTGVVKNVTVSQSCGKWYISIQTENEVSTPVHPSALMVGLDAGVAKLATLSDGTVFGPVNSFQKNQKTLARLQRQLSRKVKFSNNWQKQKRKIQRLHSCIANIRRDYLHKVTTTVSKNHAMIVIEDLKVSNMSKSAAGTVSQPGRNVRAKSGLNRSILDQGWYEMRRQLEYKQLWXXXXXXXXXXXXXXXXXXXXXXXXXXXXXXXXXXXXXXXXXXXXXXXXXXXXXXXXXXXXXXXXXXXXXXXXXXXXXXXXXXXXXXXXXXXXXXXTSQRCACCGHTAKENRLSQSKFRCLVCGYTANADVNGARNILAAGHAVLACGEMVQSGRXXXXHKPALRVLWSYSERKSPVTK

SEQ ID NO: 43206 - protein, 305 aa, unknown
  TnpB Polypeptide
MPVLRIRTFSRVCKNSQDSSPERDQCRSSIRTTLRYDSVIPTLSLKVFLPAGKQISKKKNWVRLAEHGRIPTDAKYMNPRISFDGLNWWISVCVAFPDCKKNLNNDGIGIDLGIKDLAICSDGNTYKNINKSQVVKKLEKCRRRLQRRVSRKYEKNKKGVSYCKTKNVIKNEKRLLKVNHRLTNIRKNYLNQTTSEIVNRKPRFICIEDLNVSGMMKNRHLSKAVQNQGFFEFRKQLEYKCNNNGIQLIVADRFYPSSKLCSCCGNIKKDLKLSDRIYKCECGNVINRDFQASLNLKAYGEKFAS

SEQ ID NO: 43207 - protein, 370 aa, unknown
  TnpB Polypeptide
MLKVYKFRLYPTAEQKTSIEKHIGSCRFVYNWALAEKIKTYEQTNHSISQFDLNKKITILKEEKPWLTEVNSQSLQGMTRNLESAFTKFFREKTGFPNFKSKKNPIQSFPIPQHYTVDFDSEIIKLPKIGKVKAVIHRQFEGILKVATLSKSCTGKYYISILVEDNKEAPAKQKFTEATTIGLDVGITDFAVLSNGEKVENPKYLKISLQTLKVLQKQVSRKVKGSNRRRKAIIRLAKLHEKVTNQRNDFQNKLSFRLISENQAISLENLNVKGMVKNHCLAQAISDASWSSFVTKVEYKAQWFGKTVLRIGRFEPSSKICNICGFYKNDLTLKIREWCCPVCGTNHDRDVNAAINIKKFALQSQNLVVI

SEQ ID NO: 43208 - protein, 216 aa, Microcystis sp.
MEKAYSFRFYLTPKQESLLRRTLGCVRLVYNKALHVRTQAWYERQERVGYAETSSMLTDWKKQEELEFLNEVSCVPLQQGLRHLQTAFTNFFAGRNKYPNFKKKHQGGSAEFTKSAFKFKDKQIYLAKCTEPLPIRWSRQIPESCEPSTVTVRLHPSGRWHISIRFDDPTIKPLPVTDKAIGIDLGISSLVITSDGDKVSNPKHFKKQLSETAKSI

SEQ ID NO: 43209 - protein, 199 aa, Microcystis sp.
MAIKYLIPSILKSNYRRLRRASKSLSRKQKGSKNREKARIEVARIHAQITDSRKDHLHKLTTQLVRENQTIVVENLAVKNMVKNPKLSQAISDVSWGEITRQLAYKCRWYGRNYIEIDRWFPSSKRCSNCGYIALEMPLNVREWDCPDCGTHHDRDVNASKNILAAGLAVSVCRATIRPEQSKSVKAGAETPQGKEAET

SEQ ID NO: 43210 - protein, 407 aa, Alloactinosynnema sp.
LSVVVVRLIGMSRFRLQPTPAQERVFLEHCGHARFVWNLAVEQHAHWRPGRRAAPGFVEQARQLTQARAANPWLAAGSVIVQQQALRDFAQAVANFFGRTHRRPTWRLRGRSEGFRIVAVKPGDVRRVSRKVGEVRVPKVGWVRFRWSRVIASGVKSYRITRDRAGRWHVAFAVVPEPIAGPGTGSVVGVDRGVTVSAALSTGELLSVATLRGPEKARLLRLQRKLARAKRGSTRRGKVKVAIAKLKARETDRRKDWVEKTSTRLARTFDVIAVENLKITNMTRSAKGTIDAPGRGVRQKAGLNRGILANGWGQLVTRLEHKAAGRVVEVDPRFTSQRCSTCGIVDREARESQAAYRCRSCGFACNADVNAALNIRSAAGHAVTARGGPPLGEPMNREPQRDLLLVR

SEQ ID NO: 43211 - protein, 463 aa, Alloactinosynnema sp.
MSIVVQAYRFALDPTAAQVAVFRSHCGAQRYAYNWGLALIKAALDQRRAEMSYGVADAEPTQSVTWSAYGLRKRWNQAKGVVAPWWAENSKEAYSSGLANLAAALGNWNASKKGARKGPKVRFPRFKGKRAGLSCRFTTGAFGLVDGDRRHVKLPRVGVIRTLESTRKLARHVSRGTARIRSATVTHQGGRWFCSFSVEIDRHDPAPARSNFVVGVDLGVTSLAVLSTGEVIPNPRHLDVALRRLRRSQRQAARRTGPDRRTLRAPSVRWRKTQARIARVHTAVADARRDGLHKLSTHLVRTHSVIVVEDLNVAGMLRNRRLARHIAGAAMGELRRQIEYKTGWAGGRVHLADRWYPSSKTCSDCGAVKAKPRLSVRTYNCDQCGHTLDRDLNAARNLAQLVAEIAGGMSSPSCGATRNEPDGNPCQTRTRRATGIATGRPGHQAGPTPHRKVAAHDTLSHVS

SEQ ID NO: 43212 - protein, 410 aa, Alloactinosynnema sp.
VQLRYNYRVYPDAAQRESLARAFGCARVVFNDGLRARQEARAGDQRYVSDGDLSKQVITRAKLTPERAWLGGVSSVVLQQALADLNAAYRNLFASITGKRKGRTVAPPRFRSRKDSRQAIRFTANARFKVLDNGRLRLPKIGDLEVRWSRSLAAAPSSVTVIRDAAGRYFASFVVQSADEPLPHVEAEVGIDLGLTHFAVLSDGTKTTAPKFLRRASRKLRRLQQDLSRKQRGSNNRRKAAVKVARAHARVADTRRDWLHKRSTEIIRDNQAVYVEDLCVVGLGRTRLAKSVHDAGWARFTAMLEYKAARHGRTFARVDRFFPSTRMCSDCGHINDKMALDIRSWDCPCGSHHDRDVNAARNILAAGRADRLNDRGARVGPPAMVAPRGEAVIHPDAACSTRSVEGLSTF

SEQ ID NO: 43213 - protein, 453 aa, unknown
  TnpB Polypeptide
MQQIITAKLKLLTTTDQFQALRATQLAYRDALNAVSHYAFEHGKTSSTITLHKGMYAELRTCYHLPSQLACSVERQVAATYKGLWTKLKKNAEHRRKKITKKRFQGLDKPPKYSSPTVQYTYERDYTFQRNQQVSIGTLNGRVSIPYCGYDEHLALIGHGASIGDAKLWYDKARKTFYLLVSLEIDVPEPTSEQLSEVVGVDVGIRYLAVTSTSTGKATFHSGKRVRHQANHYARLRKRLQQKGTRGAKRRLRRIEQRERRLKAQANHQISKQIIKEHPHALLGLEQLTDIRERTKRRKRKRKKNGKGTERVSVKARKANRVYSQWSFAQLHALIRYKAVLSGSQAIKVDADYTSKACPVCGHTADENRPHKGLLFVCQNPNCGYTLHADLVGARNITMRTLVLRQDWSTTGHLSLAPDASDSEAKAARLQRYAELRWSPDVTSLRSLTGGAN

SEQ ID NO: 43214 - protein, 547 aa, unknown
  TnpB Polypeptide
MILQSQYSKSFLSDHLTESKYSELRMQAMSLNVIRNELSLKVSADIMKYLKMSKIDFQKLMLPSIKDRIHSNFTKQLCDDVLTAYQNRFDAIKNKMQFERVKSIEFTFYKRDNRNKKKGDPKGLVRKTESTPLTKSLSFLARYGHEGITQYLESAVLSPDTEVSKRKFYAQTLNYTRRFGFKRMMNLALSKRKRILNKYKTPVEFKSLTFRGRSRLSTDIVSYNRNFNSVIKAFICFGWTERNATLKIPVLYSKKWHGAMNQYTNGTDTSYRVFFNELNKTVRVILSHEGDREIPDAGNADTYVGFDANSKHNQLTDSKGITVDYDREVLDALILELLKTDKLKSIDPEYKEGKRREIKIETLRRKVKHRTERNCAGICKHMVLNKENHAVFEDLNNSFGKSFIFSGDINYNRLVKEMHLSSIKDEFEHIARKYKISVSTVHPEYTSIQCAKCGYIDEENRKNQEEFECLECGHKDNADHNAAVNIQRRVSEAVQRDCLLSASKIGNGSYSPKALPRWRVKELLLSLRYRVYPVESGTLREPVRLCA

SEQ ID NO: 43215 - protein, 414 aa, Moorea sp.
MYLTQKNQIRGLSKKQYLALQTLCRLSKNLYNVGLYSVRQFFFTERGYLKYESNYHRVKSNENYRLLNTDIAQQTLKVVDRSFKSFFKLIETAKSRNYQFNKISIPQYLPKDGYFPLIMPRVKIKDGVFRVPMSREFKAEHGEIWIPFPRRLEGKRLKEIRIHPRHNARWFQVEFITEQPIEPQSVDPNQAMSIDLGLNNLATCTMTTGASLIVDGKKLKSINQWYNKLNGKLQSIKDQQGIKALTNRQSKLLRVRNNQVRDYLNKAARLIINQCITQKIGTLIVGVNPGWKQEISLGKRNNQSFVQIPHYNLRQKLQGLCQRYGIEYREQEESYTSKASSLDDDEIPTYNADNPVKYTFSGKRVQRGLYRSGGGHLVNADCNGAWNIGKKSKHNGFTGVSRGCLAQPTRIYLL

SEQ ID NO: 43216 - protein, 382 aa, Bacillus sp.
  misc_feature (318)..(333): Xaa can be any naturally occurring amino acid
MLLSQKYEIFPTKEQKETLDGWLQYCRQAYNSAFLDKQRKYKENKRLYTRSDMQKQQVIDKKRYPFLKEVPSQPLQEVFLRLKKAYDGFFRGDVGYPKLKKYKDYNSFTFPQFGFKPNEKHRFAMSFAENGKLYNKRLGEMDIHLHRPIEGTIKQLIIKRQSKRWYAIFSVERQVVPSSITIENAIGIDVGLNKYAALSNETVFENPRFLLQKEKLLKKAQRNLSKKKKGSANYKKQVERIRSLHEKVANQRKDFLHKLSYHLTQVYSVICIENLDIRNMVRNRKVSKSISDAGWGAFRRMLLYKCKKFGGLLVKVDXXXXXXXXXXXXXXXXRVLRRGHSLESGKQAEEILRNQRADVIAIGRPLLVNPFWSVNASKSLKV

SEQ ID NO: 43217 - protein, 319 aa, Bacillus sp.
MTMLLSQKYEIFPTKEQKETLDGWLQYCRQAYNSAFLDKQRKYKENKRLYTRSDMQKQQVIDKKRYPFLKEVPSQPLQEVFLRLKKAYDGFFRGDVGYPKLKKYKDYNSFTFPQFGFKPNEKHRFAMSFAENGKLYNKRLGEMDIHLHRPIEGTIKQLIIKRQSKRWYAIFSVERQVVPSSITIENAIGIDVGLNKYAALSNETVFENPRFLLQKEKLLKKAQRNLSKKKKGSANYKKQVERIRSLHEKVANQRKDFLHKLSYHLTQVYSVICIENLDIRNMVRNRKVSKSISDAGWGAFRRMLLYKCKKFGGLLVKVD

SEQ ID NO: 43218 - protein, 418 aa, unknown
  TnpB Polypeptide
MRRKKKETENLIPTITRAHKIRIYPNKHNQEVFQRYYDYQRSVWNRAIDERNAQYKIYKEMKATGLYTQKELNKNYFPNTNNLRKMEKFDWEANFYCLVREIQFDNLCQAWNNYFNPNMPNHKKPKYKKKKAVESHKILSLRKVRTKGKWLFLPKSRYSKHEYRFTKIKMAESLKFNGRITDDFTVSVENNKWYVTITVETPLEAKSAISKKSTGIDVNVGSIDYLKKNELEKEYGKFYLLPKSLLRQYDKIKFYSRVISKKRNKNPYYKYSKSYHETIIKLNNAYTKAYNIQEANLNNIVKYFFDNYNRIVIEDLDVNSMKMNKRLCKSLHRNAFGRFKRKMIEKTGEYNVEFILADRFFPSTQTCSECGHVKTGDEKLFLWGDKYGNDHNTYVCYNCGTIQDRTENAILNLNYYGK

SEQ ID NO: 43219 - protein, 411 aa, unknown
  TnpB Polypeptide
MRVIVPGTIHQGNFVALKQLMRDWSSCVRYAYQRIHRDGLTGNAIKIACKPIYMKKLNARYIADAVLKAQTIKKDHVIFGGKKRWRDLLSGLLPKKEWQERRDSELYSRGERSKKGNSNIRVLNTPEGYKLRIGLPGPREFLMFDLYIPEGRKNNKKNYKEMLDLYRDCYDVRINNKAGKFQVSIGLEIPDVKPIYLCSNGVIGVDTNPDGLAVVEVGKDGNLIKHEYLECDRLQFAQHDKRKNDIEALALQIVNKAILANKGIVIEDLKFNDGKRGSRKFNRMRHNFIYSQLLLAIERRAVKDGVEIRKINPAFTSIAGILKYQEQYSLNRHTAAALVIGRRGMGIMERVKVKLELGENKKLNLEGKGFKIALTAKAYAYFRHLYRVVEMKLPAVTPPCLTPGLGNYGTG

SEQ ID NO: 43220 - protein, 383 aa, Streptosporangium sp.
MKLVVQVKLLPDAATETALRETLTLCNRAANHASRRAFDTGIKGKTSLQRLAYGDLKAMGLSAQSAIHVARKAAGAYATLKANLKAGNHGPNGSTRRTKVESKPIRFRKDAAQPYDDRCLSWQYDARTISIWTTRGRCGRIPFACSPGQMKLLTAYRKGESDLVLRGGSWYLYATCEVPEPETFEPDAFLGVDLGIANIATTSDGIVHAGRHLNQVRHRNRRLRKRLQSKGTKAARRLLRKISGREARFAADTNHRISKTIVTEAQRTSRGVALEDLGGIRERVRLRKPQRVTLHSWSFHQLGSFITYKAARAGVPVVYVDAAHTSQGCSACGHISKKNRPDQATFRCMSCGFAEHADVNAARNIAARGEAGWAVSHAADDAA

SEQ ID NO: 43221 - protein, 398 aa, Bacillus sp.
MSVGVSLRFLYNEGIIQESEGQSMLVNKSYKFRIYPNKRQEILIAKTIGCSRFVFNRFLALWNDTYKETGKGLTYHSCSAELTQLKKQEDTLWLQEVDSIALQSTLKNLSDAFSRFFKKQNDLPRFKSKQNKIQSYTTKQTNGNIAVIDNRIKLPKLGIVKFAKSREVKGRMLSATVRRNPSGKYFVSLLVETDVQELPKTGSSVGIDVGLKDFAILSNGNTYKNPKFFRTLEKKLVEAQRILSRRIKGSSNWNKQRMKVARIHEHITNARKDYLDKISTELIKNHDVIGIEDLQVSNMLKNGKLAKAISEVSWSQFRNMLEYKARWYGKQVVVVSKTFASSQLCSNCGHQNKDVKNLNLREWDCPSCGTHHDRDVNAGLNLRNEAIRLLTVGTTGIA

SEQ ID NO: 43222 - protein, 434 aa, unknown
  TnpB Polypeptide
MPYFINLLLAPFFKIISKFSDIFKGIILKTLYNPYMDVMIRTVKLRLQISPKEILPTIKAYTKAYNFVCQKGWKDNDRNGVSLHHKTYKKCRKYLTADLTCSARTKAVESLKSVHTLQTKEIKRAKGQERKPKIFSCPESKQTSVRYNDKTFTISFDKNIVSLQTTKKRIKTSFIVPDYFKQYLTWRRRSAELFIKDDKVFLHVSFEKPAEPVVLNNKFIGVDRGIKKITVTSDKRFFGGGKVKQVSKRYQKLRSTLQKKKHSGKRHLAKIRSKENRFRRDVNHCVSKQIVNSLEEGTTIILEKLTDINKAVKKKRRKTKKDRQHRREHSSWSYYQLEEFIKYKAEFRGIKVDYVDARYTSQKCSKCGHTTKSNRTTQSSFKCVECGYQLNADLNASFNISQNYQDATSYLDRAPQQALEVNPPSVSDRICSPS

SEQ ID NO: 43223 - protein, 418 aa, unknown
  TnpB Polypeptide
MGVLVSYSMRGEEPVVIEALKVRALPEGSYDHLLEFLRLYRVALQMVVDRVWSISGKLSKKKLHKLFYNNLVSMGFRAHHAKEVYVYAKSLVDSARSNGGRKPVLRKLSARIDKYDYRLDLGSMTLTLKLHNGYEARLRLVTSRERVEKFRGWGNYELVVKYEDGEFWVSIYFKRAIKSLKPRTVMSIDLNFDNITIAIFTLDGRLVKLKRFKTPHRKILTHKIWIERIQKRYPRSWRFIKGVRKAIERHGERIKNISWDYSHRVGDLVAELALKYYSVIVLEDLDELRENNKKGREFNKKLGLWFYRRIQFCVEYEARERNLEAIKINPKATSSKCPRCGRKLAEYGYKVLRCRKCGFIGDRDVIATINLYKKYVSRYSRCGVPGVALNTPKPDENPSGMQGNRDEAMKHIKLYEPI

SEQ ID NO: 43224 - protein, 307 aa, unknown
  TnpB Polypeptide
VSLATVTGRVECEYDLPDNPDDTPHGEYLLNENYDFATSTVHYDSEADEFYLHAAMERELDVDRPEKAEHSRVLGVDCNVDDHIAVTSTGRFVGNADSLTHKRREFEKRRASLQQTGTRSAHLSFQRIGDRFGRWSEDYLHHCSKEIVGEAKRHGCTHVAFEDLEQIRDRISDGKKFQQWAFRELQQQTKHKAELAGIVVETVDPSYTSKQCSKCGTTLDENRDGQHFVCLDCSYTANADYNAAKNVARKLALQLQRGQKSPAGGAFCQYALKSGTMTVNATEVASDTPVSAERESTDKPTASAVGS

SEQ ID NO: 43225 - protein, 265 aa, Aeromonadales sp.
VELYKLALASGPTRCEWREITEPDPDNSVGIDMGSRFFATLSDGTQLERFNKHLDGIDRRISLLHKKLDRSLPGSSNRAKLVKKLALMYKRKSDIKRDRMHKYSTKIVREHDVIVAEDLQIKNITKSAKGTVHKPGKNIKVKSTLNRMNLNESWGEFFRQVGYKMKLKGGVFVQVHPKNTSRACPKCGCISKKNRPSQPVFKCVSCGYSANADVNAACNILRAGRLLMALQGSKNLLDPANNQRSTDARASTKIRDQSSDQAPQK

SEQ ID NO: 43226 - protein, 646 aa, unknown
  TnpB Polypeptide
LHCYSFHGIIPNNNYVYKLKINLTYSVNNKLIPDFYSEVLGYYGLSAKNIKNSALFIINNIFSSYSYNKDSDSYFLKNNLHDNQQEIFEIINSTINHLNKKLKIKFNQNMAKFIHQKEINTNTNNSNNPKIKLPKLVQFNLYSEIIDSKTYYQILDKSLLENVIKHKEKVKPEYKDYTIVHSHLAQSVLQKLCDEFSHYFKAVKKYSANKENFTGRPQQPNYKSKTSAISFDISIQRFSKQGKILTINKNHKVYKDYDKTKLIEQELIANFNSFNLLESINKDIENKNLTGRLIQIRVIPGKYKQKPKIEYVLSFDKELKGFYPDLLQKSQNEKNKDFFKLKDKEKLSLIKDYFNHDYVKVNPNNPIPYFMGIDCGLVNFASVSIYNQHRDLNYVVSGRTLKNKIIKIDTKLDQKKSNLTTEEIKAIQSKKDKNQQLTRVELTQLKQFHKDLSIDPILIEFQLRKANITNDFVHKLSKGLIQDCLNKEIKVIIVGKNKGQKNEINLGSKTNRAMYNFPHARFIEILKYKAMLNNILVVETEESYTSKTSFIDNEDLAEYNKTTQGMKSQLSGKRVNQVFITKNKIKLHADINGSFNIVRKVLKTFQYDKEKMSLSYNLVELNLQGKNKFYAFCGPLAKSHTGFYPL

SEQ ID NO: 43227 - protein, 384 aa, unknown
  TnpB Polypeptide
MRTYNVKLKFDKQDDYNNLLESLKLNQAAWNIISEERFAMTGGRLKILHDKCYKKVKQKIPNIPSQFIIKAEQDVIATYKTIKSNKHKLDSPATKKNLSIQLDKRIYKWIDKSKLKITTLDKQAVVSFVIYDKLKKLDFSKLKDPKLFFRNGCFYLSLIFDDNLPFVDNNNVMGVDLGLKRLISTSEGDIIKGNEFNKHKRKIRWNKRKLQSKKKSHSARTKHKKLRRREANFSRNYIHNVTKKVIQTSKANTFVIEDLSKIKSKNKGKKFNNRLSQLPFFAVRSILTYKAQLYGKKVETVNPAYTSQIDHRGLVGGKRKGCRYYGSDNVVLDADVNAAINIANRYVVDKNLQQHSVSCCKALDGQVNVNSPIVGNFSGKPLWL

SEQ ID NO: 43228 - protein, 403 aa, unknown
  TnpB Polypeptide
MCLNIIKYTQQKKGCDLYIKAYKTEINPTPEQIIKINKTIGTCRFIYNFYMAHNKEIYEKEKRFVSGYEFSKWLNNEFIPNNIEYKWIKEVSSKAIKQSIMNAETAFKRFFKGLSKFPRFKKKKVQDVKVYLPKNNKTDWNIERHRVKIPTFGFVKLKEKGYIPINSNVKSGTISYKAGRYYVSILIDNKVNINNNLSRTDGIGIDLGIKEFAIISNGKVKKNINKTVRVKRLEKKLKREQKRLSKKYNNKKKRGEESVTKSANIDKQILKIQKIYQRLVNIRTDYINQIVSELVKSKPKFITIEDLNVRSMMKNRHLSKAIQQQNFYSFRLKLQNKCKQFKIELRVVDRFYPSSKLCSNCGGIKKNLKLSDRVYICNECGIVIDRDLNAAINLRNAKKYTIT

SEQ ID NO: 43229 - protein, 478 aa, unknown
  TnpB Polypeptide
MLFEEREVFFSKNKSAKDELDSKIHTKLMELCKNNTYVNTIKRDNQTRLKQQKTWFKKRKRYMKNQLIEIKNKIDFIKSVNKKDRRLRGLYARLSSVQNRLHNLELKPVVFGTKRSFRERIKGNISRQEFKLKRDASFSCEGKKQYGTVNHGIKVFPNQTIRIKTFHREKEKKYLFIPFSVNQKQNYWYQEILHEKKYMGTIKRKIIKGELRFFAYISYDIPEAETHYNFKNGAIGLDFNYDFVTLSHIDKDGNLKSYHKISFRNLHTLRKDSRKNYISYKMDKVINYCINKKKGLVIEDLSFHQEFSYNKKRNRKLSNLKITALDLLERKCLKRGIAIRKVHPHYTSLIGKYKYSRSYNLSNHILASYVIARRGLGFKESLPAIYMWLLSQVGDIIEPRLKKGSPYYKWSQIHDFFKQSGITSFKTSEIVSIMLLVKDVLNSATSEQPDNLKVGLSESGKIENYYKFWKFIEITNFL

SEQ ID NO: 43230 - protein, 390 aa, unknown
  TnpB Polypeptide
MVVHKVAQRIPFTPSKTQAALLEQCFGARRFAYNQQVEAFNSYDKDTNPRPTYPSTTDMKGANEWLRDSPVPSSALSNAIMDFRKTQAAYFRKAEYGKNRPRFASKSDNVQSFRNTVPMRHMDGNRYPLSRKLGSVRIRRRDRIRYPLELLSSWTVKRENGVYYLVLLFDVDVQSKLPVDGQVGIDVGVKDFLTLSTGEKINYPDRLRQLEEKVRWEQHKLSRREKGSSNYRKQKAVLAKARAKAHHYRENFQHQVSHRLIEDNQFVGMETLAVQNMTRKAKKKLGVSGKYARNGQSAKRVMNRSILRGGWSGFVDKLAYKAQWYGRTFVRVDRFYPSSRLCNSCGHKYDGLLLSEREWVCESCGVLHDRDVNAALNILGEALRLNQVRE

SEQ ID NO: 43231 - protein, 360 aa, unknown
  TnpB Polypeptide
MKQCAEIFNAHVDWSLENRTYNKSKAHHALYAQLRQLYPEIPSALVQSVRDTALEAVKATKFERRPRKKPTSSLRYDKRTMTLRGYQLTLSCIGQRARAILDVPDYFREIFETWDFKGATLTYKRHKRQMWVQLVFECPTPDKQLEGEIQGIDRGLYHLAVTSDGQSFSNSEVRSVQRKYLYNRRMLQAKGTRSAKRRLKAMSGREQRFSRDVNHRVTKQLAKQSDVTTFVLEDLSGIRNKRRGKKMNKWLGSWPFYQFEMFLAYKAEALGKEIAFVDARYTSQKCSQCGHIYKGNRQHSRFRCVRCGFQSHADVNAAVNVRDTYILSIAERSVEQAAVNQPDATNYGSVASHRACPGGH

SEQ ID NO: 43232 - protein, 453 aa, Okeania sp.
MDPRYPRFFHKSIFTKKLGLKPRPSRATFWLFFFNKYVIIVLVQIGIMKARFRYRIYPTTGQKHQLAKLFGCVRVVWNDSLASCQEKYTLEENKPTNSELQKQFITSAKKTENREWLSEVSAIPLQQSLNDLNQAYQNFFRSTKGQRKGRPIKPPKFKSRKSKQTARFTKGGFKIGQHKVYLAKIGKLKIVWSRELPATPSSVTVIKDSANRYFLSFVVEIQPEVLHQTDNSVGIDLGIKTFATLSDGTKIDAPKPLKKRIKKYRKLSKSLSHKTKGSKRYEKARARVAKFHSKLKDTRTDFLHKLSTEIIRENQTVVLEDLNVSGIVKNRKLSRAISDLGWRTFRTFIEGKAEKYGREFRVISRWEPTSQTCSSCGFKGGKLDLQVREWECLNCGAKHDRDENAAINILVAGGQSETKKRTEPAPPKGARERGARNGRGGKCKTTAYGSSSL

SEQ ID NO: 43233 - protein, 259 aa, Lactobacillus sp.
VLTGKVKRATVRINSQGQYYATVLIESEKQALKPKTKQVVGIDLGLDSLMILSNGQNVNMVNFDTDAKKQIRVWERKMARRRQNALKEIAFDKHDKVLFPRTSLRQFPRYQQARRTAAKLKRQVSDRRNDKLQKLTTQLVQAYDVIVVEKLNTQDMLKNHHLARAISNAGWGNLVAMLQYKCDWYGKQLLMVDPKNTSRICSTCGQHNQQFVGLSQHEWLAVREWQCPTCGTHLDRDINASLNILNRGLAQIETQKTLA

SEQ ID NO: 43234 - protein, 392 aa, Trichococcus sp.
MYHGKRLLIRNQTKLKPTLDACNKASAEVWNLCLQKAKDHHLATGKWIGKTQLQTETKQIVALHSQSIQAVAHKYLNARLSAKEAKTAGRKDVRYPYKEKFFFNTKWVGQAFSIEGNVVTLSMGIQNGKRQTPLKLQVSGLDGIAVETIKEVELCHDTHYYLSVTYDDGMENPPLKQQQAASVDLGEIHSIASFAEDGASVLISGRKVRSIHQLRNKKLAELQRLQSKCKKGSRQWRKYQKAKNFVRTKSARQLQDALHKTTKNFVDWCAAQQVSTVYVGDVEGVERNTKGKKRKKVTQKLSNWSFGKLMAYLTYKAKAKGIDIQKVDEAYSTQTCPVCHNRKKHTGRNVRCACGYKSHRDIHGAKNILSKTLYGDFLPWAIEEQTKYLRPC

SEQ ID NO: 43235 - protein, 376 aa, Okeania sp.
MSSIKTKLKVNNKQKTLLAKHAGVARHAYNWGLATCISEYESTKKRPSAITLHKCLVAEVKSQNPWYYEVSKCAPQQALRDLERAFKNFLTIPKRGFPKFKKKGKKDSFYLEGSIKILQGNYIKLPKIGIVKTYEILPSVPVKNVRISKRAGNWYISFKYDDQYDNRSNPTAKERDVIGVDVGINTLATCSDGTTYANVKAYKQAKKRLTRYQRRVNKKEPGSKNRAKGMKKLAKLHKKVADIRSDALHKLTTWLAKNHSTIVIEDLNVSGMLKKRCDPATTPVAPGSAPRDHKLASAIADCGFYEFKRQLTYKCEWYGSELIIADRFYPSSQICSHCGDQQKMPLSVRTYKCSNCGFEADRDFNAAVNLENYVSQ

SEQ ID NO: 43236 - protein, 405 aa, Nocardiopsis sp.
VIRAYKFLLRPTKRQEASLTQMLRDHCSLYNGALQERRDAYAHPSKTKIRYGDQSAQLKEIRAFDPERQGRWSFSCQQATLRRLDKAFQAFFRRVRAGQKPGYPRFRGVGRFDTVVFPKDGDGCRWDSTPQDAVTRVRFQGVGHVRVHQHRPVKGRVKMVSVKREGGRWFLVLACDQVPAQPLEPTGRVAGIDMGVASFLTTSEGEHVDNPRFLARSAHKLALAQRNLSAFPQRVKAHKRTRKHRAAQARVNSFHAKVRRQRLDHHHKVALDLIRSFEAIAHERLNIAGMTRKPAPKTDPEQRGVFLANNAAAKAGLNKSIQDAGWGVFLGILAHKAESAGRELIPVDARNTSRTCPRQSCGHTSANNRPAQEKFRCLQCGYTEHADRVGAVNVGIRAGLVLPVL

SEQ ID NO: 43237 - protein, 482 aa, Zestosphaera sp.
MAGQQKQRMSLVGGNPTVMPAMEVPNLLKSKKESVRTVRLRLLPTKQQDKRLRKIAGTCSKLWNQINYARRKMFFEEKRINIEETYKEFYERYKKLVGSVTTQQVLNKNNEAWNSFFKLLKLKKEGKLLPSIKKPTPPGYWKDKILGKRIRGIIIRSDRYYVEQVNNGEGYIILKDFSVKVKYVGRIKWSGRQGRLEIKYEFNRWFAYIPIEVGVMPSKNNPRGYVRGGCDIIQRKKPRGEEAAFIDMGLNNLFAVMTTCGDAILVKGGVVKSEYYWWKSEKRNAQSTRDSMRNDSLEVWRRFHRRYLRALFKSSERLRHLYRTAVRFLAKELHERSVKNVYLGYPYMITQDNGNEYNTNIWWFRKLTQWLHDVLKEYGIELLIVFEDNTSRECSICHVIHENARVHRGLYVCSVSGKKINADLNAATNIAYRVGYVVSVKKIESFVVTHNGVKPVTPLRRGIAQDPAVKPPPFRAGRGSYP

SEQ ID NO: 43238 - protein, 466 aa, Zestosphaera sp.
MSLVGGNPTAMPAIEVPNLLKTKKESVRTIRLRLLPTKQQDERLRKIADICSKLWNEVNYVRRKAFFEKKRVNIEETYKEYYERYKKLVGSATTQQILNKNNEAWNSFFKLLKLKKESKLPPSIKKPTPPGYWKDKILGKRIKRIIIRSDRYYVEQVNSDEGYITLKDFSVKVKYVGRIKWSGKQGRLEIKYEFNRWFAYIPIEVGVMPSKNNPKGYIRGGCDIIQREKLRGEEVAFIDMGLNNLFAVVVTSGDAILVKGGVVKFEYYWWKSEKRNAQSTRDLMRNNGLKVWRRFHRRYLRALFKSGERLRHLYRTAVRFLAKELHERSVKNVYLGYPYMITQDNGNEYNTNIWWFRKLTQWLYDVLKEYGIELLIVFEDNTSRECSICHVIHEGARVYRGLYICERTEKRINADLNAAINIAYKVSYDIKNIKKIESFVVTHNGVKTVTPLRRGIAQDPAVKPRL

SEQ ID NO: 43239 - protein, 426 aa, Zestosphaera sp.
VYRRTCVVRLIPDRDAEAKLKALCSLASKLWNEVNYARRRQFFEGKGVNIEETYREFYGKYKALIGSATAQQVLNKNNEAWRSFFELLKAKKEGKLPPYITRVNPPGYKKRGKVRELWVVLRNDQYRIEGDKIILKGLGVIGSVEVGYRGLIHLKGKQGRLEIHYDPDERRWYAYISFEVEKKAIRGVWRKIPQTPRGDLRAGVDIGVNNLFAVYVENGASLLINGRPLKSMSHYWREKIAKYQSTINKYRVKSSRKLRLMYRKWRNQVKSFMDTQIRRLVERLYEIGVSTVYVGYPKNIAQENGNFNNVHVWSYGYLLRRVGEVGEEYGISVIFVDESYTSTTCPVHGNECGRRISRGLFKCTKLNKIFNADIVGAHNILVKGLSITPSPREGIGVMGWRPSPGLNEADVAPNLPALTTSRTLIL

SEQ ID NO: 43240 - protein, 459 aa, Zestosphaera sp.
VEGDPQAVGEGCGLEGASCHVFLSSLCPPRLVPECRRVSVVRLVPDNESEVRLKALCSLTSKLWNEVNYVRRRQFFKGKGVDLKETYREFYEKYKSLIGSVTAQQVLNKNGEAWRSFFSLLKAKKEGKLPPYIAKVNPPGYKKRGKVRELWAVLRNDQYRIEGNKIVLKGLGAVGRIEMEYRGLIHLKGKQGRIEIHYDADSKKWYAYISFEVYEKAVRGVWRKVPQASKGDLRAGVDIGVNNLFAVYVEDGTSLLVNGRPLKSISHYWRERIAKYQNIINKYGIKSSRKLRLMYRKWRKEVKSFINTQIRRLVEQLYGSGVSVIYVGYPKNIAQESGNFNTVQVWSYGYLLRRLNEVSEEYGVAVLFVDESYTSTTCPIHGDSCGKRITRGLFKCTKLNKVFNADITAAYNILIKGLTITPNPLEGVGVMGWKPSPGLNKKDVAPNLPTLTTPRTPTL

SEQ ID NO: 43241 - protein, 430 aa, unknown
  TnpB Polypeptide
MTKAEKIKNTLKETKERRKNQVCRSYLVKVDMSHLSRQKLEQLNRLFLEAKWFYNYAIANDPFELDHKISSVAVKVGEKFEERELSIISSQIKQEILHDIRSSIINLSRKKANGYKIGRLKFKSYIRSIPLKQFENTYKILDGKYVKIQNIKGKIRVNGLKQIPEYTEMANARLICKHGDYFLRIVTYTSKSDLAEEDRKKGRAAPVDNSAIGLDFGIRQQMTFSNRVSIEYDIQLTKRLKKLYQQLSRAQKSSKNRQKIILKIQKEYERICSRKADIRNKIVSYLKHNYQIICYQEDSLKAWQRVYGKKVMDTAIGEIMSALEERTHTPVAVDRLFLSTKRCSVCGNIKDMQLSDRVYICEKCGSVMDRDHNAAVNILYEGLSRVPAERRELKPVETLASALKMLEYFRAIPHVRASLVCEAGSLTASA

SEQ ID NO: 43242 - protein, 386 aa, unknown
  TnpB Polypeptide
MKTAYKFRIYPSRQQEAMLYLTLETCRHLWNDALADRKNVWEHEGISRTYEQQAELLRIEKENGRYAGIHSQVLQDVLRRLKKAFDNFFRRVQEGAKEKGYPRFKSQYKSITYPQSGFKLEGSRLILSKIGSIRIFKHREIEGRIKTCTIKKDGTGAWYAIFVAETKTHDKVEPQIAIGVDLGISHAVVTSDDQYFDYPRYYVQAEKQNRSAEKSLHRKVKGSQNHKKAQHKLSVIGQRVTNLRDEFLHQVSRKLVDSADIIVFEALNIQGLLKNPHLAKHIQDVSWGKLIRFTQNKAERAGKGVVLVDPRNTSQRCSGCGNLVPKDLSDRVHDCPVCGLKLDRDHNAALNILTLGLRGIACRVLTTTLSGRSKQARSMKQEALPL

SEQ ID NO: 43243 - protein, 383 aa, Thermoactinospora sp.
VQLRYTFRLYPTPGQRQALAKAFGCARVVFNDGLRLRQEAREQGLPYIGDGELAKRVITQAKQTPDRAWLSQVSAVVLQQALADLNAAFRNFFASLSGARRGPKVGPPRFRSKKDRRQAIRFTRNARFAVTAGGKLRLPKIGDVPVRWSRRLPAEPSSVTVILDASGRYFASFVVEVGAEPLPEAVSEEGIDLGLSHFAVLSDGRKIDNPRFLRRAERRLRKAQQALSRKAKGSANRAKAKAKLAKAHAKVADARRDWAHKLSTSIIRDNQAVYVENLAVSGLGRTRLAKSVHDAGWSQLVAMLEYKARRYGRTFAKIDRWFPSSKLCSSCGTMAVAMPLNVRSWECPCGARHDRDVNAAINILAAGRAERLNACGGTVRPAA

SEQ ID NO: 43244 - protein, 1324 aa, Actinomadura sp.
VHQPRHPAGLGLAPQVHHVHVQGVGGRFEVEAPDGLQDLLAGEDLAGVGQEHLQQHVLGAGEGERPPGAGDLAGEGVHPQVVEGQDVLAAGVGAGVGVHRGAAQQGPHARQQLVQLERFGEVVVGAGVQAGDAVADHVAGGEHQHRHGGAGGAQPPAGGQAVHPRHQHVQHDQVRGFGLEAFQGHDAVGGLGDPVALELQAAGQRLADGGLVVDDQYPGGGRRLRGAGLHALTVNSAGEGSVRGRTFLMNLSASFLRGTPVVQGREESLTSPAARRRRWSGHRRPLVDRGIANLATTSDGDNHSGRRLDRYRRWQARKKAEIQAARTRSAEQLLKKRARRESRHAMHVNHRISKTVVAVAQRTERGIALEQLQGIRERVTVRRDQRARLSSWPFHQLGAFIAYKARRAGPFRDRANKLVPQGRVVDEVLSAASAGRCGAGVVGRVGPGVAARLGGDGLGAHGTGTGFGAGGAGGGADGGGAGRGAGRGDPGGAGHVHHDVAGDVQDHVAQHVLHRDLQGLAEQVGHDGLDRGGRGLRGGADGQVAGGAGERAARGGGQQPARRAGGAARAGALGEVAARLGGGAGDRGELGGDRGELGGAAGALAQRGGQVPGGLAGGLADDAADDVAAGHERGVDGRVGDGVDRGVHDGAGGGLHGGRGRGAGHGGGHGAARHVQRGGGGGPGEGAAGGQAARGDRHGVLGGLLGEGHRGGGGLERGRGGGVGLGGGAGLAHGLFRGGRGGLDGGVAGGVLHGPHHRGAGHLLDDAGRGEGRGVAGGVPDGFAGGGGQAGGAAGDGREPVPQLFEPLGGGPVGAFGEAPLLRARAEPVPLGPVPLLGRAVPVRFRFVRPPVPPVPFVHGHVPHHAPPPQITILSVYPFHSPSPAEPGARGRGRGLLKAWPGRGAGGAGGGRNRKGGEVAWPSLRSLLRAAARSSSFPGPPADPGPSRPARSPGPLHAKGSIPLSSFDGSSPLSAYGWDETLNELFLAHRAAGLVPARVAAVDRGLCDVVTESGPGRASAGPLASPGDPAAAPCTGDWAALRPDGPGGRPVLAALLPRRTAIVRSSAARDSRGQVLAANVDTVAVAVPLVPDPDLGRLERLLALAWESGARPVVVLTKADRAASPAGAQADVAAAAPGVEVVACSAATGDGVDAVAAVLSGTVVLVGPSGAGKSTLGNALLGTGALATGEVRASDGKGRHTTVRREMLPLPGGGVLIDTPGLRGVGLFDAGGGLRRAFADIEELAAGCRFGDCAHRTEPGCAVLAAVAGGSLARRRLDSYRKLQRENAWIASRTDARLRAEQRDKWKAVSRWQRRMYKERGRDR

SEQ ID NO: 43245 - protein, 392 aa, Fusobacterium sp.
LSIGGASKEEERKIIKKAYKFRIYPTLEQIIFFSKNFGCVRKIYNLMLDDRKKSYEEYKSTGIKTKYPTPVKYKEEYPYLKEVDSLALANAQLNLEKAFKNFLKNKDFGFPRYKCKSNPVQSYTTNNQNTIYIKDSYIKLPKLKSLVKIRLHREIKGIIKSVTISKNSLDHYFVSILCEEEIEELPKTNKNIGIDLGIKEFATMSDCTKVENLKLTKEYEKKLKREQKKLSRRCKLAKDSSKKLSDSKNYQKQKKKVAKIHNKIRNKRKDFINKLSTKIINNHDIICIEDLNIKGMLKNHKLAKSISDVSWSEFVRQLEYKANWYGRKIVKVPTFYPSSKTCSSCGSIKETLTLSERIYHCECCGLEIDRDYNASINILRKGLEILKEEKVS

SEQ ID NO: 43246 - protein, 381 aa, Chlamydiae sp.
MKRTYVFKLYRSKKNKKLHRLIEIASSVYNHLLALQKCFYRFYKSYIPLYRLQKHLTKLKQFQRFCHWNQLGSQALQEIAERIDKGYKRFFDALRKKREWKVCPPRFKPARKYKSFTLKQAGYKLFEDHCIRIGKEKYKFFKSRTIQGEIKTLTIKRDSLGDIYLCFSCEVKNEKVQESMTGKNAGFDFGLITFCTSSDEEKIESPLFFKRQQKALKHAHRKVSSKQKGSNQRKKAHLVVARLHRKVFRQRRAFHFEQARLLISRYDALFFEDLNLNAMKKRYGRKINDLGFHSFLQIVKNYAEQRGKIVHLIDRFEPTSKTCSSCGHAIKDLDLKVRSWCCEVCCTEHDRDINAAKNIFRVGTSTLRLGDVRPNKLAIAV

SEQ ID NO: 43247 - protein, 221 aa, Streptomyces sp.
MRDGMFFLIATVDVPEPPVFEPTGFLGVDLGIVNIATTSDGTVHAGRGLNRHRKRQLELRRKLQSKGTQSAKRRLKQRSRKEQRHAANTNHVISKMIVTEAQRTSSGIALEDLSGIRTRARLRKPQRVTLHSWAFVQLGQFLEYKAKRAGVPLVHVDPAYTSQQCAECGHIEKKNRVDQARFVCRECGVVVHTDRNASHNIAARGAAVWIAGRESRVPAAP

SEQ ID NO: 43248 - protein, 357 aa, Rhodoferax sp.
MTRNQKKIFKYWMTVSRYVFNWTIDFIRSCQNWTPNWMEIKKYATQLLPSWTKECPFQIKAIAIKDATTAFFKAKGKPQFRSRKSPQQSCFIPKTAIKMAGIYPKISGKGLKIHESLPESYLDSRLFWKAGKYYLAMPSKTPRVPNGDNQARVVAIDPGIRNFVTFYSDDTCGFIGSGDFSRIQRLACYLDDLISRMTKVSKQRQHKMRIAAARMREKIKHLIDELHHKTALFLVKNFELILLPTFETQAMVSKAGRRIQSKSVRAMLTFAHYRFKQFIKHKAFEYGKRVVDVNEAYTSKTHPETGEVKNIGGAKLIRLLSGAWVNRDLVGARNILLRALVDTPQSADWQLIISQHC

SEQ ID NO: 43249 - protein, 454 aa, unknown
  TnpB Polypeptide
VVYRTARAGLRLTKARRRRLLALLVAAGDVWACVLELNAWRRARQDRPLASYPELCRELAASGPGTFGELDSTGARSVLRRYADAWFAAAKRRRDGDGAARFPRRRRRMVPVRWYHGTFRLDGRMLQVPVARGCPPLRVRLDRGLPYPPGQVRSVTLLFDGGRLWVDVTAEVPVTAYPPGREPDPGRVAGVDLGIIHPYAVAGPGADGLLVSGRAVRAEHRQHHYDAKARHRAAARRAPAPGQRGSRRWRQHQRRQGLVEARHRRRVRQAQHEAARNVIEWAAARRVATLAVGDPRGVLGLPAGRRHNRRTRDWRIGHLIQVLADKAEVAGITVTMVDERGTSSTCPACTKRVPKPAGRVFTCPHCQFHGHRDLVAAASIAARLGGGITPAIVPAGVTHRRAGKHLPGVSPARRDPRRRPHHGRARGSPGRHRPAPTAPTRDGRGVARPTARTP

SEQ ID NO: 43250 - protein, 427 aa, Shigella sp.
  misc_feature (305)..(374): Xaa can be any naturally occurring amino acid
VKRLQAFKFQLRPGGQQEREMRRFAGACRFVFNRALARQNENHEAGNKYIPYGKMASWLVEWKNATETQWLKDAPSQPLQQSLKDLERAYKNFFQNRAAFPRFKKRGQNDVFRYPQGVKLDQENSRIFLPKLGWMRYRNSRQVTGVVKNVTVSQSCGKWYISIQTESEVSTPVHPSASMVGLDAGVAKLATLSDGTVFEPVNSFQKNQKKLARLQRQLSRKVKFSNNWQKQKRKIQRLHSCIANIRRDYLHKVTTTVSKNHAMIVIEDLKVSNMSKSAAGTVSQPGRNVRAKSGLNRSILDQGWXXXXXXXXXXXXXXXXXXXXXXXXXXXXXXXXXXXXXXXXXXXXXXXXXXXXXXXXXXXXXXXXXXXXXXGHVLQGVEDVNNGACVRGVKMHGRAGWGHFVHAHKMAIRRWYVTMTPAYRHKG

SEQ ID NO: 43251 - protein, 479 aa, Gracilibacillus sp.
MYRTQQIRIKKGHRLYHYCDHITFLAKNLYNATNFHIRQIFTAFGEEKTLQPLQQEVFDLIEQHLPQMNAIKRKTVEKKREKELKKPMDQRKEIKDAMLFEYPSAQHKWPSYAFLDGLFKVSENEDYLALPGQVNQQVMKMVFQNWKSYFASLKDYQVNPHKYTGRPKLPKYAPKNGRKTCLFSNQVCKVKDDKYLKFPHTKERVNIGKLGLKGQLQQVRIIPTYGEYTVEVVIMKEEEKKLVELDEKHVMGIDLGVHCLATIVDNTGSSPVIMKGQTVKSINHQYYNKQRAHYYRVLRHGQGPKDGSFHSKRLQRLDQKRYFKLKDAFHKASYHNVQLALARKVSTIVIGANKGWKNKVRLRKQDKQHFQSLPHTMLIRMVEYKAEQYGIKVQRQEESYTSKASLVDMDELPIYEKGVPTNAVFSGRRVKRGLYRTKENTCIHADVNAAGNIIRKVVPNAFVEGIEGVVSRPLMLSIV

SEQ ID NO: 43252 - protein, 477 aa, Gracilibacillus sp.
MYNTQQIRIKKGHQLYHYGDHVTFLAKNLYNATNFHIRQIYIAFGAEKPFQPLQQEVLDLIEQHFPQMNAIKRKAVEKKREKEWQKPVDQRKEIKDATLFQSPSSQHKWVHYGFWDGLFKASKNEDYLPLPSQVNQQIMKMVFQNWKSFFASLKDYQVNPHKYTGRPKLPKYAPKNGRKTCLFSNQVCKVKDNKFLKFPHIKEKLNIGKLGLRGKLQQVRIVPTYGEYTVEVVMEEAEKEPVELDEKHVMGIDLGINCFATIVDNTGSSPVIIKGKAIKSINQYYNKQRAHYYRILRHGHGPKEGSFHSKRLQRLDRKRHHRLKDYFHKTSYRIVQLARKRQISTMVIGVNKGWKKDVTIRRKDKQHFKSLPHTMLIRMIEYKAEQYGIKVHRQEESYTSKASLVDRDDLPVYEKGIPKHVVFSGRRIKLGLYHTKENMYIHADVNAAGNIIRKVVPNAFADGIEGVVSRPLMLSIV

SEQ ID NO: 43253 - protein, 282 aa, unknown
  TnpB Polypeptide
MYLTLKQQVKHLSKKEFRNLKYLSHIAKNLTNEAIYNIRQYYFNKKKYLSYNENYKMLKNSENYKKLNSNMAQQILKEVDGSFKSFFGLLKLAKNGQYDNKKIKLPKYLAKDGFTTLVIGFVRLKDDMLIVPYSNSFKKTHQEVKIKLPPVLKDKKIKEIRIIPKQHSRYFEIQYTYEVKEVQRELNKENGLGIDLGIDNLCTCVTNNGASFLIDGRKLKSINQYYNKINAKLQSIKDKQKTSRTTLRQKKILIRPPLITRNTSNMPQRLRLATWPDWLPST

SEQ ID NO: 43254 - protein, 498 aa, Azospirillum sp.
MARAKPEHPPVHRTDLLPSNLTVGKEMAVLALLRAYRRGAVLLGREQWRLFFETGRFDKNHDVDKVTFAAVIGAANRLQMARWQVVGQLQGWISNRANEFRDTVNRSTLPPATKHMLHTINVLGAWFRRGDVVMKDCGEVVPDAVRRLARTIMRHCMGQHRRPNLSRISMRLDHRAGSIARAVKATQSGAVGWWVGLSTLEKGRKIAVPLLTYDYHDERPGRVTNGIQVNKRDGRLTFGVVTDMGEVCAKSRADYQGHGVLALDFGLSTLFATSEGQLLGQGWLKRLKRYDVLISMIAASQPRAGRKPRDSKRYRALVEDVRGFLRTEVGRVLDRLVEQGKPRELVLERLDFRHSDLSKRLNAILRNCGRLIIQDKLHDLEERFGITSTEVNAAYTSQTCSCCGYVDKRNRRDQKTFVCLWCGHRMHADLNAAANIEARRVRPNAWLFQGKAAVLAELVRGFGERRVRATGPCRSGSRGAPADPRLTNPYFGASRWPW

SEQ ID NO: 43255 - protein, 448 aa, Azospirillum sp.
LPLVRARYGAQAKALIAGEGMEAVVEGHFPSFPIVMGDQGLGIVDQHLVRHAPEVPEGGLQAGDPGRLPLVTEHRDEVAARVAQCRDEQVNPHPLTADLHGGGAEVDLQLLPRRRLETHRGSALRLQILAQSLDGALHSAQRHLDPMLVRQLLADDVGIASMSPEALAEPIRQVIQSTSPSRRPVGVPTTTTQVTLHRLAIAPQLPGDPLRAPTQGLQPDHRRHIVWGQHHVPPIRRLGGTQRYRDLDHSLPLDVVGGPFPRSKRRKKATARLAAYSRKAANRRADDLHKLAADIVAIFDRIAVEDLTSQGLARSMLAKDVLDAVWGLLRALIADKAERAGKLVVAVDPRGTSQECPCCGAKVKKTLADRVHRCPDCGLVEDRDVAAASVIEFRVFGRQAGGVPGNWSEKPPRFSRRSDHAPSLHPDRRIRSPVPVGHPRPAHLFRYP

SEQ ID NO: 43256 - protein, 159 aa, Blautia sp.
  misc_feature (135)..(135): Xaa can be any naturally occurring amino acid
IARVQSVWYAQQSERGIKYPKSSKHIQRLYRKKQNAVKDYLHKVTRWIAEYCRKEDIRCMIVGNIRNIRKEKDMGHKTNQKFHGLPYNKLYIMLEYKLKLYGIQLIKQEESYTSQCSPLSPEASKRYAEASNRKXWKDIFIKKSPECSLYGMHSNRKEE

SEQ ID NO: 43257 - protein, 389 aa, Photorhabdus sp.
MLRATKVRIYPTPEQAEYLNGQFGAVRFAYNKALHIKKHTYKRHGVSLNPRKDLKPLLAVAKQSRKYAWLREYDSIALQQAVINLHIAFDNFFNPKLCAQLPTFKRKQGKQSSYHCVGVKVLEGAVKIPKLSPIKARIHREIEGEVKSITLSRTATGKYFAAILCDDGKEAPEKPGVITRVTGCDMGLSHYLIQSTGEKVNNPHHLINAARNLRRKQKSLSRKQQGSANRGKARLRLAAVHERVAHARADFQHKLSRTIVDENQAIIVETLKSANMMKNHHLARAIGDAGWHGFIKKLEYKAAAAGVHLVKLDQWFASSKTCHCCGHKVPEMPLHKRIWPCPCCRVEHDRDINAAINIQHKGITELQAAGLVVSAHGGQRKSVIKTVAA

SEQ ID NO: 43258 - protein, 470 aa, unknown
  TnpB Polypeptide
MMVFYAYALSYCGGMSLMQIGNKFRCYPTPAQEKVLLQWMGCQCNIYNAKGTRRPVFSPFCPQITQSRWAVCPNRPAIQPIQKRTHALLVGSAQCTATQWRCTVEASLRSYFSKLGGRPTIHKKHGKQAVWLTSELFKFVPVVDTSTGEITDYQLHVGIKKFPVGLLTVKAHKAHKAFNLPASLHISIHAGRWHVSFNYDDGIPEPTDKDTTDWLTQFDEVALRKMTVGLDRDVTLPLAGSDYQQFDFTQPQKQQLLKQERHKKRWQRRQARRDKGSVGWVKAKHRVARYQRYGADVLRDVAHKASHTLASDPRYKLFVFEALKVKNMTAKAKPKQDEQGRWIKNDAATKSGLNKSILASTWGQTNTYLQYKARRQGQLVIEVSPCYASQECAACGHVHQDNRVSQAEFVCLSCGNTDHADHNAAKGIAMCGVRQLLAGKCIQKEKKRCRITRIKVGRKAPNWLRQRNLR

SEQ ID NO: 43259 - protein, 420 aa, unknown
  TnpB Polypeptide
VQIFFVSAHHHKWEVVTFQGSSDMPLKTHKIALIPNNKQYNWFAQQCGYARFAYNYALADFKSGLENDEFLSTSKLNERFNVAKKTYAWTKTQDQVVANKSIFMNLSSAIANWVSKRAKFPKFKKRGKKDSFTTNNQSVQVEGERIKLPKIGWVKMFQALRWTGKIMKVTISRTAHRWFVSITVDTEDTEAVDNSTHPVVGIDVGINTLATCSDGSKYDNPRPLKRYERELRQAQRRLSKRTKGSKNWIKQKWKVARIHYRIACIRNDAHHKATTDIVNKASAISIETLKVTNMLKNKKLAKALSDSALGGFLSKLKTKAETLEIPVTEASQFYASSKTCSSCGYKKKDLTLSERTYHCSQCDVSIDRDVNAAINLRNVAVGHTETENACGVQVRPHTEARETEAGKVPFGSNKCCQYKS

SEQ ID NO: 43260 - protein, 363 aa, unknown
  TnpB Polypeptide
MDFDTIGGKSNKNGARFDLDAMYVNWLGLSLKCYLPKSENSLSYVWESLKGKISYCNIKRLMFSSGWRYYAEIVVSGAAPTRVSIGTSTMGIDPGVSTIAGVSEDACVLEELAPNAIQYEKKIQKISQRMDRSRRISNPNKYNEDGTINRSNRDPWKYSKNYVKMCRLLKSLYRKKHAYIVDSHRELCNKLLSIARYFPVEKMHFQALQKKAKETRRQEKKTEVKQKDGTVKVIQKYKRKKRFGRSINRRAPARFLLELKRKAEAVGGVYAEVDTKEFKASQYNHVTDAYEKIPLSQREKEIGKRKVQRDLYSAFLIRNADLDFKHPDREKCEYEFEHFANLQDQLILKMKESGLSMRQCFGF

SEQ ID NO: 43261 - protein, 237 aa, unknown
  TnpB Polypeptide
MCIFQKGLILIHILAIDLGVTNLITAVNNNGYAPFIIKGGMIKSINQYYNRQLAYYRSIENKKGNFADTKRIQKFHLTRNNKLTTIFHRISKSIIDYCSSHTIGTIVIGYNYGWKQKIKIGKKNNQKFVQIPFLKLVKQIEYKAQLKGIHALTVNENHTSKCSFLDNERLGKHDKYAGKRISRGLFKSSKDILLNADVNGAYNIMKKAFPNAISVDGIEAFGLMPQIIQQNIVDSSI

SEQ ID NO: 43262 - protein, 433 aa, unknown
  TnpB Polypeptide
MSEEKNLKIKDTLRATKERRSQMDCRVFSVKVQENRLSRAKEEKLNRCFLEAKWLRNAVVATDSLSLDDTSSVQVKVNGTFETREISNLSSQMKQFVVDSVKQDVFNLSKAKKAGLKVGRLQYKHECNEINLKQFGNTYKIKSHNKISVQNIGVLVVNGLEQINLDEVEFANAKLLKKPSGFYIHLTVYSKKQPQSNTEKEVLGLDMGIKDQLTFSNGIKVNFYMEESEQLKGLMRKLSRQIKGSNQYKQTLNRIKRIYEHQNNKKSDVVNKLNHILKQNYIICFQDELLNSWKCNKSKQKFSFGKQIQHGILGRVKSSLKKNDSNVMLESSVPTTQTCPVCGCLTKHSLDKRIYHCSHCGFENRDRDIHSANMMVLLSGYGTYRSLNTDTVSTEKMVGLLDNLTNLGGVVNTNSMKANCLKTMCSSQQYGKW

SEQ ID NO: 43263 - protein, 381 aa, unknown
  TnpB Polypeptide
MLKVKKGIRIRLYPTREQEILIDKTIGCCRFVHNQTLADCKQSYEQTQHFPSKNERITNLVPLKDEFEFLKEVDSKALQQSVRDLNSGIDNFFKNRSHFGFPKFKSKHSSKQSYRTPYNQRNSRIVDNKHIKLPKLGKVKTKRFDTPDEYKIFNITVEKTPTGKYYASICIEMEVQPLPRTGKQAGFDLGLKDLLIGSDGTRYERPKFAYAYKDKLAQEQKKLSKMRTKLERAKLNLDECKNYQKQKRKVAKLYEHISNCAKDFNHKLSRKLVEEYDFLAFENLSVEGMKKNRHLAYSISDVRWSQLLNFIQYKCQWYGKEFRQVDRFYASSKTCSCCGTYHKDIVNSLSVRKWTCPDCGTHHDRDVNAAKNILIKALSVA

SEQ ID NO: 43264 - protein, 448 aa, unknown
  TnpB Polypeptide
MSEEKNLKIKDTLRATKERRSQMDCCVISVKVQENRLSRAKEEKLNRCFLETKWLRNAIVATETLSLEDTSSVQVKVKDTFEVREIKNLSSQMKQSVVDSVKTDVCNLSKAKKKGLKVGRLKFKHECNEINLKQFGNTYKIKSHNKISVQNIGVLVVNGLEQINLDEVEFANAKLLKKPSGFYIHLTVYTKKQPQPETSKEVLGLDMGIKDQLTFSNGVKVNFYLEESEQLKGLMRKLSHQVKGSNQYKQTLARIKRIYEYESNKKNDVVNKLNSVLKTNYIICFQDELLNQWKRTKSKHKFSFGRKVQHGILGRVKDKLKKNSSNMMLESSVPTTQTCPECGCLTKHSLDKRKYHCNHCGYENQDRDIHSANMMVLLSGYGTYRSLNTDTVSTNKLVSLLANLKNVGVVVTTNSMEAHCLYAVGSSLQSTEIDSYGSLVIKIGKNLC

SEQ ID NO: 43265 - protein, 382 aa, unknown
  TnpB Polypeptide
MSIVKKGIRVRLYPTEGQEVLINKTLGCCRFVHNQTLADCKQSYEQTQHFPSKNERIKNLVPLKETNEFLKEVSAVALQQSIRDFDSALSNFFKNRSHFGFPKFKSKHKSKQSYRTPYNNGIADVLDSKHIKLPKLGRVKTKRFDMPKVYKIFSITVEKTPTGKYYASICIGTEVQPLPKTGKQVGFDLGLKDLLIGSDGTRYERPKYAYAFKDKLAKEQRKLSKMRTKLERVNANLDECRNYQKQKHKVAKLHEHVANCAKDFNHKLSRKLVEEYDFIAMEDLNISGLLKNHRLAYSVTDVRWSQLLNFIKYKSEWYGKEFRQVDRFYASSKICSECGAYHKDIVNSLSVREWICHDCGTHHDRDVNAAINILNQALSVGV

SEQ ID NO: 43266 - protein, 406 aa, Lactobacillus sp.
MTTLGRTLKLRLYPNTIQAIQLLEMSQEYQRLANLVSQWVFDHDFPLNSLKINHALYKKFRQESPLNSQMIQSVFRTVVARYKTVLEQLKQHPYRYQDDNKKWMSVTKDLTWLFKPLHFSRPQADLVRQSNYSFSCGLTEISLTTLGKRTKMPFTVKGFEHYFQKGWRLGTARLVHSRGKWYLHIGMTKKNADFDPTVPAQVVGIDRGLRFIATTVDQQEKTRFFDGKKILLKRHKFQKVRAELQHRGTKSAKKKLKQLQRRENRWMTDINHQLSKTLVALYGPQTLFVLEDLTNVTFNTNDLPKSLRNSHRSWAFFQLEAFLTYKAQAVQSQVLKVSPAFTSQRCPKCGLIEKTNRHHNIHEYHCQQCQYRSNDDRLGAMNIKMLGQEWLSGVKHPRIKKTTATG

SEQ ID NO: 43267 - protein, 343 aa, Lactobacillus sp.
MYDLHTIDEASPKPSMYAVRNELVANKADWQYMLSARTLQLAIADLGKAWQNFFDKAQPDWGRPAFKSKNAARQGFKTDRAKVVAGKLRLDKPRGVKDWYDIRVSRHADLSGTLKVVSIYRENGQYWASLPFEVELENKPQTGKNSAVDVNVGHLNYTAGVINTLPKRLGKLYQRVKYYQQQLAHKRVVNGNKATKSNNYAVMRAKLQRDYRKVANIQHDIMQKFTTELVNNYDKIIIEDLSVKDMQMSHVASKGLQRSMFGYFRQVLSYKCAWYGKKLLLADKTYPSTQRCSKCGYIKHGTDKITLQGNAQHQTKHNEYICYNCSAILDRDENAVANLLDLI

SEQ ID NO: 43268 - protein, 429 aa, Lactobacillus sp.
VKGGSDLRKTMAQLPYHYGVKLRVFPSNEQKRLIKLNSDASRYIYNEMNGMNRELFALHQVKTPIKLVQTRIETLKQRLKHPAINISNIHGWLNDRALDSDMKANAIKNYRTAWKNFRKVHRAGTPVFHKKRTEQKYQTSNHYASKIEIPNMFNGSVRLLDDKHIQLSKLGRLRFKGMPAKLIARKAEIRIGTTTISMDATGRYYVSLQLASDQPFVNSETSQSDSAIGIDLNTDNFLTDSSANVIANPRFYRSIKGKLAKAQRTLSRRATRAKKAHRSLRESKNYQKQRQRVATIQRKVANRRKNFLHLVSTALIKNHDLVVAEELRSKNLLRNHALAMNIADVGWRMLLGMLAYKADLYKRQFVTVDPRNTTQTCSDCGFIMGTEPTQKLTLADRQWTCPRCTAYHIRDHNAAKNILAKGLVTLTDQ

SEQ ID NO: 43269 - protein, 406 aa, Lactobacillus sp.
MTTLGRTLKVRLYTNTIQATQLLDMSREYQRLANLVSQWVFDHDFPLNSLKINHALYKKFRQGSPLNSQMIQSVFRTVVARYKTVLEQLKQHPYRYQDEDKKWMRVAKDLTWLFKPLHFSRPQADLVRQSNYSFGNNLTEISLTTLGKRTKVPFTIKGFEQCFQTGWKLGTARLVHSGGKWYLHIGITKEDTDFDPTAPAQVVGIDRGLRFIATIFDQQRKTRFFDGKKILLKRHKFQKTRAELQHRGTKSAKKKLKQLQQRENRWMTDINHPLSKTLVTTYDPQTLFVLEDLTNVTFNTDDLPKSLRNSHRSWAFFQLETFLTYKGQAVQSQVLKVSPAFTSQRCPKCGLIEKTNRHHDIHEYHCQQCRYQSNDDRLGAMNIAMLGQEWLDGVKHPRIKKVTATG

SEQ ID NO: 43270 - protein, 387 aa, Escherichia sp.
VKRLQAFKFQLRPGGQQECEMRRFAGACRFVFNRALARQNENHEAGNKYIPYGKMASWLVEWKNATETQWLKDSPSQPLQQSLKDLERAYKNFFRKRAAFPRFKKRGQNDAFRYPQGVKLDQENSRIFLPKLGWMRYRNSRQVTGVVKNVTVSQSSGKWYISIQTESEVSTPVHPSASMVGLDAGVAKLATLSDGTVFEPVNSLQKNQKKLARLQRQLSRKVKFSNNWQKQKCKIQRLHSRIANIRRDYLHKVTTTVSKNHAMIVIEDLKVSNMSKSAAGTVSQPGRNARAKSGLNRSILDQGWYEMRRQLEYKQLWRGGQVFAVPPAYTSQRCACCGHTAKENRLSQSKFRCQVCGYTANADVNGARNILAAGHAVLACGGCQQTG

SEQ ID NO: 43271 - protein, 350 aa, Chloroflexi sp.
MLEMVKQQYEEQGTFPSKYDLERAFKGQGRDHVPATTVQMLADRLTKSLKRFLAAKASDIPDIGFPRFKQPNRWQSIQLRQYGKDVYLHEDKKHLMVPKKLGHFLKIKLHRPIEGTPKTVHLVHRADGHWYALIVCETEPRTEHAPSDCSHPAIGIDVGLKSFLTDSEGHTVESPRFYRSSQQTLRRKQRTIGRRKKGSHRRRKAARSTAQTHLKIARQRRDFHYKTAKPYAEHYQVIAVEKLTILNMVHNHALAKSIMDVSWGAFLDILEVKAESAGHQVIRVNPCFTSQKCYQCGEIVPKSLSVRTHICPCCGYVADRDVNATQNILKLARPGHGLQEPTYTDGCRVS

SEQ ID NO: 43272 - protein, 555 aa, Haloferacaceae sp.
MLTITVANTLIERYWTTEHLTGIDDFSYQAWKYFDESEAFDDFDLYLPSRYKRCVMQKVGETLRSHADKRGAFETIQSVLPNHKIRRIHTRIIKEQLCDSEEYLKSGYVDLLIGQLNSYYDRHGRFPESYFDMQDCPTYSKGVLPYSADDGPTSGQAVKYEYEEDTQILTVKLKTPDTLEPETRGDWTWTEHTLEGYEAFHELLEHGSLSAPSFHPTQTKTGDDYHELSFPIEVEHAEKSDDVETVLSIDGGLRKDATAVVVNEDGEQLSVPYFIQNTERKRMRNLARERNQLNSKLASLRRNGRDHTDSFTQVHAEYRRVNNKIRHKREQLVHDVANQVLALALVYDVDAIVHEDLRSLSPPRGEGQLSWELSSWARRDIISKIEYRADIAGLHVERVHPGNTSRSCPRCGATGHTTKSPDHSFEVWWGSHFRCDNARCGYQADRDYVGAVNVARVFFSETATLERDFTSSYTGDVEIVPASRSAGPRLTFGEAPIVFTEQSSEVAAGGGSCLIAPAVTPTETKNDSSKPVSVSSPATHGTSRFVKQTAVYCGK

SEQ ID NO: 43273 - protein, 441 aa, unknown
  TnpB Polypeptide
MEKQYLISEILELSKIPKSTKTTIVTNCVLYNDLNKELYDYFEEVTPLFAFLVRRTIHHLRHNLKGENETKYRTKLKQQYNLTNRFAKSVITVAKNQLKLSKAAGEYLHSTYSKKIKKTDAKIIKTKAILNNQKTSQERKKKLKTKLFWLEMKKNKLIQLKNNGPKPMLTFGTKKLLKRNKLEFLEKRDNQIVYLGDKNDSKGNQQFQLFYNKKYNNFTYKIRLENKCIKNSKYIYGSFIIKDTKAKREILKSLNNPKSNSLTFRIIRKNNLLHLQIMYRTGSSFKTRSSYGVLGVDFNKGFITISEIDEKGKLLNLDRINYIHKGRAGVTKNSMHHLVKDLVDIAIKSGKDIVIEDLKSLNKNKQEKTERKQYNRMINTLKFGKFRQFLETRCDKLGVGLSLINPYNTSKIAANKYCYNMKLNIHSGASYVIARRFYNLD

SEQ ID NO: 43274 - protein, 451 aa, unknown
  TnpB Polypeptide
MSNVYTYTTEIKNRAYNVDLMKYITEYKGLFNSIQRKAFHIIKNSYINVGEFTLKDKTVLIKNIATTYNLTARAATSIVYNMTGRFNAIKELKEYEKKQLEKKIKSLEKKIAKTEEARQKLNLRMALNTATKKEQEKYEKLKISLYWRRNKLNKLKRKIKKLEKEIETQRYKVCFGTKQLLQTDYKKFVEQRDSELFYVGNATDSACNNNFQMRYNKKDNQFYFKIRKEINTEEKKWITGKVYFSKTQTKKIKELLRSKESPLTYRIKVKDGKYYLQIIFQYKHTKAMCDTRNSNGVIGVDFNKGFVAVSETDRYGNLINTFNIKYRFRSGTKTESDFQWIAKILSEYCLEDGKDLVIENLKFDKTKANMVKDDFKIYNEMLSSLAYAKFSKIIESKCAKKRIFLKKVNSAWTSRIAKEKYCENKKLNIHSGASYVIVRRGQGLKDKVKKT

SEQ ID NO: 43275 - protein, 472 aa, unknown
  TnpB Polypeptide
MAATNEEERTRTNTFALAPKAEWKKVCLIELLDSAAALVNIVAYHRRQVYFDTDQTRSDVWNAITKTEMRNRFRPVLGRAITDKMLDKCDEQWGAFFEQLDNYYDGEREDKPGVPGYWRDNGKRVLKACIRNDAYTVEWGEHSRIELALGSELKEKYGIPLNQRIRVPIKGNPQYDGHGGRLELVYDRSTESFTANQPVTFFDDTTRATGSSDEECVAAVDVGANNFVAVTTTHGHQRVFHARPLFDRFHHYTERISELQSQLPEQTDSSRLIESLYDKRTRHRNHAQDALVRHLSRLFSEWDVKAVYVGKLDDVREKHWSAAVNEKTDLFWAHGRFRQRMHTVLEGECGISVEEESEAGTSSQCPRCDEETHVSRNSDVFHCGACGFEGHSDVVGSENFLQSVVDSDVDTGERPMARPVDSGQNSPERGHCEVPRLEWDDHRWQQRGHATKEEPTNQSTREGNLASDSGPA

SEQ ID NO: 43276 - protein, 352 aa, unknown
  TnpB Polypeptide
MAERLLLTIKLRLRDKHASELNRQAKAVNIVWNYCNETQQKAARGHRKWLSAFDLMRLTAGSSKELDIHAHTIQRVCRRFDEVRRTHRKAWLRWRGYKSLGWVPFNSNHVSFDGSTFQFRGAVYETMHLHPYLAAGTAIGAGSFNQDAKGNWYLNAPVFVDCAVPAVGQPVGIDLGLKDLATLSTAEKIEAPRFYRASEKRLATAQRARKSRRTRSIHAKIANRRRDFLHKASSRIAREFWFIVVGDVSTIQLAQTRMAKSIYDAGWSTFRNMLSYKAIRHGGRFVEVSERMSSQVCSVCGGLPPSRPRGIADLGKRMWTCDDCGSVHDRDVNAAQNILRVGLHTLSEGAVA

SEQ ID NO: 43277 - protein, 239 aa, Acidimicrobiaceae sp.
  misc_feature (13)..(13): Xaa can be any naturally occurring amino acid
  misc_feature (151)..(151): Xaa can be any naturally occurring amino acid
  misc_feature (211)..(211): Xaa can be any naturally occurring amino acid
MTRWSTKTGPGAXRFQAKGKVAPRFRLRNRATPGRAPSSQPIRFSDPSHLRLPKFGPLKLFGPTRKVRRMIDAGRFHVYSATLTQRAGRWTVSLTGVAAELHQAERSRTKRHAIPVGVDRGIISLCVAADANGVSIESFEGVTTLKQAHAXLNAANQALARTTPGSKGRQRAKSRLAKRHRKVANTRRHLVHQASKALVERCQVLVIEDLXQILSELQDVFRLRRGQKGPRPVDADLLM

SEQ ID NO: 43278 - protein, 382 aa, unknown
  TnpB Polypeptide
MLSYEYKLYRTKKTKHLDNILREACFVWNHALSLQKRYYKLYRKYIPAVRMQKHFAKRISRTYMHSQTTQEVLQRLDTAYARFFKHLAVRPPKFKKHSDFKSFVFKQHGGYSLCGNVFHLNSVQKDYRFSLSRPYEGNVKQVRLKRSPNGDWYLYVITDAKQQPIAKSHDGASIGIDFGLKTYMTFSNGETLQHPQYLKQDLKALRTLSRNHSKVHGSRKEYARQSLASLHEHIANRRKDYQWKLAHEICRRYDYIFIEDLCLAGMTKLWGRKMADLAHGQFVRILCEVANKYGCTVHKIDKWFPSSKLCDCGYVNKALMLSDREWVCPECGQIHDRDVHAAINILRRGIYELTSGSKTNEAVAEGCSAQTTLSNRSRIPLL

SEQ ID NO: 43279 - protein, 415 aa, Streptomyces sp.
MGQSIALGEMLRDHCSLYNGALQERRDAYRHASKSSVRYGQQSAQLKEIRAFDPERQGRWSFSSQQATLRRLDKAFAAFFRRVKAGETPGYPRFRGVNWFDTVDFPKDGDGCRWDSTPNDPGTRVRFQGVGHVKVNQHRPVVGKVKTVSAKREGKRWYVILTAEQATPEPLPRTGSVTGIDMGVSNFLADSGGGFVPNPRHGRKAAASLEAAQQALARFPRVRRDKRTRNHQRAVERVADLYRKVRRRRLDHAHKTALDLVREHDFIAHEDLKICNMVKAPAPKPDPDTPGVFLANRAAAKAGLNRSISDAGWGVFLTILHAKAESAGRDVIAVDPRDTSRTCPECGHVAKESRPTQEKFHCVSCGHSAHADTVGARNVLRAGLARREASPAWREAPSLMRGRSHVSIVQETDTR

SEQ ID NO: 43280 - protein, 411 aa, unknown
  TnpB Polypeptide
MLLTEVQHIKRTDKRYKRLLQLCHLSKNMFNASLYIARQHAVQYDKDVKSGLDMTGKKKYLNYYDIWNLMKRNNPDYLALPCHTSQRIIKQVHQAFKSFFALMKLKEKGKYDKKVKWPKYMKKDGYNITVFDQIGNPSKEDGTIHLPTYKDLRFKIKCNNVNTITIVPKPGYIEVQFSYKKEEISLKEDNGNYMSIDLGVTNLASCFCNKEQSFIVDGKPLKHINRFFNKKYALEKSRIKEQHNIEFSKKTRHLLMKRFHKVKDYLHKASRYIINHAVSKNINTIVVSQAKGWKQEVSMGEENNQNFVQIPHEMFVNMLIYKGKLEGINVVRQNEAYTSLCSSLDNEEVKKHDKYIGKRIYRGLYRSTQHLINADINGAINSLRKYLKCNCEAVMPADVGFVYNPIKVSIL

SEQ ID NO: 43281 - protein, 426 aa, unknown
  TnpB Polypeptide
MEIIFKNLLILLFFLIFIIGGKTNSYSIINKMILTESHIIKGDVELDDLTFKCKNLYNKGNYIIRQEFITNGNYISKFDMFTICKGIDEYKALPVRISRGVLRTLDANWKSFFSCIRKWKTNKELFRGKPNIPKYLPKSGKFTALFYEKAILKETIKNKGIGLSSLKMRLPVQTKNKIIEIQVIPTKTNKYKINVIYDYKEEKLKQDNNFYCSIDLGINNLMTVTSNKAGVNPVIVNGKPLKSINQYYNKKKAEYQSRLLKGVFTSKRISKLVFKHECKVNDYLHKASNFIIKFCLDNKLNTLVVGYNEFWKQGVSIGKVNNQKFVQIPFEKLLQMLTYKCQKHGINIITHEESYTSKCSFLDNEIVEKHEVYLGKRIKRGMFKTAIGKFINADVNGSYNILKKVIPNAFANGVEDVVVHPYRVNL

SEQ ID NO: 43282 - protein, 442 aa, unknown
  TnpB Polypeptide
MELSKTYKYKLKLTKTQEKVVQGWIHTCRAIYNLALDTKIYAYKSNKISLSCYDLQKQVTELRSCGEFEWIKDVPSSSLQDVLERMDKAYSKFFSGGGFPKFANRDKYRSITFKSIRQTGRNRIVLPKLGSVKFFDSRIMKGDLRRATITKEIDGYYINILTRQKVEIKPKSFHSDKQAIGIDTGITYFLVTSDGEFVENPHFLKTQQRQMKILQRGLARKKKGSSHYEEQKVKIAKLHTKVKRQRLDFLHKTANKVLAYDFISAEKLRLKNMTKSAKGTVEEPGTNVRQKSGLNRSMLDLGLGIFYDIIRYKSLWKGKMFVQVPPQNTSNTCAICGYSHKNNRKTQSKFICLKCGHSENADYNASEIIKREGIPYFRKRETTVCALEKNLANFYLRSVKEMRQLYKKISQKKKISNKFVMKITVTVITKTPRLEPLPQISV

SEQ ID NO: 43283 - protein, 270 aa, unknown
  TnpB Polypeptide
MKQVIVLKLEATPEQHQALLETVEAFNRGCNYVAGVAFAKHLPNKIALQPFVYGTLRAEFGLSSQMAVRCISKAVEAYKRDKNIQPTFAPHGAMVYDERIMSFQGVSHVSLLTLTCRVLVPLRFGDYQADRFGRRKGQADLILKGDTFYLYVTIDLPTPPPTEPTGVMGVDLGIVEIATDSDGNQYSGSAVKAVRQRVKEHRRQLQKRNSRSAFKRLQKTRRRQSRFVRQTNHIISKELVHRASLSSKALALEDLSGIRGRANGFGRQMR

SEQ ID NO: 43284 - protein, 444 aa, unknown
  TnpB Polypeptide
MGRRLLLIEVHTVMNKTITLQSVKPNNLIYRECEDLCVISKQLYNVGLYELRQALFNNNEFLNYKVLYQEMKNNENWTALPRKISNKVWMQVTGSWSHWLKSLKEYKNTPSKFTGRPRLPKYNKSLNIVTYEQGALGTKGLPENQIRLSKTNIILDTSLIGGQVKEVKIIPKNSHFLIKVTYTEEMRNNDLDYSKIAGIDLGLNNLVTVATNQADIQPRMVNGRPLKSINRRWNKQKTKLQSKLKKDIFNSHQIKKLTEKRNHQVDTYLHIASRMLVNWLVKNNIGTLIIGKNLQWKTGIKIGKRNNQNFVQIPHTRLIELVKYKFEQENGIVVVNEESYTSKASALDLDEIPTFSKRRNQKYDFSGKRVKRGLYKTLQGLLINADLNGALNIIIKVAKNSLDDLVSDKQFIHHCATPKFFYMWHTNEITKSHFFCNCKICPTK

SEQ ID NO: 43285 - protein, 393 aa, Halomonas sp.
MSTEILKATKVRIYPTPEQTEFLNRQFGAVRFTYNKALHIISSQYKRHGLKLKAKKDLKPLLAVAKKSRKYHWLGDFDSIALQQACINLDKAFQAFFDPKLPARYPTFKRKHGKQSSYHCMSVSAGDNWIKVPKMKPIKARVHRELDGKLKSITLSRTVTGKYYASLLIEDGVEAPVPMQTVDTVLGVDMGLTHLAIDSEGNKIANPRFLKRAAANLRRKQKALSRCQKGSKGRAKARLKLAKAHERLANARADFQHNLSRQLIDENQAVVVETLKVKNLLKNRKLAKHIADASWFGLIQKLAYKAKAQGKYLVKIDQWFASSKACSCCGHQVDSLPLSVRNWTCPACAAELDRDINAAINIRQQGIIKLRAEGLSAPANGGLRKSGHAPVAA

SEQ ID NO: 43286 - protein, 399 aa, Halomonas sp.
MLKATKIRIYPTTEQATFLNSQFGSVRFVYNAGLRIMSHRYRCHGQSLSAKHDIKKLLPVAKKSRKYGWLKEADAVALQQSCINLDRAFQRFFDPKQKAGYPRFKSKRGRQSSYHCVGVKSGGTWIKVPKLGRIKARTHRPIEGKLKSITLTRTVTGKHYAALLFETEQDAPELLKDLDASSVVGLDMGLSHLVIDSRGHKTANPRFLKQAQRNLKRKQQTLSRKQKGSARRAKARLLVAKAHERAANARNDFQHKLSRQLIDDNQAVIVETLKVKNMMKNRRFAKHIGDASWHALISKLAYKAEESGKHLVKIDQWFASSKTCHVCRHKVDEMPLQLRSWACPACHARHDRDINAALNIKHQGILKLKAEGLSVSAHRGSRKSGTLSVAAVEVGSPAR

SEQ ID NO: 43287 - protein, 333 aa, Halomonas sp.
MLKATKVRIYPNAKQADFLNRQFGSVRFVYNTALHIISHRYHRHAQSLSAYHDIKKLLPIAKRNSRYAWLKESDSVALAQACINLDKAFKRFFKEKKGYPRFKSRRGKQSSYHCMSVSAGDDWIRVPKCSPIKAKVHRQVEGKLKSITLSRTPTGKYYASLLHEVEQSEVAPLREVDASKVIGLDMGLTHLLIDSRGKKIANPRHTQKAQRNLKRKQQALSRKAKGSARCAKARLHVAKAHERVANARNDYQHKLSRQIIDENQAVIVETLKINNMLKNRKLARHIADAGWYALLLKLEYKASEQGKRVIKLINGLPVRKPVIAAVTRWPRCR

SEQ ID NO: 43288 - protein, 374 aa, Halomonas sp.
MTKRAYKERFYPTSVQAELLAQSFGCARFVWNNTLAYRTEAYQQRGESVSHSSAEKRLVSLKAEFPWLRDVSSVILQQALRDQKAAFDNYFNPKLKARYPRFKKKDARQSIRLTKAAFRYRDGKITIAKAKTPLPIRWSRPLPSAPTTITISRDRAGRYFISCLCDFMPETFPVTPKTVGIDLGLADLFITSEGVKSGNPRHLKSYESKLAYLQRRLANKQKGSNNRNKHRQKVARLHAKIADCRRDATHKATRALINENQVLCVESLNITGMVKNRSLAKAISDAGWGEFVRQLEYKAAWAGRQLVKVSQWFPSSKLCHSCGHKVAKLPLSQRHWCCQGCGHPIDRDINAARNIRTAGLAGLACGAAGAGTAV

SEQ ID NO: 43289 - protein, 427 aa, unknown
  TnpB Polypeptide
MELIMETVRRYNYRMYPTRGQCEALSRLFGACRFAWNWYVRQRLTDWSFNRSRPSYAELSAKFNRTKTEPGLEWLTGVSAVPLAQSLRQCEKAYSAFFRYVEKHGYHIDHKGRPLGYPRFKSRHCGEQSAMFTTSARFHVRHERNARWMFLRLPKIDGEIRLRWSRDLPSTPSSVTVMRHADGTYEASFVVKAGPRKAPRPRHNACGIDMGLESLVSIVYSDGTREKVAPLKALRKAERRLRKLNKELSRRQRGSSNYNRTRQAKARLYARIGAQRRDLAYQLASRVAGENQAVALETLCVKGLMRTRMGKSVADAAWSMFTDRVDALCAQWGRKAIHIDRWCPSSQVCSQCGRRDGPKPLNVREWECPDCGTLLDRDYNAALNIMDAAGLAESLNARGGDVRRRLASAGRNAVAREAGTYRTAMPH

SEQ ID NO: 43290 - protein, 557 aa, unknown
  TnpB Polypeptide
MGNKHAEERKPAKPKTPTFLLELPLVAEAGQAARVGAHLEVGRQFYNAVLSAGQQRLRRMRADPAWHAARAIPRTHKQERRAAFSALRERYGFSEYAFHELAKELRVFWLAEHLDAVLAQTLASRAYRSLNRVCVGKAKRVRFKSKGRGLSSIENKRNDTGMRFVLQTQDQGRPQGHLLWHDEKLRALIDWDDQVVAHGLAHEIKYARLVRRRASSPRAQGADSEGERYFVQLVLKGLPHHKPKHTAGSDTIGLDLGPASIAIVPRQAEANLVPLCAELRPDARAIRRLQRKMERQRRAANPEHYDERGRPKKRGKGAPRWKQSRGYQATRQRKAARERRLAAHRKSLHGRMVHEIVRVGNTIVTEKLSYRGWQKRYGRSVGRCAPGMLIDHLRRTVASTGGTLHEVPTCTTKLSQFCHGCGTFVPKPLWQRWHECPCGIGPVLRDLYSAFLTAYLDPAADFIPSCAQYVIPWEGAEARLRAAHERVIQRANEGQVLPRSMGIPRAGARLPQSRSEPTQEPVFLLRRGRLEAWKERENPRGLSPGSIQHSYSSFVMR

SEQ ID NO: 43291 - protein, 341 aa, Escherichia sp.
MHQENTMLPRRISVSLFIDQSIIWPVKRLQAFKFQLRPGGQQEREMRRFAGACRFVFNRALALQNENHEAGNKYIPYGKMASWLVEWKNATETQWLKDSPSQPLQQSLKGLERAYKNFFQKRAAFPRFKKRGQNDAFRYPQGVKLDQENSRIFLPKLGWMRYRNSRQVTGVVKNVTVSQSCGKWYISIQTESEVSTPVHPSASMIGLDAGVAKLATLSDGTVFEPVNSFQKNQKTLARLQRQLSRKVKFSNNWQKQKRKIQRLHSCIANIRRDYLHKVTTTVSKNHAMIVIEDLKVSNMSKSAAGTVSLPGRNVRAKSGLNRSILDQGWYEIRRQLEYKQL

SEQ ID NO: 43292 - protein, 373 aa, unknown
  TnpB Polypeptide
MSKAPKTNIRVLRERVKDKHCAFLNSLAKEVNFVWNYCNELSAKHTERTGQFMSSYTMDKYTAGSTKEGLSIPASTVQAISSEYCTRRKQFKKRRLAWRKSGGSKRSLGWIPFKKDAIRYQHGQIFLQKKPISIFKSYDLSDKIIKCGSFSQDARGRWYVNLTVEVQIATVNTSTKAIGIDLGLKTTAVTSDGDQMVSRRYRELEGKLAMSQRANKAKLSKTISAKIRNRRNNDQHQFSRLLANEYGAIVVGNVSSSKLIKTKMAKSVHDAGWSQFKTMLEYKCHEAGVVFLEVNESNTTQTCSSCGEKPPSRPKGIAGLGIREWTCDCCGVIHDRDINASKNILRIGLDTLAVGASQLNQGRFEPPCFSYGE

SEQ ID NO: 43293 - protein, 409 aa, unknown
  TnpB Polypeptide
MLNITYEYRLYPSAQQAQLMTEWLTTCRKVYNYALAERRDWIKSRKCEVNACSLHSEYIIPVDALKPTYYLQKRNLTAARKVIPTIGAVHSQVLQDVMGRLEKAFNALWNSGHGFPRFKKRFRSFTFPQLGKNPVGERTIKLPSIGEVSATLHRPIPEGFEAKQARVIRRPSGWYVQLVLEANVEVPDISPNGHALGIDVGLNSFVATSDGELIARPRFFVEAQHKLKLLNRAVSRKKKGSKNKLKARQKVSRFYERIANRRKDFHRKTAHQLCDSAGMVFAEDLNLKGLAKGILGKHCLDAGWGAFLDTLAIVAWKRGVYFSKVPASGTSQECPACSASVKKDLSIRVHSCPECGYETDRDIASGEVIRNRGLKAVGHIAYACRADLVAEAVKQENSRGNSREASAVP

SEQ ID NO: 43294 - protein, 373 aa, unknown
  TnpB Polypeptide
MILSKKVRLYPSQFQEQKLWQSVGTARFIYNWTLAKQEENYKNGGKFISDNDLRKEITILKKTELNWLNEVSNNVAKQAVKDGCEAYKKFFKVLADRPRFKSRRKSKPSFYNDNIKLKVKDNAVLIEKVGWVTVKKNSIPMNCKYTNPRISFDGKYWFIAVGIEKEIPLVELTDESIGIDVGVKDLAICSNGMTFKNINKTKKVKKLKKTLRRKQRQCSNKYEKNKKGKEFVKTKNIAKLEKQIRLLHRRLANIRSNHLHQATNKIVKTKPSRVVMETLNIKGMMKNKHLSKAIAEQCLYEFKRQMKYKCEFYGIEFVEVDKWYPSSKTCSECGHVKTKLSLSERTYVCEECGCVIDRDYNASINLSRYKLVG

SEQ ID NO: 43295 - protein, 411 aa, unknown
  TnpB Polypeptide
MILSEQHIFARGSRAFQEFEKLCCNANNLYNATMYCVRQNFFAGKILTYPEVNQQFIKNKQADYYSLPTKISQQVQRNVVAAWRSYFSSIKDYRRNPSKYQGKPHIPGYRKRGGFYTVPFTIQSIAFNNRNVKKGFLKLSGTSVLIKTQQKEIQAARLVPLDRNHIEVEILYNAICHEKRNTGKIASIDLGVNNLATIVYPNSQTEIINGRPLKSINQFFNKKLAKVRSKNSQKGQQTRKEVNLISKRRNKINDYLHKASRYIVNQLVSNDVSELVIGYNAGWKQDTTMGKAGNQRFQSIPFYKFINMLTYKCELIGIAVTINEESYTSKCSFLDNEEICKHDEYKGKRIKRGLFKSSNGRLINADVNGALNILKKYLEEKAVRNKERILNSLDLIEVCSTPAVFTVKLIA

SEQ ID NO: 43296 - protein, 482 aa, unknown
  TnpB Polypeptide
LGNDKQVFVYTRKLNANKSHKEQFAKRFRMADDIYKKTLITLLKRYSKMKKDPLYKKAYKFPKGKERNAILKELGVKYDLVGKFTASKFANDYRNARNYSDYIPSDTAVKLGLRAWGAFGKVMFAKGAERVNLLGTVTSFEGRINVAVSVKNNIFTISTRKKKVSCTIHNENDAFEEEVLRNTLKYNRLIRRFEFGEWNYYVQSIFEGTLPTKYTSELEGSVGIDIGTSTIAVSSYYQTELEELAKDVTLNQQEVTRLSRKLDRQRRANNPHKYNENGTIKKGVRQPWVDSKEYLKTKAELSELNRKATEQRKLAHKTLANKIVRMGSTFVVEQMSFKGLQARTKETKVNEKTSKYQSKKRFGKIILHKAPSMLIEQIRYKTMYQGKTFILANTREVKASQLNHLTEEYNKVSLGTRAKMIGDDLVQRDLYSAFLLQHVGIDGVTVDIEGCKSDFDTFLRNQEFTMSQLTTDLKSVGKEYFN

SEQ ID NO: 43297 - protein, 428 aa, Halorubrum sp.
MKYSPRYRLFPNTQQREQLEWTVDVVRQVYNDALGKYKEVPRDAGTLRQRVRSIRDELPSMKSWWSELNDVYSTVLQNAVMRIRDNVKSLQELQKQGSGAGELKWKAPREFRSFTYNKKGFELDKKSGPSGRGTLTLKKIAGDNITVPIRLHRDFPEHDSIQQLTVKQDTTSAWHVSFTIKTDSPEKPAVDEIDVSDCVGIDLGITTFIHDSDGREIGRLDLSEDRERLERAQRSLSRKQHGSNNWSEQRRRLAEVHQRMSNKKRDFKHKLAHFYTTSYDAVFLEDLNVKSVLEGDGNARNTQEVGWRDLIRIFEHHGRKNGCHVITVEPAGTTKECASCGVSTEKPLWVREHSCPTCGFSTDRDLNAAANILHRGVEELGVVHSESTPAETATATSTDGSCLAAVVDASRVVEAGSRVLKEPASTRE

SEQ ID NO: 43298 - protein, 376 aa, unknown
  TnpB Polypeptide
MGIRVRLYPTEEQEILIDKTLGCVRFVYNQTLADCNQSYKQTQHFPSKKERSANLVHLKSEYEFLKEVDACALQRSVKDFDHALDNFFGNRDYFSFPKFKSKRRCKQSYRTPGGRSNVGILDNKHIKLPKLGKVKTKRFNMPEVYKIFNITVEKTTTGKYYASICIETEVQPLPKTGKQVGFDLGLIDLLVGSDGTRYERPKFAYAFKDKLAQEQRKLSKMRTKLERVNANLDECRNYQKQKHEVAKLHEHITNCAKDFNHKLSRKLVEEYDLIAMEDLNVSGLIKNHRLAYSILDVRWSQLLNFIQYKCQWYEKKFVQVDRFYASSKICSECGAYHKDIVNSLSVREWTCPDCGSHHDRDVNAAKNILIKALSVA

SEQ ID NO: 43299 - protein, 268 aa, Actinomadura sp.
MSQIMKRAYKYRFYPTPEQAELLHRTFGCVRLVWNKALAERTRRYEDEGKNTSYAETAKWLTDWKRDPELEFLREVSNVPLQQALWQQQAAFNNFFAKRARYPRFKSKKKSRKSATFQNNAFSFRDGRLKLAKMTEPLDIRWSRPLPEGAVPSTATVSQDAAGRWFVSLLVEEVISPLAPSRGQVGIDAAWTELRWMLEYKTAWYGRELLVVDRFFPSSKLCSARECGYRHTEMPLDVRTWTCPGCGTVHDRDVNAAQNILAAGLAER

SEQ ID NO: 43300 - protein, 433 aa, Actinomadura sp.
LRFPVCSGDGWQNRGVRLRYKFRLYPTAGQRKALARAFGCARVVYNDALRARESARSAGRPYVSDAELSRRVITQAKKTPERAWLGEVSAVVLQQALADLNAAYRNFFASITGRRKGPKIAPPRFRSRKDTRQAVRFTRNARFTITAGGKLRLPKIGDVPVRWSRSLPSEPSSVTVIKDSAGRYFASFVVDATDGPPPPATAEVGIDLGLRHFAVLSDGRRITNPRFLRRAERRLRRAQRNLCRKQPGSNNRAKARIRVAKAHARVADARRDWAHKLSTRIIRENQAVYVEDLAVSGLARTRLAKSVHDAGWSAFVAMLEYKAARHGRTFARIGRFEPTSQVCSTCGRRDGPKPLHVRAWTCPACGVRHDRDVNAARNILAAGRAERQNACGGLVRPPHQVARPDEAGSHRGAAQAARHGLNPRLSDRGARQR

SEQ ID NO: 43301 - protein, 315 aa, unknown
  TnpB Polypeptide
MRQVERHWIKEGHTLYPICDDLTFKAKNLYNAGLYRIRQSIFERSKYNNKEEKPSVLSWIELVSQFRKEKQSDMLALPSKVSTNILKTLGSSISSYYQLLKCFYDKSNTSLSSKPQLPQYLRKTKGRYIVEFTNQTFSKKRGLNGELILCPKDFSLVIPTKVKNPKCVRIVPKLKAFVVEVVYEVKPTPLKHTENYAAIDLGIDNLASVTFSNNVNPLLVKGSKLKSINQGYNRLIAKATSKLPMSQKTSQHILRLWKNRELKLQSELHKITSFLSLYFDEMAIETVFVGKNLGWKKEVSLGKKNNQTSILRKTN

SEQ ID NO: 43302 - protein, 372 aa, unknown
  TnpB Polypeptide
MYSGGRRKGMLKLYKYRLYPNTEQRKKLEATLEACRWLYNYCLEERRNAWQQNQQRLTAYDQIKELPKLKKKHQFLASVYSQVLQDVVRRLDKAFQAFFRRLQTGQNPGYPRFKGHGRFKSFTYPQSGFRLVNNRLVLSKIGEIRIKLHRPLEGKVKQLIIKRQADGWYACFVLEVAPQPLPITGRRVGLDRGLKYFVATSDGQLFPAPKFLYKAEQKLKRLHRMVSRRRKGSNRWKKAVAILAKVYLHVANQRLDYAHKLARYLVDNYDLIAVEDLRVQGMVHNQHLAKSILDAAWSLFLELLVYKAAGAGRQVVMVDPRNTSQECSACGRVVPKTLNDRWHYCPHCGLSIDRDINAARNVLQRALALQVA

SEQ ID NO: 43303 - protein, 403 aa, Thiothrix sp.
MQRLQAFKYELKPDSKQRRLLLRYAGSCRFVYNKALALQQANYASGGEFIGYVAMAKHLTAWRNSTETPWLKDSPVHPLQRVLKDLNKAYQNFFANRADLPRFKRKGSGDSFRYPDQKQIKLDQCNNRLFLPKLGWIRYRNSRDVLGELRNVTVSSKNSKWFVSIQTQREVEHPVLTVTTAIGIDLGIARFATFSDGSYIAPLNSFKIQQAKLAKYQRRMAHKQKFSNNWKKAKAKVQKVHTQIANSRRDFLHKATTTISKNHALVFIEDLRVRNMSQSAAGTAENPGTNVAAKSGLNKAILDQGWGEFRRQLDYKLAWNGGILFAVPAYYTSQECPECHHVSANNRQTQAKFVCVKCHYENHADHVGAINVKERGHRLLACGDAIFSRSMKQELAEVSQLFS

SEQ ID NO: 43304 - protein, 470 aa, Scytonema sp.
MLVGYIYKLNPSPSQSAVMEKHVEMLRLQYNFRIRERAQAYEQAKSPVLGNYCDLATSSECCPLTCSVSKNALYGSPWTASGKKRSALAQQDADLPNLKRERPWYGQIQHHVLQQMLRRVDDAFQRFFRGEAGYPKPKRRSKFRSFSYPPGDVRFQGNRVRLPGIGWCRFFQSRPFPDGFTVKTVTVRSKADGWYISVRLQDNSVPTTPTPLAVKSAIGVDVGIAKLASIDTGEIIPNPGFLKSSSRRRRILHRRASRKRKGSKNRRKAYKKLACLEQKIERRRTDYQWKVAHKLTRTTDLIIFEDLNIKRMMARCKPKVDPETGRYLHNGQAAKRGLNRVIGDAAWGELKQKTIVVAAKSGVLIHSIHPRHTSQECSCCGYKSPTNRDQEKFLCESCGHIADADIDAAVVIRQRGLKELGISLPLLGVPQKVTPEKPVARQGKSATLVAESRNPQKYEQLSIFEWRKSG

SEQ ID NO: 43305 - protein, 518 aa, unknown
  TnpB Polypeptide
MEMAKTNKFLTFLIDMPEDLIWIYDFLQTKMNLWIGNPIIREQLFQIDLSQPRGKIWEEIRNIVGQEEITQWKIPNPAWYSRMIFENIRRLLLSKQEAIVCFEELKKNGNKIDVALLEKLNEKGIFKKKSFLLNLRRSDEPPTLARKATFVMDYSVSIDQTCIRINETTFGFKVQKGEYLTYEVVLPLSLRKNLTGKITKPRFLKRKRDGKYVGHCSYEVKIEPSKGQNILGVDLGKKKLFSSVVLYSDGSYSEEIVSSRLSSTVDEKLKRKKKDLDRLLYKNRTLEKLINGDINLFNSHLEEIRQRRSVQIVELRMNMSNTKRTQAKQIAGEIVSIAKENDCKEIHVENLSWLESQGGRWNHSEVQDFITEFAELEGIKVIKIYAKHTSFAHPITNELGRKSGRNVRFSNGDVIDRDLLASINIAKRNKRNQKDNRINKLRKGHTSTPKKVKKPSNRKVSLAIKNKLLEKNQRGTEIVVFSPRQTHKGTWAVLDVSSKPHMLSLFHLRHPMSICYMT

SEQ ID NO: 43306 - protein, 396 aa, unknown
  TnpB Polypeptide
MHSVGPSHSTRVLRVRVKDRHAAWLSQLSREVNMVWNYCNDLQIRVFERERKFLTGFDFWPYLKGCTRGETALSLPAQTVQETAEQYARSRRQHKRVRLAWRKSKGVRRSLGWLPFKVRTIKYAHGQIYYAGKWLSVWDSWGLGEYELRAGSFSEDSRGRWYLNVTVNMKRPDRVAPDGSAIGIDLGLKDLAVLSDGSKVAAERFYRDLEPALATAQRAGKKRRVKAIHAKIANRRADFLHKLTTKLVRQHAVICVGDVNASALARGPHAKSVLDAGWSAMRTMLQYKCDDAGAWFVEVPEAGTTRMCNFCGAMSGPQGLAGLAVRLWACAVCGGSHDRDTNAARNILARGLAIFEEQFSAAGEAKVVEAVVNEIGQHAASVGVGHDPLAVGIPVI

SEQ ID NO: 43307 - protein, 357 aa, Deinococcus sp.
MNDQTHHTSHVIRVDRSTYRHLQQAVASGQLQPNAEHLDVMTHGQIYRPNVQMLNAQMLIHDRELQLGSLTITGEFYRVPEQEYTSIITASLGAYRQYPDVYPLLTALLSPMTPADETTWLQDVRFTVAQGRQLASGTDMVDDIWTPTAWLRDRTRLIELGGDWFIVLYVAQPPRRAVPEGHDVIGVDIGLNPLATAAWGQQHAVTWRLAEPAVPAGESAEVRLLAETLTYAAARAALEDLMVQVLPQAGTLVLETIGYAQFRGDFTASARRRAVADWHQSWGPQRAYARGIRVVRVPAAFTSQTCSQCRVYTLGTRQGATFTCPQGHVLNTHINAARNLVRRYWGLQARARRRRVA

SEQ ID NO: 43308 - protein, 252 aa, unknown
  TnpB Polypeptide
VQAARNRAAEAVKGVVERWKDGKKASRPHFTSRFASYDARTVTVNDDHCTLATIDGRVTAEFVLPDGQRDTPHSAYLFNDDYDVKGATLHYDTVEDCFYLHVRTKPTVENDDAGTGDAKHVSVLGVDLGITNIATTSTGTFWSGGELNHWHREYEKRRGDLQQTGTRWAHENVQRVGRKQTGRFEQILHTISNELVEEALENDCTHMVFEQLNGIRERLPHAKAVHKWAFHRLCEYVTYKAESEGLVVRQIN

SEQ ID NO: 43309 - protein, 228 aa, unknown
  TnpB Polypeptide
MTTLRSELPDLKKWWDGLSDVYSKVLQTVVERLFDNLKGLSALKKKNGHGVGQLKWKPPREFRSFTYSQSGFKLDKKGGQTVLSLSKLADIPIRLHRAIPDDATLKQVTVKKEPTGEWFATFGVQMDREPPEPPENPEKCVGIDVGILKYAHDTDGTAVGSLDLTDKRERLERERANSRGSNTGRTTTRSNGDESRSVTLISGRSAVTSCTNSRRITLGSTISWRSKT

SEQ ID NO: 43310 - protein, 366 aa, unknown
  TnpB Polypeptide
LTANLVQKGSGVLLRPQKKWCCPSQKQERTSQPHFDAWSVVYDKRSATFHRDHVSLSTVNGRVECDYVIPDDPEETPIGEYLLNGTTSSVCPRCSTTAPQSRSISTQKCAEPNVTRKSSLRLLFDDAKHRTVLGVDLNVDGSLAVTSTGVFIGNADEMNHRRREFEKTRGSMHQTGTRSAHLSIQSMNDREHRWMQDELHRASNRILEEAHEHDCTHIAFENLTDIRKRMAGAKRFHAWAFRRLYQYVEYKAEMIGIEVEQVSPAYTSQRCSSCGFTHETNRQSKHQFVCQKCEYELNADYNASKNIGHKLLKTPPLGAESSSGGAPCQCALKSGTLNLNGDFYASVESTAEGESIDKPTTSVVGN

SEQ ID NO: 43311 - protein, 352 aa, unknown
  TnpB Polypeptide
VVRLRRRSGQSTRLSERKLLRRPRPSRPRRTPAFHCDVEAERHQTRHHKQPCSPLKKVRTTRNTRERGNTSLSNTRHAPASRSRTYSRFRAVYDSTKERWELHLVCKDEIETPNAPGNETAGIDLGISNFAAVAYSTEDADLYPGNRLKQEDGYYFPKEIAKCDDSGGDRATRLHHKWAERRTHFFHSLAKHIVERCVEKEVGRINVGDLEGVREDENGSSKKLGQARESRLTRVGVRPLQLDSEYKARVEGIEVLEVSERDTSKTCCTCGKTDDSQRVHRGLYVCDECDAAFNADVNGAENIRLDSNESNSKSAPDLGGDRSTGWLAQPGVYLHDLSRGFQPRTEVVDCKP

SEQ ID NO: 43312 - protein, 314 aa, unknown
  TnpB Polypeptide
LDQAYINFFRKRANFPKYKKKFRHDSIRFPQGVELDEAKQQIRLPKIGWVGYRKSRDIMGAIKNVTVSRRGEKWDVSIPTEYEVSLPAANPSEIGIDMGVKRFVTMSNGDFVEPLNPFKQEREKLAKLQRKLARQKKGSRNSRKTKRKIARLHRYIADSRRDFLHKTSTKIAKNHSIVYVEDLKVSNMSASAGGTKESPGKNVRQKSGLNRSILDQGWYGFFRMLSYKLERGGGKLIKVDPRNTSRTCPRCGFVSAENRKSQATFACIGCGYRSNADEVGAINVLRAGRAQLACAMSGAVRPLSAGTRRDPLQH

SEQ ID NO: 43313 - protein, 401 aa, unknown
  TnpB Polypeptide
MAGKEKAFRESGKCLQYITIKARLYPTEQQAELFEKTFDCCRYLWNQMLTDQQRFYLETGAHFIPTPAKYKNLAPFLREVDNQALIQEHNKLCQAFRVFFKNPESFGYPRFKRKKDDKKSFSACNHNFPSGPTIYTTKDGIRMTKAGIVKAKFSRKPRADWTLKRITVQKTKAGTFYCYLVYAYRVCTPKAIQPTEERTVGIKYSVPHFFVTDDGTTADPPHWLRESQEKLANCQRKLSRMQPGSKNYQEMVQKYRALHEHIANQRRDFIHKQSSQIANDWDAVCMRDDALDEMSRTMNRANLYEAGFGMFRECLKYKLARQGKQYILVDRYYPSSRICRHCGYELPQAADYNRQTWNCPQCGALLNREVNAAQNIKQAGLRQISSHGETCKPCKKSPPQK

SEQ ID NO: 43314 - protein, 522 aa, unknown
  TnpB Polypeptide
MLTKRKRLELLEVARRAARARDAYVRDYWSPKYFSRVLAAPNVLVEERRSRGWVLADLSPHYNKVCMESALGILRAGWASAIASARREIMSDECLAPEDKSEALRLLKDRNALAACLVGMHDKTRAHQALARRVRRFVLNARGQMPKASRRAWFDLDCNLYRPFVRTDDRYFKGAWIAVTGLTPGRRIKIPLAGQGIDEFASRTGHAASRPNLRVEVEDRVIFYLLSRISPGVPLGRVSAGLDKGYRTLVTVTSGQPEEAVGYGIAASELIDTVTRRAEMRLRGRRRLASYERSLRNSAPVKARHLRRRNLRAARANRCFARDRATLRQQVDTALNCLFRERQQVSSLAVEDLRFHGRSPARSLNRRLARWLKGYLHERLTYKAELNGVELKVVSAAYTSQTCPQCWFASANNRNGDKFLCGHCGYTGSADAVAATNILRRGSDPAITQFTPHAAVRQILEDRWRSARNGRAWGSNSEVSGSDEVRQLTSGRAANNVRLGRTTIRRRSVDAVAVLIENARSG

SEQ ID NO: 43315 - protein, 386 aa, unknown
  TnpB Polypeptide
LNYINDFDYNPYNKASTLLPKLKAENNFLYLSSSTSLQMTTKDLADAFVEFKQGKKGFVKTKKKYVNKFSFNSYIKIDYDNSRIKIPKIGYVRFKQSRPILGKPFNVTVSKEADKWFVTIQTKRILSPVNPTDLELPEKVLGIDMGIKKFIAMSEDIDFEFRGKIYNTAKIQNIDIYGYNFKQLSLLQQKLSKKKVDSKNYLKLKKKIAKFHKHIADTRQDFLHKLSTAIVKKFPNIAVENLKIKNMSKSAKGTKVKPGKNVKAKQNLNRSILKQGWGMFIDFLAYKLHYMYNVKLMKVNPKNSSNKCSKCGHAHKENRKSQAKFVCMNCRFTCNADKNASYNISAAGQAAQNCKDDLLSTCVSARKRKGNKSRTCSNPPSTILQT

SEQ ID NO: 43316 - protein, 326 aa, unknown
  TnpB Polypeptide
MLGNRDQTSSKYYPEIPCVLAKSLFAKYARNEKCKRVKRLCLPVCGDKGKQIKLEGEGIRVPAFFGKVVIPVQFPYPVAGYVRQAEFFKRGPQWFCSICYNTAKPSPVQFSGVIGVDRNSVGNVAVMADPQTGEVRHLGFNPARTKQCWRNRKKNLQRQGKRRLLSKLKRNHARRTTHQNHIVSKQIVDNAATHCRAIAVEKLENVTAKGSKIRSYSNRNQWAFAQLLQFISYKAALRGVTVVEVDPAYTSQECSRCGERHKVSGKQFQCPSCGHQDHRDANAAFVIAKRGLECIGGLAGDSARLRCGPIDGPRSGTLDATKILCN

SEQ ID NO: 43317 - protein, 326 aa, unknown; identical to SEQ ID NO: 43316
  TnpB Polypeptide

SEQ ID NO: 43318 - protein, 423 aa, Pyrococcus sp.
MIIKRTVVLKSEKLPKKIFRVFVELEGMYREMLIQLLPYAVENEVTSYIMLKAKNYDFLRSLYPQLPSHYAYTVCQDAVERVKGFLRKKRRGLTKKDYPEVKSISIWLDEKLFRLGYAFIRIATHRGWVEVPLETHKHYWRYRNSDWELAKYHARIKLDKRERRLIVYLVFKRDVEEYEPKNWISIDVNEDNVTALIDYTPIIFETGQKRITLGYYYRRKRVQEKWDKKLGPKNRVKKRIFEKFHERDRKRDIRSKLAKIIVVEAKKRRAGIVLEKLPKNAPKRMLEKIRDRQLRHRIYQSAFIGIQKAIEEKAREYDVPVIKVSPKNTSRICPIHNTPVKYDGRYGVCTVGGEVWHRDVLAVWNLYLRALQGDGGFALSSGGFSLDGSPVPLGSTATSEAVWIEKSRWLRWNSLPPPYKTKR

SEQ ID NO: 43319 - protein, 439 aa, Pyrococcus sp.
MRVKLTRTVVLESCPLTRRKFEAVKEVYTDYSGLLLILTEHAFENKIRNPVKLRSSIPPELKVKYELPSHYYYTVCQDAVARVKGFLGKKRKGKAKTEKPVIRRVSVWLDDVLWDYKRFPQFNTLKNGRKILIIRLTTKRGPIKLPLKPHKLFFKYLSEGWRVKAGVKLKLVEEERKVLAYFTFEKEFDEPEVTGSFIAVDYNADNVSFGNHEFLIQVRTELGRLTRFYSDVRKNVQESHLTGWRRKLPSRKGRKLLKKFGQRKMNRRVDLQRKMAKRLVEVARETNSTIILEAIPKNFNQRVTKRRKKNEKRLRNTLHNIGMSSFQRFVFEKAVESGVPVVFINPAYSSQVCPNCGAFGVRPDDDALRRRVFECPVCGFNLDRDFTAVLNLVGLFPFSPKADEPPAEGTVFPMTLVAEANLLHHKNSLIVISQCLQRQ

SEQ ID NO: 43320 - protein, 393 aa, Pyrococcus sp.
MPSETIKLTAKFKLKKTPKGLDDLFSAYREIVNFLITYAFENNITSFYRLKKGTYKELRKKYPQLPSHYIYTACQMATSIFKSYRKRKRKGKANEKPVFKKEVIMLDDHLFRLDLEKGVIKLSTPKGWLNLKFYPAKYHEKFKDWKVGQAWLVKTPKGVFINVVFSKEVEIREPKAFVGVDLNENNVTLALPNGEFVQVITHEREIRTGYFVKRRRIQKKIRTGKRRKELLQKYGEREKNRLNDLYHKIANIIVGFAERYGGIALEDLSGIRGSIRYSVELNGRLHRWSFRKLQSIIEYKAKLKGVRVVFVNPAHTSSLCPICGGKLSPNGHRVLKCKKCGFEADRDVVGSWNIRLRALKMWGVSVPPESPPMKTGGGKPTRYEINTLHTLNG

SEQ ID NO: 43321 - protein, 447 aa, unknown
  TnpB Polypeptide
MKHISSYGIEFKNYHSAVKRTVELYRASVNYLSQIVLDNWDEISDKETILLKKQHIERMVHGTSKRTARCDFDVRFPKFPSYLRRSAIADAVGAVSSFKSNYKNWVETGSVGNPPVFGVDRDVCPCFYRGNMFRFLGADKAEIKVFDNNDWVWRTVRLKRTDVRYLDKRMRVNKTASLSAPVIEKKHQDHYFLRFTVTEDVELSDKLVFNQRVCAVDLGLNTDATCSVIDVHGTVIARKFINCAREKDSVTNALHRVSVFQKLHGSHDSGRLWSVVKRRNNNHANLVSHEIVEFAREQNCDVIVFEYLKTNGRKHGSKKQRLHHWKHKGIQKTTESLAHKYGMRISHVCAWNTSRLAYDGSGAVKRGRAVNENNPYDVCQFTSKKMYNCDLSASYNIGARYFIRTLLNEFPDITAEVPGIGCGTQRTLSDLWRINNAIEQEIHNVLS

SEQ ID NO: 43322 - protein, 419 aa, Okeania sp.
MEVIKMYGCQQELIKSPENLSFLEYLCTTANNLINCSIYLARQWYFKLGYITGKYNLEKQLKSNINYKFLHSQAAQQTLRGVAEAFKSYKELSNKYNKGELADRPQLPKYRKKGGMGVITYPKQALKLEKGKVRVPLGKKVKALFKIDAFFLNFPSNLEFKEIKEIRILPRNGCFYVEWVYELKADKPQLDKGKVLGIDHGVDNWLSCVSNVSTSFIIDGKHLKSKNQWYNKQVANIKEGQPQGFWSKKLARITEKRNRQMRDAVNKAARLVINHCLEYGIGRIVFGWNKGQKNNIDIGTKNNQKFVQIPTAKLKERINQLCGLYGIELIETEESYTSQASFLDDDFLPTIGEKPKSWNASGKRIKRGLYQTLYGLLINADINGAANILKKVATTLGFSLEGVGRGTLTMPLRVRFWTA

SEQ ID NO: 43323 - protein, 378 aa, Sulfobacillus sp.
LRPSKSTSKSRGNETVSVLRFRLEPTKEQEQKLFRTFFLCRKLYNQALEDRVMSYREKGITIHYTDQQNRLPVWKREHPEYQEVHSQVLQNVLQRLDQAFVNFFEKRAKFPKFKNKFMFRSITYPQARDTYFHDNQVYLPKIGWVRMRAHLPFDPASVKIINVKFHDGKWYVNLTSVTKTIAPRTETCKSVGIDLGLLSLVATSDGEFFENPKWLQKSEKRLKRMQRQLSRKKKGSKNRQKAKHKLQGVHDHVANQRKDHLHKISRSLVDRYDLICMEDLQVKEMMKNHRLAKSIGNASWGKLATYLEYKAKNAGKHLIKVPPHYTSQRCSGGCGTIVKKNLSVRLHQCPTCGLEIDRDVNAAINILHRGLEIRHQAS

SEQ ID NO: 43324 - protein, 421 aa, Leptolyngbya sp.
LLKPLYIKGFSLHFVRYSELMKLRYRYRIYPTGQQAQSLAQLFGCSRVAWNNTLAFCQSSYAQGEKYPGFAALSKRLTAIKQTEGMLWLTDVAAVPLQQSLRDLDVAFRHFFQSATGKRKGAKVRMPRFKKRSNAQSARFTGTAFRVADKLTLAKVGAVKVRWSRELPPAPSSATVIRDAAGRYFVSFVVEVDRSLLPWCEQSCGVDLGITTFATLDDGTKIDAPKPLKRHLKKLARLQRRLARSEKGSNRRRAAVYAVAKVHARIKDIRTDFLHKLSTRLIRENQSISLEDLNVAGMMRNRKLSKAISDLGWRTFRTMVEAKGKMYGRDITIISRWEPTSQTCSVCGHREGRKKLSVREWQCLNCGAQHDRDINAAVNIKVAGGQSETQNGRRRACKSGTPAVLVDASNQPHFGQLSLSF

SEQ ID NO: 43325 - protein, 370 aa, Opitutaceae sp.
METTRTIVLKLQPTAEQATEMDATLSAFAKACDFIADVARRIHSSNKVLVQKECYREVRDRFGLSANLTIRAIARVCAALKVPEKAHSTFKPTSIDYDARIFSFREWDWTVSLMLLFSRQRIETAAGLRQKQLLKGVKPTSAVLAVRNGEYFLHIQIIEKTADPVEPDDFLGVDLGIANIATDSDGETHTGKDVERVRRKHNLQRKRLGRKNTKGSKKKIRRMRDKEARFRRHQNHVISKKLVESAKDTGRGIALEDLDGIRERTTARGGDARNRLSSWSFGQLGSFIAYKAQLASVPVVFVDPSYTSQTCAECGHCERSNRKSQSEFRCKACGHEAHADRNAARNIRCRALAASKSAIELGNQPGNRLA

SEQ ID NO: 43326 - protein, 562 aa, Oscillatoriales sp.
MSHREKLAKSCKSQIKPLETGNLSAKYQQSEPHPTSDATTSTAFSEADTTELQPSTPGLAAINSEKTSTDKSATSKVSTCKPRSSKTSEADSNSKEKRCLPFWDKSCREISQQLWSDIKTDSQGSVVSSSNGSANKTIANSWFSAETSCLVNEKWLKTSLLSSTSLAADSTVWENTNLLSKKIRVYPEAKLAAKWRTWIAASRWCYNQAIAILKDEKIGKYDLRKKIMDSAPDWVCEQPYNPRQMAVFQAFEAHKAAKKAKGTAKFRSRLDTSQTIRFQTSNWKFGAFYPLATKGLTFKASEPIVEVMQHEPTLSLIDRQWFICYVIDEPKIKPIDSDLAVALDPGVRTFVTGFDGSDFIEIGKNDIGRIYRLARHLDKLMSRIGLSKGRQFKRLRYCLRKSAAKIRIKIKNLVNELHKKAAKYFAAKYKLIFLPTFETQQMVKKGRRRLATKTARAMVTLSHYRFKQMLKHQATKHGGVVVDVTEEYTSKTCSKCGHIHAKLGGAKIFKCPEWGHTLDRDKNGAFNILLKALRDTSLTGELAAFSVLPYTAILGLVRDLPG

SEQ ID NO: 43327 - protein, 477 aa, Caldilineales sp.
MAKPAKVTRILHSQGLNASKYSRLSEMAVLCGQVRSDAWRRCSGVSTVRQSPYDVRDDWMAEGYDWHGLPARLGKAVLTDALGDMAAAREAAKVKVKRAIRHRTRNDDAERKRLYSLLKRNRWTEDSFLHRQMRKRWKGGRSHVTNQIVADSGSYTTKVWKGRAWVYLQGMERGQRIAIPLKGTHLPSGTLRIILQPNGQVAVHYAVDETEVCSTRPCGDATVGVDKGYTEAYTDSDGERHGQGLGDLLAAESDHQKVKGQRRHQLRSVAEKHEAKGHHRKADNIRRHNLGRNKWNRRKRQHKKRARNHLCQAAHTVVDKAGTIACEDLTAPMKSARYRHRDTNRRLNGWVKGVMADTLTSISRRRGSAPALVNPAYTSQIDSRTGLLQGRRQWDRFYCCDGAVLDADANAACNILARLYDDEITLYTPFREVKALLVERTRLSVGTAPPGLELRGPATTPPSTESELPASVPKCAD

SEQ ID NO: 43328 - protein, 428 aa, Caldilineales sp.
LSRWGGAACASPGKSCRPPSAWKRTAFQVDTGEPEPPQRPGPTISVDMGLQTLATLWDGDEQTEIENPRPLQEALAELRHIDQAIAHSRKVHGTHRTSHRREALYARVSPLRNDHHRTTTASAKRGGTVQVEILHLAGMQRNRRLGRALGDADLAEFVRQLEYQCAWYGTAFGKVDRRYLSAKTCSACGAVKQSLLLSERTYRCVACGFACDRDANAARNLQAFDPAARSVVADAETRRSGRPTGLPGPRSVHRTGSPFPMYAGKLRLPSVLETGTRTMTHIRVLALGLVALIALVGCSGIRAPVVQEDAPAAVSADDPTSVNVIHIGAAVSETGKYSREGRDTRQGYGTWLEWVNNEYGGIDVADKRYRVELVMYDDEGDPDTVARLVEQLIREDRVDFLLGPKKVMIDEPSAGLAPGISRHIPHHL

SEQ ID NO: 43329 - protein, 189 aa, unknown
  TnpB Polypeptide
MIDGKSKRISVKTKMTDKQKLILSSYRLGTMRIVIKNINTLVAQFVYEINEIEKVNESNNVMGVDLGIKCPAVSYCTDGSVKFYGNGRKNKYMRRHYANLRKWFQKAKKPTVVKRIKNKEQRIMKDIDHKISREIVNTAKKHKAKVIKLERLENIRSTTRTSCKNNPSLHTWSFYRLAQYIEYKANLQE

SEQ ID NO: 43330 - protein, 395 aa, Oscillatoriales sp.
MEKAFSYRFYPTPEQESLLWRTLGCVRLVYNKALHERTQGWYERQERIGYEQTSSMLTAWKKQEDLDFLNEVSCVPLQQGLRHLQRAFTNFFAGRAKYPNFKKKRNGGSAEFTKSAFKFRDGKIYLAKSLEPLDIRWSRQIPKGCEPFSVTVRLHPSGRWHISIRFDAPTIQPLPINDNAIGIDLGITSLIVTSNGDKVANPKQFKKHYKRLKRVQKNLSRKQKGSKNREKARIKVAKVHLKISDSRKDFLHKLTTNLVRENQTIAVESLAVKNMVKNHKLALAISDSGWSELIRQLDYKCLWYGRNLVKIDQWFPSSKRCSNCGHIVDKMPLNIRDWQCPNCGINHDRDVNAGKNILAAGLAVLVCGATVRPEQSKSVQAGAKSLLGKKQKPKS

SEQ ID NO: 43331 - protein, 423 aa, unknown
  TnpB Polypeptide
MNDRIKAKQETSLRRKQLKPVCISAKIQENKLSSERQTRLGDMFRHAKYFYNAMINSEDIFKFDYKTKEVEVKWKEKDNEKSEIRPIFLASQIKQGLQDRTKDSVKGLKQRRKNGGKTGKLKCKREVNSIPLKQYGVTYKIKDKKIHIAGMGFMSVNGLDQLKDLNVKEFGAGKLVRNATGYYVQITCYLDKQDKNKPDNEENFPAVGIDMGIKDDVTLSNGDKFQFKFDYSKIKREAKRLSRKKIDGKNWFKQKLKLKKQYEKVTNQKEDSSNKFVSYLGKNFGYIAVQDENVKGWQEKFYGSKIAHGVLGRIKSKLMKLNTIQVVNRYRPTTQVCPVCTKLNEIGLEERHYQCSCGYSEDRDTKSAQCVLLYSIGQLPTEHRKVTPLEFLTAEATEYRKKSLSNFKSVTMKREAPTIYGCG

SEQ ID NO: 43332 - protein, 164 aa, unknown
  TnpB Polypeptide
MELSRKIAAEITKYAAEYQAGVIVFEYLEMQGKISGKKKQKLHLWRKRDIQKLCEHQAHRNGIRVSRVSARNTSRLACDGSGVVVRNQENHSLCTFRTGKQYNCDLSASYNIGARYFIRELLKPLPETERSSLEAKVPAVKRRTSCVYADLRKLYVEVNNLKAA

SEQ ID NO: 43333 - protein, 605 aa, Rhodococcus sp.
MTVAEAGCTVPRQFSYTTRPHAAIDDATDAPLGLDEIDIRVRWMLDLIGAAQSELVTRLWQPATFDALTAGRDSQGRKLPVQGHVAAARLGWNPSYPTGVYVPSRVTRVVTSQAVGTLRTLAYRDTAIGSLSARFDPVTGRLTPPTTAGEYVPSGFARGVVRQLAARSRGPGSGGDPTTCLRITDVQRPPQTSVMARLSAADHQLSQITVTDGVMVLTVKLPTTAAPTGRAHWRRVRLTAAIPPHLQTRAITEWHLPTLVLDHRGLLLRCAATEQIPTADLSGGATAVGVDWSPATLGAAAIVTEGPAGLVSDYRGFTYDDRGLGIRLARLQAEGQHLHRKAARLTRLAATAPPEVRAELEEKIAVLDAHRTAVGVKRGKINRELAFHFARHIVEYAAAAGAAVIGVEDLSTLETRGHGRVNNNRAAQSARRKAVDALAHTAAGVGVTVVSVPARGTSALCPSCNDTLSRPGGYHRAWCARCKVGGNRDHVAGVNLAKRALLGRSRVVRKRGRNPEIRNIEHAPVRQCRDKTSPTPSRPRHRRVRRSVLTAIPQVGVKQIRIVSAPRASVWDTVKPVTSHGVTGSRDVLISPTSATSVADSMRVT

SEQ ID NO: 43334 - protein, 539 aa, Rhodococcus sp.
MLNLISCAESELVSRLWQPATFDAIAAGRDSSGRKLPMQGHVAAARLGWNPTYPPGVYVPSRVTRVVTSQVVGTLRTLAYRDHAIGSLSARFDPATGRLAPPTAAGECVPSGFARGVVRQLAARARRAGSASHERVRITDVQTPPRTSVMARLSAADRQLSQITVADGVMTLTVKLPTTAAPTGRAHWRRVRLIAAIPPHLQGRAITHWHLPTLVLDRRGLLLRCAATEHVPTADLNAATTAVGVDWSPATLGAAAIVTESPDGLVSDYRGFTYDDRGLGIRLARLQAEGQHLHRKAARLTRLAATAPPEVRTELEQKIAVLDAHRTAIGVKRGKINRELAFHFGREVTDYAAAAGAKVIGVEDLSTLETRGHGRVNNNRAAQSARRKAVDALAHTAAGVGVTVVSVPARGTSALCPGCNDKLSRPGGYHRAWCARCKVGGNRDHVAGVNLAKRALLGRSTAIRKRGQNPQIRIAEHAPVRQCRDKTSPTPSRPRHRRVRRSVPTATPQGGESDKNRSCTSSVGVGHGQTCTSIACCYG

SEQ ID NO: 43335 - protein, 481 aa, Rhodococcus sp.
LPDSLCRVSFRSPPARLSARFVPWRTGTTQSVPCRPGSTPSPGARPPHRRRGHRTPTHHRCAGTAADLCDGQAFRCRSSTRTHHRRRRCHGVDGQTAHHRRPDRSGALAQGPVDRHHPTTPAHQSNHGLASAHSRPRPPWPAAALRGDRADSRCRSECGSNRGGSGLVAGHPRSGRHRHRTPGRVGLGLPGLHLRRPGSGDQAGPPASGRPTPAPQSRTFDAARRDRTIRGARRTGREDRGPRRPPHRDRCQTGQDQPRTSLPLRPGSDHYAAAAGAKVIAIEDLTTLETRGHGRVNNNRAAQSARRKAVDALAHTAKGVGVTVVSVPARGTSALCPSCNDTLSRPGGYHRAWCARCKVGGNRDHVAGVNLAKRALLGRSRVVRKRGKNPEIRVTEHAPVRQCRHKTSPTPSRPRHRRVRRSVPTATPQAGVKQIKIVPAPRASVWDTVKPAAASHVVTGSREVPTSPTSATSVADSMRFK

SEQ ID NO: 43336 - protein, 463 aa, unknown
  TnpB Polypeptide
VRVVPLNAWALLLLGLDDPRCYGGWLIGVQVERCDVVRLRPGAEHEELLFYAGDQCARLINMENYRRRQLFFAGRGIDAGVKVARELAKSVPEYKEVKGVLGSANFDEALRKVSEAWRSFAELLKEKKQGKLPPWMNPRPPGYRKRNGERVPIIIVRADNYRIDAERKVIHLGYWNVDIPFTGKLRWLSKPGAKRGRMEITYNPIKKRWYAHISVRVTLERRSAGGGFMGIDLGREVLVAAVASDGTALLYKGSALKSDYFYFEKKIAEIDKALSDPRSEEATKSVLVKERRRLYDKRKRRRDQTFANTASHVRGEAVRRNVGIVFIGYPWYISHEKPGKGNTNMWGQLQLMLRLATTLENAGIPAFAVSEDGTSKICAYHRVEARRGPRGLVHCPNGHTLHADVNGGLGIMLRGLEALGIKAELPKRIKVLSFLATPGGVTITPAIRRGNGWRALRAASIRR

SEQ ID NO: 43337 - protein, 504 aa, Chamaesiphon sp.
MPRAKTPSFITEVALVVSSKEDAELLSRFQAGRQLYNALLNEAMVRVNLVRNSPAFEQAKKIAKGKARNDAFQLAKTQQRYSEFELMSFATQAASSAKWIAQKVDSATQQKLATRAFQASEKVLFGRAKNVRFKVPNRFNSMEGKSNKQGIRWSENQLVWGKLRAYPIIDESNLVLMHGLTSIIKYVRILKRDLNGKRRWFAQLICEGLPYQKPANFINNGIIGIDLNVSNVAYVADNNAGLLPFADKVPVIKKQVSKIQQAMQRSQRLANPDNYESDFPAKRGRKVVIKKGKNKKGVRSWNKTKNYQRLAVKKRELERRRAAYVKSKNREIANDILRNGNNINAENVSIKGWQKRYGKAISAKSPGLFQSELKRKAESAGGSFTKFSTRKTALSQTHLTGERVKKSLSERVHYDQTGIVMQRDLFSAYLARYVDDDELTLRDAQTEYLRLEPVLLAAWQRSKINCERVVFDKSRLGHPPLEQFANHDKRHSQIGELCSDRKAV

SEQ ID NO: 43338 - protein, 384 aa, Actinobacteria sp.
MIKSLKYRLYPAKKQKRLLQAQLNECRWLYNHFLEERKNSWEKDRKSIGYFQQSMSIVALKKERPSLSNVYSQVLQNIADKVDKAFQSFFSRVKNGDKKVGYPRFKGFDRYDSFTYKQAGFGWKIKDKHLELSKIGSIKIKLHRSIMGILKTCTIKKQAGKWYVCFSVEYESKPLSPSEKAVGIDVGLENFATFSTKDKIANPCFFKTDQKALAKAQRKLSKQTKGTPERQKAKKIVVHIHERIFNRRHNFIHQEARKIVNRFGIICIEKLNTRNMMSNQIKVFGHKLNKSIADVAWGQFAIVLSHKAEEAGRQFIAINPKGTSQRCSQCGTIVKKELSNRWHDCPICNVRLHRDYNASLNILRVGLDSLGIKSVEAPDFSRGE

SEQ ID NO: 43339 - protein, 374 aa, Halomonas sp.
MTKRAYKERFYPTTEQAALLAQSFGCARFVWNNTLHYRTEAYQQRGESVSHSAAEKRLVSLKADYPWLKDVSSVILQQTLRDQKTAFDNFFNPKLKARYPRFKKKDGRQSIRLTRAAFRYRDGEITIAKAKTPLPIRWSRPLPSEPSSITISRDRAGRYFISCLCDFVPEAFPVTPKTVGIDLGLSDLFITSDGAKSGNPRHLKHYEAKLARLQRRLAKKQKGSRNRQKLRQKVARLHAKIADCRRDAIHKASRTLINENQVICIESLNITGMVKNRSLAKAISDAGWGEFVRQLEYKAAWAGRQLVKVSQWYPSSKLCHGCGHKVEKLPLSQRHWHCEGCGVAIDRDINAANNIRTAGLAGFACGATGAGAAA

SEQ ID NO: 43340 - protein, 439 aa, Hydrocoleum sp.
  misc_feature (62)..(62): Xaa can be any naturally occurring amino acid
  misc_feature (429)..(429): Xaa can be any naturally occurring amino acid
MIITYCYKIKPTSEQSVKIDYWLELLRRHWNYANGQRLDWLNRTRCQLDRCSIVSCPIGEIXANGQRLDWLNRTRCQLDRCSIVSCPIGEIPSKPDYYFQQSALKQTKILFPEYKEIYSEVQQINLQRLDKAWKRWLVPDQTGKRFGRPRFKKSGKLRSLSFSRVNHPKAAIKFDGKQISISRFGTIPVIVHRPIPDGFVIKTATITKKADGYYVSFSLEDKSIPSLIPTDNIKTAVGIDVGLKEFLTTNTGETVPVPNFYRKAQSNLARKQGQADRKEIGSNNWKKAQNRIAKLHQHIARQREDFHYKTSHKLVKEYDLIAVEDLNIKGLAKNSKLSKSIYDVAWGAFIEKLNAVAVKRGVHVVKVTPHNTSQNCSNCGHKVPKTLSVRTHSCPKCGIVLDRDENAAKNILNKALSEVGIIWPACGGXIEMRMQQRTY

SEQ ID NO: 43341 - protein, 387 aa, unknown
  TnpB Polypeptide
LKRAYKIEINPTDEQKSKIQQTIGVSRFIYNFYIARNKEIYEKEGKFVSGMEFSKWLNNEYIPNNKEMNWIKEVSSKATKQAIMNGDKAFKDFFKKAKGFPRFKKKKNQDVKAYFPKNNKTDWTIERHRVKIPTLGWVRLKEFGYIPINSTVKSGTVSQKADRYYVSILVEEDYKEVSKSINEGVGIDLGIKDFAICSDGNKFKNINKTYNVKKLEKKLKREQRRLSRKYESLKIRNKNIKEGRPTRQNIQKQVVKVQKLHKRLTNIRTDYINKTVAKIVEQKPSYVTIEDLNVKGMMKNKHLSKAVAQQKFFEFKTKLTVKCKEKNIELRIVDRFYPSSKTCSQCGKVKKDLKLSDRIYKCDCGFTIDRDLNASINLKNAKEYKIA

SEQ ID NO: 43342 - protein, 469 aa, unknown
  TnpB Polypeptide
VSREGRKQKSFIRNQLFIPVHSVVLYMVVKASRTVKIPLRVPSDRVDDLHATSVQYQQCQNKASDYCWNGPKTPSDLITTKKTVEDDLYHPLKKQTDLNANLVQKAFKDVTAAISSLQTTWENGDRVSKPEWRERPDESYTMTYDKRAATYNQREATFATVNGTVDCPYELPKDIEGTPYEQYVLDPDWSFSTSKLVYDGQRFHLHAVLKRIYTDGSASDVDSDTHSENRTRVLGVDLNVKGHTAVTSAGGFHGNTDHLNHRREQYEALRGELQETGTRSAHLRLQQRSNHEGNWFDQYAHDVANSVVADAVRVEATHVAVEDLTRIRQRISNQPEYQQWLFRRIQEYVEYKLEEFSIKFEQVNPRNTSRSCSRTDCDNVAASNRDGKAFCCSACGYELDADLNAAKNIAFELLADLPTSHTCSSGKATSQLALVSGTLTPTGEFSRQEWSSTDKPHPQQSERTASVSN

SEQ ID NO: 43343 - protein, 387 aa, unknown
  TnpB Polypeptide
MPRTFIRSLKLKIRSESYSWLCSAATEVNQVFNFCNATSHAASSRTDRKRKWMSGFDLCALTAGATEYFDRIGSETIQCVCLEYANKRIASSRSKLRWRVSKGVRRSLGWIPFKEKGLKRKGSHLRFCGKTFRVFERERLKDVKWRAGCFAQDAIGDWWLCLKFEAQEEQSIAPKEAVGIDLGLKDVAVTSDGERFSSGRFFRESQHRLAELQRRGHRRQAKRLHRKIRRRREDAFHKFSHHIVRTYQKVIVGDVSSTKLAKTRMAKAVFDSGWGMLKRMLQYKGEHAGRSVKVVSERNTTRACSSCGALSGPSGLRHLVVRQWTCANCGESHDRDVNAARNMLTVGSRCRTSVRGNEQSPSVHLACPTSELRILATGCPEGGMTTG

SEQ ID NO: 43344 - protein, 491 aa, Christensenellaceae sp.
MPYKTLSFQFETLTRAKREMLHQAMEAYSDGLESVLRGLLERVEAEPAKTKNGYLKMMDRKILAPLNEKGLEPFKDAIKLDAAMILTTYAGRRRRGKTVRYPSVRVYDEELDALVRRESFSKKEYGAALAKLRRLHPLFFCRYDRGRDYSLLRDTKSGRIYAKLYLYNRQNAILVHPERGRELCYLPQETETLQSGKKQRYLLLPLRIGPWQERHLEDIRQGRAIPKSAELSEENGRFALHIRLWYEPAVPLACPNTLGVSRGIRDMLAYAVLDARGQTIEEGTLRREDPQRRSRLHALSGEVLRLAERYRCRILMANLVTRSDALSALAAPGMRVGEYNALIQMIAQKAPAYGLEAPVIVSGNGIFSRCPACQEMRRASVFQGNFICVKCGYSHALETLGAVNLAGALKRYGKKKIPVTVRQEQGRIVFCNPRWGIDFTCEETAEALDHFLRYAAEYVKAMAGGRNAREKSFIKQLEGRELSQCFQYIEV

SEQ ID NO: 43345 - protein, 308 aa, Allosalinactinospora sp.
MYPTPEQANALEAQGHAARTMWNLLHDWWTQVSENRRIDLKDADAAIRQSRKDIDWLAELPAQAAQAVLKTYVQAWRNCWDGRAGEPTFKARFRSRMAIDVPQGRDLGIRRVNRRWGVAKVPKIGMVRFRWTTDMPVGKHADAHNKVTGARLVREANGWHVVFRVRTEVKEPAPHTGPGVGIDRGVAKPLALSEGTFREHGPWLKAGEEEHLRRLERKFARQRRNHKPGHKTSNRLRRTYDQIAGARESQAARHRLAAQDHHRPGRDIRRGGGRTACDRQHGPIGPRNRGCPRHRRWPEGRAEPLHRR

SEQ ID NO: 43346 - protein, 378 aa, Nanoarchaeota sp.
MNIKAVAKIKINTTNEIVRTVKIYSKCLQFCVNQAWKKRIRNNIKLHPFVYKNIRDKGLQSQLAIACIKQSCGMVKKAKTKPIIKKASIRYSFSRSASFKNNILSIATIKGRQKFQVKIPECYVKYFDNWKINESLLRIDNKGKTFFMFCFSKDFNVKNSNLHKRILGIDVGINNIAVTSNRVFFNAKQVKLKRIKFNKLRAKLQAKGTRSSRKLLKKISGREKRFMGCINHKISKQIVNSFNGNTIVIENLKGIRKVRRGKRMNFWLSNWSFYQLQKFIKYKAERKGIKIVTVSPYLTSKTCSKCKNLGSRSVCFFSCLHCGYSLNADLNASFNLAKHHSIADDVSVPVTVPDIRVYEHKSSPRTIACETMNKTHNC

SEQ ID NO: 43347 - protein, 467 aa, Escherichia sp.
  misc_feature (326)..(404): Xaa can be any naturally occurring amino acid
MHQENTMLPRRISVSLFIDQSIIWPVKRLQAFKFQLRPGGQQEREMRRFAGACRFVFNRALALQNENHEAGNKYIPYGKMASWLVEWKNATETQWLKDSPSQPLQQSLKGLERAYKNFFQKRAAFPRFKKRGQNDAFRYPQGVKLDQENSRIFLPKLGWMRYRNSRQVTGVVKNVTVSQSCGKWYISIQTESEVSTPVHPSASMVGLDAGVAKLATLSDGTVFEPVNSFQKNQKTLARLQRQLSRRVKFSNNWQKQKRKIQRLHSRIANIRRDYLHKVTTTVSKNHAMIVIEDLKVSNMSKSAAGTVSQPGRNVRAKSGLNRSILXXXXXXXXXXXXXXXXXXXXXXXXXXXXXXXXXXXXXXXXXXXXXXXXXXXXXXXXXXXXXXXXXXXXXXXXXXXXXXXIRAGMKCAASLSTSSSGVAVRCLLFRQRTQASVARAVVIQRKKIACHKVNSDARYVDIQRTPM

SEQ ID NO: 43348 - protein, 383 aa, Clostridium sp.
VIIATKIKLKPTKEQEVLFWKSAGVARWAYNHFLSESERYYNENSKSIKESDVRKNINNVLKKTTHTWLKEVGSNVMKQGVKDASLARDRWFKGLSGKPKFKSRRKSKISFYVNYESLKKVKGGFRGEKIGFVKTYSPLPKLKEEEKYSNPRISFDGKSWFLSVGYNVDFKPVQLTGKSLGIDVGIKSLAVCSDGEFKKNINKTKRVNILKKKLKREQRKVSRKLEANTIAYTKNRKPIYKTPLKDMKNIQKQNKIIRNLYKKLTDIRTNHLHQTTSAIVKTKPSRIVMETLNIKNMMKNKHLSKAIAEQCLYEFKRQIQYKCKKYGIEFVEADKWYPSSKKCSCCGAIKKDLKLKDRIYKCSCGFKLDRDLNASINLANYSI

SEQ ID NO: 43349 - protein, 579 aa, unknown
  TnpB Polypeptide
MVDEGTGDLEGDYCINLGHYAESCIRMGKARHITREEAEEIIKTAEKRGAVHQLSNIDGKDFSLFICNCKWDTCMALKTSWYTQSPNLSSSNYVAHVNKEKCVACGGCVEVCPQNAVKLGQKLCEKNVTKIHNKEIPNNHLVFGPKHWQKDFLTNRDNVVNETGTSPCKTNCPAHVSVQGYLKKAAQGKYDEALAIIKIENPFPAICGRVCSRYCEDVCTRGNIDSPVAIDEVKRFIAERELNKENRYIPEFYYEKGSGQKIAIIGGGPAGLSCAYYLAVYGHQVTVFDKNPLPGGMMQYGIPSFRLEKEIVQAEIDVLKQMSVEFKCNVNVGKDVTLDQLRNQGYKGFYVAIGAQGSRRLQVEGEDAKGVYAGVDFLNKQPKDLGRVVVIGGGNVAVDCARVAIRNAASTTMISLEKRNELPASEEEVEEALHDGVTTNCGWGPKEILAQDGKVTGIVLKKCLQVKNKVGKFNPIYDEEETMTIECDTIVTAIGQCIEWGDLLKGSHVEVLPNGTAKAHDISVIKLERLQNIRSTTRTSRKNNHSLHTWSFYRLATFIEYKAKLAGIEVEYVDPAYTS

SEQ ID NO: 43350 - protein, 254 aa, unknown
  TnpB Polypeptide
VPKAITVKREGTRWFVSVRCVEVPAEPLPSTAREVGIDLGICALVATSDGELITKGRYERRAAKELARAQQSLQRKRSGSNRRRRAAETVGRARRKVANQRRDLHHQVSRYLVNGYDLIVVEDLRIGQMVRRPKPRSDGAGGFLANGATAKSGLNRSIHDAGWAQLVTFLGYKAEDAGRQVVVVNPRYSSITCSVCGSCDQDNRRLQAEFRCQSCGHTAQADVNAARNILRAGRAQQARPVQGLKPDPLPSAGY

SEQ ID NO: 43351 - protein, 425 aa, Clostridiales sp.
MHLKGVSRCFDDTIRIYRDAVGYLCTVVLNHWDEISGISGSKEQQRFVEKLVHQTSKNKPAYGFDLRFPKFPSYFRRSAITAATGAVSSYRANLENWKNSPKGRKPRFRVRRNVMPAFYNGNMFRRENGTFFLKVFKNNDWVWEQIRVRKSDADYLQKNFGDVQSSPALEKINHGYRLRVSVEVHSDAPRFVKDEKVQTVIGVDLGVINDAVCSRIRYDGTVTGQKFISSPVEKDRKNHILTYINRVVCSRNRSRKNPRLWRFVRNYNHAIAINTARGIVDFAAESGAQVIVFEHLDLKGKKTRMQKISLWNKKEIQQRTAALAARYGIRVSYICAKNTSRLAFDGSGEVVRDGRNHSLCTFSTGKQYNCDLSASKNIGARYFLRNIRKSMDESAWLQLTAKVPEACKRTSCTLSTLIKISAVCA

SEQ ID NO: 43352 - protein, 414 aa, Clostridium sp.
MIQDLISITHVFSRRIYGLRKRLRRMIRLLKSYKVEIKPTQEQIIKIHKTIGVSRFIYNFYIDHNKKIYEKEKKFISGIDFSKWLNNEYIPNNQDKLWIKEVSSKATKQAIMNGDKAFKRFFKGLSRFPKFKKKKNQNVKAYFPKNGKTDWTIKRHKVKIPTLGWMRLKEFGYIPTNSKVKSGTVSQNINRYYVSILVEENNNTIKPINKGIGIDIGIKDFAICSNGMTFKNINKTSKIKKLEKKLKREERKLSRKYESLKFKNKKKKGEATGQNIQKQIVEVQKVYQRLSNIRTDYINKTINKIVKQKPSYITIEDLNVSRMMKNKHLAKAIAQQRFYEFITKLQYKCKLNNIELRVVDRFYPSSKTCSCCGAYKKELKLSDRVYRCNNCNTEIDKHLNASINLANAKKYKIA

SEQ ID NO: 43353 - protein, 415 aa, Streptomyces sp.
LLGVKTEHVKRAYRYRFYPTDAQAAELSRTFGCVRKVYNLALEARTAAWYQRQERVNYNATSAMLTAWKKTEELAFLAEVSSVPLQQALRHLQGAFTRFWEKRGKYPRFKSKRKTRKSAEYTRSAFTFRGGQLTLAKMAEPLDVVFSRPLPGGAVPSTVTVSQDSAGRWFVSMLCEDPAVKPLPRLDAAVGIDVGITSLVALSRPVEGLSDARGKVVNPKFERKDRASLARAQRDLARKEKGSKNREKARVKVARVHARIADRRRDHLQKLTTRLVRENQTVVIEDLSVRNMVKTPTLARAISDASWTELRSQLEYKCQWYGRDLVVIDRWYPSSKTCSACGHVKGDLPLRERVFRCDRCPLVLDRDINAARNILAAGLAVTVCGDGVRPQRRPPGRQRSLKQKAQPAMAGIHPL

SEQ ID NO: 43354 - protein, 406 aa, Streptomyces sp.
MKTVVQVKLVTTPEVAAALHSSLCAANEAANFVSVVAFREKVFRPYTTKRKDGTVRIGLQDLVYTEIKDRFGLSAQPAIRVIKKVVDAYTTLHANLKAGNYGKEGSRRRAAAESKPIVFRPDAAQPYDLRCLSWQYDAQTVSIWTTSGRLQGVGYVGHSDQLKSLHTCRKGETDLVHRDGKWFLVATCEVPEAERFEPVDWIGVDRGIVNLATTSDGDNYSGRRLGRYRRWQQRKRQELQTKRTRSANRRLRNRNRREQRHAAHVNHKISKTIVTEAQRTGRGIALEDLGGIRERARLNAPQRVRLSSWPFHQLGEHLAYKALRAGVPFLEVDSAYTSQMCPRCGHTTRNNRPDRDTFSCRRCGLAGPSDHVAGVNVRNRARSAWVLVNGPVPQGLNTSRTGRCDP

SEQ ID NO: 43355 - protein, 409 aa, Streptomyces sp.
MIKWTRPKGVGWMIRAYKFLLRPTVRQDQALREMLRDHCSLYNGALQERRNAYRHASKTTVRYGQQSAQLKEIRACDPECQGRWSFSSQQATLRRLDKAFAAFFRRIKAADKPGYPRFRGAARFDTVDFPKDGDGCRWDSTAHDPVTRVRLQGVGHVKVHQHRPVVGTVKTISVKREGRRWYVILTAEQTVPEPLPRTGSVVGIDMGLANFLADSGGGFVPNPRHGQKAAAKLGAAQQALSRCKRGSKRRGKVVEEVARLHRKVRRQRLDHAHKTALDLVREHDFIAHEDLKIRNMSKAPEPRPNEDGTYAPNGAAAKAGLNRSIADAGWGVFLAVLNAKAECAGREVMAVDSRNTSRRCPACGHTVKENRPTQEKFHCVSCGHSAHADTVGATNVLRAGLARRDANPA

SEQ ID NO: 43356 - protein, 395 aa, unknown
  TnpB Polypeptide
MPRKPREQRAADGRIVQYNTIKARLYPNEAQAELFENTFGCCRYIWNRMLADQQRFYLETDKHFIPTPAKYKKEAPFLKEVDNQALIQEHNKLSQAFRVFFKSPEAFGRPKFKKKKTDRDSFTACNHVFESGPTIYITRDGIRMTKAGIVRGKFPRRPRNGWKLRRVTVEKTKSGKYYAYILYEYTVKKPEPVAPTAETTVGLKYSMGHFYVADNGGMADAPHWMKQSQEKLAKLQRRLNRMQPGSNNYNEAVQKYRELHEHIANQRRDFIHKESSRIANGWDAVCIRSDSMQTLSKRMNLGNVLDSGFGMFRECLRYKLARQGKPLILVDRYMPTTRTCSVCGLVLDDEVHYKRKRWQCPKCGAAHNREVNAAKNIKALGLEQHFSSQELRESA

SEQ ID NO: 43357 - protein, 412 aa, unknown
  TnpB Polypeptide
MVVTKGIELRLDPTKAQAVFFNKCIGAERVAYNAMLNTKITLYRDYGVKNFSPNWSSLKDFYPWMSEVDSRCLNYAKIEVETAFKNWFKALKNGGNIGFPKFKKKSHSGTYHNTSMPSNPDRLFKNNKIFIPVIKWVRFRNYKNLDLSNIKKIRNIVIKRTNTNKYFVSVCCDVEVQEYEHTGNCVGLDLGVKDLITTSNGEKFENKNLLKNAEKKIKHLQRILSKKKKGSKNREKARLKLATAYEKLGNRRKDYLHKLTTRLVRENDVICIEDLNVSGMLKNHSLAKSIADCSFSMLRSMLSYKCGWYGRKLIVVDRWSPTSKRCNHCGHVMPTMDLNIREWVCPKCGVHHDRDINAAKNILDEGLRLLDVGQELSEYNLGENPTMDERLAIDLKSSGSMKQEICTSLACG

SEQ ID NO: 43358 - protein, 408 aa, unknown
  TnpB Polypeptide
MERIAFNRFQDGYSEKQITEYLKSRFGANCWIIRSAIKEAHALFDRIGCKKVLFGGKHNLSQYLKGLITKEQFKQKRLMPLCSIGESSYYGNRLFSFDFENNTVGYKPNRGVRKEIKFCPVKKKLAQELAKVQELANQTKMPVTVKFTDKHLFLTYDETLIYNEAYKGLKRNRVLGIDMNPNYIGVSVIEFDKNNEFKVLHKEVFDLTALTKPSGESSQHKKSKYYTNKLKHETVAIAHRINKLVDYWKCSKLAIEDLSIKPKDQKKGKSLNRLCNNKWERSLFVNKLKMLAGIHRYELVEVNPAYSSIVGNFAYGDENTPDMVASAIEIARRAYKKFEKGWFYPKFNIETQDERWKQTLGGVKTWKDLFRKVKEAKLKYRFLLSDYVGNAVFRVMYKRQKLARAIFV

SEQ ID NO: 43359 - protein, 369 aa, unknown
  TnpB Polypeptide
MKLIANLKLKPTTEQEQSLLETLERCNEACNWISEKAFEARVFRQFDLQKLCYVELRAQFAISAQVAIRCIKKVADGYKVDQKVQRVFRKHSAQPYDDRIFRFMSDDRVSIWLLPGRDKIAYVCGDHQRKLLEHRKGEVDLMFVRGKWYIAAVCDFDDPKLLTPDGMLGVDLGIVNIATDSLGNQYTGEKIEAYREHYAKRRAILQRVGTKAAKRRLRKMSTKQQRFQKHENHCIAKSIVATAEHSHMGIALENLKYILERVKARKEQRKRLHNWGFGQLRDFITYKAKQAGVPVVIIDPRNTSRGCPECGHIDKRNRKTQSVFMCKACGHSNNADRNAARNISEKGEIVNAPIFAHQFAPGVVESALL

SEQ ID NO: 43360 - protein, 377 aa, unknown
  TnpB Polypeptide
MHKATFQYRLYPTPAQATAMQHTLDECRWLYNLLLEERTVAWNDAEATVTLYDQINRLVALKAERVTLAAVHSQVLQNVAVRIDLAFKAFFRRIKAGEKPGFPRFRGWGQYDSFCYPGSGHKVERTGDKGRVFLSKIGRVKAIIHRPLEGTVKTCCVKRTATGKWYATFACEVEDAPLPALDTAVGIDVGLASFATMSDGAEIANPRFFRQDERALAKAQRRLSREPRPAKGARATPARRKRRKVVARVHERIANRRKDFAHQQSRKIVNDNGVVAVEDLSINRMVHNHCLAKSIADAAWSMFSAFLSYKAANAGRQFIAVNPAYTSQDCSRCGHRQKLMLADRVYCCPCCGLTIGRDHNAAINIVTLGLQSLGARP

SEQ ID NO: 43361 - protein, 398 aa, Actinomadura sp.
MTRYRLQPTPAQERTLLKHCEHARFVWNLACEQHAHWRPGRQPAPGFAEQCRQLTRARMEFVWLRAGSVIVQQQALKDFTQAMSNLFAGTHRRPTWRKAGRHEGFRIVAIKPDDVRRLSRRVGEVRVPKVGWVRFRWSRPVPDSARSFRVTRDRAGRWHVAFAVVPAIVEAPGTGEVVGVDRGVAVTAALSTGALLTVPDLRDGERSRLGRLLRRLSRARPGSKRRARIKAAIARLSTRARDRRKDWVEKTSTELARRFDVVAIEDLDVVAMTRSARGTAETPGRNVSQKTGLNRSIRAACWGLLAQRLAHKAPGRVVKINPRNTSRTCNACKHVDRESRKSQALFLCTACGHRANADVNAACNIRDTAAGHAVAARGGSPLGGPANREPRHDLLLTR

SEQ ID NO: 43362 - protein, 335 aa, unknown
  TnpB Polypeptide
MRVLVTAKVKAVTLDPSHHYKLMEFLKAFRDWVQYVVDQIWSLNYISPIKELHHRFYRILREQGFRAHHCHKIERRAREVVEAAKKNKGSKPLLRKLIARLDYQGYKLDLNNRTLKVAVLNNEWVELKLMWYDYLDKYFNYVWRLKEILVSYRDGEVWIYFTFEKEVVLRKPKHVMGVDINFNNITYTITDTEGKLVSMGTIPFNGLKRALSHKIINEKIQRKYGKKWRYVKGILEAIRRHGRRAKNILLDSTHYISKRIAEIAKEYNALIVLKNLNKLKTRTNSSRKYNKKLTLWTYRRIQSCINYKALAESLPVIYANPRNTSKTSPVGGKLE

SEQ ID NO: 43363 - protein, 389 aa, Nocardiopsis sp.
VHTVLTGFRYRLALTDEQAEQCQIYGDICRAVWNTGLEQRREAVSRWQRGHQLPYCGYHLQARQLAEAKTEETWLKDAPSHILQQTLKDLDTACRDHGTFTVRWRAKGRWKPSFRFPDSKWMSIQRLSRKWGRVKLPKLGWVRFRWSRAPKGTIRSATVSRDGEHWYVSLLCEDGQTTPEVHERPDSAVGVDRGVAVAVATSDGDLFDRVFQTPKEAERERRLRRRLCRQRKGSNNRARTKAALGKLTGRVRARRADFAAQTAHTLCAKNAVVVLEKLNTKNMTASAKGTTDAPGRGVRQKAGLNRAILSQGWYGFKLACQNAARRTGTQIVEVDPAYTSQTCHPCGHVASENRESQSIFRCGACGHTAHADVNAARNILARGWTSPSG

SEQ ID NO: 43364 - protein, 445 aa, unknown
  TnpB Polypeptide
MKIVTSYSVRLRQVPTCLKDTLMKYREAVDWFIGMMEAEWNAFADCNNNQMAVRVGEKLCIKTARNGTPKYSFSDSFYKFPSYLRRAAIAEAFGLLSSYHSCLDNWNDYSVSERKRRPSVPKAGFVYPAMYRDNCFVRTGTYTARIKVWTHNTWDWIDITLRKCDVDYILRRCSNRKECVPTLRQRGKVWSLDFSFEERVTLTDSNHIDKQRILSVDLGLNSACVCSVMTSDGTVVGRRFLHLPSEYDHLRHCIGNIKHAQQSGARRMPGLWAKARGVNDDISVKTARFIVDSAMLYGVDTIVMEALDLNGKKRGSKKQRLALWRARYVQSMVNVKAHRAGIRVSRVCAWNTSRLAFDGSGRVLRGREAEKAGKNYSLCEFPSGKVYNCDLNASYNIGARYYIREILRNQSERTRLALTAKVPSLAKRSTCTLSDLKDLRAAMVA

SEQ ID NO: 43365 - protein, 410 aa, unknown
  TnpB Polypeptide
MIIRQGFKFRLDTSEAQSARLRVLCGHARYVWNQALARCNDAFAAEGQFVPRYETMAKWITAWKRNPETEWLKEAYTDNLQQKLKDLDTAWQRYFKKVAEAGKPQFKKKGRCRDSVRFVNFPKYCTLQGSRVKLPAGIGWVKFRQSRAILGDIKNCTVGFEAGHWFISFQTEREIDSPLPQAATAVGIDMGIERFATLSDGTFHKPLNSFKRHQHALRKAQQVMSRKTKFSRNWIRAKARVQRIHHRIGNVRHDYLHKASTTISKNHAMVYIEDLKVSNMSASAAGTVEQPGRNVRAKSGLNKAILDQGWFEFRRLLDYKLGWKGGWLIVVPPHNTSRTCPACSHVSADNRKTQAQFKCVQCGYANNADVVGAINVLRRGEAHLSNEGPDMARFACEVNGATRPSAAGTC

SEQ ID NO: 43366 - protein, 491 aa, Fischerella sp.
VYKLRPKQVQVVKMDNWLDMLRANYNWSLADRIDTYQQRFNRGEYCDLKTKSVAVPLTCCVSNYGASGEPWRDNGKRRSAGEIQITALPELKKVRPWYKDIDSTVLQQNIKRLDKAFENFFVGRGFPKFKNRSTMRSFTFTTGLKLDKNKIYLPKLGWMRFYNSRNIPEGFKIKSATVRKKADGYYVSIRIEDTSVPIFPVKTNSEINTVVGLDMGLGKLIYCSDGSVIDNPRFGTNKKTKRLQRIRQRRVSRKKKRSGNRRKAQQKLSIFQHRIATKRESYQWQVAKKIVKKADAIAVEDLNISGMMKRCKPKYDQTKGRFLPNGQSAKRALSRSIADASWYALISKIEYMASLSGKVVLKINPRHTSQTCSACGHVDADSRDGEKFICTNCGHVDDANLQAARNIKVKAVNQYGLILKQIRKVRQDLSKPKQLSLFETPNPESTGSKRRQHHAQSSKRGVPGNLGTQLDLFFQDNNNGTIVEVVNLLTL

SEQ ID NO: 43367 - protein, 408 aa, unknown
  TnpB Polypeptide
MHVRSAVFCLDGQLAPEARFLLEDFRLATNGAIRTGLQVGVTSRNALNKLAYKDFRKEHPGLYSQHLVSAFEVAAGILKNHRRRLKRSRTGQTLRPPYVKRLMMKAENQAYKLDRKEGIVDLPVRAGLHVKLKLVVSQYHRRYLDDEAWSLGSLTLLPDRVVIAFRKIPPKPYDPKTVLSLDTNERSLDGVLIREGSSSAVRAEFPDVAIIQQRHHDRRKRLQKEKANDRRTARALCRREGQREHHRVEYTLHQVANTILSFAKSQESAIVLEDLTGMRRKKNKDLNRRLSLWPRRELHRIIEYKAEEKGIPIIKVDPSYSSRRCPICRSIQHSRMGTEFKCECGWHLDRHINASINLLQTASSKGLAGGLRFDPGAFRHDAMMILYEPAMAARSEPNGMSGEGVAVP

SEQ ID NO: 43368 - protein, 480 aa, unknown
  TnpB Polypeptide
VSHTSQKARFFLLHPEANAGKVERLEALHREYVSYVSICVQTMFAKRRLNLYQSEKQAFFPKATSLSSQIEKNARDHAIQIVSTWAKARYSVKIKGLISKAKKDGEITETQAKALYTIGKYLRDNPGKGITQDDIGLYWEILDEKGGRKPEVSDSLPIRLSEMTARLEDPKEAAIGDFWLRVSSLEARKSIWLPLVGSPYVSQADQVSKGILARKTKKGLWRFEAVEKREWVVPEPKDLPPDAPRLGVDVGLNVLAATSDGDLYGADFKPKFDRAYRKVRDLRANRMRQGFKENSPRLNALESKLSGMIKTETGRVANDLVRKHPNTVFVLEDLDLRGCRGQKRFAYRALATALTSKAPVEVVNPAYTSQECPSCGYISRSNRSGVKFRCRSCGRKAHADWVGASGILRRSGDNGIGCVDRPNSVKATLRRRYRLRRSSPARPSPLGETAPSPLGLSLTTEVSGFPGIGTGSNLVPAATY

SEQ ID NO: 43369 - protein, 410 aa, Brasilonema sp.
LLKLGYTSLSKQVLTSLAMHAIKRELKLNKKEISQMRGNAGFKRFVYNYGLDLIISSWSFEDIKASDSKRIDAIKKVFTQVTMRRTEYTWMKQYPSTVYQSAFIDLKNAFSRWRQGLAKFPVKKTKKKGDSFTVYKNAGVYPEKGKPAFPFTNRVVICPGKIIKLPGLKQVRLKERINFLCSSQTFTVSRIADRWFVCFVLDAEKVPPRIHSIHKIGVDLGVKCLATCSDGSRYEMPVTTCQAKIKLGKHQWRNRNKIMGNKKLKIKASNNAKKCLNQLSKQHAHLANIRKDTTQKMTTDLSRKAYIIRIEDLNVVGMIANQKLAKAVSNNCFYEIRRQLIYKQSHYGTKVELVERWFPSSKMCSKCHHVQPMTLEDRIFNCQKCGQIQDRDENASKNLENAPLDKIRLA

SEQ ID NO: 43370 - protein, 431 aa, Acinetobacter sp.
MKILQHYKFRLLPNQEQEILLNQAIGSARFVWNQILAKSFEMFAKDEYIRYESIEKKLVPLKKTPEFSFLGQTYSACLQQKIRDLAQAWGKFYNKKEQARLKQNKRKPRKPNFFKLADGGEIELRPLMPRFKKKLDGEQSFRLPFADCEVIGDRVSLPKKTGWIRFKKSQEIVGKITSITIKKICGLWYVSFCTNREIEQPIHPSKSAIGVDLGIKKLITISTGQVFDPINSFKANQVKLARLQRKLRKKTEFSQNWKKLNLKINKLHHHITNIRHDYLHKVTTTLSKNHAMIVVEDLKVANMSKSAKGSIEEKGKNVKAKSGLNKSILDQGWSMLVNMLVYKQQWRGGLLVKVDPKYTSQTCSSCGHVAKENRLTQANFECVSCCFSENADINASRNILAVGHTVLSVEGRCGKDRPVKQKASEIREEVT

SEQ ID NO: 43371 - protein, 227 aa, Lyngbya sp.
VRVIRKYNGYYTQFLIDYEREEKKELTGKQTGLDVGLNYFYTDCSGNQIDNPRFLRKDERKLKKLQRRLSRTQKGSQNRQKARNKLGRAHLKVSRRRNDWACKLAQHVIRSNDLVAVENLRIRNMVKNHHLAKSISDAAWYRFREWLEYMARVYGVPVIAVEPAYTSQNCSNCGEKVVKTLSTRTHECPHCGYIADRDENAARNILKSALKQLSNKETDKKSINGLI

SEQ ID NO: 43372 - protein, 350 aa, unknown
  TnpB Polypeptide
MALTNLAYRGYEVWVPDIPKNIQHRLYKFKNYMESLVFGVMPKKWFARTWVPLTTLRVYADGSMKGDGRAPVILDFRSNTIKIHLVCRGEPRYVVEIPMPRWVVERLRERGDVKFVMIGLRDGEPYLALIAERVVGPYQPSNYMLVIDVNAWNHGIVWGLIKDGFIIRWKPEVPNLREIDNIYNLSVELSKKYGMLKRLGLNKTKEGRRLWRKIKKLRRRLYVKLGDYAQKLVHRLVRKALRHRALVIIDDMVEESRRELIEEKIPSGLRKLYLVYTRRFVKLLVTQLEWYGVPYKFRRLYSSICPICRHELIQLPGRVMVCGNCGFKAPRDLVPIHWALREYNHELNQF

SEQ ID NO: 43373 - protein, 410 aa, unknown
  TnpB Polypeptide
MSKCKNKQTKKPKPESVDILVEKFPAYLTPKQTSLARDLQREAAKVWNATCTVHRIVYSRHHCWLGEGAMKTFVKGKYGIHSQSAQAVVETYFECCERTKALHEQGHTDWRYPHRKKYFFTVTWKPLGITHEGQILTLKNGRSREPLVLNLPERLSGTVIKLVQLVWHRNQYWLHITVEKSALQKVQGTVIAAIDPGEIHACTVTDGKEALVVSGRLLRSIHRLRNKVLRKFQKAISRTKKGSNHRRKLLAAKYRFLNNIERRIEHTKHTISAIVAQWCLDRNVKTVYIGNPEEVRKKDCGRKHNQRMSQWAFSKLRELLEYKLKRHGIKLIPDQETGTTGTCPACAEYTKQTGRTYKCGKCRFTGPHRDVVGASGILDKSVNGKFTKGRKLPERVEYTRPKVVMPKKAA

SEQ ID NO: 43374 - protein, 387 aa, unknown
  TnpB Polypeptide
MSLVQVRYRYRAYPTAGQQQMLARTFGCARVVFNDALRLREELYAAEEKLSDSQIQTRVITDAKRTAERGWLAEVSSVALVQACQDARRAYRNWFDSLSGRRNGRRVGKPRFRKKSSRQSVRFTRNGFAVRGSGRVYLAKIGDVKVRWSRELPSDPSSVTVIREPDGRYYLSFVVERQAPPLPVIDHETGIDLGLDRLVVTSDGEIIANPRFLRTRLRKLARLQRAASRKQKGSANRTKANKRVAVQHRKVRNARLDHAHNTALRLIRDNQAVYAEDLAVSGLARTRLAKSVHDAGWSQLLRLVDEKADYYGRTFHQIGRFVPSSQICSACGRLDGPKPLSVRSWTCPCGAIHDRDVNAAQNILAVGQTERLNASGAPVRPAVQAVA

SEQ ID NO: 43375 - protein, 369 aa, Escherichia sp.
  misc_feature (59)..(62): Xaa can be any naturally occurring amino acid
VKRLQAFKFQLRPGGQQEREMRRFAGACRFVFNRALALQNENHEAGNKYIPYGKMASWXXXXKRAAFPRFKKRGQNDAFRYPQGVKLDQENSRIFLPKLGWMRYRNSRQVTGVVKNVTVSQSCGKWYISIQTESEVSTPVHPSASMVGLDAGVAKLATLSDGTVFEPVNSFQKNQKTLARLQRQLSRKVKFSNNWQKQKRKIQRLHSCIANIRRDYLHKVTTTVSKNHAMIVIEDLKVSNMSKSAAGTVSQPGRNVRAKSGLNRTILDQGWYEMRRQLEYKQLWRGGQVLAVPPAYTSQRCACCGHTAKENRLSQSQFRCQVCGYTANADVNGARNILAAGHAVLACGEMVQSGRPLKQEPTEMIQATA

SEQ ID NO: 43376 - protein, 372 aa, unknown
  TnpB Polypeptide
MRKIFRCRIFPTHKQVTTLEQTLDGCHWLYNHLLEQRKEAWDAEKKSLSRYDQSNSLKDLKQEHPFLSDVYSQVLQNISMRIDLAFRAFFRRIKSGDKPGYPRFRGKFRYDSFTYPQTGFKLLKNVIQLSKIGGVKIKLHRPIEGTIKTCTVKRTPTGKWFISFACDVDHKPAEKPIEPTIGIDMGLESFTTFSNDEQIQNPRFFRQEEKALARVQRKLAKQEKASKARARARKVVARVHERIGWKRHNFTHQESRKLVNRFNTIVVEDLSINDMKKDNFRCINKSIGDAAWRMFLECLRYKAEWAGSRCIQVNPAFTSQNCSRCGDRHKLKLSDRMYHCPCCGLSLNRDINAALNILGLGLQSVGPAIEAA

SEQ ID NO: 43377 - protein, 448 aa, unknown
  TnpB Polypeptide
MKHTNTFAVRPLSEDGEQVLRDLLDASAALWNEINYQRLMRYNDEDGFEGDVWDADTGRLEGTYKGVLGASTAQTVKRANSEAWRGFFKTKEKYHDDSDTSVTDHPEPPGFRGNEDDGRVLKGVIRKDAYSVEWGDRSRLEIVVGEELRDKHNSPKSRLRLEIAGDPNWPDYDDQSRLELWYDETDCTFRASQPVTITDARETPLADETAALDIGANNLVTCTTTTGEQYLYEGRDLFDRFRDTTREISRLQSKLPEDRYSSERIRRLYRKRTRRRDHAQEALCRDPIERLYAEGVDTVYIGGLTDVLGTHWSVETNAKTHNFWSFKQFTKRLVCTAEEYGISVEVRSEAWTSQECPQCGSTDRTTRHQDTLTCSCGFGGHADLTASETFLKRHTEQAVRPMARPVRFEWDGHNWSESPHSPERESPKEQRTDPSTVSDGNVAAGESA

SEQ ID NO: 43378 - protein, 438 aa, unknown
  TnpB Polypeptide
MLEVHRTHQAKILNHSQVEDPLDQHGWSASKLWNVANYHSRKQWENTGEIPDHEELKRELKIHPKYKGLHSQSSQRVLEELAEAFNSWYSSDDDRDNPPGYRKENYYDDERRRVHEEHPRSTVTWKQNGIRHDTKNNRVRLSKGANHKEHPRAWEYILVAYETRPGVTVENLQQVRAVYDRHNERWELHLVCKDEIETPTAPGTETAGIDLGISNFAAVAYSTEDADLYPGNRLKQDGYYFPKEIAKCDDSDGDRATRLHNKWAERRTHFFHSLAKHIVQRCVEQKVGHINVGDLEGVREDENGESKNWGKHGNLDLHGWAFDRFTKILTYKAQAEGIEVVEVSERDTSKTCCVCGREDENQRVERGLYVCEECDAAFNADVNGAENIRLNINKESNSESAPDLGGDRSTGWLAQPGVYLYDLSSGFQPQAQVVDCKP

SEQ ID NO: 43379 - protein, 333 aa, Bacterium sp.
MLTPDCHDNTPQEVLDCEQQQPSGQKKCARKTKHMIKAYRYRLYLDEEQERLLKKHFGCVRRVYYGALELKSDHNEQTKKSLSKSELQGQLVAKKKNPEFVWLNEVNSQSLLAALLHGDSAFQGFLKHKRGYPKFKRKTHPQQPFQYPQHFTVDFEEEYSHLPKINCSFESRIKTVTVITATPCRHDDDRVLVDETQHSVAPVVQEIKLENTLGIDLGLNNFLIDSDGHKINNPRLLKNSLKTLRVQQRTVDLVKTHHTAFVVEDLNIKGTVKNRKLARTLHNVGWGQLLLFLSYKCERAGKTVHNIGRYEPRSKVCSCCGDKMTMSIVRSAP

SEQ ID NO: 43380 - protein, 420 aa, Moorea sp.
MIVLEFKVKGNKTQYAAIDEAIRTGQFVRNKCIRYWMDNKGIGQKDLYRYNTWLRSEYPFVKDLNSHACQASVERAYSSISRFYDKCKKQVPGKKGYPKFKKFSRSVEYKTSGWRLSPDTKSIKFLDKKGVGKLKLKGTWELWRYDHKLIKRVRLVRRADGYYVQFCVKVDIKESLDPSHTNVGLDVGLKEFYTDSKGNTEPNPRFYRKGEKRLKFYQRRVSRKKKGKAVGHASRTANRKRAINRLGRTHLKISRQREEHAKRLARCVIHSNDVVAYVREACRRQDLRVKNLVKNHCLAKSINDAGWYQFRRWLEYFGQKFTRQTVAVNPAYTSQNCSNCGEVVKKSLSTRTHACSCGCVLDSPKATLRERDHNAAINILKRALGTVGHTGTWIIDPNALGDPTSTLPDSGLEEPRWVVD

SEQ ID NO: 43381 - protein, 450 aa, Moorea sp.
MQLGYAYKLIPNRTQEATMNRWLEMLLAQYNYLLRDRSESYEQVKSPKMGDYCDLKTRGEACPLTCSVNKSTSIGYPWKKSQKNPRRSTYEIQSSTLPTLKKERPWYKGINSTVLQQMLRQLDVAFSKFFKGEAKYPKPKRRSRFRSFKYSPGQVKLDCHKIYLPGIGWMRFHNSRPIPNGFTMKSVTVRRKSRGWFVSIQIEDKSLPLPPVKAANEITPCRVKGCDIGIRKLVSVSNGETIQNPANTKKYKRQSRRLRLRQRSASRKRKGSNNRKKSFSRVASLHDWITNSRSAYHWETAKKLTDGADALVFEDLNIKGMKSRCKPKPNENGGYDYNGQSAKRGLNRVISDAAWGELVKKVEVVAAKSGIPVIKVNPRNTSQQCPRCHHVSADNRNGEKFVCTECEYHDDADVNGAVNIKNKGLKKLGIDPAQLPSVRGKVTPTELTAV

SEQ ID NO: 43382 - protein, 463 aa, Moorea sp.
MKYTYQYRLYPETQQTLTLNQWLRVGRYWYNRMLGERFDWWQKNRCPVNACPLICYLPELKDQPNFYSQKKQLPVIKKDLVKIGWSGELIDFTEVYSTVLQDVCTRVKNAFNRFIADDKNGKRSGKPRFKNVARYRTLNFPNADNSWLKFCTVNGKWLFVQVPKIGLIKLRIHRPLPDSANLKQLSITRKADGWYCNLSLEDKSVPEFNPDDIIPTWENSIGMDAVLDRGFYLAISDGKKLLSLKPLRRNQDKLTTVSQRKNKRKKGSKARRKLAKREARIHQQIARSREDFQYKTAHQLVNTGKKVFFHEKLNLKGLTRRNTPKRGRDGTFLSNGQSSKSGLNKSWLDAGFGQFFEVLGQVAAKANASVVEVKPNYTSQLLSYRDEFVFTDRDMREYFDQELKLIVDRDVNASINIKRVGLDVFPTIKRRRGKPVVVESTTNSTSKEALTALYEHQKPTLKA

SEQ ID NO: 43383 - protein, 268 aa, Brasilonema sp.
LYKTVPVKARFTDEEKAFWINQCEHANSLINSAIYHTRQTHYSKLEQQGDAFTTYWCGDELLKGWKTYKCSTTYPELDKALKDSPHYKAMAAQSAQQTLKTVGESITSYNGLVNVFYKGEVDRPSLPKYRKRGGLAACTFPRQALNYKDGCFYPSISRQTKPHLLTEIKLHLPEFIDSDWVKEVTVRPYLGELWIDWVIDDGKEPINSNPNLDYTQAWSFDHGGTNWLTGVSTHGKSLIIDGRKLKAMNQGYCRLVAKYKQGKSDFYW

SEQ ID NO: 43384 - protein, 225 aa, unknown
  TnpB Polypeptide
MEYGGYFFNLNCKGNYFYLYIFMDHKKTTVNISEYRLKSVTVSQTPSGKYYASILFEYEDQVQEKELQKFLGLDFSMHELYRDSNGKEPAYPRYYRNAEKKLAREQRKLSKMQKGSNNRNKQRLKVAKLHEKVSNQRKDFLHKQSRQIANAYDCVCIEDLDMKAMSRSLNFGKSVSDNGWGMFTTFLRYKLEEQGKKLVKVDRFLQAARPVLFVVTKMQKRKILR

SEQ ID NO: 43385 - protein, 320 aa, Acidithiobacillus sp.
MTLSIANYYRIFKGLVNSIGTLTGRIRCRYEGWNRHLEWLAHPIDHGITLGAAKLWQDPVSKVWYLLVSIEKSLDPMAMDSITTVKGVDLNRRNIAVESNTRGECRFYPGGYWRHLAERVASTRSALQAKGTRGAKAVLRKLVLRERRLNADTAHCVSKAIAEPHAMVGLEWLKDIRNRTERRHSKKASVRRRKANRKVSSWSFADVQAKTAYKTRLSGGVPIWVDADYTSQTCPICGHIGQENRPDHGLLFVCAQCGHTLHADLVAARNISMRTLLIRQDWVRTGRLSAAPEASGDETKAARLSRYAELRWSLDASSVL

SEQ ID NO: 43386 - protein, 486 aa, unknown
  TnpB Polypeptide
MNESKTFTYQTRIVSNEIQKEVLGACGKLYGSIERHLFEDLNKDLPINSLKSSYLIKYGITARQFNACRVSVEGKIASAKACRERHIADLKEKIASLEKKLPKIKKDLVLHHKTRSLISMKLRLKKLEQAHKEGPVSLCFGGKKLFHAQFFLEKNNYISFADWKNDWEKARSSEFFSLGSKDETAGNQSCVLRVAQDKHFDLRLRLPNALAKTYETKYLTFSDITFNYGGDEILQALLAKKALSYRFKSDEKGWRLFISFSQEKAPLITDRCRGGIGIDVNADHLAFTEIDGKGNPIDKKTFPLCTYGKTTHQTKALIGDVCKEIIALAKEKQKPIVVEKLDFTKKKASLKEGAHPKQARMLSSLSYGCILENLERKAFKEGIGFFTVNPAMTSIIGRLKFSVRYGLSTHHAAALCIVRRHFKFSEAPSKCPMKVVHKNVKVTCSLPVRNRKQHVWTFWRDAKRKIKTALAAHFQGSPGSCYSQSE

SEQ ID NO: 43387 - protein, 467 aa, Scytonema sp.
VLLNYQYRAYPETSQKQQFNSWLRISQYWYNKQLGDRFNWFENNRCSIDACLLICPLPELRENPDFYSQKKQLPTIKQDLVTVQHSGELLDFTSVPSQTLQDVSKRVDLAFKRFLQGDSNGKRSGRPRFKNSARYRTLRIEGQAITVERAEKNWLFLSISKLKGWLKVRLHRPLPNGFVLKNMLLTKKSDGWYTTICLEDPTVPVFNPDEITPTWENTLGMDAVLHEQDYLATSEGTKLPSLKSFRKSEKRLAKVSRRKEKKRKGSRARRKLAKRQGREHQRITRARKDHAFKTAHALVRTGLKVFVHEDLNLKALSKRNKAKQGEDGTYLPNGQSAKSGLNKSWNDAAFGQFFTTLEHIAAKAGTRVIAVNPAYTSQLLAYRDEIVFTDCDMRSYWDIGHSLNVDRDINAGINIKRVGLGLFPTLKRRKGNPVVGCSATNSTSKEVLETLRACQKPTPCLYSDRCR

SEQ ID NO: 43388 - protein, 526 aa, Clostridiaceae sp.
MRTIVLKIYKPSMKKKQILDEALQNYTMAYQYLLDAAQPEIEKIKSDYVDKNGKYSAKKVSKWIGSNFNLVLNEFDIEPFKDSLKIDFGATIAGYLNLVATGEVSEYPSSYISGEAFNNEYNKVMDLCINDDENPEKSLKRIDRLMSKNENLRPIFFCRYATNRNYSILYDELKDRYYIKMYLMNFHNENRKKFDENSATVLRYISKNRDVFKVHGKPEGFLILPVSFGKYQEKYLQLVSKNPEMIKTARLVKRKEEYFLSINMEIEAVETIKVNNYMGVTRGIENIINYTMVNNIDGTVIYGNEKPKENSIKLNKLHEIANRLIQLAKDNNCQVIMEKLVHKGDKLSYMDKNNKEYNPILGCFQYNRLYDILKYKLPAKGLPPPIRVSSLSIFHTCPRCASNTKGNRFSHNVFMCTNCGMSLSIEEIGSNNLSRKLIKYKNDLVKVKVEGTTEGIKYINSDLGIEFSSKNNYGDNDKLRNTINAVIKDFYINMDSEKRKKTFKKKFSFIKKLETNDDVLKVIKIV

SEQ ID NO: 43389 - protein, 300 aa, unknown
  TnpB Polypeptide
MNRAVKIRIYPNKEQRVQIEQTIGCSRFIYNQMLADKISYYQKEKKMLRNTPAGYKKEYPWLKEVDSLALANAQLHLESAFRKFFREPACGFPRYKSKKHARNSYTTNALNGNILLQDTHLKLPKMSVIRIKLHRQIPSDWKLKSVTVSREPSGKYFASLLFCCEDQTVEKRPAERFLGIDFAMQGMCVFSTGERAGYPMFYRKAEKKLAREQRKLSHCEKESRNYQKQKKRAALCHEKIKNQRKDFQHKLSRELAERYDAVCVEDLNLKGMSGGLHLGKGVQDNGYGQFLFMLGYKLEE

SEQ ID NO: 43390 - protein, 434 aa, unknown
  TnpB Polypeptide
MQKAQSHHIRTSQVIVRKHDECFRDIAYVCQISRRIKNATHYLIRHEKKSNGKPFSHSDADKWLKSNNPDLYKKLPSAIAQRTTQIAGQEWSSFFVAKKQFDKRPELFKARPKPPRYANKATTAYIGRNGFRVVEGVVYFAGDVIPPIKTQYSFNQDWNAKVSDTVLREVRFVPKGNCYIIELIVDEAELVTSGQYCPLLDKSRHAGIDLGIDNLMAIATNQPDIHPALVKGTGLKSINAWYNKRVAKLRSLGKYDHIQTVTNKRRRQVKDALHKASRFVADYCVKHNIGQVVVGHNKGWKQEINIGKRNNQKFAAIPHTILIKQLCYKLEALGITVIIREESYTSKASALDNDHIPTKGDDVIPTFSGRRVKRGLYKADSGQLINADINAALNILRKESGELVACRGLMDRPTVFYPIDRVTVRKGRSMPLAA

SEQ ID NO: 43391 - protein, 505 aa, unknown
  TnpB Polypeptide
MAIRGFSIEITDKVNSNQAITFAQWIGASNVMRNQKLTEYKSLLAAQKGSEINKAYSHIRKNKVLSFLKDIPVQLMRNAAQDIFEDVEKWRKGLVRFPRHKGRSRKRSIRITKEMFVLEPLGGNRSLLTFFDNATQKRQRLFSIQLGYAPQQLAKQFRISRQGRHFYLSGSYSDGIDSPTNEELLKGFVQQNLSDEALLAQITGIDRGVKLPIATSDGLRKAYSPETTERLRHLARKKARYQRILARKKRQNKNKNVRRVESKEQQKLADKIANFDAKTARIRHNFLHQTSKDVVLAAKPIIALEDLKLGNMTKRAKPKRGVQGRGYVRNRARAKSGLNRSLLNVALGKLGDFIKYKANDYGKAVVEVNPAGTSQTCHVCGEKNTIRPQQDTLICLNGCGTFHADDNAGIVVAQRAVPYIQESVFAQKAKTRKKTAIRKKAVSPPLGNELTSTKKSGELETASSEVSLACSRTQADVRPSSTASLAQRNSLTTMDTSLAGVLETR

SEQ ID NO: 43392 - protein, 400 aa, unknown
  TnpB Polypeptide
MKTSYQYKLKTTKEQAEKINNTLEMLRYQYNYLLAQRFDWYEMNRCPIDRCPLICHLPELKEQPNYYNQKASLVQLKKDRPWYKNIPSQVLQEVPKKVEITFDRWLKGDVNGKKSGRPRFKGKGQYKTFTYSQFKSQTLDDSLTLRYHFVNSRITLSKIGDVKVIVHRPIPDGFDIKTVSVTKKADGYYVTLSLDDKTVPTIKPDFDVDNIIGIDVGLIDFYVASDNTRIPAPKYLRKAERKLKSAQRKVSRRKKGSNRRNKAIKQLGIKHKKVADTRKDFHFKTVKTLLDKYDVIAVEKLNIKGLTKTWLAKSINDAGWGQFINILSNKAENAGLKVIAVNPNGTSQECSNCSHKVKKSLSERIHNCPNCKVSLCRDMNAAINIKARGTHALKAQLMSS

SEQ ID NO: 43393 - protein, 421 aa, Chloroflexi sp.
MFHNHYKQQTAACVAGIKGVQIRKAYKFRLYPNATQQQALAVEFGHARFVYNHFLAVRREHYTQTKAGLSYADTTGRLAILKHHPAHLWLQEADSQVLQQKLKDLDRAFKNFFEGRARYPRFRSRRHRQSIRYPQRVKVDLATGRSYLPKVGWVKTVFHRSLEGRIKNVTVSRTKSGRYYASFQVELEIPDPTYRGKAVGLDLGLRAFLACSDGQKIANPRYLVQAERRLRRLQRSLSRRQKGSRGWEGQRLKVARQHEKVADQRSDFQHKLSHRLVEEHRLIAVETLHIKGMVRNRRLARRISDAGWGQFLQMLAYKGDWYGCEVVAADRWYPSSKTCSVCGVEMETMPLQVRNWNCPSCGSHHDRDVNAAKNILKHTTAGTAERRNHRLRHADGVHVRPASYQMQAGTQKSEAKYSSSW

SEQ ID NO: 43394 - protein, 547 aa, Chitinophagaceae sp.
MKIEKPPDKKAQNSVENFAPWFDKNISKQIIDYNDPTFISKQFTKVDNNIHTEIVYTTKLANIDYKPNQEKDVKKEALKLLDKYLDNIRENPAKKEVKKSTKKLSKTPAQKLQQEKELKTKFYRDLNEIGTVIKTTKHIIHFNQKQKEILYTWIAECRKLYNKCVDKLNTNKKYFNNGFKAIKAEFLGSVYGKIDKPAPYDVLSQVVRDFCSNLKSAFTNKQKGNIKRFKMNKILATATNYSLYIPLKSIQDHGIFTTKLGKVDNFPKLNTTHDCRLFYNYHQDTFTLLIPTTFHCKPIEKREAICAIDPGESKFISFYGLQSHGYIGKGIRVPLLKLRNKISRYQKVLDKNVNRKNNKLKNRKQLRKKIRKLYKKTKCIVKELHNQSANYLCKNYDKILIPKFETQKMISNKKKFKEYKMEFINKGETTIEKNKNARKFTKICRLSKNVKYVLNQLSHFSFRQHLANKAKEHGCLLKVVTEEYTSQACTKCGMLSKTYNNRIKKCGSCKYEIDRDINGARNILIKNINEFPKLKCKATRPMVSTNH

SEQ ID NO: 43395 - protein, 393 aa, Lactobacillus sp.
VSKVIKGIKLRLYPNQSQREQLWQMFGNDRFVWNQMLGMAKERYKNNPNSLFVNEYGMNYLLKQLKCEYAFLRESDSTSFLVVNHNLAQAFKMLFRHQGGYPHFKNRHSLRQSYTGRSTCKVLARRRMQLPKLGSIRTSRTGLVGDAKIKRYTVSYEPTGRYYLSLQVETEVNQLPETRQSVGLDMGLADLVISSDGVKYGTFNAEWLEKQAVRWQRKYARRRYLAQYQVWKWNHNRSDHLEELDDYSNWQRARVNKARCQQRIANKRRDYLHKLTTDLVRNYDVIVIEDLKTKNLQKNHHLARSIANASWYQFRAMLEYKCAWYGRQLVVVKPDYTSQICSNCGFSSGKKPLEVREWTCPKCGIHHDRDVNAAVNILHKGLKAIGQGLALVK

SEQ ID NO: 43396 - protein, 322 aa, Streptomyces sp.
MRTVVLMQLRYSFRIEPGPGQRLALNRAFGCARVVFNGCLLARRAAHAAGLPYPKSAELSRRFITEAKKTPERAWLGEVSAVVLQQALRDLDAAYANFFASLKGTRKGAKVGEPRMRSKRDSRQAVRFTANARWSITADGKLHLPKIGPVQVRWSRSLPSVPSTVTVIKDAAGRYFASFVVETDPADEILPPLDTDQGIDLGLSHFAVMADGSRVRSPRFLRRAEKKLRREQRRLSRKAKGSRNRDRQRVKVARAHARVADARKDFHHQLSTKLIRENQAISVEGLSVKGLARTRSPNPSTTPGGRRSWTCWSTKPHGTAER

SEQ ID NO: 43397 - protein, 390 aa, Pontibacillus sp.
MNVKKAYKFRIYPTKKQGELINKTIGCSRFVYNYFVGKQKNKDAYWYIANEMMQNGQLTENNWKGEFFNKNQSIKAVRALKKHYPFLKEVDSIALQKSVEIVNDAYTRFYKKQNREPRFKSKKNPVQSYTTKWVNGNIVVLAKHVQLPKLGLVRFAKSREVEGRIINATIRRNPSGRYFISIVAETEVEPFEKTGSAVGIDVGLKDFATLSDETVYANPKFFCTLEKKLAKAQRILSRRKTGSSNWQKQKIKVALLHEKMANARKDMLDKLSTDIVKNHDIIGIEDLAVKNILKNHHFAKAISEVAWAQFRSMLEYKAAWYGKQVVTVAKNYPSSQLCSTCGHKNKDVKHLALREWECPTCQTHHQRDINASLNLRNEALRLTAGAAGIA

SEQ ID NO: 43398 - protein, 412 aa, unknown
  TnpB Polypeptide
MRSQKIRLRLTREQERLAWWYSKVSRNFWNLLVDIDKRNNKGEFDEILNKNGNKTYYSKFHNRDVCKLNQSDYLELAKIVVAKNYEEDEQSWSWYYQPNQFFIYNFLSRELVKIRKQNKGRLNFRSIGDSQPSFNVRCDVSSDKKRSSRIYLKDNGKLQIPTIGDVCFGSVRADFDLSCKKQIANISFDGKYWYLSYTEDVETQVVDLPDYTDGVGIDLGIKTLATISDGTTVPNIKTFRRVRILNKRLKRLQRKVSRKYHINKCNKYNKTKNIIKLERQIKLIYRSLRNIRINHIRKFVSDLVKKQPQYIAIEDLNVKGMMKNKYLAKDIANCSFYTIREHLIRKATERHIAVRLVDRFYPSSKTCSNCGSYKKDLKLGQRIYHCDNCQEKLDRDFNASLNIAKTDKYVLV

SEQ ID NO: 43399 - protein, 385 aa, unknown
  TnpB Polypeptide
VARKTFAFKLYRSKKNRRLHQQIDIGGIIHNHCIALHRRYYRMFGKHLSATHLQAHIAKLKRLPRYAFWNQLGSQAIQDIVQRIDRAYQRFFANAKARKEGKTTEHIGIPGFRKVRKAKSFTLKQAGYRLLGNNRIRIGKYVYKFSKSREIVGDIKTLTIKRDALGDIYLFFSCLYEDEEPNRALTGKSVGFDFGLKTYITGSDGSRFDSPEFFKQSQRDIARANQKLSHKLKGSKNRQQANQHLARIHKRVANRRNAYHWGLAAELCDTYDAIYLEDLNLRGMKRLWGRKVSDLGFAGFVSILHHVAEKTGIVVHRINRWFPSTKLCSVCGTTNEAITLRDREWTCSCGAHHDRDLNAAINIYTEGASSVGVGSVRLASASVNR

SEQ ID NO: 43400 - protein, 377 aa, unknown
  TnpB Polypeptide
MRKRGYKTELGLNNEQITACLKHVGCARKAYNWGLSRKEEARAAGLPIPNARQLHRELNALKVTEFPYMYEVSKCAPQEALNDLDDAFKHFFRKVALKKQGKWRGKCGYPKFKSRKKGIGGFRLTGAIHVFEKSIQLPRLGTLRLKEKLYLPRNAKIGSATITEQAGRWYVSICVHEEIAEPEPATGPVIGVDLGIKTLATVSDGREMANSKALRKRLKKLQRLSRWHSRKQKGSANRKKSQRKLARLHACIAHVRQDALHKATAGLVAKNKPSDQRPAIIVLEDLNVSGMLKNRHLSRAIADVGLYEFRRQVEYKAKDAGCVMQVASRWEPSSQTCSGCGWRNPHLTLADRVFICQECGLTIGRDLNAAQNLAALA

SEQ ID NO: 43401 - protein, 398 aa, unknown
  TnpB Polypeptide
VILGQRLRLDPNNAQATWLERCAGTARFVFNWGLARWQEQYKAGEKPSWQKLNAELNAIKRIDFPWIAKLPWKVANGALGNLGMAFTNFFRRVKAGQKPGYPRFKSKKHTTPAFAVEERAVQFDGKRVKVPKLGWVRTRQKLRFPGKVLAARFTKRASHWYISVQVEVAESWVYPHRCETQAVVGVDLGVVDLAVLSTGEKTKAPRALRAHEKRLRRLNKELSRRTKGGKNWQKTKAKLGRLHERIANIRRDVTHKLTTSIVRRFRWIGVEDLNVAGMARTRLAKSVMDAAMAEVSRQLAYKAPLAKSTVVVADRFYPSSKMCSICGVVYAALALGERRWTCNACSAEHDRDENAAKNLEMLAAAHAVTACCPRSAGRPMPSVKLPVGQESSSYVNCG

SEQ ID NO: 43402 - protein, 406 aa, Streptomyces sp.
VIHAYKFLLRPTARQAVALGEMLRDHCSLYNGALQERRDAYRHTSKTSVKYGDQSAQLKAIRAFDPERQGRWSFSSQQATLRRLDKAFAAFFRRVKAGQTPGYPRFKGIGYFDTVTFPKDGDGCRWDSTPHDPVTRVRLQGVGHVRVHQHRPVQGRVKTVSVKREGNRWYVILACDNVPAEELPPTGAIIGIDMGTVHFLTTSEGEHEPNPRFLGTVAEELAEAQRHLATFPKRTRRRTKKHRAAARRVAKLYTKVRRQRLDFHHKTARALVADNDVIAHERLSTAGMTRSPAPKPDPDQDGAFLPNGAAAKAGLNKSILDAGWGQFLAILANKAESAGRLVIPVDPRNTSRTCPPSLGGCGHVAKENRVTQAEFQCTACGFTANADHVGASNILDRAGLVLCAAA

SEQ ID NO: 43403 - protein, 420 aa, unknown
  TnpB Polypeptide
MQTVKIYQLKNLSHKQFQRLKTAQMEAAQVWNCCMEIHKAARINHTPWPGRDTLQKATKGRFALHSQSVQMVVATFLANIETTRQLRQTHPQMQMKYPWRTKRFYPVKWPAQAVCKEHGRVVLPMGRGRTSLILPIDLPENSGACSLVWNYGFELHVCVERPQAEEAPGTIQATVDLGEIHLAAVTTNTGAAMIVTGRAIRSLKRQRNKQLGKISKKQARCKKYSRRWKRLQHTKNKQCRRAERRIRDLRHKATRKVIDFCVEHKVESLFIGNPHGVRNENNGRHHNQRMALWEYGKDIDYLTHKSQAVHIMSSTSSERGTSSRCPACGHKHKPKGRNWVCRKCQFSGHRDLVGSVNMHELAYGKHKVMFPRSFTYLRPGQSRSRSSRADTPPSCLSKTEAQPRLTEMVSSETGHPSELA

SEQ ID NO: 43404 - protein, 382 aa, unknown
  TnpB Polypeptide
MQRRTYKYRLYPNQEQSEILEHQLGEARSLYNAALQERREAWRMQKISLNYFDQANQLKDIRDAGNLDLANFSACQDVLRHVDKTFKAFFRRIKAGEKAGYPRFKSRDRFNSYTFPVWGDGCHLTDTGKVKIQGVGIVKLKMHRPISGVIKTLTLRKEAGNWYACFSVAINVPDVVPSPDAIGIDLGLYSFATLSDGQLIANPRNLKTGLGRLRRCQRKVARRKKGSNGRRKAVRLLQKAHTRIRNRRSDFQHKLSRQLADNYGLIAVEDLNIKGLSRGMLARSVSDAAWGSFLAKLAYKVEYTGGQLIKVNPNGTSQVCSRCGCLPDVPKTLADRIHYCSCGLVIDRDVNAARNILRLGLSLATGTWHNGAGVVAEAVCFS

SEQ ID NO: 43405 - protein, 381 aa, unknown
  TnpB Polypeptide
MKAYKLRLYPKKEEIEKLELSLEVCRQTYNNLLSELNNGYTKNEIQNWLLDLKVVYPEMDNVHSKVLQMENQRLFSNLSSLSAVKKKGKKVGRLRFKGKNWFKTFTYNQSGFKIIQGNKKRILRLSKIGDIPIRMHRKVEGNTKQVVIKKFNEKWYAMIITDFIELRKCGNRELGIDLGVNNYLVDSEETYVEHPKFMEKNKQLLRQAHKNLSRKKLRSKNRLKARKILARTYEKVRNRRDDFLHKLSNEYIRKCRIIAVEDLEIKQMMQSSYNAKNIADSSWGRFLQFLTYKAESAGCKIVKIDPRNTTKCCSNCGNIQEIKLYQRIYNCNNCGLSIDRDYNSAINIYRLGTNLCGDDVRPLGQLSEKQEAMPLISNVRA

SEQ ID NO: 43406 - protein, 428 aa, Lactobacillus sp.
  misc_feature (277)..(399): Xaa can be any naturally occurring amino acid
MIRVQKVRLYPDQTMKNVLDDLCDYRRYCWNQGLALWNDMYDSSLILGDKKVKPSERRVRDELVANKADWQYQLSARCLQLAISDLGKAWKNFFDKAQPDWGKPKFKSKKAPRQGFKTDRAKIVNGKLRLDKPLEIKTWYDIRFKGAKSLEGDLKVVSIYRENDKYWASLPFEVEITKKDETGNKTAVDINVGHINYTEGKVNTLPDHLKKLYKRIKHYQRQLARKRVVNGYKATKTNNYVKTRAKLQRDYRKVANIQHNIIHKFTTKLVSDYDKIXXXXXXXXXXXXXXXXXXXXXXXXXXXXXXXXXXXXXXXXXXXXXXXXXXXXXXXXXXXXXXXXXXXXXXXXXXXXXXXXXXXXXXXXXXXXXXXXXXXXXXXXXXXXXXXXXXXXXXXXXXXLMVIKNIKLSITNISVMNVVRSWIEMKMP

SEQ ID NO: 43407 - protein, 429 aa, Gammaproteobacteria sp.
LLYERTLNSPASDLVAGYNCQIRTVTRSYRLRAYPNGAQRRLLDRWFGAARWLWNTALAIRSEAYRECGLTLTGNDVSRWLTQWKRTPGHEWLAQVPATCLTKCLRDQDAAFRNFFARRARYPRFKGKSTSGSLRFQGVGAAWARGLVTLPKLGALKLAESLPEVERPGLMTLSRDATGRYHVSFCSQVETSLLPITHRLVGVDLGLKDLAAFSTGEKIPNPKRYRARLRYLRQQQRCLARRQKGSRRREKQRLRVARAHAHVRQERQAALHALTTRLVRDFDLICIEDLNVKGLGRGIHARAIHDVAFSEVRRQLAYKGEWYGKILVEVDRWYPSSKTCSACRHTLDELRLDERQWKCPKCGTLHDRDVNAARNLLAEGLRQLAGRDDRDLRVDAGDACPEEILVQVLAEEARSGQRNRACVEQAIFG

SEQ ID NO: 43408 - protein, 382 aa, unknown
  TnpB Polypeptide
MSKTNKAIKCRIYPNVEQQILIAKTLGCSRFVYNHFLEYSNNLYKTCKKSSSYEDNTKMLTQLKKEITFLNEVDSIALQQSLKHLSSAFKNFFEGRADFPKFKKKQFAEKYTTKYVNDNIRFENSNHINLPKLGVVKIKLHRVIPSNWVIKGATVSRNSSGKFYVSIVFEFENQITPKEINNLIGLDYSMSELYVSSNGETAKYPKYYRKSLKKLAVEQRKLSNCVYRSNNYYKQKRKVAKIHEKIANQRKDFLHKLSRKITNLYDAVCIEDLNLKEMSKSKDVKLKGKSKKAKFGKSVSDNAWGMFTKFLEYKLLDEGKLLIKVDKMFPSSQLCHICGYKNLKVKDLSIREWTCPVCHTYHNRDINAAINLKVEGQRLISV

SEQ ID NO: 43409 - protein, 407 aa, Gemmatimonadetes sp.
MTNIKITKGYRCRLYPNAGQRAMLANLFGCCRYVYNWGLARHREHYQKTGKNLNSYDLSKELTQHKKEVDKSWLNKVLRMPLRVSLFNLDRAFKNFYEKRAGYPKFKTKNGKQSAKITRQYFSIQDNRLSVNKMPGAIRVRWSRRWQKNADVSSVTVSKDRAGRYFASFLVTETIAQLPPVKGKIGIDMGLSHFLTLSTGEKVENPKFFVSAERRYRRACKNLSRKQKGSKNRAKARLKLSRIASRISDSRQDFCHKLSSRLIRENQAIGVEDLSIQNMMKNRRLSKAIGDASWGMFLRLISYKAAWYGKDVVTLDTFFASSKTCSICGHKREKLPLYIRKWTCSKCQTLHDRDVNAAINIQKYTVGETEMLYNWSCSDQFTNACGVPVSPHLLRQRTMKQELSLQR

SEQ ID NO: 43410 - protein, 367 aa, Gemmatimonadetes sp.
MDYITYKYKLYSRCDRNKYLHRDIDAFAGVYNHFIALHKRYYRRFNKYPSKFTLIKHLAKLKRTTRFAHWCLLPSQALQNVVERIDFGYQKFFVRDNKRPPTFRSHFRYQSYTLKQAGYKFLEGNKVRIGKRVFRYHKSRCFNVESVKTVTVIRDRVGDLWLCVVAKAEGIKQSIVKNGKTAGFDFGLKTYLTASDTTRTQSPLFFSRNSRHIKKVNRNLSHKKKGSNNRHRARQNHARVHRRIANQRRDYHWQLAHHLCKEYDVMCFEKLNIKAMQTLWGRKINDLGFSDFLTTLKYVAQKTGKTVRQLNQWLPTSKTCSACGTVKENLELRERTFRCQCGLTMDRDLNAAINIHRWGHPPAEEAT

SEQ ID NO: 43411 - protein, 376 aa, unknown
  TnpB Polypeptide
LKAVKAVRFQYAPREEVHALLVTFRDMVNDALRIGFEKKPRSRFQLITMVYYDFKEKYGLHTHYILGACECAFAMLRNRKWRNCPYARKLFLKLDNQSYRLDYMLLRIPTTPRNFITIPLRGGDYQLSFLRNPSLKRGSITVTDSTVVLAVTKAASVVELLRKPVAYDINEKNITCSNGEKYDLSRVAQIRHQYSRIRASIDQNTCRDRRIKKRLLAKYGRREKQRTNQALHIVSKQIIAKAKQAHSPIILEKLTHIRRSMCRGNGQGRKLRGRLNRWSFYELQRQIEYKAQWEGLPVSYVRAAMTSKTCSKCGYRNRALKWEKCWTCPNCGIQHDRDLNAALNILSRFKEPTVVRSVDEGLAKEAMVQLATASRG

SEQ ID NO: 43412 - protein, 424 aa, Moorea sp.
MIVREAKLLNGSKVQYQALDEAIRTAQFIRNKAVRLWREEPNVNKARLSLLCKELAREFPFAKKLNSMARQASAQRAWNSISSFYRRCREGAKQKGYPQFKKHSRNGFADAARTVEYKTSGWKLSADCLTINFTDGFNAGKFSLFCNQETREDLFRLKINRVRVVRRADGYYAQFCFDATRQEVGKHTGNVIGIDLGLKYFYKDQNDNAAIYPKYLRRAEKRIKKLQRRLSRKFVRGKKPQSNNYHKARIRLGKAHLKVQRQRKDWAVKLARCVVHSHDVVVLEDLKIQNLVKNHHLAKSISDASWYQFTQWLDYFGKVWDKTVIAVAPNYTSTDCSNCGHRVKKSLSTRTHQCPKCKTQICRDTNAALNILKKGMNILGVELNSTQGHWGTAGKPGTLEESSTAVDEGKPDLISCLAESRITL

SEQ ID NO: 43413 - protein, 412 aa, unknown
  TnpB Polypeptide
MKINKGIKIRIYPNKQQQIILNKTFGCCRFLYNEMLEERKTVYDNLKDRKEKLYSYKYKTERQYKQEYPFLKEVDSKALQIETRNLIRAFQNFFRGLRNGQKIGYPKFKSKKNKQTYTTYNIDNNIRIDIETNRIRIPKVGWVKYRDNRESTHSIKYMTVSKVRTNKYYVSMLTELEINVIPKKEIQIDKIEAFDMSAPHFLVSERKINYNPRFYRLGERRLKRLHRQLARKQKGSKNREKARLRLAKFYERMQNRKNDWTHKVTHQLSQEYDALILEDLNIKGMLQFNSGLSKSVSLDFSWYQFVSYLRYKMKWRGKHLILIDRFFPSSKLCSVCGQRNNDLKLSDRTWICECGAMHDRDINASSNLKKRGLDILQDREIQIILNGYDTTAGTAGSHASGDRISLHSKETV

SEQ ID NO: 43414 - protein, 386 aa, Clostridia sp.
MKKLLKSFRTEINPTAEQKIKINKTIGTCRYVYNFYLSHNKSLHDKGEKFMTGKSFSVWLNNEYIPNNPDKAWIKEVSSKSLKKSIEDGCTAFTRFFKGQSGFPKFKKKGKSDVKMYFVKNNPKDCRCERHRVNIPTLGWVRIKEKGYIPTTKDGWKIKSGTVSMKAGRYYISVLAEVPDVKIISHGNSGIGIDLGVKELAVVSDGKIYKNINKSARVKKLEKKLRREQRCLSRKYENLKKGESAQKNIQKQKLKVQRLHHRINNIRTDYINKVIAEIVKTKPSYIVIEDLNVKGMMKNRHLSKAVASQKLYEFRIKLKSKCDDNGIELRVVDRWYPSSKLCHRCGCIKKDLKLSDRIYRCGCGYIEDRDFNAALNLRDAKTYEVA

SEQ ID NO: 43415 - protein, 453 aa, unknown
  TnpB Polypeptide
MQQIITAKLKLKTTPEQFVALRQTQLVYRDALNYVSQYAFEHGKTSNPEKLHKGTYYDIREKFKLQAEMTANAIRQVAATYKGLWTKLKKNSEHRKAKITKKRFKGLDEAPTFASPTITYSYQRDYSFKTEQHVSVLTLGGRVIVPYQGFEKHVALIQHGASIKAAKLWYDKPHKQFYLLVALELEMVEPTPEVQQTVVGVDVGQRYLATSATMTNEIRFFSGRKVRARADHYARTRKRLQHKGTRSAKRRMIALSGRERRFKLNTNHVIAKTIVNAHPNALIGLEDLSGIRDRTKRPKRRRKGTQVLPLTLKQRRANWHASKWAFAELHGMIAYKAALSGSSFVVKVDADYTSKACPLCGYTDKSNRPGNGLTFECQNKDCGYQVRTGRAYRLHADLVGARNIAMRALLIRQDWVRTGQLSVAPDVSDREAKAVRLKRYAELRWSPDTSLLL

SEQ ID NO: 43416 - protein, 441 aa, unknown
  TnpB Polypeptide
LLKILELVRTYSVPIRDDRVRGLITWYVKTLQNAIDMIWDNIEWKYSFPELVRKGKKLVVIRGSNVRIPIIPRDRVFKKRLRDMLMKDNPYAAHWVDAVIRTAYSIMENRRKRYLRGRARKVKQRIRRRFARCKTTLIKIDYQAKTIRITLKQGEYLYVSWRSTWFERRVRGWGVGEVIIKDDRVVIPFKSSKEIKVRRFIGWDSNELSLDGYEPSIGFIHVDLKPLQSIKITYERKKVIAQRKGRRELYEKYVRRERNREKDFINKLSAGLRMLFQNTIHVFEDLDKEDLVSRKRAKNRRKRNYRTPWKRIHKRISEVALTAHVDPRNTSRECPRCGYVVETQEGQIFECPRCGLKMSRHRVASINIRRRYLEGKRRGKRRARMRGHPHSNEPEETMMVELWVGVTPSGWSPVIWIPMKWDPEGDETKGRGLDIKLYQAQ

SEQ ID NO: 43417 - protein, 442 aa, Trichococcus sp.
VLLHSRDFSHELGGTVFSLALSFANTCSEVYNEAKEVSIMLKAFQFRLYPNREQKIYFANCFGSARFIFNQMLADRKKIYETYKDDKELLKSIKPRTYTSFKEEFPFLKEVDNLALANASQNLNKAFKNLFRDKAVGFPKFKTKHKSKASYTTNNQGGNIRIEDGKIKLPKIGFVKIKQHRDFDGLIKSCTIFMNKAGNYFISILVEQETPEWLPAEHKIGIDLGLSDFAITTNDAGESVKYANPKCLSRSEKKVKKAQRALSRKQKGSKNREKARIALARKHEKIANQRKDFLHKLSNHITDENQVIVIETLRSSNMMKNHKLAKAIGDVSWSEFCRQLTYKAEWKGRTLIKADRFYPSTNFVPHADTGTARKPHISATGHAQTAAQPMIGTSMPARTSWLWPSKRKHPRQVLPFEPTKYPFPLSAKTYADKEGVRRKFAT

SEQ ID NO: 43418 - protein, 388 aa, unknown
  TnpB Polypeptide
LQRTFKFRLYPNSIQTKQLHYTLGACRWVYNKMIEKIRSEGLHTRNDLNYFLTELKEQDRWLYSYHSKMLQMVSTQADGAQKSLAQLRKNGHKTGDLKFARFSEYNTFVYNQSGFEIKDSFLHLSKIGRIKIIQYRDIPENSEIKQITISKSKSGKWHACVIADIDAVLPKISLEKSVGIDVGIKNFAYDSDGYQTPNPLNLQKMLRPLARAHRKISRRQLGSQNRKKAVKWYQIVHERIKNKRRDFLHKLSTLYARKYDVVFLERLTKLNMVKNHRMARSILDSGWGIFGNMLDYKTLLIEVPSKNTTVNCSRCGNMVPKSLAVRTHQCDRCGLVLDRDHNASINILKKGLEIFGITHQIQQELREVTPVEITKWSMKQEALSFNEG

SEQ ID NO: 43419 - protein, 408 aa, Burkholderia sp.
MDVHQKNAVPPVPNTAVVARTPNYIICIQRLQAFKYELMPTGGQQRDMRRFAGSCRFVFNKALAVQTARYEQGEQKLGYAGLCKLLTEWRNGAETPWLKDAPTHPLQQTLKDLERAYTNFFAKRVKFPRFKKKGQGDSFRYPDPKQIKLDQANSRIFLPKLGWLRYRNSRDVLGKVKQITVSASGGKWFASIQTEREVEQSAPNGDAVGIDMGIARFATLSDGTFYTPLNSFKRHEDRLRKAQQAMSRKSKFSSNWKKAKARVQRIHSRIGNARRDFHAQGHDHDQPKPRDGVYQGLADTEHVQVGGWQHRETGKKRSGQVRPEQVHPRSRLVRVPPPTGLQAGVERRVSHRRAAAEHEPHLSVLRPSIGGQPADARAVRVRRMWLRGKCRSGRRDQCSQGGTRPLRL

SEQ ID NO: 43420 - protein, 427 aa, Thermus sp.
VTKAERIKSAIQETRERRANLRPAVFELKLQNLSRKKEELLSRAFLEAKWLYNWLVSDLGRLNLPANKVDAVEVKVGDSFEERRLVLLGSQIKQEIADRLKDNLRALKKLKERGYRVGPLKPKRFVHSIPLKQYGVTYSLDFARNRARIQKLGNFRVLGLHQIPRGVEIAGAVLVRKPSGYYLHVTCYLPKGDSPKPIAGQPHVTGPRARTLRGYLEAVGIDFGIESKLTLSNGIKIDFEVHETPRLKRLQRKLARAKRGSKRRGKIRFLLRREYEKLNNRRKDAENKVLAFLKLYGKVVFQDDLLASWARLFGRQVHSSRIGGLKLRLRNSLKAPIPVRRFEPTTKECYACGKRHELPLSQRIIACSCGWECDRDVNAALVILRKGLGLSPDQALGLDRPEVTPLEKEAAARILGSNPSIRVSFLQ

SEQ ID NO: 43421 - protein, 226 aa, Thermosipho sp.
LCSTTHSTIYQIGIDLGIKDTLTLSTGEKYSLPDLSKYENKLKRLHRQLSRKQKGSKNREKARLRLAKAYEKIINIKNDWIHKVTHKIVNENQVGKIVVEDININGMMKNSKLSKYIHMQSWGKFITILTYKAKNLGIEVIKADRFFQSSQTCSVCGYVNKEVKDLKIRKWVCPICKAEHDRDINAAKNLAKYGLTIPVGRGPFEFTPVDSALAEEPAKGLRAITG

SEQ ID NO: 43422 - protein, 462 aa, Caldilineaceae sp.
MRALRVRLYPGTAANGQYLEQLAGACRFAWNHVLAGHETDYRMWKAFGKPGEGPGSPTFFTLGQRFTQLRNAPGNEWLKGYSYAIVRYACKYMGDAYAAFFDPDRPDHGRPQCKAKHYQPAFTIPSRVRIQDGRLYIPKMGWTRLAPIRRYVDGQPLTVRVRQESESKQPKWYAYIVFEVPVDHPDVCLPAADGAVGVDRNVGQATDSTGALHALPDTTVEDAKIKRYQRRMARQQKGSNRRRGTARKLRQLQRKRARRRDTATHQISRKMADTAHTVVMEDLNTKGMTKSAQGTVENPGRNVQQKAGLNRAILASGWGPLERKLAYKAGRVVFVDPAYTSQACSRCGHTAKSNRLSQAVFVCGTCGFRAYADHNAALNILVRAAAGAPPTHTAPLNRGGGAALPPAPVPARGTGAAARRGALPPSGRPQGRPLGLPRPVNRICVVSTNVYKSHCRVGFHSQ

SEQ ID NO: 43423 - protein, 461 aa, Mycobacterium sp.
MARLKVPEGWCVQAFRFTLNPTQTQAASLARHFGARRKAFNWTVTALKADIKAWRADGTESAKPSLRVLRKRWNTVKDQVCVNAQTGQVWWPECSKEAYADGIAGAVDAYWNWQSCRAGKRAGKTVGVPRFKKKGRDADRVCFTTGAMRVEPDRRHLTLPVIGTIRTYENTRRVERLIAKGRARVLAITVRRNGTRLDASVRVLVQRPQQRRVALPDSRVGVDVGVRRLATVADAEGTVLEQVPNPRPLDAALRGLRRVSRARSRCTKGSRRYCERTTELSRLHRRVNDVRTHHLHVLTTRLAKTHGRIVVEGLDAAGMLRQKDCRGRAPDGAHCLMQPWQPRAVTCPTRQAGTDRVWWSPTAGSHRRKPAMPAGMCKTSAGTKNGNATAVRSRTNVTTTPRSTSHATRNHLASSAQLGPPSSVEPTVRPGLARRVAVKRGRQPATRPANNPETGCKSSDH

SEQ ID NO: 43424 - protein, 426 aa, Caldicellulosiruptor sp.
MTKAEKIKQTRQQTKERRKNQIPVVYQLKINLSSVSKETKNKLSKLFLEAKWLYNYIVADIENRLNSNADKLKEVEIKVGENFERRKIENLSSQMKQALRERIKQNLYSLHVQKENGYRTGKLQFKHCVNSIPLKQYGNTFKFVNQQKTRVKIQGIKKPLRVLGGHQIPGDSEIAKAELVRRPSGIYLFVTCYIDRDKYTGAWKHRKNRKGVVKPRVWQTFATDSGIDFKPTGFMLSNGLKLEWQIKETRRLKKLQKQFSRQKKGSKRWYKTKEKIAKEYEKLTNIKYDVINKTCSFLYRYRKICFQDDNIKGWKNGHFSKSVHHSAVGTIKRRLSDSLRVSTAVVKSNVPTTKTCSRCGSQQEISLSDRIFRCSVCSLEIDRDLNAAINMLKEVGLGRSELTPVEWETAAKIFRGNPYILVSHTT

SEQ ID NO: 43425 - protein, 372 aa, unknown
  TnpB Polypeptide
MKLILQIKLLPTNEQSKSLLQTLKDSNAACNKISGVAWDKREFNQFRLHHLVYHQLKESSGLSAQILVRCISKVVDAYKLDKKIKRIFKPLGAITYDVRILSYKENSVSIWSVAGRLKILFICHNLKYLPYIKGEADLVTKKGKFYLFQTIEVPEEDVKDIEEFIGVDFGIVNLATTSDGEAFSGEMVDIVRKKMTKIKKALQKRGSKSAKRHLKKLSGKERRFKKHTNHTIAKKIVQIAKDTNRGIALENLKGFKVSVRKAQREQFGKWSFSELGQFITYKARLNGIPVVFVNPRNTSRTCNYCGHISRSNRKTQSEFVCVQCNFSLNADLNASKNIALLGSVNNRIAVHSPIAISPLSWNCKPPALAGGS

SEQ ID NO: 43426 - protein, 448 aa, Moorea sp.
MAKTKTMIGVQQILLHPDQDTEAILTYLCEQSGKLYNMGVYFARQTFFKTGRILTGKFDLVYDKSIGKSKIAKSLPSTPAQQTLLSVTEAFKSYKKLRECWFKGQLEDKPRPPKYLRGSKLFKVAYPNSGGQKPKIIDGQLHFSLGLTVKRWFGVKSFSLAFPTNLEGRKIKEWTILPKNGAFYLEVSYELPEQRLQRQNRNEALSIDLGTSSNLAACVDTLGNSFLIDSRGMKSFNQYWNKQVATRKEGKPQGYWDKWLDRVTRKRNHRIRDGINKAARLIINHCLRHGVKTIVLGWNEGFKKNSNMGRINNQEFVEIPLGKLKDRLSQLCDLYDIRLEITEEAYTSKASFLDGDSLPKFGEKPIGWKASGKRIKRGLYRSANKSIINADLNGSANILRKVARKLGINLSRLGRRSLTTVARIGLWELPQFNLSAESPRLMTGECQI

SEQ ID NO: 43427 - protein, 383 aa, Limnoraphis sp.
MFTALKVRFYPNQEQQVQLSKEFGCARFVYNRFLAEWNKTYEETGKGLSYTKCANQLPALKKELPWLTEVASQVLQQSLKNLDTAFKNFFRGTGKHPRFKSKHRRQSATYPQGFQVSSSLIKLPKLGEIKAKVHRQIKGKVKSITVSMTSSGKYFASLRIELPGEWLEQSTEGKVIGIDLGLNALIVTSDGDKIKPPKFYRYYEKKLAKYQKRLSRKTKGSANRNKARLKVAKVHDKIANCRLDSHHKLSRKLVDENQVIVFEDLNIKGMTRNHCLAKSINDAAWGMLQTLTEYKAKEQGKVVEFVDRFFPSSKTCNCCGHHMKSMPLNIRTWDCPKCGKVHDRDINAAQNLRDYFASGSGVLACEDSVSPKPDTVFGRGNCQ

SEQ ID NO: 43428 - protein, 472 aa, Micromonospora sp.
VKVTRIAYSTVLNPGKYAALEEQAHRLGRVRSEVWQRYGSIAGVGSGLTDRRVRDRWLADGIHVPFGVLANAWKETVRDAMADIAANLEAAKVQVRRAISRRTDDPAERKRMFTALKADRWAEDPFLSRQMRKHWKRGHNRTHDQIVVRADAYSAVVDGRGRLWLAVPGLRRRQMVRIPLSTTVAPSGTLRLILRGGRVEVHHQIDASRMRSSQRPCGQRTLGVDKGYTEALTDSDGGHHGTSLGRLLTSESDRLNERNRRRAKLRSMANTAALRRDHAKAHRIRSHNLGAVKRDRQAARHRARVRTEIFTAVHRVVDKAAAVVAEDLTKRFAGRKTLGKNVNRRLAGWTKGVTAEALANVSERRGSALVHVNAAYTSQACHRCGRLGRRSGDGLHCTSCGVVWQADANAAINILHRAGDPDIALHTPHHMVKQILQDRTDRHRTRLPVQDSSPATTGRRANYPNRSAMSNK

SEQ ID NO: 43429 - protein, 420 aa, unknown
  TnpB Polypeptide
VSASVDIPVIRHETKYAVFVQLRYSYRLDPAPRHRKAFARAFGCARVVVNDALRARQEARQAGLPYITDAELSARLTAAKKTPERAWLNAVSAVVLQQALADLNTAYRNFFASVTGKRKGPKVAPPRFRSRKDHRQAIRFTANARFKILPNGKLRLPKIGDVPLRWSRPLPAKPSSVTVIKDAAGRYFASFVVETEPDSLPATGPVLGIDLGLTHFAVLSDGRKIASPQFLRRAERVLRRRQQDLSRKQQGSKNQTKACLKLARAHARVSDARRDFHHQLSTALIRDNQAVAVEDLAVKGLVRTRLAKSVHDAGWASFVTMLEYKARLHGRQFHQIGRFEPTSQVCSACGMKDGPKPLHVRIWQCHGCGALLDRDINAAVNIAKAAGLAVTACGAQVRPGPAPAQRGETGTHPISRQEAA

SEQ ID NO: 43430 - protein, 528 aa, unknown
  TnpB Polypeptide
MSTQRRASRPTKTFRYRLGHRPQADVWFGETQALFNRVAAFYFDVMEAHPGVRELSDKEALTALERLTHATTNHPHPIMPLADVAQNVPALFRRAAIHAALGSARSFHSNLKRWQAQKAKAEAKAAACGRKLHFHARPPVSPHEWNQGVLFYAGQYKEFAGQTVMLKVWTGGAWAWVKFHLSGRAMPEGWEMNSPQLVKRGKRWCLHISLTRKEFVYPAKVQEQLADPSTRICAVDLNINDALAVCTIQSADGTGVATRFIRGGRELQGRRKRALGRVAVKRGKTGVIQAGVQDNQQLFRYVRAMDNDTAHRVSRRIVEFAQEHGATIIVFEHLGHFKPEKGKYSKRGNEKRSYWLRGKIYRYTQYKAWEHGLITSRVNPRNTSRECADCHQLVARYNAGEAPIEYRPGAPLFLCPACLKRGNADRNASLNIGHRLFARYDGTHFQKPVSKESGVSLSQDAGNEDGPHSQPERHEERDGLGTARTDASGTALHPSCVPRRLRPHWSGGYATGTPSAAHAGAPKEAAAL

SEQ ID NO: 43431 - protein, 814 aa, Trichocoleus sp.
MAIRALKLKFTPSKALKKQLVLMSWAARDLTNILVAHARYIREHKGLACEVVPAQGDSCTLQTWDSESKKWIDAPREGNGVQHAIVPCMVPITQKPKKGELNKAKPLIKPHGETAEQRWEVGLGWEILQALYSGKGCLWPRTNTDRIISKGKRKGLTEVVEVTTQQKPKAEYSLSFEYDEKPHTVTLSAKTVGVITRNFDGNFKSFFSNLRRGDPNAKPPYKERNYVPIVFNKDEIRWEGEGLRLGSVSQNKRHQGITIAFPALKKLKGQQFQDAKVTRSLNGEYWLHLTHENNVEKNPELTGIGAIDFGQKRAIVIANQKGETATISGNNICAVKRVRDRRLREIGRLRSRTLRGQARQYLSKNEQDKALEKNRIKPGSGEKYVRSLVAQRRRDGKDGQGRDLEAIGQKQPGTPFRKRSRRQFKILEASRKLSARSRRALDYANHCVTRAAVDWAVENKIGTIYVGELDNIPKGRKKGNRRMKQVKRNSLWEWPTQTKYLADKLVEAGGIEVKKASERFTSQKCPQCGTLNKPSGRRYHCRPNKGGCGWKGDRDQVGAVNFLNTCLERDIGEPGNLVPGRNYILRISPAARKRKNPRTAPAGRKIRSGLPGCVGTPIGRHASGRSSPASSFEPAEETAKGHRASDRNDEDGSDLHAPKTVRTPRCESGIGIYSKSLGLMQVSAGSGDCEKSSPATSGIGDTSSQPSTLKTGAIKADSGITQCADVEVFSSNIAEEQPQTSSHKGKRKPITSQKIRAKSKTLTPSEVCNNCEPPTRKKAESKIRARTKSAQSESAIQLSLDLWGTAPEIDSWNS

SEQ ID NO: 43432 - protein, 431 aa, Streptomyces sp.
MFLLAVGGARSYDRRMQLRYAFRLYPQPGQRIALARAFGCARVVFNDAVRAREDARTAGEPFPKAAELSRTLITEAKRTPGRSWLGEVSSVVLQQSLRDAEAAYRNFFASLKGERKGAKSGAPRFKSRKDSRQSIRFTANARWSITGSGKLSLPKIGAVKVRWSRALPARPSSVTVVKDAAGRYFASFVIDTDPAADAARMPDTDQTVGIDLGLALPQTPSGGTPIAVLSDGTKTDSPRFLRRAEKKLKRAQRELSRKQKGSKNREKARLKVARAHAKVSDARREFLHQLSTRLIRENQAIGVENLAVKGLARTRLAKSVHDAGWAQFVRMLEYKAARYGRTLVRIGRFEPTSQTCSACGVKDGPKPLHVREWTCNTCGTLHDRDHNAAINVKTAAGLAVTACGAPVRPGLVPARHEETGSHGSPLEPCAA

SEQ ID NO: 43433 - protein, 300 aa, unknown
  TnpB Polypeptide
LQTAFKNHFDKSHKKKNGFPKFKSAKHSRKSYTTNNQNGTIAIFEKGVKLPKIGIVKAVIHRFPQDDWKLKSATISQTSDGKYYASVLFEFEKPENNYVADLNNAIGLDYASNGLYVDSNGKIASNHKYYHESHKKLAKEQRRLSRKIGSKKNETKSQNYLKQLKRVNKIHRHIANQRLDNLHKISTEIANQYDVVCVESLNMRAMSNKSFGNGKATLDNGYGIFLSLLEYKLNDRNKYFVKIGKWYSSSQICHNCGTLHPEMKDLNNRTLTCDCGLTINRDYNAAINIKNEGLRILLSA

SEQ ID NO: 43434 - protein, 394 aa, Nostoc sp.
MYALKRELKLNNNERSLLRGIAGFKRFVYNYALDLITASWDFEGIKAGDSKRLDTIKKVFTQITMNKPEYAWMRKYPSTVYQSAFQDLKNAFSRWRKGLTGFPVKKTKKKGDSFTVYKTSGVYPEKGKPALPFTNRVVINRGKKITLPGIKRFRLKEAIDFICSSQTFTISRTADRWFVSFVLDAEKIPPIIHTIEKIGVDLGVKTLAVCSDGTTYAMPITIKKAKTKLSKLQWRNRNKVLGNKKLNIKASKNAHKLYNKSAKIYARIANIRQDVTQKVTTDLSRKAYIIRIEDLNVQGMIANSKLAAAVSNNCFYEIRRQLTYKQSFYSTKVELVDRWYPSSKMCCKCHHIQPINLSERVFHCKSCGHIQCRDENASINLENAPPNKVRLAQP

SEQ ID NO: 43435 - protein, 226 aa, Nostoc sp.
TDETMQPVDSAVGLDVGVSSLVTLSTGEKIANPKAFDKHYQKLRRAQKALSRKQKASRNRDKARLKVARIQAKISDSRKDHLHKLTTRLVRENQTIAVEDLAVKNMVKNPKLARVISDAGWGEMVRQLDYKTKWHGRTLVKIDRWFPSSKRCGNCGHILERLPLNVREWDCPNCGTHHDRDINASRNILAVGHTVTVCGANVRPDRHKSKGQLRKSSNGRKQKPKS

SEQ ID NO: 43436 - protein, 352 aa, Pseudomonas sp.
MTQTKTLKVRIRDKHAPMLRHMARSVNFVWNYLNELSQRSIRERGVFLSAYDMQKYTNGCAKELGLHSHTVQVVGKEYATRRLQFRKSRLNWRKSRGVRRSLGWIPLNTGAASWKNGQVYHNGNFFKVWDSFGLGHYRFRSGSFTEDARGRWYFNVVVDVEAKPSAGKHAVGIDLGLKTVATCSDGAALENARFYRDLEPALAIAQRAGKKARVRTIHAKIANRRKDALHKFSRSLVERCNLIVVGDVSPQKLAKTNMAKSVLDAGWGQLKTMLAYKCAHAGIVFREVSEAYTTQTCSCCGAMPDSRPRGIAGLGIREWTCECGVTHDRDINAARNILAAGHRRLAVGIPAL

SEQ ID NO: 43437 - protein, 472 aa, Acidobacteria sp.
MTTTLVAVVRPPKADLDVLASAVGVLARATRTTFSWLYRQGRGAAEVKRAVCAQFGILARHWSGCRAASQAAARSWREGGAERLGMLEQRIRVLDDRWRKDCLDPGKKRRNAVARRKAEVAAARLRKELAGAPRWCFGGRRLLRRGRLREWRWRRDSQALFCGETGRRAGNEVAQWSPDGVLRLRLPDACSRTHLVLRDVRFSAVRQSLLESAVDARSPVTWRVKLLRRGKVQLCVTFDEPEPELVSDPAAGVVGVDLNRDHVAVVDVAPDGRVAGAVRLALRAGSDAVWRVAKAVVARARRAGRPVVLENLDFRSDKAWLRSYGKRFAEVLSIFRSRQVRDAVEREGRRAGVEVRYVDPAWTSELGSLKYRRRCRLGRHHAAALVIGRRGLGFGERLLDGRPTLTRTVECVGTSVGKRVFVQRLPAAWLQGGRRRHDRRGRTPRVLVAGSRASQPDGPPAGDGSPAAVGGA

SEQ ID NO: 43438 - protein, 385 aa, Allochromatium sp.
VDCPVGAVIKAKRIRLYPTSEQKSLFRQWLGTSRYVYNATVKHLGLPKEERERHWMGAAKIILASLPDWAGAIPYQIKKIAVKDAYTAFSNGIRKWKHTGAPFDLRLRSRKNPKQSCFIPSSALKDTGVYPRIAGSLKRAEEFPDNPRDSRLVFEQGRWFVIVPYRVPIAPTENQGRVVALDPGIRTFLTGFAEDQAFKIGQGDFARLARLCHHLDRLLSQIAQARCRQKARLKKAANRLRWKIRDLVDELHFQAIHFLLDRFDLILLPTFETSEMVRRSKRRIRAKSVRSLLGYAFFRFGQRLEAAAKRLGKVVLRVNEAYTSKTASWTGEIQPIGGAKTITSGGVTLDRDLNGARGIFLRALVDTPSLKNECACVGACEQALA

SEQ ID NO: 43439 - protein, 386 aa, unknown
  TnpB Polypeptide
MLFATMERYNAACNAVSPVAFSERQFSNIGLQKRLYRHVRETFGLSAQMAQLAIRKVAGSYRSTKEAIKEQNKVLAALGNPLKTLPELSFREHGAICYDARVLSLGRNRVSIWTLRGRIKPRYSKPDHFPAVTIVKQTDLVYRDGAFWLYATVETPDAEPAEPSEYLGVDLGVVKIATTSDGATFSSDATEKVRKRYGRLKGVLQKVGTKSAKRKPQKISGRERRFKTDTNHVISKQIVCAAEGTKQGIALEGLKGILLRTTVRHDQRERHHKWAFHQLRSFIEYKARRAGVLVTVIDGAYTSQQCSACGFVHSDNRQTQAAFRCLACGHTENADLNAARNIAARAAVNRPIAVCSPDTRREVESQACKERGTTYGIMPPTSVGGS

SEQ ID NO: 43440 - protein, 418 aa, unknown
  TnpB Polypeptide
MKLSKTLKIKLGKLSKNKQNILDILLRKNTKAVNFCLQKAKKGKKITHNLVYKDLRKLNLPATVIHGCRAKSIEIIKSYKKVKKRKSKFPELKNSRVRYDNQVVKLRKTNNKLYKYFVSLLYKAGTKGKSDNRTELPLITNSQYQTEIIQKIGDEYKLGSTELVKKDNNYFIHISYSKDINIPTPDKSFSPIGIDVGINNLAVSVAQSSTKFYNGQRVIYKNEFFRKQKAILQRNFAIQEARRLRGRQTRYNDHYISEISKSIIEQAKQEINPVIVMEDLTHIRDTAKVNRKQRYKLHSWIFRRLQQSIEYKALWEGIPVEYIDPYHTSQICPKCGELNKRKKHTYKCKSCGYEANSDYIAGRNIQQLFLAKCQEEQASINNASNIGSPEPKAKKDASVRNISIPPTNELVGILEVIL

SEQ ID NO: 43441 - protein, 199 aa, Okeania sp.
MVKPKNFWYYEVSKTAPQYALRYLSLAWKRCFSKVSGQPKFKKKGRDDSFTLDGSISVGFNHIKLPRIGWIKTFEILPDHVIPKSVTISKKAGRWFVSFYLETIPQISEKSIDVVGVDLGVKSLATLSTGEVFVGAKSYRKLESLLSRLQYLNRHKTKFSNNWKKAQLKVARLHSRIANIRKDTLHKRAYFSRLKTTAR

SEQ ID NO: 43442 - protein, 424 aa, Pleurocapsa sp.
MLTRRITYRLYPSTSQLNKLFYWRRMHAYVYNGAVSNRITQYRKFGHSVDYFEQQASLPGFKKTWTEYLELNAGSLQATLKRVDFAFVRFFQGLAKHPKFRPIKQYSGWTYPDARQGFKVHSDGKNGYLELTDLGCKIQMRGEARTWGKSTTCTIVYRNGKWFASITVKCIPVRETGNGAIGLDFGCKTAIADSNGNKIEPPKFLKEAQSQINKISKQLRRKRNPEKRKVKGSRRWKKTQARLAKLKRKVANKRQNWIHHQAVDIVSCNSLIATEKLQIKNMTRKAKKGSKRKRQKAGLNRSMLDVGIGMLKSAIAYKALEANAIYLEAPTRSLKPTQRCNLCWKLTKKTLNDRLHVCSNHQCNHQEDRDVNSAQVCLTWARGLERASLDGDESSSTESPKVRYCGGFQQLAQTKRYLTHGSTK

SEQ ID NO: 43443 - protein, 373 aa, unknown
  TnpB Polypeptide
  misc_feature (3)..(3): Xaa can be any naturally occurring amino acid
  misc_feature (18)..(18): Xaa can be any naturally occurring amino acid
  misc_feature (46)..(47): Xaa can be any naturally occurring amino acid
  misc_feature (51)..(51): Xaa can be any naturally occurring amino acid
  misc_feature (188)..(188): Xaa can be any naturally occurring amino acid
MNXAYVYRIYPTDEQAIXMNKTFGCVRFVYNKMLADRKAVYEQYKXXKHAXKQQRYPTPADYKEEFEWLREVDSLALANAQLNLNAAYNNFFRDKSVGFPKFKSKHRDKKSYTTNNQGGTIRMIDEKHIRLPKLKDVHIKLHRQLPENSIIKSATISQTPTGKYYISILLEFEEDIKQVVPTQETTVXIDYSSKTLYVDSQANSANYPQFYRKSETKLKKEQSKLSKRKKGGKNREKQRRKVVKLHEKVANQRKDYLHKVSRQIINAYDAVVIEDLNMRGIAQGLNLAKSTNDNGFGMLKVFLEYKLKEQGKQLVVIDKWYPSSKLCRFCGTVNTALTLGDRMWTCSCGAVLDRDVNAAINIKNEGCRILGIA

SEQ ID NO: 43444 - protein, 367 aa, Ruminococcus sp.
LKKNKAFKFRIYPNKEQQILFAKTFGCVRFIYNKMLADKIEYYNQTKQKLQNTPAQYKEEFPWLKDVDSHALGNAQINLKKAYENFFRNPKIGFPKYKLKKSNRLSYTTNLVNNNIRIENGKIRLPKLGFVGMKQHREIPDRYKLKSVTVSQTPSGKYYASILFEYENQVQECKLQNFIGLDFSMHELYKDSNGCEPAYPRYYRIAEKRLKKAQRKLSLMQKGSNNRNKQRKIVAKLHEKVSNQRKDFLHKNSRKIVEKYDCVCIESLDMKAMSQSLNFGKSVADNGWGLFTSYLAYKLEEQGKKLIKVDKFFASTQTCSCCGYNNKGTKDLNVRQWDCPQCGAHHDRDINAAINIREEGKRIALGN

SEQ ID NO: 43445 - protein, 521 aa, unknown
  TnpB Polypeptide
LESEEKSHSRNLFDQNCFGCASFFPAYVVPVFTVEAVKPLTSAREYKADRASHEKKRSILACIQNFWHDSPIMKIICGFRYELYMTDEQRSALGKNAGCRRFVFNKALELQNERKKSGLSLLRYKELCLELVKWKKEEKTVFLKEAMSQPLQQALKDLDRAIADSFRPKSDSARKEWPKFKTKDIGDGFRIPQFKPEHIDDANGRVKLPKIGWMRYRKSRPLAFKCADGSMKSGTVRQIHIRKDCGHWFVVFTTEFDIEMPDPKALDVGIDLGVVHAVATSDGQFFDLNTGRIKELEKEIARYQRKLALNRSSRLKLAKEGRAEAFDKTKPSRKRRKLLEKLQKLHRRVRNIRRDFQMKTAHTLAQEYGCVYVEDLKTRNMTKSAKGTIDNPGKNVKQKSGLNRAILRTGFFGMRQAIEWQQYKAGGYVVAVPAAYTSCECPSCTCTDKRNRPRQAQFRCIGCGYENNADIVGAINVRRKGRTGPSAHNKKRIAREVSSGAVEPFARNSGANSENQPLGVA

SEQ ID NO: 43446 - protein, 362 aa, unknown
  TnpB Polypeptide
MESTKTLKLRIKDKHARVLSAMAREVNQVWNHINAISAKAARPFHGKPQFLSGYDLQKFTAGFSKCDDVSVGSGTVQLVCVEYATRRKQFKKTRLNWRVSNPKSAKYSLGWIPFKGGHAKYKAGQIHFAGQKLSLWDSYGLADYELRAGSFSEDSRGRWYLNVVVKVQAKASSGTASVGIDLGLKEAAVASDGQRIEGRFYRKLEADLGIAQRAHKKRRVKAIHAKIANQRKDALHKFSTALVRENAAIFVGDVASSKLVKTKMAKSTLDAGWASLKTMLEYKSHQAGIVFEVVNESYTTQTCSCCGIIPASSPKGRAGLRIREWVCSGCGAVHDRDINAARNILAAGHRRLAEGITVSSGR

SEQ ID NO: 43447 - protein, 251 aa, Enterococcus sp.
  misc_feature (210)..(243): Xaa can be any naturally occurring amino acid
MNLMERLKAHKFRIYPTEEQEIFFAKSFGCVRKVYNLMLDDRMKAYEETKKDSSKKMTFPTPAKYKTEFPFLKEVDSLALTNAQLNLDKAYKNFFRDKSVGFPRFKSKKNPVQSYTTNNQNGTVSLLDNKFIKIPKLKSLVRIRLHRQPKGTIKSATISRHSSGKYHISLLCKEEIVELPKTNSAIGIDLGITDFAIFSDGQKIDNNKFXXXXXXXXXXXXXXXXXXXXXXXXXXXXXXXXXXRLTVSLFI

SEQ ID NO: 43448 - protein, 305 aa, Bacterium sp.
MAKQSFNWNNQGYQIKDSDNSKFKIFHLMKMPLKMRYHRDLPNNYKINQITISKSHNKYFVSFSVTYTKPNVSLISTSNLDIKKAVGVDLNINEYALSSGELIKTNSKLLAKAKYDKAFKRLQRKQSKRILKAKKEKIKLGVNFKKTQTRLNKIYEKASNIKKDLQHKISKEIVDKFDLIVVENLKTKNMTKRAKLKNVKVKSGLNKSILDTSFYQFLSFLEYKALHNGKLFTKINPQYTSKTCNKCGSIKTNLTLKDRVYICDECGNEIHRDINAANNILERGLKSFGLGISLLDYKQKAFLIS

SEQ ID NO: 43449 - protein, 288 aa, Escherichia sp.
MHQENTMLPRRISVSLFIDQSIIWPVKRLQAFKFQLRPGGQQEREMRRFAGACRFVFNHALALQNENHEAGNKYIPYGKMASWLVEWKNATETQWLKDSPSQPLQQSLKDLERAYKNFFRKRAAFPRFKKRGQNDAFRYPQGVKLDQENSRIFLPKLGWMRYRNSRQVTGVVKNVTVSQSCGKWYISIQTESEVSTPVHPSASMVGLDAGVAKLATLSDGTVFEPVNSFQKNQKTLARLQRQLSRKVKFSNNWQKQKRKIQRLHSRIAYIRRDYLHKVTTTVSKKTTQ

SEQ ID NO: 43450 - protein, 260 aa, Trichococcus sp.
  misc_feature (260)..(260): Xaa can be any naturally occurring amino acid
MKLKGVKVRLYPTPEQQLAIENNFRLNRFLWNQLLGMQLARHENGGSFVTKFGMNYLIKVMKIEFPFLKQAESTSLLYTSADLADSYDRFFKKQNGFPKFKSRRRPKNSYKSNCVNGNIQVVDNHYLKLPKLGLVKANGLHRVKDNIKSVVVRKKADGTFEATLQVAFEAIIFESTGKSVGIDLGIADLAIQSDGYKLPNKQFERSLAKQKRRWERKLARRRQQALVKIEQAKAQEIELELSDFKNVQKAKEQVARINKX

SEQ ID NO: 43451 - protein, 485 aa, unknown
  TnpB Polypeptide
VKTTVRGVILQLTEVQKTYLNNLMERYCAAERWSFKRLLDGWKTQDIRLAAQSKFNLNSRQANDTVYDAQATITSQKELVKLNHTNAANKAAFTRKRLKKAKSSGSSARLQKRLDKEERKLAYWQKHLDGGTFPPVVFGGKKFFHERCKGNITREEWQETRSNRYLSRGDKTKGGNLNTRLYTKDGNICLDIAAEPIETGKVIRYNRITVPVYLAHKPSPQTGLSNGRNYRQMVLEYIKTGSAYQIEIIRKNGRYYVHVTIEEEILELYTAYNGAVGVDINPDGLGITRTDHLGRFRESLWLLQGEWTYAKSCRRDNLIGETAALVVETAKQLNCILIVEDLAFKNDKSVTAKFNRMSHGFVWSKFLQMVDRSAARKGVPLLKVPPSFTSIIGVLKYQQQYGLSNHEAAAYTIARRGLGYIKEKVPKQLIQTFIKKKETFTLLTNWKQWSTIKKAATAAIKKQTKRKVKNLVSWQHHRKQLLVTG

SEQ ID NO: 43452 - protein, 377 aa, Bacilli sp.
MGGEKMATKTILVKLKKPTKKKHKQFIYEQKEFSNCVNDCVERIQNGEKISSKDVPFNLKSSIKNEAIRRAKKAVSDYRKGRATTIPIFKKSLGVKINNQNWNSIEKNGRWYIAFTSNMGKKALPVVETKDVQTFFPFLTQKKKGFRGTMELLRKGKHWYVAIPIQISSELDFEKKHKRIFENMKRQKSTSIGVDLGLGHIAVVSEPFSGKRQFFSGKEVGYMRRHFCSLRRSLGKAKALRVIKRIGKKEREWMKDYNRKLAKDIVDFALQFDNPIIKMEALDDIRKTCRSMKRADKTIHSWSFYQLKQFIKEKAAKHNIPVVDINPYQTSQFCGCCGHAEKNNRYGDKFRCVKCGYTCHADLNASNNIARSTSLAG

SEQ ID NO: 43453 - protein, 446 aa, Thermofilum sp.
VKGPEPRVPELEIPCLERGAEPKGVGKLQNNRSGAELGEPGVRVFKLKTKSIRGKLKEFYDMLTSLLPRDELPKSAFRYRREWENSFIEVIHSRLATGKWLRPAKKRKRGRKKGKHIPKRPPFLLTARFILSSGEQRGRRDAPVVVDLRRKEHRIPCVGVAVPIPERLAKALEEENGLEPRPEFVVQLCSDGRLRIIAKRAAPARPLEVPLRVIAIDENSRYGFVVAVFDFDERGYCRLTRFEVFKPPNHGYREGIVAALRSYADKPAEALESVRELLAFTPTPSDAERLARKTLARKRRLNNAFIESFVARVRELVREARGAAVVILVDPIDAESLQGTPLQGTLLRVRERLRNLAAYEGAHFAELRASGKLCPFCGAEGRENGHRVFRCPSCGAVWDRDRAAVANLVLRYLRTLYKEECQDADPLRLVDAMQAWLKRHPGFLLR

SEQ ID NO: 43454 - protein, 129 aa, unknown
  TnpB Polypeptide
MKRLLINEKIFLQKQSTMLIRENQTICIEDLKVKKLMRNHKLAQHIGSVSWSKFFDMLTYKFVWYGNDVVKVPTMYPSSQTCSACGYKNPLVKNLAIRSWMCPECGTKHNRDTNASINILNKGLQIQSA

SEQ ID NO: 43455 - protein, 392 aa, unknown
  TnpB Polypeptide
MQAANAVCDSLSAWAWANQTFGQYPLHKGQYAAQRASSGLTAQVIVRAIGKVADSYKLDKRTQRTFLPTGAIAFDGRILRWYVDKGQVSIWSVEGRLKLPFVCGEYQRGLLAFQQGESDLAFVNGHFYLMATVSIPDPPLIETDGVLGVDLGIVQLATDSEGRAYSGEPVKAVRRRAQRIRALLQSKGTKNAKKHLQRMRQRTANYQRWVNHNISKQLVQNALLSRKAIALEDLKGIRERASAFSEKRGSRERKKARKVVSRIHERVRNRRHDFVHQTARRLVNRYGTIAVEKLNVKGMVKNHCLAKSISDASWSMFRSVLTNKAESAGRLVVSVNPAYTSQMCSGCGNIAKKSLSVRTHRCLSCGLVLDRDTNAAVNIKALGQYSLATLIA

SEQ ID NO: 43456 - protein, 317 aa, Escherichia sp.
  misc_feature (290)..(290): Xaa can be any naturally occurring amino acid
VKRLQAFKFQLRPGGQQECEMRRFAGACRFVFNRALALQNENHEAGNKYIPYGKMASWLVEWKNATETQWLKDSPSQPLQQSLKDLERAYKNFFQNRAAFPRFKKRGQNDAFRYPQGVKLDQENSRIFLPKLGWMRYRNSRQVTGVVKNVTVSQSCGKWYISIQTESEVSTPVHPSASMVGLDAGVAKLATLSDGTVFEPVNSFQKNQKKLARLQRQLSRRVKFSNNWQKQKRKIQRLHSRIANIRRDYLHKVTTTVSKNHAMIVIEDLKVSNMSKSAAGTLSQPGRNVXQNQHIHLKSKCVVFLSRHGQKSDVGIW

SEQ ID NO: 43457 - protein, 413 aa, unknown
  TnpB Polypeptide
VDARCATRPKPFLPRSRHASVPAVAPRGIPVAREPFHSHRAPRGRPLPVSPDEGRVPHPLAEHDVHKQHIPSEFEVALGVLKAHRRRARRGRRTNVPYLRRPMLKAENQSYRLDRETGRLRIPIRRTEGVQLVLPLSACHRSILEDPSWGLGSLTVTPDRIVVVVRKAAPDPYAPQAAIALDTNESSLDGVAVGDGEARLVTVPFLEVHVVQATHVRRRRRLARKKANDRRVMRRLLAREGRRERDRVRQRLHRVSKGLVAAAAGSGAAIVLEDLRMPQGGGRGPRMRRRLSSWPQGELHRQIAYKALAAGVPIIKVNPAWTSKTCPACGARRRDRVGQDFVCVVCDWEMDRQHNAGLNILKSALASDEALARAVRFRPGALRRDVVIPLYDLLAREGAREEPSGVECLAEGG

SEQ ID NO: 43458 - protein, 209 aa, Anabaena sp.
VESAPQFYRKSEKQLSRANRQKSKKFDRDKKKAKQPQSKNYLKAKNRYARKHLRVSRQRKEYCKRLAYSVIQSNDLVAYEDLNIKGMVRNRHLAKSISDAGWATFRQWLEYFGHKYGKITVAVPPRNTSQNCANCGQEVKKSLSTRTHNCHHCGFVEDRDINASINILRLGLTTVGHTGSYATGDLPSWAIGANLSSNGESVNVESPRL

SEQ ID NO: 43459 - protein, 373 aa, Sporosarcina sp.
MILSKKIRLRPTKEQEEQLWKSVGTARWAYNWALNRQQENFKQGKKFISNNDLRKELTDLKQTEAFKWLFGVSNNVTKQAIKDACNAFLRFFNGKARYPTFKSRKKSKPSFYNDNGKLEVKKNLVLIEKVGWIKTSEQIPIGVTYTNPRISFDNKYWYISVGIEQEFEQLELTDEIVGIDLGIKELAVCSNGQVFKNVNKTKEIRKNEKRLRRLQRSVSRKYEMNKEGNRFVKTSNIIKLEKEIQHLHRRLANIRNNHIHQATNAIVKTKPSTVVMENLNVSGMLKNRHLSRAIANQRFREFIRRMKYKCEKYGIEFIQADRFYRSSKMCSSYGTIKNNLKLSNRVYSCECGLKLDRDVNASLNLAGYGRLTV

SEQ ID NO: 43460 - protein, 517 aa, Streptomyces sp.
VIKTGGRVLTAIVPVRLNRADHERAHAACHASALLWNYAVDWVREQWKAGVRPGREDIRRFVTSQPPEVRPLHAHTAQAIAYDLADAIATTLTNRARSTVGTKFPWREKKYRPLVFTARFGWRITPRGQLALSLGRGRGRILVAAPEFSDRNGLLVTPERWGEIKLCWDIAARSWSLRVAHHLADDSLPDVSSGKPLSDNVRVITVAVDEGVINPMTLVAVAPDGAFEVAVINGRSARSIKRGRNKNMGRLQAKLSRCKPGSRRHRRLTAAKKNLTARTDRRLHDFNHQVTAKANSFIRDQVTAHEQATPQGTSVAVRLVVGDVRGIEKNTETKRRSSRSTRQQLSQWERGIQERQLVYKTGLKIRHISEAYSSQTCPYCLTRRKVRGRMYVCKNDACPLVLHRDAVGGVNILTLAVNDGIFVPVVPETQFRVTYLRARPGWSSGQRERHGFHQYAQARAGVKPGREARSSAQNRAARPDLRVGTGVAVVPRPGDTACHDGSAAAPPGADRARAHTT

SEQ ID NO: 43461 - protein, 340 aa, unknown
  TnpB Polypeptide
MILIGGQMILTYKIKHNRDFSRELELAQKVAEFAIANRDKLSSKQISHLGLKSIIANQILRKYGHNRKSKSVNSVKLTVPNQGIKLDNRIIYISSLKLTMPFDRTCEKINQIEIDEVYAYVSVTVKEEIPYVPEVSIGVDLNTTSHCAVVAIKETGKVYKLGKEAYHIHRKYSRTRRYLQKKGLYKVVKKIKHREQNKVKNLNHRISRFIVDLAKKNKGAIYLEKLQKIRNKKCGRSFKYALNSWSFYQLNQFIGYKASLAGVLVSYREPNWTSQICSQCGLLGERKGKEFRCPSGHVEHADVNAAFNHASPSESIVRLLAERDVNKRNSDIRQEATLCV

SEQ ID NO: 43462 - protein, 400 aa, unknown
  TnpB Polypeptide
MKQTIKYRLNPNFEQEKHLHNLCSIATKLYNTDNYIRRKEWEKTGKIPSVYTQKKALKQNHWFKLLPSQTAQEVIFNLQRNYNSWFKLRKKDDKANPPMFRKKEMLSVISFYQQFKVIGNKLMISMSLKYRAENKIKLIEMSFDKWRESEGTPKFCQIVFNKGKWYAHIVYEVIEQSPILNDKVMAVDLGIINTGATCDTEGNANIYSGKQVLAIQHYFNKEKAKLTSTLTTQYPNRHSSRALRILHKKQNRQITQCLHTHSKAIVTDCLNKGIKTLVAGDITDIRKDKNFGHKNNQKLHSWSFSKFIKQLEYKCMKVGIRFAMVNEAYSSQTCSNCGTVRKSNRKHRGLYICKTCGYTINADVNGAVNILKKYLQDFLSRSIGIVAMPSVARITNVCPS

SEQ ID NO: 43463 - protein, 400 aa, unknown
  TnpB Polypeptide
MIVLEFKLKGKAQQYRVIDEMIRTAQFVRNKTLRYWIDHQGVKLVDLYKQCAIMAKEFEWAGKLNSMARQAMAQRAIFAIQRFFSNCKTKKPGKKGYPQFKKQTRSVEYKTSGWKLSADKRCLTFTDDFAAGTFRLLGSRDLHFYAPGEIKRIRVIRRTDGYYAQFCIDVERTEETIPTGKAVGLDVGLNHFYTDSTGETVSNPRHLRQSEKALKRLQKRVSRKKKGSGNRKKAINKLGRKHLKVSRQRKDFAIKTALCVVKSSDFVAYENLQVKNMVKNHKLAKSISDAAWSQFAQWLQYFGKVYGKTVIAVAPQYTSQNCSTCGNTVKKSLSIRTHICSCGTVLDRDHNAALNILAKGLKARAGINLSLNTVGHTGINALGQNDLYSLVVTSTGKPTD

SEQ ID NO: 43464 - protein, 433 aa, Lactobacillus sp.
MTEETTLLTSEYVITDKTGKLDEIAKEANNLYNASLYQTRQAFFKGKILSATDLDRIFKKKYQQRENMLYHKLGYVQSAQQTLREVNSVFGAWLKALKAYKASPFKFTGRPRMPKYLDKGKRHIFFVTNQNAKVKNGYLVIPKLEVKLKLADNLGKIKRVAFKPLSKKHFKVLVQYEVNNISKLKSDNGIYVGIDPGLDNAFTCVTNGNQKPLIINGKGVKSVNQFYNKQKAQLQKLHAINKTNCKEIKTKQGIKTVYFESNQTLTLTDWRNTKIKQFAHKVTKRIIDYALNCGANTIVIGKNKDQKRSVNMGRRNNQNFIGIPHQVMINMLIYKAKLQGINVIQTNESYTSQTSFLDNEKPVKQNGNYHRKLKGLSPNNRRIKRGLFKSNQGKLINADVNGAYQIMRKVFPKVNSDGIVGLVFSPVKYSVEF

SEQ ID NO: 43465 - protein, 386 aa, unknown
  TnpB Polypeptide
VLKTYKFRLYPTKNQEVLLEKHIGTSRFVYNFFLNYSTNCYKNTKTSTNYYNWANQLTRLKKTEKYSWLNEINSQSLQASLKNLDKAYKCFFKKQGGYPNFKSRHKAKWSFEVPQNVKLELSETNDKFGYLVMPKFIKSPIKTRVHRIMPIDYKIKTATIVKSRTNKYYVSLVLEYQPQGKLSFNTLDAENSIGIDMGIADTLILSNGEKYNFPINSKKYDKKLRHCQKSLARKYRKNQPHSKNFEKARVELAKVYEKISNIKDNWIHQTTKKLIAENQSDYYFLENLNIQGMSKNHKLAKAVLFQSWYKFKEVLSYKAKYSGKEVVSIGRFEPSTKTCSNCGHINNDLTLKDRSWICPECQSEHERDINAAINIRNFGIKQLAAV

SEQ ID NO: 43466 - protein, 350 aa, unknown
  TnpB Polypeptide
MLISKTLKCKVFNPTKRKIELLNQEYSKFQIYVRSGKDFGIYSLTKANFDFVYKKKATKKKQPMPLHNQSTKLRITNHKLTPYWFRIPIHGKRGGIWLPVIPHENIDFSWEIREAKLFKRKKDFWIYITIRKEIQLKTSYSSVLALDIGEKVIATAVLSSVRKPIFLGREVRGIRRHHAWLRKRLQERKLFKKLKEIKGKERRRVELVLHEVSKQIVELAERNNSLIVLGDLKGIRNGNKGKRFNRIVNSFPFNKLSFFIEYKAHLKGIAVVKIREDYTSRTCSRCGEEGKRINQGLFKCPHCKYQANADYNGAMNILKRSQGHALSDGAVAFSPEPPMTEKTRAEAHNI

SEQ ID NO: 43467 - protein, 285 aa, unknown
  TnpB Polypeptide
VTSISQSSQRVLEELAESFTSWHKARQRGDEDANPPGYRKHGDNHPRSTVTWKQKGIKHDSKHNQLRLSKGFNLKNHRSDFILAEYETRPDVTVENIQQVRAVWNGDRWELHLVCKVEIPVEDAPGDNTAGIDLGIKNYLAIAYDDGDAEVVSGERCKGNRTSTTSPETSTTPRGENGPSRRALRARQKLSRRKDHFLHALAKHIVEQCIDHEVGRIAIGDLSKIREDENGNSRNWGKRGNKKLHGWEFDRFTRLLEYKAEEHGILVDRTGRRDVEDVFVLWAQA

SEQ ID NO: 43468 - protein, 460 aa, Catellatospora sp.
VRVTRIAYSHRLNPGKYAQLEEQARRLGRVRCEVWRRYGSVAGAALSDRQVRDRWLAEGTHRTFGVLANAWKETVRDAMADIAAHRAAAKVRVRRAIGRRTTDPAERKRLFITLRTERWAADPYLARQMRRHWRRGHNRTHDQIIVRADQHNTRADARGRLWLAVSGLRQRAMVRIGLNTTLAPAGTLRLILRGGRVEIHYQIDSAAMPTSQRPCGTGAVGVDKGYTEALTDSDGDHHGTGLGALLTAESDRIKERNRRRAKLRSIANSAEQRRDRAKANRIRKNNLGTVKRDRQAAKHRARVRTEIFAAVHAVVDKASTVVAEDLTKTFAGRKPLGKNMNRRLAGWTKGVTAEALKNVSERRGSALVHVNAAYTSQVCSGCGALGDRSGDRLHCTVCGVVWQADVNAAINVLQRHGDPDITLHTPHRVVKQIVQARADRHRSRLPLPDSSLSVQQTESE

SEQ ID NO: 43469 - protein, 499 aa, Vulcanisaeta sp.
MLRRAVAVELEVTKEFNKLLYGVESAYLGIVREVVEYAVKHNVTSAVKLQGIFYHKYRLEYPSLNSQLVIQAIRQASEIAKSFIAQRKKGLASKPYPEVRSISIRFVETTWNYEEFVKSIAPVRIAISLLGGRREVWLRPHKRFWLYWWRVLNGEAELASTLIVKRKANKWYAIFIFEIKPRREVPQSVVAFDINENTVAVGRIDLPSTVDRVVDWNRRYTTPQLYMIRTDFGKLAKRYKAIRNAIIEKLKPGFALPSGNYVNVTNTREFRKRVRKLRERGRKVGRVRHVANELTKTPAIIVTEELGNNPQEEMINGVGKGELRHRIKQTPFKAMEKTVEDKALERGSKIFRVSAYRNSRVCPIHFTRLESTNDWHFLKCPLGHLVDRDYASVTNMAWKLTPEAWTKGVWWDLKSLSKNMDWRKHENKSNPLIPYEIVQYIHAVLKTFTASLEQSPAVLARGNPMNHHQIQNEGGGEETSHAPQGREEASRLNLRGFTS

SEQ ID NO: 43470 - protein, 542 aa, Bacillus sp.
MPYEMVDILIKTIETFNRAKRFAFQTIVREKRWNRKIHTDSLHLVLKRKYQLTDYYANSAVQEAKALFTGLMESQQIYENQEQEKLTKLKKKLKQERTKLTTLRKIKQSCVKGKLTFPKNTRFAKHNNLISLSRKKETLIWLNEYLFEHQYLDVQIKRIQAKIGLLTHRQYRLTQKLSSYQTNIPSAVFGSKKLFRSQFTIDEFIHNHDKWKALFSRARNKQLILSGCKDAKHGNFVFQYVTQNQELWMATSTGKQVMFSAVTFPYGQEIMEEVITNQLQCKNKKKHGKPIAWSVEDYGEYYIVKCLVDVPENPHTNYSKADGVIGIDCNLDHFAWANVTKDGNDKGSGSFRFSIIGKSTGQITKIIEGEVIRLVDLAHQYNKPIVIEKLDTMQSRAGDRYGSKRANRMKSLFAYQKMTDAILGRADKRGVAVFQVNPAYTSISGKMKYMRKLGISIHQSAAFTIGRRGLGYKEKVPQVLQPYIPKKEAHHWSHWHQLNNRLDIRTHHFYQLYHVNQPEEALQIERLDLFENEKKKLAKLLA

SEQ ID NO: 43471 - protein, 392 aa, unknown
  TnpB Polypeptide
MIKTIRVMLLPNNKQKTKLFQYANTSRFAYNWALAREQENYKNGGKFIPDKDLRKEFTQLKKTPEYAWLNDISNNVTKQAIKDACEAYRDFFEGYTKFPRFKSRKYSVPKFYQDNVKIQFTNTHVKVEGFATSKKKNKQKLNWIRLAEYNRIPSENVKYMNPRIKYDGINWWITVGIEYENPTSLPSNEGVGVDLGIKDLGICSDAHKYKNINKTQKVKKLEKRKRRLQRSISRRYEKNKKGVVYCKTSNIIKSEKELLKLNHRLTNIRHNYLHQTTSEIVKREPSFICMEDLNVKGMMKNRHLSKAVQQQCFGEFRRQIEYKAMWNNIPVIIADRFFPSSKLCSCCGNIKKDLKLSDRIYKCECGNIIDRDYQASLNLKRYGEMTLEKSVA

SEQ ID NO: 43472 - protein, 249 aa, unknown
  TnpB Polypeptide
LAKMVEPLDIRWSRPLPEGAEPSTVTVSRDSVGRWHVSLLCEVTVQDGPPTDAVVGIDAGVTTLVALSSGEKVTNPRHERNDRVRLARTQRAHARKQRGSANREKARRRVARVHARITDRRRDHLHKLTTRLVRENQAVVIEDLQVRNMLGNHSLARAISDAAWRELRTMLEYKCRWYGRDLVVVDRWFPSSKACSACGAVRDGLPLNVREWTCRCGATHDRDVNAASNIRAAGLAVLACGDGVRPARA

SEQ ID NO: 43473 - protein, 536 aa, Bacillus sp.
LSTELIRAATDSIVQFNTAKRFSFQTMVREARQNEKLFSKSLHLVLKDKFGMSDYYRNSICREAKALFKSQTELRKLYTKQTDEKIKHIKKKLVNERKFLTQLTKIKQSLIKGKLQLPKNLRFSLQPNGIVSMARRKETRIWFNTYLFEHRYVTPTIKFLKAKIGRITHRLHRLEQKKETLQSHTNSVVFGSKKLFKHQFTKKEFRSDHEHWRHHFLQARNKQMIISGRKDAGSGNFVFHYNVDTNELCFTDVFGRAQTFSNVLFPYGQEIVNEAVSNQRNCKNKKEYGNPITWSIEDYGTYYIIKCIVEVQSNPHTNFSTSAGVIGVDCNVDHFAWANVSRDGNYLGSGKLSFSIRKKSSAQMTNLIEEVVIDLVDLAVQHNKLIVIEVLDTTLSKTGDRYNNKKANRMKSMFAYEKMITALHNRADKMGVSVITVNPAYTSISGKMKYMRHFGIPIHQAAAFTIGRRGLGYKEKVPTALQKHVINKKAHHWSQWNALHKRFNVRTHLFYRLFSRKPLQSSECTESEMKLLKNCI

SEQ ID NO: 43474 - protein, 401 aa, Bacterium sp.
MIRVIKTAFRTSKTDLDRLFACNRESARVWNDCLSYAKDYHKQKGRWIDRRELQVLTKGRYHLHSQSIQSVQERYLEARKNAWRAKQAGYEHIRYPYKTKCNYPTRWKKDGFVIHSNGKIELKMGIHQGKREGPIIVYVSTIPQVRVKEIELIWDLKLMLAISYEDGVIPVTNEHTGTAAIDMGEIHGIAAVAETGQALIVTSRLLRSQKRLRNKQHAELRRKQARCQKGSRKWKKLRRAMDRSSSKTDRQQRDILHKTSRKFTTWADEQQVKTVVVGDVEGVQRNTSKRKKNNPGKKQRTRLQNQRLSQWPFGLLLMMLTYKLGALGIELVKTDEAYTTQTCPVCGRRKKISGRIYKCHCGYEMHRDIHGAGNILAKHKYGEIRALDFKIENITYLRPAA

SEQ ID NO: 43475 - protein, 406 aa, Symploca sp.
MRHKEVIQVFNLVYEFKLKPTKAQVVQFEDWLEQCRKVYNYALAERKDWYKSRSCRIDACSLRCEYIIPPEAKRPNYASQCKGLTAARKAIDQLRAVQVHVLQQTLKRLEIAFVSMWEQGHGFPRFKKPGQMRSFVFPQLGVNPLKGNAVKLPKTGWVKFRQSRPIPDDCKVKQARIVKRASGWYVMLTLQWDLDVPQVMPHGEAIGIDVGIKHFAAVSNGRLFPNPRSFKRLQSKLKLLQVRVTRKRLGSNNRKKAQAKVSRLHERIKDTRKQYHWKIAHNLCDLAGMVFAEDLNLKALAKGILAKHCLDAGWGQFLQILEQCCFKRGVYFQKVDSKKTSQICPNCLTETGKKTLAERTHHCNHCGYTTDRDVAAAQVVAIRGLAAVGHTVKMLSEGKFVGIPAT

SEQ ID NO: 43476 - protein, 525 aa, Thermus sp.
MPEAKAPKLFLGVHARLVFPDPKDERAVLDLMRRFSAAKRFAYQRLLEGKSREELKRADGPLCTLFRLNTRYADGAIEKAKAVLDSALELGSDPRKVVFGGRGLFEQLKRKHLSGKDRERLKREWKEKRQELLYSRGDKSREGNLNLRVEVRDGALWLRIHLGTEENKYAYALVKTSHPQLKALLERVCSSSPYNTELTLKEGKLYAHLSWGEALPPPVHTKANGVLGIDVNSDPYHLALAVVSPDGNLVRYLTLSLEEVDSAPNKGAKELFLWKIAHQVVALAEEHGVTLATERLKYLRKSKRGDGLGRNFRRKQHRFAYRSLLEKIHSLARKRGVEVLEVNPQDTSTIGMLKYAPQLSLSKDIAAALVIGRRALGYEERLPKGYEALLQDESFLAHAEGFYQAHLQELEKLKRAEKNPYLRRRLSREMGKAKAALCLLSSFRGSPGSRGKAPHRRSFPGTHPWRVLKVGLVLPLLGREVPRDLSPLKPVLHLAPLTVGPWEKRMESQDPHPGGGSARINARFG

SEQ ID NO: 43477 - protein, 565 aa, unknown
  TnpB Polypeptide
MYTITTYSNRLYTNEDKEHQQIINDDFIKACDDTLIKYNKMLFSIYNLLFMEKFNNSRYLEITKGLSLFKYLKNKYNIKTPYINSLINEAKGKLESQISNNKNYINYYEEVIKTIEEDLLKLEKTLKNYLKLRDDFINYRNDIKNNRNYILKVKSEKGCGKYAIKNITFTEDKVYVRFLNKKKQRNCKVSALQIKEYGFIDFEYNYLNKKIKKLKELISKKKFKLNNKKGKLNKLQKIKPITFRTNLLNKSNSIFKTRKERIKAKTAFRDSKYDKFLISGRCDAKCGNYILKLTHIPKTNDFDITISFLSKEISLSHIDFPYQKEAIKNILLKNTNDFKMHPICLGIIRKYDKLRNKYYYQIKVSIDLEATKSYINEDISTGIIGMDFNYKHLDITEIDKYGNIINYFTINYDVNGTSHQNALSLREALNEVFTYANSKHKCVVIEDLDLIKTKNKNNKETKKKALNKITHSLSYDLYKRICEYESLKISSKLFYVNPAFTSVIGKLKYTPIKKLGSHIAASYVIARRALKFKETPIKEQYKLIPIEKTFNEFSMWSYLNKNLNK

SEQ ID NO: 43478 - protein, 391 aa, unknown
  TnpB Polypeptide
MIRSIKVRLSPNNKQLTKLFQYAGCARFAYNWAITREQENYKQGGKFLSDSKLRKEFTQLKKLEKYKWLNEVSNDVTKQAIKDACNAYKRFFKGQCKYPKFKNKKRSTPSFYQDNIKIQFTNTHVKIEKFSTSKKRNKQKLNWIKLCEKGRIPIGCKYMNPRFTYDGLYWYVSVGIEVDDNTTLPLNEGVGIDLGIKDLAICSDGNTYKNINKTQRLKKLEKRKRRLQRSVSRRYEKNKKGASYCKTSNIIKREKELLKLVKRLTNVRQNYLHQITSEIVKRKPSFICIEDLNVSGMMKNRHLSKAVQQQKFYEFRRQIEYKSEWNNITVIMADRFFPSSKLCSRCGNIKKDLNLSDRIYKCECGNIIDRDFQSSLNLKTYGENVLKQSVV

SEQ ID NO: 43479 - protein, 362 aa, unknown
  TnpB Polypeptide
MNKGVRFRIYPNKEQQNLINQTFGCCRLVYNLGLDMRNKAFENGEKIGYTQTSAMLTELKRNDEFSFLRDVEAVALQQSLRDLDQGFVNFFQKRARHPRFKGKHGRQSYRTVNQRNKIRIVGEYIRLPKLGYVKIRQSMKIGKINNATVVRMPTGKYFVSLNVEFEPEVKQNNGSSIGIDVGIKEFYSDSNGSTVSNPKFLEKLSRKLRREQRKLSRKKKDSNNRNKQRVRVAKVHEKIMNQRNDFLQKVSTMLISENQVICIEDLKIKNMVRNRKLARCISSVSWGKFFNMLEYKANWYGNEIIKVPTMYPSSQTCSCCGHKNPLVKNLAVRKWECPNCHTIHDRDTNASINILNKGLSIA

SEQ ID NO: 43480 - protein, 276 aa, unknown
  TnpB Polypeptide
MKKNKAIKYRMYPNKEQRDLILKTFGCSRFVYNYMLEESIKAHENGEFLCTRNSFNYLLPSLKRELPWLKEVDSKALESANNNLATAFLNFFKGNNNFPKFHKKKLSGSYTTRCVNENITLLDRSIKLPKLGKVKASLHRMPKKDWKLKAATILQSSDGKFYASVLFEYDSDINYQVDINNAIGLDYASNGLFVDSNGKRGTNHKFYRKAQKKLAKEQRRLSRKTKGSKNYYKQLLCVRRRLSFKTTSAVVIEARSSVMPSSSLITRGALVSLFFT

SEQ ID NO: 43481 - protein, 403 aa, Streptomyces sp.
VKLVVRVKLLPTPVQAAALEATLHACNEAATWAASVAFEKEARRPLELRKHTYAEVRVRWGLGAQAAQHAIKKTCDAYTTLKVNLRNGRYGRPGTKRHARASGKPVVFRPQAAQPYDDRMLSWQHERQTVSIWSTAGRLKGVAFTGQAEQLEVLAAHRRGESDLVCRGGKWFLIATCDIDEATASTHPVGFLGVDLGIVNVAVTSDGERHCGRRINRMREQDRNLRRKLQKKNTKSAKRRAKKYAGKEARRAKDINHKISKRIVAEAERTGRGIALETLTGIRERARLRKPQRATLHSWPFAQLGSFIAYKAKRAGVPVVYVDPAYTSQECSKCHHTARGNRPSQAVFSCRVCGFVEHADHNASHNIRQRGWMAWVCGAQSTAPELTLLACVSPGRSRPHHHQ

SEQ ID NO: 43482 - protein, 278 aa, unknown
  TnpB Polypeptide
VNWTRRTLVFINNPLPIKRERTGAMVGLDRGCVHTLATSDNTFIDLPKERLNRIDREIRRRQKAQARRVSMSGKTLKQYRQHASRTYERTGREIGRLYAKAHRIIDDWQHKTTTGLVKQYDLIVLENLNLQDMSRKAKAKPDPERPGAYPHNSQSAKRGLNRSLRAASLGGIVGKLEYKTQLTGRNRLILVNPAYTSQTCSECGYCDSRNRESQADFECKQCHMSMNADLNAANNILKRGLDHLIGLDEAEHAETESAVQPAYRGKNASTMTCKTSTR

SEQ ID NO: 43483 - protein, 375 aa, unknown
  TnpB Polypeptide
VATITKTISVKVFKPTKTKTEALEDLLNISTELSRFYIATMEGKGTFSKKALHTETYNIIKEQYKGIPTGLIQTIRDKAIETYKSYRAILKNKKKASIPEFKKPVVRFDNRTFTLHKTYNSFSYFVSVSAREGRIYLPIVYGDYQLAVLDKISEGEYKFCTAELSYSKRLNCYVLNISYKYNVEEYRTFKVMGVDMGIDNYAVFAVPGQVIKFFSGKRHNLKREHYSNLRKELGKKKLLKKIKAIGNKEKRYMKDINHKISREIVKIAKKYNAAIQMEDLSNIRERVKMSRKMNRKLHNWNFYQLQAFIEYKALAEGLKIMRIPPRYTSRMCHVCRHAEKGNRKSQALFKCKACGYQAHADYNASMNIANYAASG

SEQ ID NO: 43484 - protein, 485 aa, Caldivirga sp.
MLRRSVAVELEVVKELNRLLYSVEAMYLNIVREVVEYAVTNNVTNPTQLQRLFYSKYRQEYPSLNSQLVIQAIKQASEIAKSFNEKRRKGLADKSYPEVKAVSIRFVETTWNYEQFTSSIAPVRLSLSLLGGRREIWLRPHKRFWLYWWRVLSGEAELASTLIVKRRLNRWYAVFIFDIKPKKELPQSVVAFDINENTVAVGRVDIETTVGKVVDWNKQYLMPQLYTIKTDFGRLARRYEAIRNKIIDRLKPEFALPNGNYVNVANTREFRKHVKGLREWGRKVGRVRYVASELTKNPAIIITEELGDNPQESMINEIRRNETRHRIKQIPFKAVERAIVDKALERGSKLFHASSYRNSRVCPIHFTRLERTDDWHFLKCPLGHLVHRDYASILNMAWKTTPEAWTKGVWWDLKREKMNWKVREGDSNPIIPYPIVQYLHAILKTFTASEESPAVLARGNPMNPAREAYESWARKPPRSKGTPAL

SEQ ID NO: 43485 - protein, 505 aa, Micromonospora sp.
VLSVQLRYQFRVYPTPGQRIELARAFGCARVVFNDGLRLRQQAHEAGEKYISDGELSRRLITEAKATPERAWLGEVSSVVLQQALADLNTAYRNFFASVSGKRKGRAVAPPRFRSRKDNRQAIRFTKNSRFRVLDNGRLRLPKIGDLDVRWSRSLPSDPSSVAIIRDAAGRYYASFVVQTAEDETLPPVESEVGIDLGLTHFAVLSDGTKVAAPKFLRRAAGKLKRLQQALSRKQKGSANRKKAVVKVARAHARVADTRRDWQHKLSTAIVRENQAIYVEDLCVAGLGRTRLAKSVHDAGWASFTGMLEYKAARYGRTFGRVDRFFPSTRMCSDCGRVNEKMVLNVRAWDCPCGSHHDRDVNAARNVRAAGQADLNDRGARVRPPAMVAPRGEAVTHPDAACSTRSVEGISVLQGGEDVNSRTGSAGTCCTTRCGSRSGCGWAGRTGRRATGPPSRSRVSTPAGSCSGWRHRVRHLRLGVRRLAHESLVVICREPSGVTTTATQT

SEQ ID NO: 43486 - protein, 139 aa, unknown
  TnpB Polypeptide
MFGTVTRYYEDKGYGFGDIKGIREEKNLGRKTNQQLHSLPYARIYMQLEYKLKMQGIRLIRQEESYSSQCPPQSEEVSRIYAEKKNRKKRCIYIVDTVIYNADAVGAYNILRKYHAVSGEEIDMPVTGLKNPEIIKVAV

SEQ ID NO: 43487 - protein, 386 aa, unknown
  TnpB Polypeptide
MTPGGEGQLTVTIKMKVSPEPSSLQALLDLMRRYREALNHAIKEVIENKALSLGKAHRLLYSVLRERYSLPSKIATDCYREAIAIAKSWLSNPNRGKIPRAKAPRIWLTNRHSYRVKDGYVELLGGYKLKIVGWDKRYDDYPYGDARLMLKDGKFILGIYKRVPKLGKYVARGVLAVDVNEKEIVIGNKKIEQRFETHIERALHYRQLAENLQKKYSFSKYNAWLRRRGIRRRTKSFHRKASNIIEDWAKKTSHEIVSLAKQYQYAVAREDLTGLVENLRKLPKEHKVSLLILSYRRLEHWIDWQCEKQGVPAVAINPRGTSSTCPICGSKLVENGYRKLKCIKCGFEADRDTVAILNIEKKAHEKMGGSLTTPTAPQMTDVIPNR

SEQ ID NO: 43488 - protein, 449 aa, unknown
  TnpB Polypeptide
VQVRYRYRLYPSPAQEQALARAFGCARVVFNDCLRLRDQCHAGGEKISDTEVQRRVVTVAKLTPQRAWLAEVSSVVLVQACRDARRAYRNWFDSLGGTRKGRKAGHPRFRRKHGRQSVRLTRNGFALHGRKLYVAKVGGIEVRWSRELPSVPSSVTVIREPDGRYYASFVVEREAAPFPPCDRETGIDVGLASLAVTSGGQVIANPRFLRSAERRLKAAQRVMSRKQNGSANRAKARRRVAVLHRKVRDARLDYAHKTALRLVRDNQAVYAEDIAVSGLARTRLAKSVHDAGWSQLLRLIEEKAARHGRYFARIGRFEPTSQVCSACGTKDGPKPLHIRQWTCGTCGTVHDRDVNAARNILAAGRADRLNACRGGARPPLAVAAASETGTHRNAALAALEESRHPRRGGRQRKDAVVSCVVLSSARRFRAWARTARRARRPPAGPSRAR

SEQ ID NO: 43489 - protein, 306 aa, Okeania sp.
SVSYPKQALKLKDNQIRVPLGNTCKRWFGIDSFLIPIPSIRAFSTLKELRILPRNRCFYWEFVYEKEVVVKPQLNQENVLGIDHGLNNWLTCVSNVGTSLIVDGKHLKSMNRWYNKQVSTIKENQPLGFWSNKLATITEKRNRQIRDGINKAARIVINHCLEYQLGTIVFGWNQGQKNQIELGHKKNSEFVQIPTARLKQRIAQLCEEYGIVFIETEESYTSVASFLDGDYLPNYGEKPNDWKPSGKRIKRGLYRTGNNWFVNADCNGAANIITKVSRKLSLDLSRLCRGTLTCPQRIYLWSAKKK

SEQ ID NO: 43490 - protein, 468 aa, unknown
  TnpB Polypeptide
MLRRAVAVELEVAKELNRLLYSVESVYLGIVREVVMYAVEHNVTSAVKLQKLFYRKYRLEYPSLNSQLVIQAIRQASEVAKSFMERRRKGLVNKPYPEVKTVSIRFVETTWNYEEFVKSIAPVRLELSLPGGRREVWLRHHKRFWLFWWRVLTREAELASTLMIKRKLNKWYAIFVFELKPRVEKPQSIIAFDINENTVAVGRVDIVATIDKIASWNRQYATPQLYLIKTDFGRLARRYERVRNAIIEKLKPGFTLPSGKYVNIANTREYRKQVRKLRERDRKLGRVRQIANELTKTPGIIVTEELGKNPQESMIEDVMKDELRHRIKQTPFKSIEKTVEDKALERGSKLFRVSAYRNSRVCPIHFTRLESTNDWHTLQCPLGHYVDRDYASILNMLWKTTPEAWTKSVWWNLRREMNWREYEEKSNPIISKTHRLLPTNTPQDPNGQRTKPRNAGPGQTHEPSQRSQ

SEQ ID NO: 43491 - protein, 407 aa, Blastocatellia sp.
VIRTHIVKCQLDRATADNLNRASGYIYSHIVSTHWKLIKRKGLWLSERSMTRISDLRLATRKLPLHAHSIDAAQQGFYRACATVSSLRQAGVDAKFPYRNKRWRTTVWKNTAIKLANGIIRLSNGRNGEPIEIKLPDHLGDILRVVEVRLVMDGKARCYTWHVVVENGKQPKQPAGDNTVSVDLGEVHPAVVGDERETTIITCRERRHQQQGHAKRMAKLSRALARNRKGSRRYKRLVRARARMRAKHKRVMRDIEHKVSRAIVDAAVERKASTIVIGDIRDAADEVNLGKQTNQKLSSWNHGQTRSFVEYKAEAEGITVVLQDEYHTTQTCPACSFRHKPRGRLFRCPACGFQSHRDVVGQINILSAFKFGAPGKIAAPILIKHRMPHNLRLMGRCQDTGQSSRGL

SEQ ID NO: 43492 - protein, 514 aa, Ethanoligenens sp.
MTMPCYKTLSLEIREPGRRKRELMDTALLSYTRALEQLLRQCREPVQALARGGRRVTRAQVQALADKDMLRALNVYGVQPFKDSLKQDFATILLSFAARWQKSGGQAGYPCVRLEPEEADARIRALTDAYDAGMLSAAEMRGRLAVVLAHSGRVHPLYFGRYAAARDYCLLYDPGTGRFFAKLHLLNAKSRLPPAPFGRELRVVAPGLPSAQATDGPRRFIVVPLSFGKAQQEVLRQALDHPQILRTARLVRHGDAYRLVLSVEVSCNACVVPQATMGVARAAAALACTVCGRDGAVQGNAMLSARGGQMLFCLAKEITARALEARAQVVLEANGGRGDGFLLRDGGRFQPEVFPAGQYMRLEHILRYKLVEAGLPPPVCVSGSGLNITCPRCGAVTRKNRLSPQMFACVACGYAAPFPFVGSRNLAVRLQKYAGNKVPVYVREENGMRHYFNDALGFSCTVPAEDGETVVFYELSLMAKGRQEDWCEGKKYAMLCKLRAAEDIRNAVRWVPVK

SEQ ID NO: 43493 - protein, 404 aa, unknown
  TnpB Polypeptide
VLLSFKTELKPNNKQVTRFRQHCGVARHAYNWANSIILETLKIRETDKSVKIPSAIDLHKRLVTKVKQEHPWYYESSKASPQQALAELRTAWDRCFKKVSKQPRFKKEGASGDSFYLEQGTKSKPGINNDGKRVKLPKIGWVRLHEPLPITAFHNCVISRKADRWFIAFKYKIEKPVTPPDRPTVGVDIGIKELAVCSNGQVFANPKAYRRMSRKMKRLQRRVSKRVKGSNNRKKAVAKLAKLHLKVSNIRSDAIHKLTTYLAKNHSEVKIEDLNVKAFLKNHKLAGAIADCGMYEFKRQLEYKTEKFNSKLTLVDRFFPSSQICSNCCNHRHKMPLKVRVFECPNCGNVQDRDFNAAKNIERWFEGIFVPERSEHQAVSSTASACGVDKQRWQSCYRYDETGS

SEQ ID NO: 43494 - protein, 353 aa, Bacillus sp.
MKHFRTYQFRLYPTTQQLKSLQESWSLGTFIYKAFDKFHNEVSLRQSDTQLLLNRLSHHYPILHTVSRIFLEQAATQTWDKKHKSFQGYTFKDYRLHNARLYIKGMNPIKIVQSRAMPSKPHKVTLVQKDGKWYASFLVSLLNEVNKPETYRIVGVDMGLKDFITLSNGKHISHPKFWKQFEDKVKVEHQKLARKQRGSNEWLKQQGKLRRVYRKLSRVRHDFLHQVSRHLVSSFDVICFESISLSSLNKKKHLRKSLQDTAWSTFIQYVCYKAEAEGKKVIFAERFFPSTKRCSHCSKVRDISLSERVYTCECGFVCDRDENAAKNLEWYGKQALITSTKKRGFPYRFEVNI

SEQ ID NO: 43495 - protein, 415 aa, Bacillus sp.
MICSVYQNEGGVRMKRLTTKQKNEKLVTEGKKLHHYGLRFRALPTPSQLEKINQFIGSSRFAFNFYLKERQNVYRSTKESLSVNTFKKSFNSFKQHPSFSWLKQVDKFALESAIESVEDAFKRFFNGQNKFPRLKKKHKSKQSYTTKLTNNNIELDIENRAIKLPKLGWVKTRFSKSLRDNFVLKGRVLSATVTRHSSGEVFISLKMEDVIDLQEKQVISSISDKDILGCDMGLLHFLITSKGDKIENSRYLKNNLRKLASLQRKLRNKRVGSSNYKKAQQSISKLHLHIANMRKDFLHKVSRKLVNENQVIVLEDLNVKNMIQNKRLARSIADVGWGMFKTFITYKANWANKYVVLVDTFFPSSKMCHGCKEKHTLLSLSERVWVCPKCGIEHDRDENAAQNIKEEGKRILLSS

SEQ ID NO: 43496 - protein, 409 aa, unknown
  TnpB Polypeptide
LELLVQQQQINQHHPYFNEIRNLCHLSKNLYNATLYEIRQHYFKTKKHLSYKDVNTKFAHENQLNYRALPANVSKMVQRKLDKNFKSFFSLCKMYQQRKIKDMPRIPKYLNKDGYFVVEYTKQALSFKRKGYIFLSKTNIFVKCDIPRDDIQCVRLVPRDGHFVIEICYKIVYPNLKNDNGRYASIDLGINNLMTVSSNVFDPFIISGKPIKSVNQFFNKTVAEYRSLLDKFQPKQYTSKRIWRLSRWRKNKIKDYFHKKTTWLVNQLVSNNVNILVVGYNKGWKQDINIGRVNNQKFVHIPFLLLVRILEYKCRLNGITLVLQEESYTSKSSFYNADDLPKLSKNKPLFSGYKKYRGLYKLTNDNKTFNCDLNGSCNILRKYLSDLRLDIYKTMTREYVLKSPYVIKK

SEQ ID NO: 43497 - protein, 388 aa, unknown
  TnpB Polypeptide
LLKSYKTEINPTTKQIQKINKTIGTCRFIYNFYLTHNKGLYDNGEKFMTAKDFSIWMNNEFIPNNPEYLWIKEVSSKSIKKSMENANTAFVRFFKKQSGFPKFKKKNKSNVKMYFVKNNPKDCICERHRIKIPTLGWIKLKEKGYIPTTKQGYTIKSGTISYKAGRYYVSVLIDVPNAKKLQLNDFGLGIDLGVKNFAVISNGITKKNINKSKKIRKLEKQLKREQHCLSRKYEDFKKYNKKKGVATRQNIQKQVLRIQKLHYRIDNIRTDYINKCVNEIVKTKPSYITIEDLNVSSMMKNKYLSKAVASQKFYEFRTKLEAKCKEIGIELRIVDRWYPSSKLCHECGYIKKDLKLSDREFVCECGYHVDRDYNASLNLRDAKTYKIA

SEQ ID NO: 43498 - protein, 402 aa, unknown
  TnpB Polypeptide
MPPIVSYNVGMKTSYQYKLKPTLEQAVEIDRWLSMLCSQYNFLLADRFDWYERNRSPINACPLVCHLPQLRGNPDYYSQKKTLPALKKSRPWYSDIYSQVLQDVVKRVKATFDRFLKGDVNGKRSGETGAAGGSPSVGNPRTRKGRPRFKARDRYRTFTYPQMKEGCLQDNLINLPMFGQVKVILHRPIPDGFKIKTASVTKKADGFYLTLSLEDAAVPTIKPANDPESITGIDVGLKDFLTTSEGETVAIPQYYRKAQKRLRVIQKRVLRSSVDGGSFPHQTCARNIGSKRRSKAVKQLGKQHKKVADKRKDFHINSASNLLKKYDVIAHEDLNVNGCARTRLAKSVHDAGWSNFLSILANKAEKAGLLVIPVSAYNTSQDCSGCGIKVPKELHERTSRLP

SEQ ID NO: 43499 - protein, 421 aa, unknown
  TnpB Polypeptide
MTMVTYKYRIYPTAKQEETLIGWLGQLRFVWNNLLAANNTQYAATKTFSFGFEMKRKLPQMKKDYDWIDAPSQALQNKVFDLDQAMKNCFKYGRGYPKFKSKHHDNSGIEISQVVSKEKITGKILNKNIKWTSQAITIPKLGDVRWVYHRRITGRLLSITIKRDVDQWYVCCLATQTKKKTRTAFDRTECVGIDLGLKDFFVSSDGEVAPTSKIYRNKQDKLKQRHRRLSRKQKGSANRNKARIAVARLHRSIRNTRLDWHHKLSSSIAKNYLVVLVEDLNITGMIKNRKLAKAIQDQGWAQFVTLLSYKLKWNNGVLHKIDRWAASTKTCSCCGSKKTLTLSERTYVCSNCDNVMDRDLNAATNILNWGIDDINTAGTAEIYACGDTAVGDISREISKHVSLETGIIPSLEGSCWSSDQQ

SEQ ID NO: 43500 - protein, 352 aa, unknown
  TnpB Polypeptide
MYEEAKEMRARAGKRTPPKTPPLPLLVKFVMPDGSLRVNRNAPAVIDLRRGELRIPSYGVTQKLRRSLAKALIEENSLDSRPEFTLQVTRRGFLRLVASRYAPARVALPLRIIAIDENSLNGEALAAWDVLKPSRIVRSRYEELMLRNRGFLDRTAALFQSASKGKAEALEEVKELLREAGKSEAEIAALLAPEKLAEIAASTREKEKRLNRAFAEELVSLVRRLIREARARGWSVAIVVDPIDSESLRGSELQRTLLKPRRLLRNLALYEGARFKLYRVSGKRCPSCGGWGVEVAHRRYRCPHCNIEWDRDKAATFWLAKRFLDEHFKEESGDETYVDITGWLKQHPRGLL

SEQ ID NO: 43501 - protein, 343 aa, Boseongicola sp.
VQFARATPFIARKRGPWHGRSQSADAVRSGSACPSGCCLERACREELLGKDFRRERGSARRVPASHVVPEIRQSVHETIRDETCRSDRIKSGNYTASRRQARLRRAQACRGKWTAVVCLAVEIEEPADYGHMLGFDRNCGQVADSDGELHEMPDMSRLEGRARRLQRKLSRQEQRSKRRERTKRHLAKTRRRIANRRRRGQGKPQTFGFLGMTHFCDQSRNDRFRVGRMPSRKRVNRTFRRIKEELRRRRRDDRNETAAWLVRVMNGWLNHYAVPGSGRCLGRFMRLCQRVLWRALRRRSRRDRTAWEKIDLLAAIHWPKARIRHPWPDQRLVVNTQGRSPVR

SEQ ID NO: 43502 - protein, 459 aa, Moorea sp.
MYKTIPIRATFSDEENAFWLFQCEQANSLWNCAIYYSKHKHYSWLEQQSEAFTTYWRGDELRYGWKTYKCTVKYAELCKSLKDNPHYKAMAAQSAQQTLKTVAESIASYNQLVGLYYKGQVDRPKLLRYRKKGGKTAVTFPRQAFTYKKGLFYPSISKESKPELLTEIALEPPDFIDTDWVKEVTVRPYLGELWIDWVIDDGKQPVDLNPNLDYSQAWSFDHGGDNWLTGASTHGKSLIIDGRKLKSLNQGYARLVAKYKAGKPEFYWDANLDRFQRKRNNQMRDGINKAARFIINRCLNDRVGNLIIGWNERQKDSSNMGKRGNQNFVVIPTKRLIERLKQLCPEYGIKLTVTEEAYTSKASYLDDDSLPSHGEKPKGWKPSGKRVRRGLYKTSFGYLINADCNGAANIARKVARQLSLDLTKLGRGALTLPHRYDIFKSLNRSYRTRSEKARFQPAL

SEQ ID NO: 43503 - protein, 327 aa, Microcoleus sp.
MQSDLPKWVKETPCHIRQNAIFDADRAYCVSKDAKYRSIRNPRSTVKFNAADFISGMWFKSKVKKLKFTVSEPIPTSCKYGTQLVLHRGNWFAVFPEEYNSQPSRANSAIALDPGIRTFLTGYDSQKVIEIGSGDIGRITRLCQDLDELMGKMTRVSAKQRRAITKAAERIRSKIQNLVEELHKKSAHFLTTNYQVIFLPTFETSQMVRRAKRKINKKSVRQMLTWAHYRFKQIIKHQADRNGSIVVDVSEAYTSKTCGKCGHIHRKLGGSKVFKCPNCQTVIERDLNGARNILLRALSDSTCSVSNDGIAIVTSPALHSYVEKCSA

SEQ ID NO: 43504 - protein, 425 aa, Rhodococcus sp.
MAPNAIVRGVLKRYRYRAYPTREQHKALSQLFGCCRVVFNDALAARESARRAGRSIPSKSELSAALTIAKTTPERAWLAEVSSVPLQQSLADLHRAYANFFDSRTGRRKGRKVGAPRFKKRTHRQSARFTRNAGFSVLEPGSGIGCVRLPKIGRVRYESSRPLPADPSSVTVIREADGRHYVSFVVDEPVPVVVVPQPAPTRCAGIDVGLTDLAVIVYDDGTREKVDNPRWLRSKERGLARAQRAYSRTMKGSKNRDKARRKVAVAHRKVRETRLDHHHKLALRLVRENQAVALEGLSVAGLARTRVAKSVHDAGWSILTRLIEEKAAEYGRVMHRISRWEPTSQVCACCGVRDGAKPLGVRVWVCPSCGLVLDRDYNAAVSVLLAAGLVERVNACGGSVRRVLACADPVKQEPAEQSLPFGGAA

SEQ ID NO: 43505 - protein, 395 aa, unknown
  TnpB Polypeptide
LTIYQITIDNIGGENMIKGFKVKMFPNQEQQEKIIKFCNTSRFSYNWALNIENENYKNGGKFLSGYDLAKLFTQFKKQEGNEWLKEIPACTTKIAIFNCAESFNRFFKKLSKYPKFKSKKHSKMKCATRYDRMIIEEKRIKLESLGWIRIVKRIIPIGENIKYFNPKIEYDGIDFWFSVSVEIIDNQDNDKTKTEAIGIDLGIKTLATCSNSIINQKPNINKIKKKLKRLQRRASRYYQKLIEKSEQMKIKFVQLSKSKNLLKLEKEIKKLHIKIKNILTTNIHTFTTSLIKLNPEAIVIEDLNVKGMMKNKHLSRSVAEAKFYEIRRQLEYKCKWNNIKLIIADRWFPSSKLCSECGNKKDKLSLSERIYVCEECGSIIDRDLNASINLKNLAA

SEQ ID NO: 43506 - protein, 413 aa, Halorientalis sp.
MEYSHRYCAYPTQEVADRLEHHLDVHRQLYNHVRWDYENSPEDDKPSEYDQNNKLPEWKQRWPVFSELHSKAAQATVARFHRNLSNLRKKKENGHKVGRLKRQAPTEYRSVTYNQSGFDLDEKRGHDKYAYVRFSKIGWVKIRYSRSIPDHATIKEVTFKKEPTGEWFASFGLETDDVDLPEKPDVDSLDASNCVGIDLGIRNYVHTSDGKTVDWLDLEDDYERLRREQRRLSRKDHGSRNYERQRRKVAKVKRRIRRKVLDYQHKLTTWLVTEYDAVFVEDLDVKAMLQGDGNARNKQDAAWRQFINLLDYKADLYGTHVVQVEPAGTTKECARCGVETTKPIWVRDHSCPSCGFETDRDANAAMNIIQRGFAELGLGWPEDTPVETVAATDTIQFESVSARHVIETGSLPS

SEQ ID NO: 43507 - protein, 188 aa, Macrococcus sp.
LIDNKFVKLPKLKSLVKIKLHRQPKGMIKYAIISCHSSGKYHISLLCKEEIMELPKINSAIGIDLGITDFAILSDGQKIDNNKFTTKMAQKLKREQRKLSKRALLAKKKSINLLEVKNCQKQKRKVARLHEKVMNQRNDFLNKLITEIIKNHDIICIEDLNTKGMLRNHKLAKVFLMYRGLAYFDKRK

SEQ ID NO: 43508 - protein, 260 aa, Filamentous sp.
MFNLTYEFKLKPTTGQTEIFEDWLEQCRRVYNYALAERKDWFGSRSCQINACSIRSEFIIKAETQRPTYASQCKSLTTARANIPALAAVAVHVLQQTLKRLEKAFVSMWEQKHGFPRFKKAGNMRSFVFPQLGVNPVQNQSVKLPKIGLVKFHQSRPIPDGATIKQARVVKRVSGWYVMLTLQWDLSVPDTMPHGEGIGIDVGLTNFIAISNGLLVKRQRFFKDAERKRKHCCNNVSVERNSAQTIGEKLKRRSLSCMST

SEQ ID NO: 43509 - protein, 405 aa, unknown
  TnpB Polypeptide
MVTVLKGVKLRLYPNKQQECDLRQMCGNDRFLWNILNEMLQSRYENNKHLYTDDKSKEAKEKRKHVMPSTYDMNYLLPLLKVEFPFLEYSDSSALQVVTSNLSQAYSNFFKNPKYFGYPKFKKLGVCKLSYTGKSTIKLLAKRYLQLPKIGCIRTSKTGVLKDVKIKRYTVEYDSTNRWYITFQVEANVDEFEKTNKTVGLDLGLTDMVIGSDGFKSGRFLVPELENEIKSKQRVYSRRKHYADVKIAMDKTLKVINPRTLLDFINVEKARVTKAKSQKRLANKRKDFLHKLSTNLVKTYDVIVIEDLNSKNMMKNHKLAKAIGNASWYVFRTMLEYKCKWYGKQLIVVPPHYTSQECSNCHHNSGKKTLDIREWICNNCGIHHDRDINAAKNILAKGLKTLQIV

SEQ ID NO: 43510 - protein, 451 aa, unknown
  TnpB Polypeptide
MSSYAIKLTGDLKALENSITIYRDALHFVIPIVNTHWYEMKDFEYANQRMAYAEKLIHSTKENKAHYHFDVEFPKFPSYLRRAVLNRAIGIVSSYRSNLTNWEEKKVELEAKGEKLPQAPRLETRHFDCPAYYKQNLFRNFNPITQTIDLKVFKNGDWVYEPYSLKTSDCTYYQKNLANKKQNVPIIQKKGRCFYVNFSYEDNVPLIAEEKIEKICAIDLGLNTDTTCCIMGVDGTVYARKFIHFSEEHDQLNTQLGRIKRNQKQGNKKNTRLWKRVFGISQDIADKTAQAIFEFGTQHGVDVFVLEFLEFKGKQAVKRAHFWRYKRIFSVLGLKAHRFGLRIARVNARNTSCLAFDGSGTVKRGWEISKETSYSIIQFTTGKLYNADLNAAYNIGARYWIRHLLKTVTVTQRLALETKVPQVAKRNTCTLSHLISLRSELLALNVMRTQA

SEQ ID NO: 43511 - protein, 267 aa, unknown
  TnpB Polypeptide
VNGRVGVRLRPGKFQLSQLAGFLAEELAGTSKENRIYRLGECNLVWKCGIKGTPSRWELHIAIEKKLKEVSLDNLSLNQVMGVDVGENNAAALSTGRIFKAGKMKDDRDKYLSSRARFQRNGSRSARQALRKASGREKRHVEQINDEISKSIIEDAAERNIRLIVLEDLTDIRERIKAGLKVRARLHRWPFRELQQKIVDKACRAGIEVIFVDPRYTSQTCPHCNAIGTRQKHRFVCKNCGYRAHSDLNGGRNLQRLGCLLITQGLV

SEQ ID NO: 43512 - protein, 367 aa, unknown
  TnpB Polypeptide
MRIYPTKEQQNKIDQTLGACRYVYNHMLFRNKKVYERRGEHLGYYDMQNLLPKMKAYLPWLNDADSQALKYACRQVDNAYQRFFKEKKGYPKPKSKKDAVQSYTTTNGTTIHYKQYKVKIPKLGWIRHSDNRKLPEHAKICQATVSRKNGKYYVSIMYKYEKDMQPITINESQVIGLDYKSDGLYVDSNGYEVHMPHFFKESQEKLAKEQRKLSRKKGSKKGEKKSNRYLKQQAKVAKIHEHIANQRIDWLHKESTRLANEYDAVCVEDIDMRSISQGLKLGKATADNGFGMFRVMLKYKLEERGKRLAKIDKWFASSKLCSDCGWKFDDLTLDVRSWICPNCGTNHDRDLNAAINIRNEGLRMLTA

SEQ ID NO: 43513 - protein, 372 aa, unknown
  TnpB Polypeptide
MYRIYKSYKYRIYPNKQQQELIAKTFGCCRFVYNQVLEWKINSYELCGINRSWIDCNNYCNQVLKKEYKWLREPDKFALTNAIRDMNAAFQNFYSGRADYPRFKKKSNEQSYRTIYTNNNIEVDFQFNRIKIPKLRWVKAKISRQFEGKIVNATVRQVPSGKYFVSICVETEHEKLPSTGAMVGIDLGLKDLLITSDGQKFKNIHALAKHEKGLIKLQRRLSRKQKGSKNWNKARIKVAKKHEKIANIRLDYTHKITHKLISENQVIVSEKLIVQNMMQNHSLAKAISDVSWYELTRQLSYKAKWNNCQHVEIDTFFASSQLCNACGFKNKLVKDLNVREWICPNCGAIHDRDINAAKNILNEGLRVIGLCD

SEQ ID NO: 43514 - protein, 221 aa, unknown
  TnpB Polypeptide
MFRKAGRPRFKSFRRGLNSIEGTNNQEIMYKPERGAIGWRKHVMTYMKPDTGYMKEALAFDRRVKYCRIVRRTLNDVRRWFVQLVVEGLPPVRKVYASKCEVVGIDPGSSRIAYFHERHAAIVEVAPHVDLKEPKIRLLQRRIDRSRRANNPDNYNPDGTVKKGSSTWNTSNRGRRTAARLKLRKTMTDLFNAASDGRQTGGEWVSLWSISNARLKVPAAR

SEQ ID NO: 43515 - protein, 552 aa, unknown
  TnpB Polypeptide
MGTKARGKQKSPKKKTPTFLLELPLVVEAGQAARQRAHLEAGRQFYNAVLSAGQRRLRQMRADPAWREARAIPRKHTQERKAAFAALRERYGFSEYAFHELAKALRVSWLAEHLEAVLAQTLATRAYRALNRVCVGQARRVRFKSRGRGLGSIENKRNDTGLRFVLETSEDGRQLGYLLWHDDRLPALIDLDDPVVSHALAHPVKYARLVRRPASSPRAQGADREGERYAVQLVLSGVPLQKPKHVAGTDTVGLDLGPSSIAIVPQQGEARLGPLCAELRPDARATRRMQRQMERQRRAANPEHYDERGRPRKRGKGAKGWKQSHGYQVSRRCLAARERRLAAHRKSLHGRLAHQIAAVGHTIITEKLSYKGWQKRYGKSVGLRAPGMLITHLKRTVASTGGTLHEVPTRSTKLSQWCHGCDTFVPKPLSQRWHQCPCGIGPVQRDLYSAFLAAYLDPADPIPSCAQYVVPWEGAEARLKAAHEQVIQRAKEGQVLPRSMGITYAGARLPKSPSEATQELLFLSREREGRSVEAPPRTPRASAGGVFRIVVK

SEQ ID NO: 43516 - protein, 334 aa, unknown
  TnpB Polypeptide
VRLYDQHAELPALKAERPSLAGVQSQVLQNVAVRIDLAFQAFFRRVKAGEKEPGYPRFRGQGRYDSITFPQVPVGCKLETGTGRLYVMNVGRIKLVYHRPLEGTPKTATIRRSSTGKWYVSFSCECAEPAPLPPTSQQVGVDMGLTTFAMLSTRQAIANPRFFRQEEKALAKAQRRLSKAEKGTPERAARRTVVARVYERTTWRRSDFTHQHSRRIVNAFDLIAVEDLSVNRMVHNHCLAKSIHDAAWSQFADLLSYKAAWAGRKYVAVNPAYTSQDCSQCGHRQVLSLSDRVYTCPCCGVVLDRDLNASLNILGVGLHTLGLAPRSSRIYPGE

SEQ ID NO: 43517 - protein, 273 aa, Paraburkholderia sp.
MSVKRAFRFRFYPTAQHEQQLAQHFSCVRFVYNHMLARRQQRYKDGLKSNYGDGVAALIALKQTPECVWLRDVSIIALQASLRHLDTAYRNFFARRADLPRFKLKRGAQSYSLMRNGFTLCDGKPTLAKMAAPLDVRWSHQLPATPSSLTVSGDAAGRYFVSLLCDDAVAPLPATNRIVAANLGLTHFLTFADARPPLSARSSPAGCCIGYGALAARFRANTRVQKTVTRRASVSRGCTRALPTRARISCTNCRPSLSAKTRLCSWRTCASGA

SEQ ID NO: 43518 - protein, 431 aa, unknown
  TnpB Polypeptide
MFIIHDTGGGETIRLSFKYTCKLSEKQRSIIEELSYHQSKLYNTINYDCRTNGFKSYYELEKAYRDNWHRVYMHSHTYQQGVRQLEQDWKSYFAAVKDYGKNPEKYRGMPRIPGFKNDRRKAPIIFTNYAVRLKDNVMLMSLSKQMQKKFNVKSLNLPLPEAVIERVDFENIHQVRIQWNQSQRQWTFLIIYKKEEERLPKDFTNLMSIDLGLDNLCAITFMDGTDQYLISGKSLKSKNAWYNRELGRLTGTRMKETGNTRFKRTRAMIRLQTKRNNVMLDGIHKASRKVIDLAVKHKCRTIVIGELKGIKQESQSKSFVQIPIQKLAEQIRYKAKLEGIDVKTIKESYTSGVSAMDLEPVTKKYYDKSRRIQRGLFRTNTGQYINSDINGSLNIMRKYLSKTGKENVVPMLITQPRNNGRLDRPVRLLAV

SEQ ID NO: 43519 - protein, 380 aa, unknown
  TnpB Polypeptide
MKYGCQQVLIQDRKLVALREYLCQQSNKVYNCALYYARQVSFKTKRLVNYAQLCRERVRAKNRHFMAMYVSSAQQTCKSVAEALTSFKSLLQTQPEANPRLPRYRKSGLFPVAYPKQWLKFQEGQVRVGKQVKAWFGLDAFWVQFPTNLRWESIKELRILPRHGVFYLEWVYAKPPQPQSLGPTKTLAIDHGVDNWLTCVSNLGHSFIIDGRKVKSFNQGYNQEVARLRTNKPQGFWSRHLGCITEKRNRRMRDAVNKAALWVVNSCLEHSIGRIIFGWNQGQKQECNLGKVNNQSFVFITHRLDGDELPNYGEKPDGWRASGKRVKRGLYQTAAGLLVNADANAAANLLRKVSRTLGLCLKGLSRGVLTVPLRVRLWTA

SEQ ID NO: 43520 - protein, 381 aa, unknown
  TnpB Polypeptide
MGIMSWRFRIYPSKSQEKCLEQHLCNCKELWNSLLEYTKSYHGKTGKFPTRQQLYLQTKGTSLFSQVAQNVADRLAKCIRLMILKKKAGKIAGFPRFKPIERMKSFTYPQFGFKLDRRLELSGMGSIPIKKHREVEGEVKTLTVKRMPSGKWFAIFTSEIEEKQVPQKDILPVGIDLGIEHFAYLSDGTAIENPRHLKASENRLRKAQQELSEKKKGSKNRRKARLRVARVHERLANKRRDFIHKLTHHLAKNYSLIAIENLNVERMSNGFLAKSILDCGWAEFSGMLAYKAEEAGCEVVLVNPANTTSECSGCGLIRKKLLAERRHECACGASMHRDLNAAINILGRATAGHAGSNASGEGTHTHQKWASSFNERGSPAL

SEQ ID NO: 43521 - protein, 315 aa, unknown
  TnpB Polypeptide
MHTVCFKLKTTAYERKELARRFFALSHIHNVLVKHVRKLLIRLEHDAEYQEVLKEYRALLKKKTTPKEELVPYKERLNEIRNTYGLTEDGLQSYIKVCGKRYQKMLSSSQVQKEATRVWAGVSKVLFKDGKQVHFKKYRDFDTIGGKSPTNGVIFEKETLSIEWLGLSLNCIIPRQQKTWKYLVEALDAQISYCELERKMFPNGWHYYVKIVLRGDAPKKFIPGDSVMGIDPGTSTISAVSDTDVFLEELAKDAAKYEKKIFPLQQSMDRSKRMMNPQNYHEDGTIKKGKKTWKYIGCISKREISSRHSIERNLP

SEQ ID NO: 43522 - protein, 391 aa, unknown
  TnpB Polypeptide
MMIMETIEKGFKYRIYPKNNQIEQIENMFKAKRFVWNYFLNINKHRLSHHKSILNYIKMAKLLTLLKKKKTWLNICEKSVLQNSLRTQYETFLNFFKKKCRFPKFKSYKSNYQSMKMNFTKTTAGGTIRVEEKEIKYTPTGKYKKQFCKIKIPKINQIKIAYSRQYEGRIVSCTLSRNTDNKYYISLCCVEITPKQLEQTGIMVGIDLGIKEFATISDNKIIHNPKFYRKYERYLIKAQRKLSKRKKDSKNRDKQRLKTNKLNKKITNCRIDFLQKLSTKLIRDYDIICMENLNSSGMIKNHKLAKSISDASFSEFNRQLEYKARWNYKLISRIDRFYPSSQICSYCGNQSDQTKDLSCRTYICEKCGLKIDRDYNASINILHEGLRILEL

SEQ ID NO: 43523 - protein, 362 aa, unknown
  TnpB Polypeptide
MLKAYKYRIYPNKEQRIYFAKTFGCVRFVYNQMLADRIKSYEENKDLEVKTMKYPTPAQYKKEFEWLKEVDSLALANAQMNLDKAYKNFFRDKSVGFPKFKSKKNNYKSYTTNNLKGTIHIENSHIKLPKLKSMVKIKQHREFDGLIKSCTISQVPSGKYFVSVLVDTEINQLPKVDKKVGVDVGLKEFAITSDGEFFHNPKWLRKSEKRLAKLQKDLSRKQKCSKNRNKARLKVAKLHEKISNQRKDFLHKVSTQLLRENQTIVIEDLKISNMQQNHKLAKAISEVSWFEFRTMLEYKASWYGREIIIAPTNYASSQLCSNCGNKSSQTKDLGCRTYVCPVCGMVMDRDINAGKNLLKLAM

SEQ ID NO: 43524 - protein, 188 aa, unknown
  TnpB Polypeptide
MQCRGWQCFQKRSRWKKQVFSEKMKKDWRGSSEQEKEQRKLSRCVRGSHNYELQKKKVARCHEKIRNQRRDHLHKLSRKIADSYDAVAVEDIDMKAMSQCLHFGKSVQDNGYGLFREMLDYKLAWQGKKMVKVDRFFPSSKKCCKCGRIKKELRLSERVYHCECGNKMDRDHNAAINIREEVRRMLTA

SEQ ID NO: 43525 - protein, 547 aa, unknown
  TnpB Polypeptide
MTRAKDPTAPVRVTFERTRKLAVSKDLNAGKLAAIKATHDIYGRMLEFFVDFFNSHYLLVEAGDAKAALSACEELVLSVPARKLKGGLRQARQAMQGWDFTARFGPVPRDLRRAAINAAYGHLVAYDRQVKAWDKAGQKGTRPKLGVPANHPVLYAQMSKLSVAFYRDGHVRLHLLNPSSGTWDWYNIPVTGRPGTLSLLELSEAERTRRKEARERAVRACKLERRVKGTRPVFNEAEKAEVRLAVGAVEALSPTLVVNRQGRVSLNVAFKQAVEVVRAEPGRLAGLHKTVMAVDTNTHNVTAVVKRGHKVLAARKLSYAPIVARREKAVGTAVRKARLSGRRPRGERQNIALWEHISNQGETAARQVAAWLTKLATAYGVTVIVFEHLRPYRPERGARLTRSARANRRRSYWLRGKIRSYTGDAALACGILTVERNPAWTSNSCPRCHRLGERFSASTTNPANKARFQCWHCGWAGDADIVAALNLHLKWERAFVYPSKDEVKAWKAAGRSKTPQRCGAAVRANPKRDSGHYDVAGTAMLAGEVAA

SEQ ID NO: 43526 - protein, 390 aa, unknown
  TnpB Polypeptide
MILTYRYRLLPTKQQHRALATILESQRQLYNAALEERIDAYRKAGVSRSYFDQTKALTELRQGEPEFSVLPVNVQRATLKFLDEAYKGFFRRVKRGDKAGFPRFRGMGRFNSFAFREFFGISLNAGRIRFKGMPGALRIHLHRPMPSDAIVKCCAFRREAKGWTVSLTAARTVPPPRGGRRAVGVDLGVTTFAALSDGAFTPSLKAARRAERCLRLAQRALARKKQGSTSRRSARATVTRCHAATARRRANHLHQASARLVRDYDVIAIEALNVKGLARGALAKDVHDASWGRFISMLRYKAEWAGARLIEVNPQYTTQDCSGCDARVPKALGDRSHVCPHCGLSIDRDLNAARNILDRAGVGPGLGNVTDGACVQARTLVCLNGLVKDP

SEQ ID NO: 43527 - protein, 196 aa, unknown
  TnpB Polypeptide
VASSDGEKLVAGRFYRGIEQKLAQAQRRGHKRQAKRLHRRAARRRKDALHKFSRRIVRAYQNIVIGDVSSLKLVKTPMAKSVLDAGWGMLKTQLQYKGQQAGRGVFIANESNTTRTCSSCRSLTGPRGLDMLSVSTWVCRVCGDVHDRNVNSAKLILCAWRCSTSVGGNKLPPSIASPSQAYRLREAGISAWTAAA

SEQ ID NO: 43528 - protein, 477 aa, unknown
  TnpB Polypeptide
VQVRWNYKLKPNIEQSTLMAEWLVTLRQHRNYCLRERVNGWSNNNRDSDQPINYAYGSYCEIDTLNEWGSYAPLTCPVVKHGVVSAELTKRSKDVLKWGSASDIQMKRTTQLRHENIYYSRIDSDVLQRNIAHLDADEQGFWEHGLDFPKYARSATFKSFEYKPKRCKFEVNRHAGTKHRYSHVYLPLIGWMSYFDSRPIPRDAETRTVTITRQADGWYISVLLNLPESLPDAMSMGEVSGIVGIDVGINQLVALSDGSLIKNLKVGTNRRIRRRLRIRQRRINRKQKGSKNRIKAGKAVARLHQSVMVKRDAYQWKAAKKVVDTADAVAHENLNILGMRKRCKPKKALSGRFMPNGQSAKRGLNRSISDAAWGQLFQKIAWLALKVGKPVVKYNPKNTSRECSKCGHISPDNRDGEKFICSNCGHIDHADTQAARTGLKRVGLKLVSTRRKDLPVDCGKVTPIRHDSATQWQTGSG

SEQ ID NO: 43529 - protein, 342 aa, Escherichia sp.
MRRFAGACRFVFNRALARQNENHEAGNKYIPYGKMASWLVEWKNATETQWLKDSPSQPLQQSLKDLERAYKNFFRKRAAFPRFKKRGQNDAFRYPQGVKLDQENSRIFLPKLGWMRYRNSRQVTGVVKNVTVSQSCGKWYISIQTESEVSTPVHPSASMIGLDAGVAKLATLSDGTVFGPVNSFQKNQKTLARLQRQLSRKVKFSNNWQKQKRKIQRLHSRIANIRRDYLHKVTTTVSKNHAMIVIEDLKVSNMSKSAAGTVSQPGRNVRAKSGLNRSILDQGWYEMRRQLEYKQLWSGGQVLAVPPAYTSVARAVVIQRKKIACHKVNSDARYVDIQRTPM

SEQ ID NO: 43530 - protein, 190 aa, Enterococcus sp.
  misc_feature (153)..(156): Xaa can be any naturally occurring amino acid
MEQLKAYKFRIYPTEEQEIFFAKSFGCVRKVYNLMLDDRKKAYEEVKNDSSKKMTFPTPAKYKKEFPFLKEIDSLALANAQLNLDKAYKNFFRDKSVGFPRFKSKKNPVQSYTTNNQNGTVALIDSKFIKVPKLKSLVRIKLHRQPKGIIKSXXXXLQYHVILAVNTIFLCCVKKKLSNYLKLIPQLVLT

SEQ ID NO: 43531 - protein, 215 aa, Enterococcus sp.
LCKEEIIELPKTNSTIGIDLGIMDFAILSDGQKIDNNKFTSKMEKKLKREQRKLSRRALLAKNKGTNLFEAKNYQKQKRKVARLHEKVMNQRTDFLNKLSTEMIKNHDIICIEDLNTKGMLRNHKLAKSISDVSWSKFVTKLQYKADWYGRKIIKVDKWFPSSQICSECGHKDGKKSLEIREWTCPVCHTHHDRDINASINILTEGLRLHSMGLA

SEQ ID NO: 43532 - protein, 439 aa, unknown
  TnpB Polypeptide
MTTIQDKKTSIKNSLNETRLLRENQYCYVRELKIDQSHLNNKQLQHLNRMFLESKWLYNSIIQFHSEFTISKLNQYDTKIKSVLVKNKDGIYESRNIDNLSSQIKQGIYETFKMSLSSLKSLKQKGKKVGKLKFKSEYNSIYLKQYGNTHKIKNKDGKLSFHIVGFNKPIKVHGLEQIKDLLHTENLNNKNIASAKLIKKPNGFYIHLVCFKSKPNLNNNNDIPIKQPVGLDFGIKTSITTSDGEKFNIMIEETRSIKRASRRVNKSQKGSNNRKKRRLKLQVAYEKLTNRKKDLVNKIVSKLSNNYSVISIQDENIKGWHHGWFGKQVQHSSLGKLKARLKNLSNNQCHIVPRFYPTTKLCPNCGNISSTISLSDRIYSCDCGYSFDRDIHAARNILNHYVSSLCTERTLTCGEMATSGGLNLFNSLSAIVEPRSQSL

SEQ ID NO: 43533 - protein, 370 aa, unknown
  TnpB Polypeptide
MILAKKIRLYPTEEQKQKMWQSVGTARYIYNWTLSKQEENYKNGGKFIVDNILRKEITKLKQDELSWLKEVSNNVAKQAVKDCCKAYKNFFNGFSNKPKFKSRKKSKPSFYNDPFKLKAKEKLVLIEKIGWIKTKEQIPIGVKYTNPRVSYDNKYWYLSVGIEIEQPNIQLTNESLGIDVGVKYLAVCSNGDVFKNINKTKEVRRLKKSLKRKQKQISKKYELNKKGKEYVKTKNIIKLEKQIQQTHRRLANIRNNYLHQTTTSIVKTKPYRVVIEDLAVSNMMKNKHLSDAIRKQGFYEFRRQLEYKCNFRGIKLVVADRFYPSSKICSQCGEIKKDLKLSDRVYKCSCGLVIDRDLNASINLSKYKLV

SEQ ID NO: 43534 - protein, 394 aa, unknown
  TnpB Polypeptide
MRQVERHIVKDNRYEEICHKSGLLYNYCLYVFRQGIFTKNYVKEYELSTKLGKENQPDFRNLPCHVSQNVVKQVGKNIKSWIRSKKEYDKHSEKFQGKPKLPKYKKGKKLNVVVFDETNCRVKEDGYIHFVKNIIEPIKTKVKPDELVQVRIIPQATCFVVEVIYERKEVDLGLDKDNFLSVDLGLNNLCSCVSNVVNPFIINGKVMKSVNQWYNKTKAELMSYVGDEGTSNRIRKITLFRNCWIEDKLHKISRYVVDFCKFHNIGTIVIGLNKEWKNKINIGRRNNQNFVFIPHSKLIDKIIYKSKLLGINVIVHEESYTSKIDHLAFETLKKQDSYLGKRKKRGLFQSSIGKMLNADINGAIGIARKVIGDSFIRKIVDSGFVFNPVRLNIL

SEQ ID NO: 43535 - protein, 409 aa, unknown
  TnpB Polypeptide
MSLITRSYRRRAYPNGAQRRLLDRWFGATRWLWNTALEIRSEAYRGCGLCLTVIDFSRWLTQWKRTAGHAWLAEVPATALTQCLRDQERAFSRFFAGHARYPRFKAKGGRQSLRFQGVGAPWRSGVLSLPKLGVLRLAEGLPEVERPDMLTLSRDASGAYYVSFCAQVPCSLLPGTGELVGVDLGLTHLATLSTGEKIPNPRHYQRRLRYLRQQQRCLARRKKGSRRREKQRVRVARAHARVREARQYALHALTTRLVREFSVIAIEDLNVRGLACGRSARAIQDAAFGELRRQLRYKSDWYGPLLLEVDRWYASSKHCSMCQFRLDELRLDQRQWTCPKCGTCHDRDINAARNLLTQGVRQLAGRDDRDLRVDAGDACPEEDILVQVLAEEARSGHHNRAGPGPVRLG

SEQ ID NO: 43536 - protein, 260 aa, unknown
  TnpB Polypeptide
LRASVDLGIVNLATAYVEDGKCYIFKGGGVLSQYEHYSKRISKVQKVLAIHKQRKSRKIKLLHDKRRRYLKHALNSMVRKIMEELRQKRISEVIIGYPKEISRNHGNKLTVNFWNYSYVIKRFEDIGEELGIRIVKVDESYTSKTCSLCGEVHESGRIKRGLFRCPHVGKVINADLNGAINILHIPEFQGSGRKGQLPVRDRGNGLKTQPVVYRWTNKAGWVQKSPASYEVMKMKAVNHKPMIPLRVPLPFRVGRRSVTK

SEQ ID NO: 43537 - protein, 347 aa, Proteobacteria sp.
LVYRYRVKNLHGELNRQARAVNFLWNYCNDVQRHALQWGKKWPSGFDLNKLTAASSKELRLHSGTINATCEQYAKSRCQHRRPYLRYRGKKSLPWVPLKGRDLKADGDGFIFQGRRFRVFLSRALPEGGKIKDGTNFARDARGNWFLNVCIEVARAAESRPIQSGVGIDLGLKHFAKLSTGEPIPNDRYGRTAALKLATMQRAHKHKRHLAKLHGKVAHARADFQYKLALDLVRRFDYIAVGNVDAAKLAKTKMAKSVYDASWSSFRNKLAHKAIEHGATFEEVSEQGSTQTCSACGARSGPKGNAGLRIREWICSDCGSEHDRDTNAALNILRCGHAAPVVGISAL

SEQ ID NO: 43538 - protein, 439 aa, Proteobacteria sp.
MLIRQGFQYVLRLKPRKQALLRRWIGCRRFVFNEALAHQKSELAEGRRRPGYAALCARLPALKQNHPWLCEPPAQALQQALKDLCTAWERTYSSCFGAPRFKKRGEGDTLRLPQDCRYDGTVGVVHLPKFGAVRLRHSREALGELKNVTLRQERGRWLASLQTERELDVALPNATSAVGLDFGATTTIMPSVGDPIVLPLKLGRYERRMKRLQQSLSRKKKGSRNRVKTRQRVAACHARIAAIRRDFLHQRTTQLVRNHGLIAIEDLAVKHMSVSAAGTLDKPGKNVKAKSGLNRAILRNAWSMTRQMLEYKCTWRGLMLVAVAPAYTSQRCSACGHVALENRKAQLFKCTLCGHAEHADRNAAKNILAAAHAMLSANKEAQPGGCPACTAGYAETHACEGAWHPPLRSRPHSAAQGMSVGIPLAGTISELSPSGNLHP

SEQ ID NO: 43539 - protein, 471 aa, Oscillatoriales sp.
MRKVRNAMRTTYQYQFYPDIKQKLTLNHWLRICRYWYNRQLGDRFDWWEMNRTTVNACPLIVSISAPREKPNYYSQKKQLPILKKDLVKVFHSGDILDFKQVDSTILQDVSKRVDKAFERSIAGDSKGGRSGKPRFKTEADYRTMTFSTANSDWIKLVRKNWMYVRLPKLGVVKVRMHRSIPDGFTIKQASVTRKVDGWFIQLMLEDASVPEFTFDKVNPTWDNSVGLDAVLHEDVYLATSSGEKLPSLKPLRKNQAKLDRISRKRNKQKRGKAARRKLAKKEAKQHQKIARSRQDFHYKTAHKLVRSGAKFYFHEDLNLKGLTKRHKVKQDDEGTYLPNGQSAKSGLNKSWLDAAFGQFFKTLEYIAEKTGAVVVSQKPAYTSMLLCYRNEIVFTDCNIREYWDEQHSLMVDRDINATINLKKLGLDIFPSIKRRNGNLSVVGTMDDSTVKEILHTLHRAARSPHHTVLS

SEQ ID NO: 43540 - protein, 176 aa, Shimazuella sp.
MDVFFPLQSNVIHPKVFRFRCERNYCPYVPAKKKAVGIDLGLKDFAILSDATKVKPNRFFRQYEQKLAKAQRILSRRIKGGSNWNKARIKVAKIHEKIVNARHDFLHKLSSKLIHENQVISIEDLQVKNMVKNHQLAKSITDASWSEFTSMFLFLLWLPHVKNLNLRAWTCPESRM

SEQ ID NO: 43541 - protein, 300 aa, Bacillus sp.
VQPVLVNKAYKFRIYPNKKQEMLIAKTIGCSRFVFNRFLTLWDDTYKATGKGLTYPSCSAELTQLKKEQDMLWLKEVDSTALQSSLKNLADAFSRFFKKQNDMPRFKSKKNRIQSYTTKCTNSNIAIIGNTIKLPKLGFVRFAKSRVVAGRILNATIRRNPSGTYFVSILAETEVQPVGKTGSSVGVDVGLKDFAILSDGTTYNNPKFFCTLEVKLAKAQCILSRRTKGSSNWNKQRVRVAKIHEHIANARADYLHKLSTEIIKNHDVIGIEDLQISNMLKNRKLAKAISEVSWSQFRNR

SEQ ID NO: 43542 - protein, 414 aa, unknown
  TnpB Polypeptide
MQKAIKIRLYPNASQRDALEAQFGAVRFVYNKSLATISHFYKYHKKNLSAYHDIKKLLPMAKNHSRYAFLKNADAQSLQQSCINLDKAFKSFFNKKSGYPNFKRKQGYQKSYHPNGTVCVAEGKRYGHVKIPRIKAPIKAVIHRNLPDSSEGKLSSITLSKTPSGEYYASLLYVMNEKLKEPKNTLSLSDIIGVDVGLNHLMITSKNKKYANPKYYVKSLKELRKAQRKLSRCKKGSNNRHKARIIVAKCHEKVKRKREDLLHKISTQLIHENQVVVVETLAVKNMLKNHKLARGISDASWSRFIEMLEYKARFYGKRVIKVSQWFPSTKLCHVCHYKHPNMTKDIRDWICPDCNTHHDRDINAGINLQQQGVIDLRAGGQVVLGDKAEIVELVSDANESSHSRNSDEARSLAR

SEQ ID NO: 43543 - protein, 255 aa, unknown
  TnpB Polypeptide
MIPKANARFFEIQYIYEAECIQRNLNTNNALALDLGINNLVTAVSNSGQSFIIDGKRLKSINQWFNKENARLQSIKDKQHFSRKPTNRQKAVARNRNNKVNDYMNKTARRVIDYCIINNIGTLVVGYNETFQRNSHIGKQNNQNFVNIPYGQLRNKLEYLCKLNDIVFVKQEESYTSKSSFWDRDDLPVYNADNPKEYPFSGRRLHRGLYKTASGKTINADVNGALNIMRKSSVVDMNILYSRGEVDTPIRIRIA

SEQ ID NO: 43544 - protein, 275 aa, unknown
  TnpB Polypeptide
MKLVANIQLKPNVRQGNALFSTLERSNQACNYISQKGFESNIIGQYDLHKLIYKETRNIFELAAQVAVRCIAKVADAYKVNKGELITFKKYSAQPYDDRIFRFCDNDTISIWTLEGRQKILFICGDRQRELLKYRKGEADLMFIRGKWYLACVCDVPDPEEIGIKGVLGVDFGVVNIAFDSIGNSYSGETVEKVRQKFSKRRACLQRIRSKASKRKLKKLSGKEARFRKHNNHCISKEIVANAERLSFAIAIENLTGICKRIKARKAQRSRLHGL

SEQ ID NO: 43545 - protein, 373 aa, Geobacter sp.
VKRTISIKLVTSPEQEARLLLLQTELARACNHLAGAAAVNRCSNRVKLHHRVYYTVREAMPALGSQMTCNAVAAVVRSYKSLVSNNPGLRKTDWPLITFKSSGSVHFDKRTYSIKGKAISLFTTEGRIIVPMKLGEFQGKYLDIGMPKEAELVCRKGRYYFNLVLDFPDPPKRTTGPVAGVDLGENTIAAISTGKIFGGGKLRHDRDKHLTLRSRLQRNGSQSARQLLKKVSGREARHVRHVNHEVSKAIIAEAVGNECGAITMEDLTNIRKRIKAGKRMRSRLHRWAWAQLQAFIAYKAEAAGIRVEFANPAYTSQTCSVCGCMGTRERHRFSCTCGNLAHSDLNASRNLARLGATAVAPTGAVNRPYVGTA

SEQ ID NO: 43546 - protein, 259 aa, unknown
  TnpB Polypeptide
MIVGRRVRLKPTKAQENWLKQYAGVSRFVYNYSLGLKIDTYNISGENLGQKELMRNITDLKYTDDYLWLQNYNSETIKQSVKDMLSAYNRFFNGLSRYPKFKKRGKCKESFYVRYDKIYSLDDRHIKLPNLKEPMKISESLLITKGTIKNPRVAFDGKYWYLSYSFEVEPMTIDLLDEILGVDLGIKDLAIVSNGDVYSNINKSDKVIKLEKKLRILQRRVSRAYEKNSHRKTRNIIKMERKLRLLHRRLKNIRQTYIH

SEQ ID NO: 43547 - protein, 444 aa, Mycobacterium sp.
VHPRFVAIVVTYANGHVRGVDDTAAVSELMVVKRCVKYPLAPSAAQSEVLARQAGAARALWNLIHAHHTFYEASRRWPSWSDSDAAIRQARKDIDWLAILPAQAAQQVLKAYQQAWLNYWNGTHGRPTWRTRRARHAVDVPQARDLNFTRLNRKWATVSIPKVGKVKLRLHRDIPERVTGARVVRESTGWMLVVRGENQVVKPRQRRVQRGSVGIDRGVIHTLALSDGSFIDQAATLAAGEKKRLYRLERQAARQRAGTLRGHKASRRLLRTYAQIASLKARQARRRYDFAHQATTALVATGMANLVVEDLRVKNMTRSARGTVEAPGINVKQKSGLNRSILNQGWNQILTLLTYKADQAGARVIRVRPHGTSQTCHRCGSTAEGQRESQAVFRCANPACGWTGNADTNAAIVINHRGQEVALQDVEPNAIRQAVKRQNPKTAA

SEQ ID NO: 43548 - protein, 408 aa, Mycobacterium sp.
VEFTAEQAVYAEQVGAVCRSVWNTGLEQRREYRRRGAWMNYEPQAKELAEAKADHPWLKDVPGHCLQQTLMDLDKACRKHGTFRVRWRSGRRWPPAFRFPEGNKMTVQKLNRWHARIKLPKLGWVKFRASRSLSTVVIRSATLTRQGRHWVLSVLIDDGRQQPQVHETPESAVGIDRGVATAIATSAGELIDRTFSTDGERQRVAALQRRLSRCKRQSANRNKIRAELAAVRERERYRRQDFCAQSAHLFTGANAVVVIEDLKTRNMTRSAKGTLHKPGRNVKAKSGLNRAILGKGWYQFALALSSAARYTGTTVVTVPAAYTSQRCSACGHVDPKSRESQAVFRCTHCPHHEHADVNAAKNILAAGLAVTACEDQPRPAGQTRSLKQEPAGNREGLLPQPAHTAPAA

SEQ ID NO: 43549 - protein, 420 aa, unknown
  TnpB Polypeptide
MKIYEMEEGGDSIKVNRVEQTIIKPSHKMYSVINDFSIKSRTMYNYANWFCRQCFIRENHWLRYYEMQIIFKNDKCYKNLMSQSSQCVLQVLDRNWKSYFNGVKQWKKNPEKFLGMPKLPKYIKSKGWIWLLKNNNTYIKEGRLYFRLKAMQGYSFKTEIPKDSRLISVRFVPKNGNFVLEIVYEIELPYISEFNNNYVSIDLGINNFITVSNNIGQRPTIIKGGFVKSENQWYNKRRADKYSKLTDAYWSKYLDRITVIRYNRIKNYMHHVSKYVIDFCKANKIDNVIVGLNETWKQEVNMGNRVNQNFVFIPYDMFIKQLQYKCQDNGMRLITHEESYTSGTSALDNELPIKENYNKKRRIKRGLFRSNEGILINSDVNGSIQIAKKVNPNIFQEYGLEGCLNPITIKDIFSCYKQSA

SEQ ID NO: 43550 - protein, 471 aa, Escherichia sp.
VKRLQAFKFQLRPGGQQEREMRRFAGACRFVFNRALARQNENHEVGNKYIPYGKMASWLVEWKNATETQWLKDAPSQPLQQSLKDLERAYKNFFQNRAAFPRFKKRGQNDVFRYPQGVKLDQENSRIFLPKLGWMRYRNSRQVTGVVKNVTVSQSCGKWYISIQTESEVSTPVHPSASMVGLDAGVAKLATLSDGTVFEPVNSLQKNQKKLARLQRQLSRKVKFSNNWQKQKRKIQRLHSCIANIRRDYLHKVTTAVSKNHAMIVIEDLKVSNMSKSAAGTVSQPGRNVRAKSGLNRSILDQGWYEMRRQLEYKQLWRGGQVLAVPPAYTSQRCAYCGHTAKENRLSQSKFRCQVCGYTANADVNGARNILAAGHAVLACGEMVQSGRTHRNDSGDSLNVAGIHVLQGVEDVNIGFCQRLNSTPRNKRLRQLIPRTQNQSRPASIHLPLPEMPPPPRLAHAHYAAPDTNCR

SEQ ID NO: 43551 - protein, 302 aa, unknown
  TnpB Polypeptide
MEHSHRYHPYPTQEVAVELEHHLDVHRQLYNHVRWDYENSPEDDKPSEYDQNNKLPEWKRKWPLFSELHSKAAQATVARFHQNLSNLRKKKQKGYNVGRLKRQAPTEYRSVTYNQSGFDLDEKRGRDRFAYVRFSKIGWVKIRYHRPIPDRATIKEVTLKKETTGDWFLSFGLETDDADLPEKPDEDSLDASNSVGIDLGILNYIHTSNGKTVDWLNLETEYERLRHEQRKLSRKQEGSNNYEKQRNQVAKVKRHIKRKMLDYQHKLTTWLAKEYDAVFVEDLKVKGMLEQSHNARNKQDVA

SEQ ID NO: 43552 - protein, 371 aa, unknown
  TnpB Polypeptide
MLRTFQFRLRPNAGQTAMLERILTDNCETYNAALQERRDAWKLQRKSISYRDQQNELTELRQDPTFQWLACDIMRDPLRRVDRAFKAFFRRVKAKSGNAGFPRFRARDRYDSFGFSVPVCRDRSIKIPNVGDIRARGGRLIDGKPKLCTVKRDGKRWTASVVCDIGEAPEKCVVSNPVGIDVGLTTLASLSNGTQIENPRWTRQHEDRIAACSQRLALKSRGSKNRIRAREVLRRAHQRAADARNNFVHHVSKWLVANYDLIAHEDLKISNMVRSNLAKSIMDAAWGILIHQITYKAESAGRWVVPVNPRGTSQICSGCGRTVKKKLSERVHSCECGLVLDRDHNASINIKALGMSAAGFMPSESILYSGI

SEQ ID NO: 43553 - protein, 424 aa, Thermogladius sp.
VARVARTVVVETPPLPRRLFRVFVELEGMYRNMVEQLTMYAVREGVASFTRLKALKYRELRSLYPQLPSHYAYTACQDASARAKSFLRLKKKELAEREHPEVNSVSIWLDDHLWRASGLTSIEVATHKGWIPLEVIPHKQYWKYINRGWRLASEARIKLDRKSRKLLVYLTFVKDAEEHRPRGFVPVDLNENNVTALIDGTAYLFETNIGRIVLGYYYRRRRVQEKYDKLYGVKSRIKRKILKKLNERRKKLDARWKIANIIVREASKRGYAIVMERLGRRPAERMIARMSDDQLRHRVFQAAFRGVQRAIEEKAREHGVPVVYVDPRNTSRLCPVHGSEIAYEDGSRVGRCTRGGEHWHRDAVAVWNLLLRALRGGGSSAPSPAGLSVDGSPVPLGSTAAHEPTRVPKALWARRKSLDATMNS

SEQ ID NO: 43554 - protein, 428 aa, Thermogladius sp.
LSKLLKTLKRTVVLEGWVNSAGRRALREVFEAYRAMLQEMVEYAVEHNASQATLHRVFYSRFREEYPWLPTRVIKGCYRDAVRRARSFLRLKKKGLAQGDKPVVKNITVTYSDSQDWRLVGGDVELRTHRGWIRLNLRYTRQLVRYLYGGWKLSSELKLKPAGKRILVYLTFRRVFEVSYNPNNVIAVDVNENNVTLAVFRNGRLGDVYRIETNLGRIVIAYSERRKRITGGKSTKDRSVKKALRKLREGERKTDIIYKVARFIEELAYINSAVVVVGNVHKGKRRLVSRAGSNNLRHRIHQWSVSKLVEVLDNKPIHVVEVPEAYSSSRDPFSGEPIKGYAPSVIRVAVRGRRVRVAKVVLRLARLSNGLTLDRDVVGAVNIGLKHLTADGSPVALGSTGPHEVRVKLVNPHQGPTPPTELKVIETN

SEQ ID NO: 43555 - protein, 406 aa, unknown
  TnpB Polypeptide
VKIYKAYRYELDPNVEQRIHLAKHAGAARFAYNWGLARWKEIYENEGRTTSAIELHRELNHLKKTDFQWMYEVSKWAPQEALRDLEKAFKNFFKGFKNGKKIGYPKFRKKHDRRDRFRLDNSSGTIRLLLDGSDRRYPEKVRHIVLPRIGAVRLKEKPDRQKKNGRMRMYFPQGRILHATVSREADRWFVSLTVEEEILGPHPPKGPAAGIDVGLESFITLVDESGAAQKVQAPKPLHRALKRLKKLQRKISRCGVRDKNGKLIERTKNYEKIRLKIAKLHRRIRNIRLDFLHKLTTELARTHRIIAIEDLNVVGLLKNKHLSRHIADVGWGTFRALLEAKAKLQGVCVVKANRFEPTSKTCSHCGHVLSELSLSVRAWTCPACGTHHDRDVNAAKNLLKFALTVA

SEQ ID NO: 43556 - protein, 257 aa, unknown
  TnpB Polypeptide
LLSVATVPLDSLTGCKTATITRKADGWHVTLSLEDASVPEFTPSPPTLENTIGIDMGLSHFLVTDEGEAIEVPQYYRKAQKKLKRLQRAVSRKKKGSNRRKKAVKQLAKAYQKVANQRKDFHYKTAHKLLKKGRHIAYEALNIKGLARTRLAKSVHDAGWRQFLQILAVKAARAGLLTIAVDPKGTSQECSGCGRVVPKGLHERWHYCPHCHLSLPRDQNSAILIKYRAVGHPVLKAQEMSYAIAGVTEKPALYASA

SEQ ID NO: 43557 - protein, 391 aa, unknown
  TnpB Polypeptide
MKKAFSFRIYPNKNQEVKLNRTLNTCRYLYNNSLTERRRRAELNNLCRNFDVFSWGKPEWLTYEDQANSLAKNKTPEQKEVYSQVLQNTLKRLDRSFKNFYNGFGYPRFQGRNRYNSFTYPQSGFELENGKLNLSKIGNIKIVQHRDIEGKIKTCTIKKDVDQWYVILSTEIDREIRKVPVVSKTGIDVGLNSLLTLSSGEQIKPPKFLRASEKRLTRKQIRLSRKQKRSNNRKKQVTTVARVHRKIRNQRKDFAHKTSRTLVNTYDHIAFENLQIQNMVQNHHLAKSIMDAGWYQLISLTKSKAEYAGKVVELVNPKGTSQVCICGCPVPKKLSMRIHNCPGCGLVLGRDHVSAIVIESRSTVGTTGIQARLSSLNIDTMKREAHTLQSE

SEQ ID NO: 43558 - protein, 381 aa, Crocosphaera sp.
MLVVEAKLKNGTPQQYQKLDEAIRTSQFVRNTCVRYWMDNKGITRNDLQKLCSTLAKNQDTPWVTLLNSQARQSAADRAWQSINRFYQNCRAKISGKKGFPKFKKYSRSVEYKLTGYKLSDDRRKIKFTDGFKAGEFDLWCSQRTLVYYSEQQIRRVRVVRRCDGYYCQFLIDVERQQNHEPTGQVTGIDLGLKEFYTDAQGNTVDNARYLRKSEKRLKKAQRRLSKRFRKGKKQSNNYHKQRVKVAKLHLKVSRQRKDRAIKDALALVQSNDLVVYEALKIRNLVKNRKLAKSISDASWYQFTEWLNYFAKIYRIVCIAVPPHFTTQDCSVCSTRVQKSLSTRTHQCPNCKTVLDRDHNAAINILKKRFSAVLGVSPMSD

SEQ ID NO: 43559 - protein, 407 aa, unknown
  TnpB Polypeptide
MMLTEIHQVNKGNPLYDVFDDLCFKAKNLYNAALYTFRQSFFDDDAKTLSWMEISTMFSKSKQADYASLQSKVANNVIKMLGANISSFWELLKLKRKGEYNRKVKLPKYLHKTEGRFVLDFRSGTISRKRGEKGEIILCPKSYNIKIPTKIKEKIKCVRVVPCRNYYKVEVIYEIKDTIPKSEGCIAGIDPGSKNLLTIAFSDKEKRPAIISGKKIKSINCYFNKMIGEAQSKLRPGTYRSSWLDRLWTKRENKLSYEMHVISKFVANFLDESGCYKVVIGDNKELKKEISLGKQNNRKFVQIPHQKLFQMIEYKCKRKGIEVILCEESYTSKASFIDNDFIPKFNPENQGKHKFSGKRIKRGIYRTSAGKKINADINGAYNIMAKQFPEELSDRNGRKYSPVIFKL

SEQ ID NO: 43560 - protein, 387 aa, unknown
  TnpB Polypeptide
MRKLLKSFKTEINPTEEQKVRIHKTIGTCRFIYNFYLAHNKELHKNGERFMSSSKFRVWLNNEYLPNHPEYSWIKEAYSKAVTQAVNNGQTAFTRFFNHESNFPNFKKKGRSDVKMYFVKNNPKDCCCERHRIKIPSLGWVRIKEKGYIPTTKDEYVIKSGHVSIKADRYYVSVLVEIPDDKMVNNSNEGIGIDLGLKDLAIISNGKTYKNINKSAKLKKLEKQLIREQRSLSRKYENLKKGESTQKTNIQKQRLKVQKLHHRIDNIRTDYINKTIAEIVKTKPSYITIEDLNVKGMMKNRHLSKAVASQKFYEFRTKLQAKCNENGIELRVVDRWYPSSKTCHCCGAVKKDLKLSDRMFKCSCGYVEDRDFNAALNLRDAITYEVA

SEQ ID NO: 43561 - protein, 427 aa, Nonomuraea sp.
MVMSGRELVKRQRGHRARLELTRDQSAILEEQASAAITLWNCLHAYWTHFPGRRPTLAQADQAIRQARTDVPFLAALPAQAAQAVLKTYRQAWENFFNPGHPAKRPTFKSKKNRPRPAVDVPQARTMRIVRLSAKWGQFTLPMVGRVRFRWTKGLPGVGKNCPAGKVTGARLVKDAFGWSIVFRTETLAEPAAPHPGEQVGIDRGITVALALSDGTMREHSPWLTGREAGHLRRLEKKSARQRAARPRKTRPSGREQRTYDQIARLRAKAKRRAVDWQHQTTTELAGTFAVIKVEKLAILNMVKSAKGTVEAPGRNVAQKAGLNRSISDQAWGRTVTLLAYKSAERGGQVVKVPAPGTSQTCHRCGHRDPASRNGTVLACVNPVCGWVGHADTNAAININNAAGPAVSGRGDLGLTRSAKRQPPRAA

SEQ ID NO: 43562 - protein, 440 aa, Streptomyces sp.
VGSELRLRQLQFGHRARLVLSPAEVRLMNDQAHAARTMWNCLHAWWTMLPKDKRTLAAADVAIRQARKEVDFFAVLPAQAAQAVLKTYFQAWKNCWEGRADKPNFKARFRSVMSVDIPQGRDLQITRVHRRWGLVNVPKVGRVRFHWTRDLPVAKKANADNRITGARLVKDALGWHIAFRITTLEAGPAPHQGPEVGIDAGVNIPLALSDGNHQNHGRPPRLRDGTSDRDKWLNAEEKGKLRRLERQAARLKQHRKPGRQSSNRLRVVYDQIGKLRAKAKRRVTDWQHQTTTFLARQYGVIVVENLDIANMTKSARGSIEEPGKSVRQKAGLNRSISQEAWGRTVTMLTYKAARYGGTVHKVPAPGTSQRCSACGFTTPGSRESQAVFVCRNPDCGLSGNADWNAARNILDLYRMGHALVPAAGRAVVRRARRVKPAAAR

SEQ ID NO: 43563 - protein, 402 aa, Escherichia sp.
MKRLQAFKFRLRPGGQQEREMRRFAGACRFVFNRALALQNENHEAGNKYIPYGKMASWLVEWKNATETQWLKDSPSQPLQQSLKDLERAYKNFFQNRAAFPRFKKRGQNDVFRYPQGVKLDQENSRIFLPKLGWMRYRNSRQVTGVVKNVTVSQSCGKWYISIQTESEVSTPVHPSASMVGLDAGVAKLATLSDGTVFEPVNSFQKNQKTLARLQRQLSRKVKFSNNWQKQKRKIQRLHSCIANIRRDYLHKVTTAVSKNHAMIVIEDLKVSNMSKSAAGTVSQPGRNVRAKSGLNRSILDQGWYEMRRQLEYKQLWRGGQVLAVPPAYTSQRCAYCGHTAKENRLSQSKFRCQVCGYTANADVNGARNILAAGHAVLACGEMVQSGRPLKQEPTEMIQATA

SEQ ID NO: 43564 - protein, 426 aa, unknown
  TnpB Polypeptide
MPSKTLTRTVAVNCFGSSLTCRILRSVEDAYRRMVEEMVEYAVRHGASQATLHKVFYARFRREHPWLPTRLIKGAYRDAARRAKSFRAAKRRGRAYTEMPEVRHATLTFSDVRDWRLEGGALKLRIGGGWVELRCSSHKQLHRYLYGGWRLAGELKLKRRGKRWVAYLTFKRDFDVDPDPRNVVAVDVNENNVTAAVFVGGVLREVWRLETGLGNMVIAYAERRKKIMEGRHPSDREVRTKLKKLRERSRKLDIARKAAKFIERLAEEHNAVVVVGRITHRAKEKMGVDKGKKFRHRIHQWSVRTLAKLLEEKPIQVVEICESGTSSRTPSGARISFRPLVIRTAVRGASGRVRPVKMRLRVGSAGNEVWERDVLGAVNIGLRYLQMGGFVASAPTGAHAARAMLMNPRLGPTPLAEISTIIARHR

SEQ ID NO: 43565 - protein, 206 aa, Nodularia sp.
VLHKAVQVRLYPSKEQEIQLAQTFGCARWWWNYTLNQSIETYRETGKGLSRVALNAFLPALKKAEETVWLADCYSQVLQATTLNLTTAYKNFFEKRAGFPKFKSKHGKQSIQYPQHVKIVDGNVKLPGNIGIVKAKIHRTIEGKIKTVTVCKTTSGKYFASILTEVEGENPTITFGKIQDLRKIMEKRTTKDTKDTKLRRFQRVLA

SEQ ID NO: 43566 - protein, 373 aa, Acholeplasma sp.
MHIAYKFRIYPNPEQQILITKTLGACRFIWNQMLSDKIAHYESTKEMLYNTPARYKEAFSFLNEVDSLALANRQLHLERAFKSFFSKQTSFPNFQARKKDYGYTTNIVNGNIKVLDGFIKLPKLGLVKLKKHRHIPEDYKLRSVTVSKSKTGKYYISILLDYETVISPCEVKTTIGLDFDMTNFYVDSEGNRYAYPESILLDQQKLRRLQSSLSRRYQPNKKQKDQSKNYFKQQHKVAILHERITNKRLDFLHKLSDSIAKTSDSVSIETLDLKQMATSNKHYAKQISRFGWYKFITLLEYKLNRLGKTLVKIDKWYPSSKMCSRCGHLKTELKLSERIYSCEHCRQNMDRDYNAAVNIRNKGLELLKVENLA

SEQ ID NO: 43567 - protein, 376 aa, unknown
  TnpB Polypeptide
MREVSYKFRLYPTPAQSLLLNKHLELCRWVYNTTIACRKTLWTQERISLSRFGTHNLLPDWKKYKPELNEVYSQVLQEAQKRVDVAYREFFRRIAAGEHPGYPRFRGFGRYNSITYPQYGHCGSVLLRDNGLRLSKIGLVKINIHREIPDSATIKTVTIKKEADRWYATFSTERSSDTKKHKCGKGIVGIDLGCKTFLVLSDKKKVGNPKFISKALKRIAKANRKLSRQPRGTPERAKARKVLSKIYQKINNRRNDFLHKESRKLVGKYETLVFEDLHIKDMVREKPWHNLNRTILDSSWGQFVRFCSYKAEYAGGKVIKVNPKNTSKMCSKCGTIVDKDLSCRIHSCPHCGLTIDRDLNAALNILRLGQQSLAKA

SEQ ID NO: 43568 - protein, 414 aa, Streptomyces sp.
MIVKLVVQVRLLPTPVQAVALEETLHACNEAATWVSGVAFEKNVKRNFALREFAYGEVKARWGLGAQAAQHVIKKTCDAYTTLKANLTAGNLGKPGSKRYRKATGKPVAFRLDSAQPYDDRMLSWRIAERRISVWTVSGRVKDVVFTASPEQLATLALYRRGESDLVRRDGMWFLNATCEVPEEPVNTDPVDFLGIDLGIVNIATTSDSEIMAGRELNRVRARERGLRKKLQKKNTPSAKRRLKKRRRKEGRRAKDINHKIAKHVVAEAARTGRGIALEDLTGIRERVRLRKPQRATHSSWSFAQLGQFIAYKARKAGVPVVHVDPAYTSRTCAECGHIDRANRVSQAWFACRSCGFVDHADRNGSRNIRARAWQLWRRGAQSTAPAPPPRQRAGAGRRRSTAASGARRASPSL

SEQ ID NO: 43569 - protein, 399 aa, unknown
  TnpB Polypeptide
MQMVEQHIITQTDSRFAVIDAAAFAAKNLYNAANYRVRQSFIHGGVYLNYHAIHRIMKHTEPYQALPRKVSQQVLMLLDRSWKSFFAAIAAYRANPSTCTGKPGLPRYLDKTKGRYALVYTVQALSRPARAQQVIKPSGLEIAVTTKQTRIAQVRIVPRSGFYVVEVIYERDVEPATVDPTLVAGIDVGLNNLAAITSNKPGFVPVLVNGRPLKHINQFYNKQKAQLQSKLGRTGSTRLMERITNRRTRQITHYLHTHSRRIIDVLVREGIGTLVIGKNDGWKQQIAIGRRNNQNFVQVPHARFIAMLQYKAALVGIEVRTINESHTSKCSFLDTEPIGHCACYVGKRVTRGMFRTADGRRINADVNGAYNIIRKAIPNAFGNGIGGVVVHPVGIAPTN

SEQ ID NO: 43570 - protein, 387 aa, Balnearium sp.
MLYVYRFRLYPKEGQIEFLNRQIGHCRFVYNKLLEIAKKDYEVEGKKWNYYEYKKLLPKLKEEFSFLKEANSQSLQEAVRWLDRAFKNFFKGLAKFPKFKSKKRTNSISIPQHFRIEGNKVKIPKLKKPIRFIKHREIKGKIKSITITKTPTGKFYLNILVDREIEPLPKENKIVAIDVGLTHFCTISNGEKIEKPKHLIESEKRLKKLQRHLSRKEVGSKRFLRLKKRIAKLHEKIKNQRDDFLHKLSRKIIGDNQAVIVEDLNIKGMIKNSRLAKHIADASWRRFIQYLEYKAKLYGRELIKVDTFFPSSKLCSKCGYKNDGLKLSDREWTCPLCKTKHDRDINAALNLLKEGLTRLKRVVGVDRPELMPVEGAMAPCEAGSPSL

SEQ ID NO: 43571 - protein, 395 aa, unknown
  TnpB Polypeptide
MLLKMYRKTYKFRLYPTKSQETKLIFTLNTCRHLYNNSLEERIHNAKINKIYREFQVFPWGKQKWVSIYDQQKTLARNKTEYQKQAYAQILIDVLRRLDKTYKSFYRGNGYPRFQGKNRYDSFTYPQHGFKIEGNKLKLSKIGLIKIKQHREIEGKIKTCTIKRGVDHWYVSFSVEIDKEIEHTKGDCEIGIDVGLKELLTLSNGQKISPQKFYRKSENKIRTANKSLHRKKKGSNNRNKQRVKAGRAHRKIRNQRKDFNHKTSRILVNTYDKIAFEKLQIQNMVKNKHLSKSINDVGWYQLIEMTKCKAEWAGKVVVLVNPHNTTQLCSRCGEYVKKSLSVRVHKCPNCGLVLDRDHNAAINILNKVGRDTPELTSVEMINRSSLKQKTITSYI

SEQ ID NO: 43572 - protein, 457 aa, Sutterellaceae sp.
MAGTSSSSKDEPAAVFIVGFRTKLIVTAPQAQYFARACGTARFAFNWALEKWIEQYRQHKQAPALVPPPNEAALRRELNRIKGTQFPWMYEVTKCAVQNAIRNLGTAFKNFFSNPKHFKYPKFKKKFVDDSFTISNDQFKLDEELSRIHIPRLGWVRMCERLRFKGARLLSATISRRADDWYVSISCEIKDLSHLSPAKNHGRVGVDLGISKLATLSDGHVFEAPKPLKSKLGKLRKLQKRLSRASKGSQNRLKLRLRVARLHRSIADIRADALHKLTHFLSANYSTVVIEDLNVKGMMSNRHLSRAIADIGFHEFRRQLAYKMALRGGELIVADRFFPSSRLCRHCEKRNADLELSDRQWQCPHCGCRIEDRDLNAALNLYHYPEMKWDRPRTPVQGRSSESTADQAPPAVADHNGELDDHTAGVSLLCAEEEPVSGRGSTEAARIPKNGEEDSIH

SEQ ID NO: 43573 - protein, 419 aa, unknown
  TnpB Polypeptide
VSITYFDKLVYLRSMRRKPTLKAYKYRIYPTEAQAVFFAKTFGCCRFVWNRMLDEKLLAYKKKERIPRVIPAKYKEEFPFLKEADGLALCNVQLQLEKAFRDHFKNRKHFKLPKFKKKRDKQSYTTNNTYDSIRVDFEKRLLYLPKVREGIKIELHRKFDGKIKSITVSKTNDGKYYASILVETQNPKNKVVEPKSKACGIDLGLEHFVTVTNDFGSHKVEHPKYLLKAEERLTRLQRSLSRKQKGSKNSEKARLRLARQHAYIASARNDFLHKLSKAIIDENQVVVVEDINVKGLLKSRLAKSISDSGWSKFVSYLKYKAEWYGRTFVQVDRFFPSSKLCHRCGYKKEDLALHERIWTCPACCETHDRDVNASINLYLVGLGRPEVKPVEHALVDDRSPNGLPKKPSCAETGNSTEKC

SEQ ID NO: 43574 - protein, 408 aa, Nocardiopsis sp.
MWATLNWCGCGLSLVGCTMVSVSKIVVRLKLAPSPEQAVVLTSTLRDLNTHATWVARVAHEQGVFRNYDLRKHTYQQLREAGVGSQAAQHTIKKVCDAYRTRRANLNNGNYGPKGSARHTRIESIPITFRPTSAHPYDQRNLSLALEARTISLWTFQGRLKGVPFTGSPDQLKALAEHKRGKADLLCRDGVWFLAVTVEVPDAPEIEPEGFVGVDLGIANIATTSDGQVMAGRKLNRYRRRQLRLRQKLQAKGTRSAKRLLKKRRRKEARHAKDTNHRISKRIVAVAERTGRGISLEDLRGIRGRVRQRRPQRVTLHSWSFAQLGAFIVYKARRAGVPVVFVDPAHTSQTCADCNHVDRRNRVDQATFICRSCCVVAHADRNASRNIARRGAVVWDAGRRSHVPPDHP

SEQ ID NO: 43575 - protein, 590 aa, Mycobacterium sp.
  misc_feature (27)..(113): Xaa can be any naturally occurring amino acid
  misc_feature (340)..(449): Xaa can be any naturally occurring amino acid
MIVRMRSCAQAAKVAEATGGVQLAGKXXXXXXXXXXXXXXXXXXXXXXXXXXXXXXXXXXXXXXXXXXXXXXXXXXXXXXXXXXXXXXXXXXXXXXXXXXXXXXXXXXXXXXXGLVRSHFGARRKAFNWGLAQVKADLDAKAADPAHESVDWDLKSLRWAWNRAKDDVAPWWAENSKECYSSGLADLAQGLANWKAGKNGTRKGRRVGFPRFKSGRRDPGRVRFTTGTMRIEDDRRTITVPVIGPLRAKENTRRVQRHLVSGRAQILNMTLSQRWGRLFVAVCYALRTPTTRSPLTQPTVRAGMDLGVRTLATVATLDTATGEQTIIEYPNPAPLKATLXXXXXXXXXXXXXXXXXXXXXXXXXXXXXXXXXXXXXXXXXXXXXXXXXXXXXXXXXXXXXXXXXXXXXXXXXXXXXXXXXXXXXXXXXXXXXXXXXXXXXXXXXXXXXXAMGLVAPQLAYKTAKCSGVLTVADRWFASSQIHHGCTSPDGTPCRLQGKGRIDKHLLCPVTGEVVDRDRNAALNLRDWPDNASRGPVGTTAPSAPGPTTTVGTGHGADTGSSGAGGASVRPRPRRAGRGEAKTQTPQGDAA

SEQ ID NO: 43576 - protein, 411 aa, Methanobrevibacter sp.
MNTIKKNLEIRIYPAIAEKNDKGEKLANISKIESNIGIYRFIYNKELEFINYFRNLLLQYGYEDHVIVNDTSCSIILNMLRQEYPFLEKAESSSRQQSQRNLILAFKRYDDSSLKSNYPVLKTKKNQKDTFRIMNNNDNLRIQKDKYGYDKIKLPKLGLVKFKTSKEYRELLRKGSNPDDPTVEIKHITIKKVNNEYYAVFNITELYIPQEIIGPRQQIGIDIGCSKLASLSNGQEIPNLDLTTEANKIIQYQQKMSHTQPGSIRHNEAQRLYNLWMKKLVNKRNDYYNKVTAYIVKNSSFIAVQNENIIAWKHNKYLSRKLQLNAPRIFMDKLEYKCLWNDVEFIKVPRNFPSTQICSECGERNDNMSGLRNLGIRDWECPHCKTHHNRDINAAKNILNKGLEIVGTTVQ

SEQ ID NO: 43577 - protein, 351 aa, Azotobacter sp.
MKQTKTLQVRVRDKHAPLLRQMARSVNFVWNYLNELSQRSIRERGVFLSAYDMDRYTKGAGKELALHSQTLQEVSREYVTRRVQFKRNRLAWRKSGGARRSLGWTPFKAGAASWKNGQVYHNGHYFKVWDSYGLSQYPFRSGSFSEDGRGRWYFNVVVEVDVAVPLGQDAIGIDLGLKDVATCSDGTRLENSRFYGGMEDKLATAQRAHRNSRVRAIHAKIANRRKDALHKFSRSLVNRHGTIIVGDVSSAKLAQTRMAKSVLDAGWGQLKTMLAYKCAHAGIVFKEVGEAYTTRTCSSCGSLSGPQGVNGLRIREWTCSACDVTHDRDVNAARNILAAGHGRPGVGIHGL

SEQ ID NO: 43578 - protein, 164 aa, unknown
  TnpB Polypeptide
MELSHKIAAEITKYAVEYQADVIVFEYLEMQGKISGKKKQKLHLWRKRDIQKQCEHQVHRNRIRVSRVSARHTSRLACDGSGAVVRNPENYSLCTFRTGKQYNCDLSASYNIGARYFIREFLKPLPETERSSLEAKVPVVKRRTSCVYADLRKLDAEVNNLKAG

SEQ ID NO: 43579 - protein, 408 aa, unknown
  TnpB Polypeptide
VAETLGRRIVFAAHLIRLVPNNVQASYLARAAGTARFAYNWALAEWTKQYEACKLDPSLPKPSEAALRRKLNAIKRNTFPWMLEVTKNAPQIAIMQLGRAFENFFAKRANYPVFRKKGRDDRFSLSNDQFSVEQRRIRIPKLGWVRMREALRFTGRIISATISRVADQWYASITVEAESPPLPPSENQDAVGVDLGIKTLATLSTGEKFLGPKAMNTLLKRLSRLSRALARKVIGSRNRTEARLKLARLHAKIANVRRNSLHQLSTSITRRFYTIGIEDLYVKGMLANGRLARAIADMGFRELRRQLEYKAAWRGGQLVLADRWFPSSKLCSCCGHRLETLDLFTRTWSCSICGTSHDRDVNAAINLKNMAVSFTASACRGEGAGLARKREAKPAPAKQESSSRISHG

SEQ ID NO: 43580 - protein, 538 aa, Catellatospora sp.
MADLRSIAGPFVVPGPSGVAIRTRLKNLTDQDELVLRVVGAHLGSLAAGDLKQRCADGRGHDSRRWAERKRDLTGLSSSRWAGSITKASHDQWALARRGLAAHVQGLQAGIDMLAHRLSQPVGQKGTKRVPGGCRSRQEWHAKARRLACLTARHAAALAEYDGGRVRVVRGGRRLLNARHHLAEAGLTEPQWRQRWQAARWFLSADGESGKRFGNETIRVTDDGQLSMKLPAPMAHLANAPHGRYLFACRVSFAHRGQEWADRIAADRAVAYRISFDAQRVRWYLAASWQHPSVPTIGLAAALVAGCVGVDANDDHLAAWHLDTHGNPVGAPRRFFYDLSGSANHRDAQVRHALSRLLHWAKTCGVKAIAIEDLDFAAEKTREKHGRRKRFRRLISRFPTGRLRARLTSMADQTGITIVAVDPAYTSKWGAEHWHKPMDSPTKKITRHDAASIVIARRAQGHKARRRTSPPPPDQRDRVGHRSLQAGPDVPGCEGPRRRIPGPRTRCASPDCDPNAGDQCAQHRSGHTTAHAQLMHSS

SEQ ID NO: 43581 - protein, 389 aa, Paenibacillus sp.
VIRCVKTAFHTSKWDLERLYTCNRISAEVWNQCLLIAKHHALQDDGKWIGKTELQAALKNQFPLHSQSVQAVCHKYLFARDSAKQARKQGLRTKYPYKKKKHFNTKWVDQAFKIKANTIYLSLGIQNGKRQQPIKITVPRLPNPDIKEIELVFDRKLVISMSYDDGQAAAENQGSQTAAIDLGEIHSITATTTENKSIIITGRKVRSIHRLRNKKLAEIQKLMSKCQKGSRQWKKYNRAKKYILSKSERQLNDAIHKTTKQFVEWCRENEVKAAVVGKVEGVQRNTKKKKRKTVTQKLSNWSFGKIQKQLAYKLEAQGASMKMIDESYTSQQCPCCGRRKKISSRNYNCSCGYTEHRDVHGSKGILSKYLHGDIRYLGETKEIKYLRIA

SEQ ID NO: 43582 - protein, 370 aa, Paenibacillus sp.
MILTKKVRIRPALEQEQQLWRSVGTARWVYNWTLSRQEENHKHGGKFLSDGDLRKELTQLKHTEEYAWLCNVSNNVAKQAVKDACDAYKKMFKGLAKKPKFKSRKKSRPSFYNDTAKLKVKDQVVLLEKVGWMKTVEQLPIGVSYSNPRVTFDGKYWYLSVGINQEQVQQKLTDEVVGIDVGVKELAVCSNGMVFKNINKSAAVRKTEKRLRRLQRKVSRKYEMNKEGSRFVKTSNIVKVEKSIRLLHRRLTNIRTNHIHQATSAVAKTKPRAVVMETLNVSGMMKNRHLSQAIANQKLNEFIRQMKYKCEKRGATFMQADRWFPSSKCCSGCGQVKTHLKLSDRIYECDCGLKIDRDLNAAINLAQLAV

SEQ ID NO: 43583 - protein, 417 aa, Candidate division WPS-2 bacterium
MKYRLVVRLYPSPRQAAACEHILTVTRRLWNALLAQRRDARKTRRLNISSKRQYHELTELRAVDPWFASAYRECEDAVLHRLDLAYQKLFSGGGHPRFKPETRWNQFEFPHGNRALRWEGEQDRIAIPGVGLVRVRKKCKRVIPPHGRAMVFRRCGRWYALFECEVAPKRLPATGKVVGIDRGIRALAATSDGELIANPRHGAALALKAARAQRTLERRTVRDAGGRVRNGAGKNRSRAAMALQKIWDKLRRARRGYLHEVARVLVNRYDAIAFENLSLNGMTRSAKGTGEAPGRNVRAKTRLNFAMLDASLAMLRTLVVEKAESAARLVIDVPAAYSSQTCSKCGFVAAEARSGERYECVNADCEYVGDADVNAARVIAQRAFGRPAGRGAGLPDPNDLRSELSPGETRFRQQDVA

SEQ ID NO: 43584 - protein, 320 aa, Candidate division WPS-2 bacterium
MILAHRIRLVPTCEQETYFLRACGVARFAYNWALAEWKQQYKAGGKPSEVALRKALNAVKAEQFPWMSEVTKNAPQQAIKNLGRAYTNLFEDLKKYRRKEIRWKRVRVPTFKKKGQHYSFRADNGPDKKHPDAVQTDGARIRLPVIGWAKMREEVRFAGRLLSVTISRHADAWFASFSIEVPYEVPIRTDATIVGVDLGITALATFSDDTPKTFAPKPLRRYLRKLKRASRALSRKVRGSRNRVKAKTKLARLHWRIADIRADALHKLTSSLTRYRTIVIEDLNVTRMLANRCLSRAIADVGFCEFGGSWTTKQQWLDRP

SEQ ID NO: 43585 - protein, 430 aa, Halorubrum sp.
MAWEVTRTVRVRLDVPDDRKSDLHATNDKFQYCANRTADWAWRYPDEDCVTSKSEAEAAIYDELRHETDGLHANLVQKAIKRATDDIGNCVDRLAKGENTSKPEYDTFSIVYDKRAATYYRDRVSLATVNGRVECEYDLPDDPDGTPHGEYLLNDDYSFSTSTVHYDSEADEFYLHAAMEREIDASSPEKAEDSRVLGVDCNVDDHIAVTSTGRFVGNADYLNHKRRGFEKRRASLQQTDTRSAHLTYQRIGDRFGRWSEDYLHRCSKEIVAEAQRHDCTHIAFEDLEQIRERISDGKKFQQWAFRALQEQVAYKADECGIVVETVDPSYTSQQCSKCGCTLEENRDGQRFACLNCSYSVNADYNAAKNIARKLALRLQRGQKSPAGGAFCQYALKSGIMTVNATEVASDAYVSAERESTGKPTASAVGS

SEQ ID NO: 43586 - protein, 373 aa, Methanothrix sp.
MLKSYRYRLLPTKSQVRILERQLELCRWVYNDTLAYRKNAWEMEQKPVKRFETQDRLPQLKLEIPELKEVYSHVLQDVTLRVELAFKAFFRRTKSGEEPGYPRFKGKGRYDSITYPQLGFGMVNGKLHLAKIGDIKIKLHRAIEGKIKTCTIRRMPTGKWFACFSVETEDISLPPWKDGSIVGIDVGLESFATLSNGEKIANPRFFRKEEKALAQAQSKRDKLPKGSILRKRATMVVERIHERIANRRNDFANQLSRQLVNRFGVIAFEDLDILNMLKNHCLAKSISDVAWNMLVKSTESKAAYAGSRVVLVDPRQTSQMCSRCGLIVKKDLSERVHSCAECGLSMDRDLNAAINILRLGMQSLRKGDRSPTF

SEQ ID NO: 43587 - protein, 534 aa, Rhodococcus sp.
MTATAALADPTADIAAPDPSRVVIRAFVYVLDPTPGQVEALRSNCGAQRFAYNWALSQVKSNLDQRTAERSYGVPDAGLTPSMSWSAYSLRKHWNTVKDDVAVNPETGQVWWSANSKEAYSSGIANCANALSNWSAARSGKRAGTMRFPRFKSKRAASSCRFTTGCIGLVTTDGDRRHVQLPRIGVVRTAESTRKLARKTIAGTARIRSATVSFRRGRWQVSFSVETLLPARALPPTTTGPRSVVGVDVGVKHLAVLSTGELIENPKHARKQAKKLRRLQRRGARRTGPDRRTRQQPSNRWLRTQDQIQRIHARVANSRRDHLHKLTTQLVRVYDTVVVEDLNVSGMSRSGGAYKRGLNRAIGDAALAEIRRQLTYKTDWTGTGLHVADRWYPSSKTCSNCQAVKTKLPLNVRVFVCDHCGYRGDRDHNAALNLAALAVSVEDGTSPASCGRDVKAARQKPTIRPATSGQTVSLREHHTPVVNVAGATRPLMPSTQKNTQRERQMVSPPPSPRPVVPVSRTTPNLPTCVGKNTT

SEQ ID NO: 43588 - protein, 273 aa, unknown
  TnpB Polypeptide
MLTIPGQVVKVNQDEHELYIPCLKLRLNIGHLPDFDRINQVEIGNEYAHVTVTINEPPVKHVERWMGVDLNTTGHIAVVGIPSTGKVHKFGKEAPHIRRKYSKMRRRLYIHGHPRVAKKKIRRRENNKVKNLNHKISRAIVDEASRQGCGIKMEKLSVTKETSRFSKSLRGSLHSWSFFELQQFIEYKAKLLGIPVTYVDPRYSSQQCSSCGRLGTRSGKDFSCPHCGHVDHADANASFNIALRPSLEESDGRLHQDRDWCKGRIDTPQEAPS

SEQ ID NO: 43589 - protein, 464 aa, Streptomyces sp.
  misc_feature (464)..(464): Xaa can be any naturally occurring amino acid
VPAPTAVTIRDRLKGLSSQDEQALRQVGDHLGALASRDLKARCTAGSAFDNDAWAERKRVLTAESSSRWAGAITKATNDQWALARRGQLAHVRALEAEVRSVARRLALPLRAAGDKRAAGGYRSRREWFAKSRRLRVLEDRLRSARADWRAGVVHVVRGGRRLLHSRQHLAAAGLTEQRWRERWEAGRRFLQADGETGKRFGNETVRVTPDGEVSIRLPAPLAHLANAPHGRYVLAGRVTFPHRGGQWRERVSVNRAVAYRVHEDMDRGRWYLTASWKLPSVRTAPLAAARANGLVGVDTNADHFAAWRLDAHGNPVGRPFRFGYDLTGTAEHRDAQVRHALTRLLHWAKRHDVAIAIEDLDFTAEKTREKHGGRTRFRALISGMPVAQVRSRLAAMAAEKGIAVIAVDAAYTSRWGAQHWQKPLTGKRGRPTRHDAASIAIGRRALGFAIRRRAAPPRDDRSX

SEQ ID NO: 43590 - protein, 473 aa, Succinivibrio sp.
MPFVRHKIEIKANNKFRSYCRLAFGISRFAYNYGVECFTRDYEKYLEDIKHYFELLNQYKKNKAKGIQDLLPVKPKLPSALDYKKEFNKIRREKFPFTYKVTKYASQQPFIYLGRAIDVFFESSRSGKRQKAQEARKGRVFKKVFFPKFKKKSSNSGSFYIGGDLVKLCIGRSCSKKVTNDSKKQYLFIPKFGYVQLREHLRFNGHINSVTISQRGDKFFASFSVTVSDDEYKRTHKTVDHTNTAVGIDVGLKSALTLSSGVSIQSPKPLQINFRREQRLSRQLSKKQHPRTKGDATKTSNNFKKCSKRLNKLYYRIGCIREDWAHKVTTLLTNHYEYIAVETLNVQGLMKNHNLSRAISDIGFYNVKDKLKYKSAYKNRTLLEAGSFYPSSKTCSVCGHIKDKLSLSERIFTCEKCGNTIDRDLNAAINLRDHCLNKIGRAIPEFTPVELTALQESFIRNNLATSSIESGIR

SEQ ID NO: 43591 - protein, 464 aa, Streptomyces sp.
MSRFRMYPTGPQEQQMLLHRAHARYVWNLAVEQHAHWQPGRRAAPGFAEQCRQLTEARRENAWLAAGNADVQQQALKDFTKAKAARFTSGFGKPTWRRKHVHEGFRVIGTDRVPESEADGTPRLNARGRQVMGRSVVVQKLNRRWARAKVPGCGWVRFRLTHTELPTAKTFRVTFRNNQWHIAFAVIPEPIGAPGTGEVIGIDRGIKITVALSDSRKLNCPQLTTRERAQIRKHQRRAARAPKGSESKAAEYAEVARLKAREADRRKDWCEKTSTMLARSYDLIRFEKLSITTMTRSAKGTTEQPGTNVRQKAGLNRAILSQGWGLLRRRTGEKAPGRVEDVPAPFTSLRCSACGWIEKDSRKSQAEFVCVSCGFACNADENAAVNVAAGQGGIPRPRHTAGAGGVTAATGRSSARGPQPTWVEIPLLQKGEDVKASRSGRGRSSPTVSRKPTGPPQCAGQAQQ

SEQ ID NO: 43592 - protein, 412 aa, Exiguobacterium sp.
MKVGDESPALLQGIFPSKEVRTMLKHRAYKFRLYPTKEQEILIAKTIGCSRFVFNHFLAKWDESYQTTGKGLSYGACAKELPMLKQEFDWLKEVDSTSVQASVKHLADAFDRFFKKQNERPRFKSKRNPVQSYKTNIQGKSQLPEVSIVGNRLKLPKLKWVRFAQSRQVEGRILNATIRRNAAGKYFVSLLAEQEIDEMPKTGSSVGVDVGLKHFAVLSDGTVYKNDRYFRTLEKKLAREQRKLSRRQRIALDRKVKLSEGRNYQKQKHKVARIHEKIANKRNDLLHKVSTEIVKNHDVIGIETLQVKDMQQDRQLSKAISDVGWSAFHRMLEYKADWYGKAVVKVGKTFASSQLCSSCGHQHKDVKRLALREWTCPSCGIHHDRDVNAGLNLKREAERLLASSTVGTTGLA

SEQ ID NO: 43593 - protein, 487 aa, unknown
  TnpB Polypeptide
MKKKKKNSIYVPNEELDISNWIPNWGKEMINSQTHSWFDFTEFKNPNHTQPEKYPVLAPIIPEDSYKQQLNTIRRRKLLKEPVFISCKKIRIYPDTEQQIILQSWFNSFAHMFNITIHYLRSQIKKNNIDFKLCSKIVNFQHIRSVLYPDKLEIYNNMTHDKIPIHILDEAIAQAVSNYKTCLSNLKSGLIKKFRIREWSKNRRRKIIKIEPNYFRNDTFCPSVFPYMSASESLNGIDKTVTLQYDSDSGKYILLVPVETPPKYILKEKSSCGIDLGIRSFITGYSDEGVITMCNDSKNSKQLQNYHRKIDKINELLQLEDKVQIITPIQKENRELIVHTKVKILKRNKLLKGLRKYNKKIRNMITDMHYKVSQELTNKYDEIYIGKLSTKNILSRNNKSLSKENKRMIGVLSPYMFRQRLKYMGHKYGCEVTEVNEYKTTKTCSNCGREKEMGKLKIYECRCGMIADRDENAAKNILKVGKEDSRK

SEQ ID NO: 43594 - protein, 428 aa, Crocosphaera sp.
MLTMNMTFRIYPSADQEAMMLDWLETCRRLYNRCLRDLKTWLNGKKCPIDRCSLKQEYIVPADLPFPSYLEQKRQLTQWKKENPWFKAVHSQVTQDVVKRMHNTWEAFKKRGFGFPRFKKYGQFRSFLFPQFKNPPLQLPSQEGSWRGGYQIKLPKIGSVLIELHRPIPEGFVIKQVRVLSRARGTKWYVVITVQSNVEVPNPLPKGRGLAIDIGLENFLTTSDNFTIKPARFFRELQSRLKELQRKASRKKKGSKNWEKEQIGVAKLHHKIANYRKNFHFQVAHQLCDQGDMIFVEDIDFGVSAKGFLGKSMLDGGFGQFRTILKWVCWKRDKFFAQVDHKYSSQICPNCGTHTGKKPLSQRQYICPECNYQTTRDHAAAEVLLQRGLGSVQFVRMDDAERKLPSNGDLSGSVWDWLDKCRSRNTQE

SEQ ID NO: 43595 - protein, 413 aa, unknown
  TnpB Polypeptide
MEYSHRYHAYPTQEVAAELEYHLDVHRQLYNHVRWDYENNPEDDKPSEYDQNNKLPEWKRKWPVFGELHSKAAQATVARFHRNLSNLRKKKEKGYNVGRLKRKTPTEYRSVTYNQSGFDLDEKRGHDKYAYVRFSKIGWVKIRYHRSIPDPATIKEVTFKKETTGEWFVSFGLETDDANLPEKSDVNSLDASNSVGIDLGILNYIHTSDGKTVDWLDLKDEYERLRREQRKLSRKEKGSNNYEKRRVKVAKLKRHIRRKVLDYQHKITTWLVREYDAVFVEDLNVKGMLEQSHNARNKQDAAWRQFITLLEYKADLHGCHVKQVEARGTTKECARCGVETAKPIWVREHSCPSCGFETDRDANAAMNVLQRGFSKLGLGWPEETPVETVTATDTAGFQRVSASHVVETGSLGA

SEQ ID NO: 43596 - protein, 237 aa, unknown
  TnpB Polypeptide
LDESEDRERIEKRHRALSRKQHGSANWEKARVKLAEAYERLSNKRTDFIEKLARSYTTQYDAVFLEKLDVRGMLEQDSNGRNIASMAWSDAIKTFERHGDKNGCHVETVPPEGTTKRCARCDVESDKELWVREHSCPSCGFEADRDENASYNVLKLGLEELGIEFDVDAVVGLGEAESTSAESHSDSDGLGKSPRDFRTPAETALPTGADANDNSSFRLVPAQRVVETGSHGSPDPW

SEQ ID NO: 43597 - protein, 597 aa, unknown
  TnpB Polypeptide
MASTHLSLPIHLQFEERERHVRLDTLTANVANALIEKYWTPEHLAGIDDYSYQAWKYFDASEAFADVELYLPSRYKRCVMQKVGETLRSHADKRKAFQSIHSVLSNRKIRSIETRRIKEQLWNAEEYIKSGYVDLLIGQLNSYYDRHGRFPESYFDMQKCPTYSKGVLPYSADDGPTSGQSVKYDYDEDTETLTVKLKTPDILEPGSRGDWTWTKHELEGYKAFHELLDHGSLSAPSFHPTQTKTGEDYYELSFPVEVEHAEKPDDVETVLAIDGGLRKDATAVVVNDDGEQLSVPYFIQNTERERMRNLARERNHLNAKLAYLRREGRDHTDSFKHVQAEYERVNNKIRHKREQLVHDVSNQVLALGLVYDVDAIVHEDLRSLSPPRGEGQLSWELSSWARREIISKIEYRADITGLHVERVHPGNTSRECPRCGSTGHTTKSPEHSFEVWWGGHFRCDNTRCGFQADRDYVGAVNVARVFFSSSATLNHDFTSSYIGDVEIVPASRSAGEQRTALRSSSDRDSDAGPRLTFGNAPVAYLGQSEQEVTAGGGSCFIAPAVTPTETKNNSSNPDSASSPAMLGVTRLTRVTTNCYRK

SEQ ID NO: 43598 - protein, 387 aa, unknown
  TnpB Polypeptide
MLLGFKTRLKLNNKQATMLSKHAGVTRHAWNWGLSATKFILDHNKENPDSKFKFPSAIDLHKLLVKLVKPENPWYYEVSKSAPQFALRDLRTAWDRCFKKTSAPPKFKKKGKHDSFTLDGTIKIKGQNKIQVPIIGTVRTFEDLPQVPVKNVTISRQADYWFISFKVEIETKLNNVADNPVGVDLGLLRFATLSDGQEFDSPRPFRAMRKKLAKLQWRNRLKEIGSKNWRKAQIKIARLHADIANIRKDFIHKVTTQLAKNHGTIVIEDLNVSGMMANGKLSKAIADSGFYEFRRQLEYKTKLYGCELVLANRWFPSSKTCSNCGHKKQALSLSERTYNCECGFVCDRDVNAAINLVRLVKSDFKPVDKKEPTPLVESGNKQQTRFA

SEQ ID NO: 43599 - protein, 401 aa, Planktothrix sp.
MIWGMEQILTLVCKLQPTPEQVAQIEATLQAFAAACNYANEVVKPQITSKTAIQSTVYQELRSQFGLSANLAVRACARVGANRKTAKLKDKPVKAFKPTSADYDARIFAFREKDWSVSLTLMDGRHHIKLSIGQYQIGKLKGKKPTSAQLCKHRDGNYYIHVQVKDAPPDPIKSERVIGIDFGRTDIAVTSEGQKWSGKDVTAVRDRYARTRASLQSKATKGTRSTRRRCRQILQRLSGKERRFQAHQNHVISKTIIQQALQLNAIVAIEDLTGIRERTNQLPRTKTERRRSNNWAFYMLRQFLEYKGIGAGVEVIAINPRYTSQTCHRCLHIHPVRGESYRSGKIFKCGHCGWHGDADLNGAKLIELVGSSVNRPEGNKLFCSLRAIESPRYIGTPISGG

SEQ ID NO: 43600 - protein, 402 aa, Planktothrix sp.
MLDVLKVRIYPNTEQEIALAKSFGCSRFVWNYYLNKTNNQYQETGKGMSYCDMAKDLTQLKKLPDYEWLQEVTAATLQQTLKNLESALKNFFAKRARFPKFKSKHNKQSIRYPESCSIKKGGLKLPKLGIVKASISRSINGKIKSVTVSKTSTDKYFAAILFETDDLITNKQGKISGIDLGLNSLVTVFDGESCYKVEPIKPSRRYAKRLQGRQQALSRKTKGSNNRKKQLIRVARVHEKIANTRQDFLHKLSRKLVDENQVIVAENLCVKGLARTKLAKSIHDAGLGMLLNFLGYKLDREGGKLIEIDRFFPSTKLCNCCKVKNNSLNLSIREWVCPSCQTQHDRDENAAKNIREEGLRILSTNTVGHTEIQACGEEVRLVNTRVKKHSSVKQESPVIAPA

SEQ ID NO: 43601 - protein, 474 aa, Methylococcaceae sp.
MQNGFRFRLYPTPEQASILLRWIGCQRFYNAKVSEDRYFRTFARKSLQHAGQLPPQDQQYSHFITEATPWLREVPSQVLRNGAVRWKQAYSRYWKKLGGRPALQTRHGTQGVWLTRELFRFEPAVEPETGEIAYRLHVGTRKHPVGMLRYTAHRAHAIPASITVSIDAGRWYLSFTNDDSVPEPSDAETAEWLASFSEDELKARTVGVDRGVTIPFMCSKGASFNLSEIQRCRIARKQAAARRWQRRLSRRVKGGANRRKAAQRIARLRRYEQDVRRDFAHQTSHRLVGDPKALLIVFEALGVQRMTRKPKVKQDEQGRWLRNGARAKAGLNHAILGSAWGATKTYTAYKARRAGKLVVEVAPHHTSQECARCGHTHPDNRRSQAEFVCQCCGHVDNADHNAGQNIARRGVRLILSGEYRQKAAKRVMRMRQKQLGAGRSEATLGEIAVSRGAGNGTALGSKNQETPASTAASG

SEQ ID NO: 43602 - protein, 392 aa, unknown
  TnpB Polypeptide
MMLIRSETVKLLTDFNFMPTFQAYTEAYNHTCKVGWTEKEFNGVRLHHLVYPTLRQTLPAQLCTSARMKATESLHGARTSIKNGKKTSCPKSTLCSIRLDSQSHSVWFDKNEVSILTTQGRVKGIKFQSYPYFDQFRTWKRKSADLTYRKGQVFLTFVFEKLIPDAEYQSNTFVGIDRGIRRIAVTSDKQFFGGGRIKHVCHRYQRLRSELQSCGTRSAKRHLRRVAQKENRFRKDVNHCVSKQIVQGLPVGSTIVIEQLKYIRERCRQRQEQRGEFHNWSFYQLEQFLTYKAEAKGCRVVYVDPRYTSQKCSCCGHTSKSNRKDQTRFKCIHCGYTLNADLNASFNIRNNYLDATCHPSRASVNRPVVSSRDLPVEAGDLVTSHGPCARGS

SEQ ID NO: 43603 - protein, 517 aa, unknown
  TnpB Polypeptide
MHTLRLKLEMDKNTAYIMEKRFRILAHISNQIRKHVKKLLSRLENDEQYQQALDEYIRLKKLESDDKQVVADMKRLSKFMNETRESIGLTKNGLEKYASVMQRRYKKNISSHQVQAEVAHIVKGVDAVLFGNGKDVHYKKESDFRTIPGKDMSGLKIYFNQNDEKHQVDCYIKWKNLTVPVRYDISKADMLDDKNYINESLSCGKIKYCEIVRLWFKNGWHYYVNLVMTENAPKKLTPGKSIIGIDEGPSTIAATSETSVFLEELSPECKKYNKQIALLQRKIDKSTRNMNPDRYNDDGTTKKKSKDLPAWKFSETCLRNKAKVKELYRKKTEYTKYRHENLLNRMIKDASIFINEPMDFKALAKRAKETSRQDKASVVIKSNGIEQIIYKYKRKKRFGKSISDRSPSLVISRLKQKCNQYGLVYIETDKWKYKASQYDHVLDEYIKSELSQRFKKIGDYTVQRDLYSSFLQSCMDTLEKPDRNQCIKLFDNFVKMQSELINKMKAAGVSYPACFGF

SEQ ID NO: 43604 - protein, 280 aa, unknown
  TnpB Polypeptide
VYNRFFERRRTEAGWEPESPQLVLGKQGAELHFVQTKTISAKKIVESKQDPELVTVAVDLNVKFLAVITVRQHGRIQATRFVSDKGLDQHRYRHLKRVAKKQWQSGKAVKGERSNQQLWAHVRRQNLDSAHKTARAIVEVCEQYPGCVLIFERLRKIKRKGGSTSRRLNRKHANQLKGKINQLAKEKAYASGVVSVEVNPHGTSQYCSRCGAKGMRFSLVAGQRITGKGGKLFCCSSCHFECQADFNASVNVHHSFFRGAPRKRQRRVRKPRLSEYLVCT

SEQ ID NO: 43605 - protein, 481 aa, unknown
  TnpB Polypeptide
MTRHTTFRYCLDPTSEQRSVLVRHAGASRFAFNQCLRMVKDALSVPTSASDKVVPWSGFDLINAFNTWKKTDAAGRTFAVDTEGVIEIRVTGLAWRTEVCQQVFEEAAVDCGRALAAWADSRVGKRSGRRVGFPRFKQKNTAIPSFRVRNRHRNGIWQAIRVGEGRARSVSVPGLGDIRVHDDTRPLRRLLTKDRAKVRFATVSYRAGRWCVSLNVEAAELHSLHRHRARPSSDHGGWVGVDRGLSAFLVAASADGRQLERVDDPPRALARGIQRQRHLARSFSRKQKGSRNRNRAAATLSRHHHRVRNIRLHFLHRVSGELVKTHDRLVLEDLNIAGMMANHRHARAISDAAWGVFAKLVHYKQAWRGGMVAVADRWYPSSQICSLCQARNNELTLADRVFTCPEGHSLDRDLNAAINLASWGEERHRVGADTKSRVREPEARAPVKKARRRRGSGRHLARVGETGPSDAGTDVQAGLSA

SEQ ID NO: 43606 - protein, 528 aa, unknown
  TnpB Polypeptide
MINPKKKKDAVFCQYLLTSTTDARRMYNTANFYIRNTMTGIKKSPELRTPNETEVLHNVFAGIQKANKARDTKYQKDLGKYKKGLSKKPPKKPKHFPYPTAKKWFLSYNVLDAIFKYTRNEVYYSMNSQLNQNAIRKIVAAWKGYFKILKDYQKNPSKYKERPNMPGYLRNPQYVAWFSNQTAKYSVEKDGKAYLRFTKNKELFCIGKASLYVGLRYVKTEIKPQHGCYLILVTFDDGVELPKIPEKPKRIIGIDPGIDNLAAVVNNFGVHPFLIKGGAVKAANQWFNKKRASLLSAVTAGSDSRHSIKNSHSLYALSRKRDDLFRDIFYRAAWYICRFAVKHHADVIVIGHNKDQKQEIRLGKQNNQSFVSIPFVRFEQILTNTAAKCEIPVIVQEESYTSKASVLDGDVIPTYGINDDYAYFSGKRVKRGLYRSADGTFLNADANGAANVIRKKYPDAFDGQNLKYLCETTNVVKFTDLYPGAKSSCQEHYNGKRHESSPASKARHRYRKDTRLQYRILFGKSKYV

SEQ ID NO: 43607 - protein, 388 aa, unknown
  TnpB Polypeptide
MAVKHNRSSKSEGDRVVQFTTIKVRLYPDAAQAELFEKTFGCCRYIWNNMLADQQRFYLETGAHFIPTPAKYKNEAPFLREVDNQALIQEHNKLSQAFRVFFKNPDAFGYPNFKRKKDDRDSFTACNHEFESGPTIYTTRDGIRMTKAGIVKAKFHRRPQAWWKLKRITVDKTRSGKYYCYILYEYAVKPPEPVAPTPETTIGLKYSLSHFYVADDGSMADPPHWVKQSQDKLTKIQQRLSRMQFGSKNYQEAVQKYRFIHEHIANQRRDFIHKESRRIANAWDAVCMRADAFEALTKAMTHGTMMESGYGMFRECLRYKLERQGKPLILIDRYAPTTRTCSACGLVLDREVSYKKARWTCPKCGAVHNREVNAAKNIKAEGFAQFCA

SEQ ID NO: 43608 - protein, 387 aa, unknown
  TnpB Polypeptide
MKNYKFRLYPNSDQEYKLNNNLNVCKWVYNKFVEQAQNNFLTRNDMNYILTELKQQEQWLYQYHSKMLQMVSTQLESAEKSLIELSKKGHNTGKLRFARYNEYRTFTYNQSGYKLERHGDKTLLYLSKIGYMEIRKHRITPDDIKQVIVTKSKSGKWYACVTCETGINTPPMIDFSKAVGIDVGIKKFAYDSDGHQTPNPLNLKKMLKPLARIQRKIARRQKGSQNRKKAVKFYQIIHERIMNRRKDFQHKLSTQYAKNHDVVFVERLEKLNMIKNKKLSRSIMDSSWGTFVQKLEYKCKLLVEVPARNTTINCSRCGNKVPKSLAVRIHRCNICNLVMDRDYNASINVLQKGLNIFGLPQELRKVTPVEILMRSVKQEEANVFRRW

SEQ ID NO: 43609 - protein, 404 aa, Symploca sp.
MKARYRYRIYPTVGQQLALAKLFGCVRVVWNDALAFCIAKYKAGEKKPKNYELQKQFITQAKRTTEREWLSQVSCVPLQQSLNDLEQAYQNFFKSCKGQRKGRSLKTPKFKKRRAKQSARFTQRGFSLTGDCLKIAKVGKLKIVWSRPLPVEASSVTLIKDAAGRYFASFVVETIPEAPDGASESVGIDLGIKTFATLDNGQKIDAPKPLTHRINRLRRLSKNLSRKNRGSKRYERSRKRKAKLQAKLKDTRTDFLHKLSTQIIRENQTIVLEDLNVAGMVKNRKLSRAINDLGWRQFRTYLEGKAQKYGREFRVISRWEPTSQTCSCCGFRGGKLDLSIREWTCLNCGTKHDRDINAAKNIKVAGGHSETLNGCGDKRQTSAKGAAVKEASTRREYVQLALFG

SEQ ID NO: 43610 - protein, 438 aa, unknown
  TnpB Polypeptide
MLVVKTVKVPVHYGITTRKLSILASLTARTTHGVWLWSRLFKEHKLKGSYGDRRLFYGQVKRDAKLGTVAQCCFDTAAWMWSSYRETQKMWSREVAIARREGDKKWLRKLLRREPQEPFSRGMNGKIPIWFDNRFGSIEESKRIKLCSYVARVSTLQRGIKLTIPLNPAKHHVDLLQQGTLKSFQLVKRDGKYYVHVKMEFQVRDQPVYAVHGIDLGVKRSIASVMLRPNQPLRSSDFSILQDGLKRDRLNRLEKRMEELQQAKKWEPLKRVRHRRLHVSEYYDRLAAKQVATTSQNALVVVGYPKGIKYENFKGNGKARLRRTLVHWTYGREIRYIREECTKQGIPSEAPDERWSSRTCHRCGSRHTERLTQSIFHCWNCELIYNADYNGAINIGSRFLPVATTRRATDDLAYARNEQAREIVACEPRSPHPFMGGS

SEQ ID NO: 43611 - protein, 379 aa, unknown
  TnpB Polypeptide
MRISYKFRMYESSKNHRLHRLVTTATRIRNHCVAFQKTHYRLFKKHCNKFQLMKHIAKLRNRREAWQVVGSQCVQAVIEKLDLTYQAFFKWIKTRAGLKRGKPKFKRSAGHGSVTFKQAGWAYLGENRIRFGKYQYKFIKSREIEGNIKTCTLKRDSMNRFWVVFSCEKEETQNQVTGSIHTAGFDFGLKQFLTCSDGTTIESPQFFKVSMAEIAKCNRELASKKKGSKNRRKAKYRLSRAHERIANRRTDWFFKLAHSLCDRFDIMYFETLNIAAMQKLWGRKISDLSFDSFLQILKWVAYKRGKSTEQIGQWEPTTKTCHQCGRVQNMPLDVRVFNCGGCHCSVDRDLNAALNIKRLGHQASGLGNVSRNSGCAVPV

SEQ ID NO: 43612 - protein, 399 aa, Methanococcoides sp.
MKRGNKFRLYPNDDQKTIIENHVGACRFVYNYSLGIKSLMYDKFRINISNKQLDEHLKVLKHTCYPWLKEVNSQSTQQSNRNLMTGYKNFFEGTSDFPTFKSKRDSVQSFQVTQRYKINLTTSEVWLPNIGWMKFKMHRDRFDQDTMSKCIKTTISNNGVIIEKKLNANFLRTVTISRTSTGKYHISILTEDGIPEPGKVMFDDTDIVGIDLGIKEFAILSNSTKIENPKHLRTSMKRLKTLQRRVSRKPKGSNNRKKAVLKLAKLHEKVANQRNDFQHKITSQLISENQAIAIEDLNVKGMVKNHCLAQAISDVAWGNFVRKLEYKADWYGKTILKIGRFEPSSKLCSVCGHKKTDLKLSDRNWTCTSCLTEHDRDVNAAINIKNIAFNNINAVGTTA

SEQ ID NO: 43613 - protein, 352 aa, Sansalvadorimonas sp.
MKKTKTLKVRVKDRHVKLLNGMARSVNFVWNYINELSARSIKERGKFLSAYDVHPYTKGAGKELGLHSQSLQCIAAEYVTRRKQFKKSKLNWRKSNGVRRSLGWIPVNTGQSKWKNGQIFHNGHYFSVWDSYGLSGYRFRSASFNEDARGRWYFNVVIDVDTEVTEGESSVGIDLGCKEAATDSNGEGITGREYRELETKLGIAQRARKKKRVKAIHAKIKNRRQDSLHKYSRKLVNENAAIFVGNVNSLALAKTKMAKSVLDAGWGMLKTMLEYKCDHAGMVFEEVNEAYSTQTCSCCGVIPDSSPKGRAGLGIREWTCSECGAEHHRDINAAKNILAAGHRRLAVGIPVL

SEQ ID NO: 43614 - protein, 413 aa, unknown
  TnpB Polypeptide
LEPGSTACGDTVRKSRKIRLYPDAGQRAELRRWFGTARYAYNQTVEILTSEDAPPAVKTRIRDLILPALPSWHRSAPREVLVGAVFDACRAVSAAKKRNAQLARDKAKGHRKDEGFARVRFRSRKNPRQTFTVQANCVTPNGIYRTKLGGMQMAENLPVPENKNICRLTLRYGQYHLAVPYDEKLPPQRENQARVVALDPGVRSFLTWYCADSVGKIGEGAFFRIQRLCERLDDLLSRAQKSPAKRRRNMRRAAGRMRIKVENLIAELHRQAARFLVGKFDVILLPTFETSEMVERGRRRIRSKTVRNLLSLAHYRFEMFLRHKAAEFGVTVLSVNEAYTTKTVSWTGELLDDVGGASVVVGRDGERMDRDYNGARGIYLRALGDTPALRTMFSECAASVGNSRLSGNVRAVA

SEQ ID NO: 43615 - protein, 458 aa, unknown
  TnpB Polypeptide
MADGWTERVYTIETRLQKEYCGYFREFAPEFAALCRRISQDLRHGVETDSKYVTALMQKTGYLKRTVNSALRQIKGRIKALKELQKTQIADKKNKVEALVGKIKDLSDEIDELKKSVVQHPNDKELLRKYKNKKAKLYSLQVRKNRFNNDIRNYEKSDVPDICYGSKAFFAKQYHLEDNGYKTHKKWLNDFRKLRDRQVYYLASREETAGNQMCQLKYQGGSFLLKVRKERKYCPEDAKRNDERNYVWIPLDFSYRRELLIYALNNGLPLSYTFTCKNGKWYVDVAVTVKNEIWTDTSDGCIGMDFNNGFIALTETDKSGNITKTTNIPLKYHGTGNRAKSEMSEKISKIVRYAFNKKKAISIENLKFSKKKSCCLRKGKKKYNEMLHLLDYSRYKQLCTDYCSTYGVMLKLVNPAYTSKIGKQKYADKRKLTVHNAAAYVIARRGQGFKDRYKKKAA

SEQ ID NO: 43616 - protein, 449 aa, Okeania sp.
LKARYKYRIYPNHVQIQKLSQLFGCCRYVWNQSLAHCNQLYADGIKKPSYTDLTKQFITQAKRELLWLKEVASTPLQQSLKDLDQAYKNFFNSCTGKRKGIKVKPPKFKSRKSRQTARFVGVNYQINRDKIYLPKVGKIKIFWSRPLASQPTSVTIIRDSAHRYFASFVVETNAEFLPKTDNYIGIDLGISTFATLSNGEKYEAPKPLKQNLKKLAKFQRKLVKTQPGSKRRERRRLKVAKLHGKIKDMRTDFLHKLSTNLVRKYDTIVLEDLNVSGMVSYGMLRKRNPKLAKAISDLGWRQFRTLTEAKCEKYGREFRVINRWEPTSQKCSCCGFKGGKKELNVREWTCISCGTFHDRDVNAAVNILNTLTAQTVVMSREASLQPITKVKKAVELENPVQLSLFNEVAEGQRSIIYRTRSSRKTRRKKQASSNDVSTRPESFKQRASV

SEQ ID NO: 43617 - protein, 589 aa, Bacillus sp.
  misc_feature (245)..(248): Xaa can be any naturally occurring amino acid
MILAKKVRLIPTPEQEQVLRNHAGAARFAYNYCKRMSDRYYKLFGKSVSQLALQKRFTKIKKRKRYEWLNDINAQVPKQASKDFDMARKHSFKTYKNGSHTSYKSKKDLIQGFYANYEKLIIGKKVVHIQSIGEVKTSQQLPRNKKPSNPRVTFDGRHWWISVGFQEDFESQELTNESIGVDVGLKELFVASNGMKERNINKDAKAKKLLKRKKSVQRDMSRRFKKGVKIQSAGYEKAKTEHLRXXXXMSDRYYKLFGKSVSQLALQKRFTKIKKRKRYEWLKGINAQVPKQASKDFDTARKNSFKKYKNGYHTSYKSKKDLMQGFYANYERLIIGKKVVHIQSVGEVKTSQQLPRNKKPSNPRVTFDGSHWWISVGFEESFEAQELTDESIGVDVGLKELFVASNGMKERNINKDAKVKKLLKRKKSAQRDMSRRFKKGVKIQSAGYEKAKIEHLRLSRKITNIRNNHIHQATAKLVKTKPMRIVVEDLSISNLLKNKKLSKAFSFQKLNFFFQCLSYKCEKYGIAYVKADKWFASSKICSCCGVKYDHSVQPEGQWSLKIRQWRCVRCNSHHDRDVNASINLSRWVQ

SEQ ID NO: 43618 - protein, 289 aa, unknown
  TnpB Polypeptide
VKKNGRFPVYFTYQAVSYKSRERYLKLSGTSVYIKTDRKAIQVRVIPKGDHIVVEIVYKANECKAKEDNGIYAGIDIGLNNLATIGFNNGKGLIINGRPLKSINQYYNKKKSELSSELERRNKSKNSKRLNRLTTKRNNKVKDYLHKASTMLVNQLISNNVCKVVIGKNDGWKKEINIGKRNNQNFVNIPHAIFIEMVCYKCKLNGIEVVLREESYTSKCSFIDNEPIKKHDSYAGRRVKRGLFRSENGTFINADLNGALNILRKEVGEFNYNPIEVCSSPKKLRIGLS

SEQ ID NO: 43619 - protein, 296 aa, unknown
  TnpB Polypeptide
MPRYLNKGGLFPAVFTTNAFSQKWIKQGIVKLPKQFSFTTRTNKQNIQQLRFIPKNGYIVLEIVYNKKEKNLMSDNGNYLGIDIGLDNLASCVSNTGSCFIINGRPLKSINQYYNKRLAFLKSKLKDNKHTSKQIRSLTNKRNNKIKDYLHKASRILINHVVSNGINTIIIGHNKCWKQEINIGKRNNQNFVSIPFNSFISMISYKATLEGINVKIVEESYTSKCSFLDNERICKHESYKGRRTKRGLFKTSFGKIINADINGAFNIIRKSAKESFDVTMLPEGRGFWCNPVRISV

SEQ ID NO: 43620 - protein, 473 aa, Streptomyces sp.
VKVTRIAYSKNLNQGKYAQLDEQARRLGAVRSLVWRLYGSVSGLAWSDRQIRDVWIADGTAQTFDVLANAWKETVRDTVADITANREAAKVKVRRAINQRTKDEGERKRLFTSLKRETWADDPFLARQMRRHWKHGRNRTHNQIVVRADQYKTFTLTAGGNIWLAVPGLERRQLVRIPLNTTVAPTGTLRLVLRSGRVEVHYAIDAEDMKSSQRPVGTRTIGVDKGYSEVLTDSDGRHHGTQLGDLLTSESDHRKVKNARRAKIRSVAEKAEQRGDHAKARRIRDNNLGAIKRDRRSDSWRCRVRDLTFKAVHAVADKASLIVAEDLTKTFASGKKLGKNTNRRLAAWTKGVTAEALEAVSDRRGSAVRLVNAAYTSQVVPFTNIPGVRKGDRLHCTECGAVWQADHAGAVNILHREGDPDITLFTPHTRVKQLLQERTDRQRPRLPMGQDSSTRHLCRCGERNIRLMLNSEQ

SEQ ID NO: 43621 - protein, 403 aa, Desulfosporosinus sp.
MLEGVFKIIRVLKTKFHTSKENIDRLFACNRTSAHVWNDCLGLAKAHFQQTGNWINRGTLHFATKGQYPIHSQSIQAVFEKFIDARENAHKARALGFSQIRYPYKEKKHFNTKWKKDGFRIGKNGKIELSLGIFSGKRQQPIVVRVKDLPSVRIKEIELIFDRGLQLAIAYDDGKFPKENANVCIAAIDLGEIHTIASVCENGQGVIITGRKIRSLKRLRNKKMKELQKKMAKCQKDSRQWKKYRRALNNILGKSDAQLTDALHKTTRKFVNWCLESKVKEVVVGNVEGVERHTSPKKKKNKRKRSRKHNQKMSQWQFGRTTSYLQYKLAAEGISLQKVDESYTTQTCPVCERKKKTSSRNYSCTCGYREHRDIHGAKNILSKYKYGKFQEISLDQQKYLRIA

SEQ ID NO: 43622 - protein, 385 aa, unknown
  TnpB Polypeptide
VAGIRWRNDAVEWSGLKLNAIIEDYDLIILHGLNSRVKYVRLVRRKYNGRDLFYAQLVCEGKAFQKPKNNLGKGDVGLDLGPSTIAIVSDQSARLEQFANELEFQAQQLRKLQRRLDRSRRASNPSNYNPNGTISKGKKKWDNSSTYLKTRDAKATLERKSSGHRKSLHGEMVNSILCEGDTFKLEKLSYKAFQKLYGRSVGKRAPKNESEATSGPPFFRRGAGGLAFVAYLKRKAESAGGKVVEFSTYNTKLSQTCQCGRVEKKSLKQRVHKCECGVHAQRDLYSAFLAKYIDPETNVLQVNQVLDAWCSVELLLRAAWRAATINQPATGRLLPSSFGRCPEVEWVAAAVQTEIPESQNVVAEMRESGKGYPVRKYRAVGTPRL

SEQ ID NO: 43623 - protein, 161 aa, Burkholderia sp.
MVDMILVYRYRVKSLNGLLNQQSRAVNYVWNFCNDTRKHALDLVRRFDYIAVGNVSAAKLARTRMAKSVYDAAWSSFRNKLRYKAIAHGATFEEVNESGSTESCSSCGSKDSTTRPKGIAGLRVREWTCSGCGVVHDRDTNAALNILRCGRASPVVGILHL

SEQ ID NO: 43624 - protein, 532 aa, unknown
  TnpB Polypeptide
LILTTSIRLPSEFVGPVKILTALGLKLQEQALGHYWSLEGLEKVAAHSGQIWKLLDAEMSRPEDVYIPSRPWRCILESAGRILRSQAERKRIFEHLLPFFAGGAKNAARKLYKEFKAEGNPEKFGYLLNVAEQLAEFCTEHERMPQDFFEFQIKPEPKRFTYTLAPDDGAEDGQAIKYRLEGNRLAGEIKLPVVPEPRSKKDWRWFSFSVELPAELQEKLVAGGTLCAPDLRLKVKPGGELVALLDVKVDVPEEKPSGDPGRALSVDWGLRKLVTCTVVSRKGQLTPPFFVFWSGLKARLFRIREDIKKLQKERDRYEKGTPDWKKYNRKIAAAWQKYHRVQHTLAHAVSTLLVLLARAFGCRHIFIEWLVTLHGKKGRNRDLNWWVSTVVRGLLFRLLRYKAKLAGIRVFMVPPGGTSRVCPRCLGAGRHVISSGNKAEKDSGSWFVCPSCGWQADRDYAGSLNIARVGFNLARPLSYKVGGAAMPFPSRVASAEVLREAMTFTTTLGYTCSVFPGNIGCLVKLLDLQCRT

SEQ ID NO: 43625 - protein, 345 aa, Lactobacillus sp.
MYDAYCVNKIDNRRPNKLRVRDELVANKSEWQYGLSSRTLQLAITDLGVAWDDFFNEELPDWGKPRFKSKRAPRQGFKTDRAKLVKGKLRLDKPHGVANWYDIRFNKHVDLAGTLKTVSIYCENGVFWACLNFEITVERKCKTKQITAVDVNVGHFNYTEGVVRVIPKRLKRLYEQIKYYQRKLAHKRVVNGKKATSTISYRVMRAKLQQAYRKATNIQHDLMQKFTTKLVINFDTIVIEDLAVKKMQMTHVASKGLHRSMFGYFRRLLTYKCDWYGKKLVLAEQSYPSTQRCSQCGYVKQGLEKITLRGNALHGTRHDQYECYQCGAKLNRDGNAVANLLALAK

SEQ ID NO: 43626 - protein, 386 aa, unknown
  TnpB Polypeptide
MKKNKKIKLVKQIIYKKNDPEYEEMDELCFKSKNLYNATLYAVRQTFIKSGEYLNYNRINKIFTKENNVDYRALPAKVAKHTQMFVDFAMKSFFGLVKKKKKGEYDKKVKLPKYLDKTKGRMTVHYEGGALSFKKRKGYIHLSKTEIYIKLPEDLNENDIKFARIVPGVNNLVTMIDTVTKNPVIINGRPLKSINQWYNKKIAEMRSETERLHGKYWSHKMSSVTNRRNNKIKDYMHKASAYIVNHLVSNRIGTLIIGEIKEWKQDTNMYKVNNQNFVCIPFEMLKSMLEYKCRLAGIEVVRQDEAYTSKCSFLDNEEIRKHEKYMGSRPKRGYFKTSNGRKVNADVNSACNIMKKYLLKVASNCTNLLHELVEVFSMPCLKVKTF

SEQ ID NO: 43627 - protein, 373 aa, Methanolobus sp.
MLRAYKYRMYPTKEQEEMFFQHFGACRYIYNWALEQKIKTYEQNGKSISRFDLNKGISMLKRDGEHEWLKDVNSQSLQGATLNLDNAFTRFFREKKGFPKFKSRKNPVQAFNVPQNYKADIENNRIYLPKIDYIKTIFHRPLGDGDLRTATVTRTPTGKYYISILVDDGAEIPKKPKFSVNDTVGIDVGIKDFAITSNADKINNPRHLKNSMKRLKVLSKRLSKKQKCSKNRNKARQQVAKLHGKISNQRHDFQHKVSTKLVSENQAIAVETLNVSGMLKNHCLAQHIADASWTSFITKLEYKAEWYGKTILRIGRFEPSTKICNVCGYYNSSITLADREWECPDCNTHHDRDINAAINIKKFALQEQNLIGI

SEQ ID NO: 43628 - protein, 389 aa, unknown
  TnpB Polypeptide
MINQGMKLRLYPTPQQQEKIRQTLTANQLVYNETLAYLEKRKAAKLPVPTLTELKNYFLDFILVKETALRDFAPHLLFKSLYRAYDAFLAQKGSGPIRPEKPKDFRQKFTVDYSPGEVKVSQAKAKIYLPEFGILEAHGLYSFSGKITAVTLSLINHSEFFASLRIIGNIPSLWPLGTKELGLDLGISSLITTSDGMKYPFPRFNLADDKRVEALIKVLRTKKKGSKNYRKVCHKIGQIRLRMENRMKHYIDTITTALVKQSRLIAIETLDIRGMIDNPKSAWHINQACWGEIIRQLGYKCRWHQRKLISIQRHYPSSQICSTCGYRNNAVRDPNIRIVTCPNCKTTYDRDVNAAINILRKAKQIADYKDRGIVLDSPPEEFHKSHTEF

SEQ ID NO: 43629 - protein, 387 aa, unknown
  TnpB Polypeptide
MMTTHYKGAVARIYPDKAQTAMLEHLFWCLRSLYNASLLFLIETKQKDPDKTLTTEDCIRHLGQTFFKDGANPEILQLPKTFLRETVEQSLRRFALDQAKGRKSHLKSHYDSHEAIHLKALGWYGRIDSTKRLFSCTKLGQVRLRGLIRKVTDGFSFVLQKDGVSHFYLSLLSRAPLCPLPYPGKKPVGIDLGLTDYVTTSEGKKIPNPRPFKQAEKRLAHLERLLAKKTFHSKNWYKMKAKISKLFQKITHIRRDFLHKLTHRLVKKHSFIAIENLDVKEMAAKRQLAKSIADAAFFEFKRQLTYKSLWNRRTLVEVDRYYPSSQICSTCQYQEKEVKNLAVRHWTCPKCHTHHDRDLNAANNILREGIRLFCEKENKTIPKKYQI

SEQ ID NO: 43630 - protein, 228 aa, unknown
  TnpB Polypeptide
VEEVKLSWTARGVGLDSGLASLVVGSDGEKIAPPRFLRSALRTIRRLQRSLSRKAKGSSNRKKARLLVARSQEKAARQRLDFLHKPSTKYIRENQTVALENPNVSGMLKNRRLAKNISDAGWRMFRTLLEYKADRYGREIVVIGRWEPTSRRCSGCRHLDGKKSLAIRRWTCSACGAAHDRDINDAKIFSPSDRRRGSTLVEPRVRPACWCLAVKQEPVLIRAYDLQP

SEQ ID NO: 43631 - protein, 312 aa, unknown
  TnpB Polypeptide
LDAIRQGIWIAKGWLKNPKRGRKPVIRRLWMILTPGQSYTFKWTEASILTIKGRVKVPLVYVERWHGKYKDWKVKEARLICRNGRLYLHVTVEKDIKPYRPRSVLGADINYENVTLSDGTRFENHAFRRAYGLKLHIEHLQRRHPRGWRFIPQVRLRMRMLGRRARNIVVDACRKLANEVVRRALATQSAVAVEDLRYLNAHIDPKPRSWRLRLALFAYRKLLHWIEWKARLHGVPVVKVDPRGTSSECPFCGERLRGNGYRLVGCPRCGFSGDRDLVAALNIGMRGAQAALIAPNPDEAPREDEGENFSIA

SEQ ID NO: 43632 - protein, 410 aa, unknown
  TnpB Polypeptide
MPMLTIKAQIHADPEIERILRDAMFCATKVYNGLMWHLRRQQQETGRVDIRHFSLNRLLAALPRAKGYYSLSAQLTRDEVRQAWRSFFALRRNGRTTHNAPGFRPKSMLSPLKYVQSGFRVEGDRLTLYLGTGREDGVRSVTFRISHRPGVEYERVRQVSITYDKVSGRIEARLVVEVKPRETPGKERVAVDLGETVLLAAVFEDGAALLYSGRLIKAIRRYWQKVRSHVRPPSKDRPRKSRRFHQIARRERRQADHLLHTVTSHFICGGVGEIATTTGIRDGIDYGARMNQRLHAWPYRKIIDMIRYKAALVGIAVRDNVDERGTSRSCHACGMVRESSRVHRGLYRCPCGWTVQADVNGALNIYERAFQVSPVKGSSGRVARPVVLSFQVEWHTVHEPKRRADLRSSA

SEQ ID NO: 43633 - protein, 447 aa, Leptolyngbyaceae sp.
MQLAYQYRLLPTSEQQATLNRWLEMLRHQYNWMLAERFDWWEQNRNPVNACPLVCQLPELKDQPDYYSQKRALVPLKQDRPWYKEIHSQVLQDMAGRVKLSFDRYIKGDKNGSRSGKPRFKSQNRYRSFTYPQASIDWIDGNKIDLPKIGEVKVIWHRPLPPGFEAKTAIITHKADGWYITLTLQDESVPEQVIELEPNWDNSIGIDLGLEHFIADSEGELIDYPKFLRVAQGKLAKLQQKRELRRKGSVARKKLNQRITRLHQKIARQRYQFHCETANRLLDKADVIFLEDLSIRNMSRRCKPKQDEEGNYVANGRAAKSGLNKSFADSGLGQFANQVLPFKAEKAGKRTVKVDPTGTSQHCAICLNRVPKELSDRWHSCESCKAEMPRDTNSGMLIKKVGLGIASLKKLDWVRLGREARAVPPSGQRREYVTPIRVARIFGQVLD

SEQ ID NO: 43634 - protein, 324 aa, Halobacteriaceae sp.
MKRVNTFAVRPLSDDGGQVLRKLLDASAALWNEINYQRLMRYNDEDGFEGDIWGADTGHLEGKYKGVLAASTAQTVRRANTEAWRSFFRLKKKFHDESNNSVTEHPEPPGFRGNEDDGRVLKGVVRKDAYTVDWGDRSRLEMVVGKELRDRHNSPKSRLRLEIVGDPNWPDYEDQGRLELWYDESDSTFRASQPVTVSEETRETPLADETAAVDIGANNLVACTTTTGEQYLYEGRELFQRFRETTREIARLQSKLEDGRYSSERIRRLYRKRTRRRDHAQEALCRDLLERLYEDGVDTVYIGGLTDVLESHWSVKTNAKTHNF

SEQ ID NO: 43635 - protein, 398 aa, Moorea sp.
MLFKAGKYLNNAELDKILKTNIHFKAMRSACAQQTLHGVIESFKSYKALSKLYKKGQLTDNPRVPKYRKKGGMAVVSYPARWVKLVKGQLKFTLGKQVKAWFGLDHFLLPMPSNLDLKSIKEFRFVPRNGCFYLEFVYEQPDIKPVLSTNNVLGIDPGLNNWLTCVSSTGKSFIVDGRKVKSQNQWYNKQVSKIKKGKSHDYWDYRLAFFTEKRNRQMRDNINKVARFVINWCLRHKISTVVFGWNQRNKDSIKIGKKNNQEFVQIPTAKLKNRIEQLCIQYGIKFIETEESYTSKASFLDGDFLPTLGEKPVRVACAKAQGWKESGKRVRRGLYRSAKNELINADCNGASNILRKVVTQLGFSLAEVSRAALNLPQRYKLDSLSRLYREASRRGATP

SEQ ID NO: 43636 - protein, 401 aa, unknown
  TnpB Polypeptide
MRKINRTFRFRLYPNQSQTELLSRHFGCSRFVYNYFLNQRKEQYKFTGKSDNYYAQAKALTTLKKQEETAWLKEVNAQTLQFAIRSLEAAYNNFFKKRTKFPKFKSKHSKDSFTVPQFASITDNRLFIPKFTEGIKCRVHREIKGKIGKVTITKTPSGKYFVSVFTEEDYINPLEKTGKSVGVDMGLKDLLVTSEGETFKNNRYTRRYEIKLAKAQRHLSRKKKGSRGFENQKLKVARLHEKISNSRVDYLHKCSISLVRRYDTICIEDLNVKGMTKNHHLSKSITDVSWGKFISMLTYKAEWNGKKVVKVDRYFPSSQTCHVCGHINKQIKDLSVREWECPNCHTRHDRDVNAAINILRIGLNNISAGTVDYTGGEEVRADLLESHSSVKPEANVLNVHG

SEQ ID NO: 43637 - protein, 322 aa, unknown
  TnpB Polypeptide
LQFAIRSLEAAYNNFFKKRAKFPNFKSKHSKNSFTVPQSASVASGRLFIPKFKEGIKCRVHRNIKGKIGKVTITKTPSGKYFVSVFTEEEYITSLEKTNKSVGVDMGLKDLLITSEGETFKNNRYTRRYERKLAMAQRHLSRKKNGSRGFENQKLKVARLYEKIANSRADYLHKCSISIVRRYDTICIEDLNVKGMVKNHHLAKSISDASWGKFISMLTYKTEWYGKKVVKIDRFFPSSQTCHVCGYLNKETKDLSVREWECPVCHAHHDRDVNAAINILRFGLNNISAGTVDYTGGEEVRADLLESHSSVKPEANEFLIQG

SEQ ID NO: 43638 - protein, 418 aa, unknown
  TnpB Polypeptide
MLRAVKIKLYPTSFQATQINKLLGSCRVVYNQVLDYKIKQYKENSFIENRTTLSHWFHHELLKNPDLRYLKEQNSKVLKCSIDDMLTAYDRFFKQHTGYPKFKTKHDNKQSCRFPVDAISKRNIYTNYKLSLANIKDIKFRCSKKYAEYLQKHKANIRQATLSKLPCGEYHLSILVDGDLTHKGIQDTDKCVGIDLGIKNFIITSKGEVFNNLHFNKNEANKLKRLQKQLSRKQKGSNNRYKARIKLAKANKKINDKKQYYLHSVSNSLINENQVICVEDLNVKGMLRNHKLAGSISEVNFGEFRRMLEYKARWYNRKIVFVDRYYPSSKACSHCGYKYKDLTLGVREWTCPECGTKHDRDINAAINILHEGMRLLGSSTTEFTLVDYPPMDDRPAMDLKSNDRLKQEANKEQGSVFV

SEQ ID NO: 43639 - protein, 359 aa, unknown
  TnpB Polypeptide
MSHYIKTKKWIKPYPKCQSKVRGFKIILFNKMMVNLDEYERKVEADIRKLKTRLALVTEARKRKAKKLENLEKLPPERIVFGGKKLYSEKDVVEVTKSDDSSNDKDQKTSKKASNKWRQEFFEKRHQSMSLPGRHTSKYGNFLCKYDGKDLSVTCIDGSVTIFHDFKLPRYNEAFQNNFTCKPEDRQSLCYNFTVKRDRKNRQYIIVSVTMKLQAYENSYYGNGAISMDINYDHFALAEINETGKLLDQKLIRFDLVKKSTGQITNILGAAVKEVFNWCAEKDKRLIVEDIDLTIKLASRKYGNRKGNHHMTLFAYQRIASSIENQSLRREIAFCKIDPAYTSQMGKFLFMRRYGMSIH

SEQ ID NO: 43640 - protein, 379 aa, unknown
  TnpB Polypeptide
MQRTYKYRLYPNKEQESKFNQALAICRSLYNNALSERRSYYEKNKKNLSAFTQIISLPERKRQESYLAQVHSQVLQDVFLRLDKAYALFFVRLKEENGKAGYPRYKAANRYHSFTYPQYGGFKLMEQALRLSKIGMVKIKLHRPLEGKPKTCTIKKEIDRWYACISCEVQPVKKSVPQKVVGIDVGLENFATLSNEEEIANPRCLRLSERKLAKVQRRLSKRQKGSRNRKRQAIKVAKIHRKIKDQRSDFLHKLSRNIVDRFSFIAIEDLAILNMLKNHHLAKSIADASWGQFIAYLSYKAAEAGRGVVKVDPKGTSQLCSKCGSIVKKSLSMRVHRCPHCGLVLPRDHNSAIAILQRAVGREPPEFTPLETAVGQSSN

SEQ ID NO: 43641 - protein, 381 aa, unknown
  TnpB Polypeptide
MMAYKFKLYPSKQQEQALFKTFDLCRFTYNQLLEKLGKQEKINRKEIQHSLVEMKQNYPELQDVYSKTLQYECHRLFGNLRALAQLKKKGIKVGKLRFRGKDWFKTINYNQSGYELEQTGKRYGKLKLSKIGNINIRCHRIAHGAIKQITIKKTAGRWYAILITDEEYKKQKGEGQIGLDFGIINFVADNNGNRIKSPLFLKRSLKKIEKAHQDLSRKKKGSNNRKRAKQRLGKLYEKVENQRNDFLHKLSTQIVSENKLICIEDLDIKEMISKKKNRFWNRRNFLDCSWATFASMLKHKAESAGADVIEVNPKNTSKICSGCGTMQEMSLSQRTYSCDCGLEIDRDVNSAKNILAQGLGFVENETASSSMKQEAITSNNV

SEQ ID NO: 43642 - protein, 732 aa, unknown
  TnpB Polypeptide
LNLICLKWISLFIVMVKKKKKKKEDKKEISSKYLSFKNNIKNICEDNVINILQDMSIRTTTIIRNTNYFIRYYYVYLFENNMEFPIIDHKMIRDIFSLVSTMKRTYKEPACNILLKEFYDDVFCNLNLELVSRDKLTQLLTYETERMLVNIETNIKEHFLAHYNRYIKVVFNYYKKDEKIRKKYKCNKKFNIEIKKLNNDYNDIKYNILNVHDDILEDHYDFILEQRQKLFPNIDSIRNNVLYDVKCTPLKYLYTYFTIVDTFEKLNVNYNMEESIKYHNNKSNNNNIVIRGYNTDHENKICKVPIFKSTKNKESTLYKKIKLFSVTPLQTSLIPKYITIDSAVIIQNFGDIIKEKIKEDKTKKEKLFTDPRIINVESLRLYYNNDQTKKELWSLIFDMDDKYFKQKGNYKFNYTLSTDCFACTAPFYHKDTKTVKKGRNMTIKSKSNTDPEYVEDKIMNFSLDLDKKIVCIDPNKRDILYCGTFEDQNDPSTFKKFRYTACQRKLELKTKHYSKIRANSAEIKTKQLESLKVIDKNTINLMCIKKYIIGSGKINKLLKYEYEKPIHRKLKWYSYLNKQKSENKMIKNFKKKMGPYQKTIVVVGDHSCNSSNMPGTIPTISKRIISIFKKAQYETYLINEYNTSKICNKCGCETETFMKRTSPKPKLKKKNIQITVHGLLRCKSVKHTCEALHNRDTNAVLNMLKIVNMTKEKLIRPLLYCQPTAYYATNLS

SEQ ID NO: 43643 - protein, 446 aa, unknown
  TnpB Polypeptide
MWLISDTITSISKSEPLPIEWKYLQKISVFVKNVVFLQKFRLFNNRMKLIYKSYKFRISPNKEQIILINKHFGATRFVFNRYLNSRKETYLEEKKSLNYYDNANNLTKLKKQEEFVWLKEINSQSLQSSLRNLDTAYNKFFRKQSKFPRFKSKYDRQSFTIPQFITIEEGKLWIPKFKKGIKLNSHREIEGKLLFATISKSTTGKYYVSITCEVEYQPFEKTNSKVGIDTGIKDLAILSDGKVYENIKTLKTNLKKLKYEQRQLSKKVKGSNSRLKQKSKLATVHEKVTNIRKDYLHKVSTEIIKNHDVICIEDLTVKNMMKNHKLAQAFSDVSLGTFYTMLEYKANWNDKIIVKIDRFFPSSKTCSVCNYIKQNLTLKDREWTCPNCNTIHDRDFNASINIKKQGLKILSDLGTNSDTKQKRNKALPLGKSMTSETHLIASGVGG

SEQ ID NO: 43644 - protein, 270 aa, Gammaproteobacteria sp.
MKHTKTLKVRVRDKHASLLNSMARSVNFVWNFVNELSQRSIKERGVFLSAYDMHPYTKGAGKELGLHSQALQFIAGEYVTRRRDSYGLSQHRFRSGSFSEDARGRWYFNIVVDVEVETPKGQDHIGIDLGLTDTATCSDGFKLEAGRFYRGLEDKLATAQRAGNKIQVRTIHAKIANRRKDALHKFSRTLVNRCGEIYVGNVSRLKLVKTKMVKSVLDAGWGQLKTMLDYKCAHAGIVFKDVNEAYTTQTCSNCGSLPESRPKGIAQDLE

SEQ ID NO: 43645 - protein, 234 aa, Okeania sp.
MYSCQQVLVGKNPELIAILKFLCEQSHKLTNMGIYYGRQLFFKSHKTLGKYDLEKLYKKNYHYKVLYSQAAQQILRTVAESFRSYYSLIIAYNEGKISDRPRIPNYRKKGGMATVSYPKQALKLKDNQIRVPLGNTCKRWFGLDCFLIPMPSNLEFSSLKELRLLPRNRCFYYEFVYEKEVVVKPQLNQENVLGIDHGLHNWLTCVSNVGTSAGCRWEKSQINESLVQQTSINY

SEQ ID NO: 43646 - protein, 346 aa, Okeania sp.
MILSHCYKIKPNQEQITKIDNWLELLRRHWNYALGQRLYWLNRTRCQIDRCSIISCPIGEISCRPDYYFQQSALKETKQLFPDYKEIYSEVQQINLQKLDKAWKRWLVPDKTGKRFGRPRFKKSGKLRSLCFSRVNHSKAAVKFDGKQIIISRLGIIPVIVHRPIPNGFTIKTATITKKADGYYVSFSLEDKSVPSVIPTDNIKTAVGVDVGLKEFLTTNTSETVSVPNFYRKAQSNLARKQSKAARKEIGSNNWQKAQNKIARLHQHIARQREDFHYKTAHKLVKEYDLIAVEDLNIKGLARNTKLSKSIYDVAWGAFIEKLSAVAVKRGVHVSRGEWPFARTPS

SEQ ID NO: 43647 - protein, 234 aa, Okeania sp.
MLLGFKTELHPNNRQKTLLAKHVGVARHAYNWGLWLTRNILNHNFNNPDSKLKFPTAIDLHKLLVAMVKPKNCWYYEVSKTAPQYALRYLSEAWKRCFNKVSGQPKFKKKGRDDSFTLDGSITVGFNRIKLPRIGWVKTFEILPDNVTPKSVTISRASDRWFISFRVETIPQITEKSVDVVGVDLGVKTLATLSTGEVFDGAKPKKKLEAKLSRLQYLNRHKTKFSRQLEKSST

SEQ ID NO: 43648 - protein, 368 aa, unknown
  TnpB Polypeptide
MQIISSYGVELRKQNIPIRQTLEIYRSAVSYLIGIYVQVWEELAEIPDAKRRFNAAEHLVHTTKKNHACFDFDIRFPKMPSYLRRSAIRHALGTVSSYKTRLDLWEKTDGKSGKPRLVYENHAMPVFYRDVMYREGAEGKDEAYLKLYDGHDWKWFCVRLEHTDMEYLRKYWSGKKASAPTLKKRHQKYFLRFSYTEEITLTKTPVKEQIICSVDLGINTDAVCTIMRADGTVLGRKFIDHPSEKDRMYRTLGRIRKFQREHGSVQSRGRWAYTKRLNIELGKKIAGAIVRYAEPFQCDDADHRQCAGAVRRRCRGVPRHGIRGCNSDRPALLRGPGGRKFSGQHPAHPCRETAGRWLSWRAARRLSI

SEQ ID NO: 43649 - protein, 384 aa, unknown
  TnpB Polypeptide
MLLKKGFRFRLDPTDSQRQLFAQFAGASRFLYNRGLEQRKQVYEQSRKSISYFDQNNELVALKKEAATSWLQEIHSQVLQQALKNLDTGFQNFFQNLKKGKKPGFPRFKCKGVRDSFRYPQGVHIEGTQAYLPKIGYVRFRKSREIEGTLKQTTIIREGIHWYVSFSCEIEEPDPVLASISEDKAIGIDMGLKSFATTASGPHNAAKHIGNPRFFTQYLPRLRVLSQRLSKKVKGSKNRLKARLQLSKLHARIRHCREDFAHQLSTEIVKSHDIICVEGLDIANLLETKTRSLSRAIADASWRFFLKCLAYKAKEKGKHFVETGKYFPSTQTCSSCGHRQRMELEDREYCCKNCSMQIDRDLNSAILEKAAGMSVLLKACGAAP

SEQ ID NO: 43650 - protein, 397 aa, unknown
  TnpB Polypeptide
VVSITIVKRGMRRLLKSFKTEINPTQEQKVKINKTIGICRYIYNFYLAHNKELHENGEKFMNGKSFSVWLNNEYLPAHPEYQWIKEVSSKSVKKSIEDGCTAFTRFFKGQSKFPNFKKKGKSDVKMYFVKNNSKDCACERHRLRIPTLGWVRLKEKGYIPTTKDGWKIKSGTVSIKADRYYVSVLVEIPDTQIINNSNEGIGIDLGIKYFAIVSNGETYKNINKSARLKKLEKQLRRKQRCLSRKYENLKKGEAIQRKNIQKQKLKVQRLHHRINNIRTDYINKTIAELVKTKPSYITIEDLNVSGMMKNRHLSKTVASQKFYEFRTKLKSKCDDNGIELRIADRWYPSSKLCHRCGCIKKDLKLSDRIYRCGCGYIEDRDFNAALNLRDAMTYKIA

SEQ ID NO: 43651 - protein, 664 aa, unknown
  TnpB Polypeptide
MGRPKKEVPPKPPDNPTFDFDFYKAVKVPIKHILKQPEIHLPKINNAVRKCHQIVIHTLMFMKLYLLDYYETHQTLPVIDHKFIQTCMKVVCKETTTGRPPSDATVELKTILKAFYQEHYFPLTQNDQLDYTNLNTVLDYLKVTILTVYENNIKSHFVEYVERYVNVMWKKRLLTQKIKAKVHLTQKEKETKLRKLGSELRKIKNDILNVETTDFTSHSSYHSWITEHKKKIMPVKTKFEKKSIYYDIQCHPQDYFPCMLFMMKQIEQEHNKISSVFPLRSEIIPKHIRLDTTTIVLLLFTKKQGIKTEYTTKGNLKKQENNIWKFFFRTDRQCFHKPNYTFHHMIETDGVSATILFIRNEFIGKHLPNNKFKEKEQYLDELNDYSELQSKKIVAVDMGKSDLIYCVDGNDRDANKFRYSQDQRRKETKSKKFSKLILEFRRTIINDRTVIEYETELSNYNKKSLNTDEFKSYIKRKNEINHILFDFYEKYLFRKLKLNGYLNTKRSEQRMIQNFQKKFGTPENVIIAFGDWEQRQQMKYKEPTKGKGMRSLFRKCGYNTYLVDEFRSSCKCSQCNGGECNNFLMVENPKPYRNNQQMCWGLLRCKSCNGFWNRDCNGAKNIYKIAENAVKQINRPDYLCRGTFQAIFKSGYNQNLHGNEKTRP

SEQ ID NO: 43652 - protein, 374 aa, Caldilineaceae sp.
MTEMIVMHKTYQERVYLSSAGYRRIREVLGACRWLYNRSLEERRNIYRACGMGMSKFAQMKRLTRLRTKSQWWRDLSVQIARGVLVRVERAFQSFFRRVKAGEKPGYPRFRGSGRYRCIELAEVTPAMVKGNRICVKGLPSMRIRPSRKLPDGGQLKALRFVMRGRHLWADLVYREQVMPLPQNDLIVGIDLGVNQRMTLSSGEVVERRVVDRRRERRLQRAVSRCKRGSNGRRKAVAAFATEKRRNAIRNRSECHVITTDLVRQYGTVVMEDLKVRSMTAAGGVHKRGLNREILAQTWGMIRQQLAYKAEWAGRKLVEVNPAYTSRRCAACGVVNARAKIYRVFECSGCGHVADRDVNAARNIMARGAFAPVA

SEQ ID NO: 43653 - protein, 152 aa, unknown
  TnpB Polypeptide
MMSLCYTVWIVSYSNILDSKGKIRGKRYRERIHLWRKNDVQHRVELQAHRMGMRLSRVCAWGTSKYAFDGSGVVDRHSIYHYEHGRKVYNYSLCTFQNGKIYNCDLSAAQNIGARFFLREYQLLGIEGLSATPQRTLCTLRTLVSNGLPVAA

SEQ ID NO: 43654 - protein, 331 aa, Moraxella sp.
MQDSRNRWYACITVKNYPKQTCGTGSVGIDLSLKDSATTSNGDKLQIKQTLKYAKALAIAQRAKNKQRIKAIHAKIKNTRLDLIHKFTTQLVRDNALIVVGDVKSRSFTNKKTKLAKSTYDAGWFELKRQLEYKCQQTGCRFEIVNEKYTTQICSHCGDMSSSPKGRAGLAIREWACAKCGTWHDSDLMPLRTFLRPSLTVLQKESPHFRAGRESTMGDKHICRFDSGIIGFIYAEKEKIRQEFGVERITKEIEAKVAKQFERRLELQSQYLNGEVYCFFIYRVNTAEFEKYGEHCLERSEVLDSCTGYYQKCDAIFDMLDMLENLSKNAA

SEQ ID NO: 43655 - protein, 500 aa, unknown
  TnpB Polypeptide
MISLSTALKHYKRKDVQDEIILAAQDKEVVARFGDKGFGKRPDILKYPTDIIEQVKNGATSFHVSEERWRNPLQLTTPMSKRDADNLRTGWDLVIDIDFEAWEITKLIACEIIRALKEHGVNSISCKFSGNKGFHIGVPFEAFPEKVHNNETKLLFPESTKRILSYLADYIDSKEKGFALSKNIVKSSEFNDFIKKTGKDVDEFTKDICLKCGARLKSRDKKQTEFICPKCGKTISADKSVKYMLCDKCKGYMEKIQSPAIKKCPECGGKKFGKKVNLFIDTLLVSSRHLYRMAYSLHEKSGLVSIPIDPNKILEFDKSAAKPETLRVSKFKFLNRKNVKKGEAGKLIMQAFDYKPQIEGKESELEKKEYKPLGFALQEEFFPPCIKKGLKGLKDGRKRFSFILINFLTSVGWDYDKIKKLLVEWNKKNYELLREVNLLGQLKYHKQNKKKILPPNCDNAAYYKDIGICEPGNLCKRIKNPVNYSRIKVKSVNKGKTIKD

SEQ ID NO: 43656 - protein, 647 aa, unknown
  TnpB Polypeptide
MLNPEINSDFYKAVKVPIKHIIKHPDINLPKINKIVLMSHKIVIHTLQFIKLYSIHYYDKHNKLPAIDKIFINCCMKILCVDKPMGRPAKKEIKDLKDKLILFYNKYYKPIQIDVLEYTNMNTILDYITIDILTGYENNIKEHFVEYVERYVNVIWQKKFMIDKIRKVKKTKRDRDNAVNRFNSDLRKIKNDLLNVEDNKFKSKSFYHQWIKEQRKLILPNKKFNKNLYYDLQCSPMDYLDKMVYMMKIVESYNMTPNNMFPLRTDVIPKHIRFDTTTVVLTLLTKKYGNKSSYLVKGNLKKNEDKIWKFFFRTERQCFNKPNYSFHHMIETDGVSVSILFKRTDIVGKRINVKKNTTKEKYINELDNYKDIQNKKIVAIDPGKCDLIYCVDGDTNKANTFRYGQDQRRNETKIKKYSKIILNDKKKTKIKNKSIIDYETNLSKYNKKSLEFKKFIEYVKHKNEMNNNIMKFYEKSLFRKLKLNGYLNRKKTEQKMINRFTKTFGNKNDVIVCFGDYEQKKHMKFKEPIKGRGMRTLFKKNGFPTYLVDEFRTSCKCAKCDGGECNKFIIRKSPKPFQNNINLVHGLLKCKTCSGVWNRDCNGATNIYKICYNAIRGKDRPTYLRRSNSSGVFDDTSKPQFTQVSKG

SEQ ID NO: 43657 - protein, 474 aa, Nocardia sp.
LDPTPAQERTIRSHCGAARFAHNHMLARVKAILAQRAAERSYNVPDSELTPALGWSLAALRKSWNTHKATVAPWWAENSKEAYNSGLDSLARGLDAWFASRNGVRAGTKVGFPRFKTKYRAVNSVRFTTGVIQVTPDRHHVTLPVLGTIHTHESTRKLARRIEAGTARILSATVKYDGRRWYCAFQVIVEGKQRAAHVARSTYPIVGIDIGVKELLVVAAPDGTELERVSAPKPLSAAQTRLRMLQRRAARQQSRWNPDTKTRQDPSKRWLRTQTRIAKTHAHVANIRRHELHTATTRLARNHDVVVVEDLNVMGLRRRGGAYKRGLNRAIGDAALGRTRSLLGYKTTWNQTRLVTADRWFPSTQTCSRCQAKTKLALRDRVYHCRNGCPPIDRDTNAAINLARLGETTGHGGVSGTGTGSSPAASVAAGDGRGAIRKTCPTDSAGKAGGVEASIPPHQLVGQTGTAPSQGEAA

SEQ ID NO: 43658 - protein, 312 aa, Microcystis sp.
MKSKSFGFPRFKKKMRSFVFPALSKNFLGDEYLNFPQLGKIRIRQSREYPSGFEPKQARIIRKASGFYVSVSFQSTELVPDMTVGKTCLGIDAGIESFVATSRGDLIKAPRFLLKVQSKLKLLQRRLKRKTKGSSNWLKLQEKIARLHEKVSNTRRDWHFKLAHYLCDLADNIFVEDINFVSWSRGIVRKQSLDSAIGSFINEILPFVVWKRGKYYLKVDKNGTSQDCPNCGAITGKKALSERVHRCDFCGHIEPRDTASAKVIENRGKNAVGLTVLENARGGDLTGIDRLNQVDLVKSLRTENPPLHRASG

SEQ ID NO: 43659 - protein, 607 aa, Moorea sp.
MDQSITFLPESPPTGSGLVPKHLNDGLSQVKFKGSKLLGDKEDTTSIQLSLSHQKKLGETDLLSCMPEFQAALKRTILNNKYSFSSLVIQTQKSSKTSGADSTLKDLVFKPYWTELSAVLASMLSLPTKIGFVALGSILSHGCVLNSKPKYWFSTKRTSAQNKKWLKMYSRSSMSSVVDCMDSGNIKTKSLKTTTYRVYPNKDLEKIWKKWVAAVRKVYNISIEQLNKNQGYTKVGKKGGKHGFRTWLKQSGLIPEWCKSLNVSKILDNASMEAYTAWKGTAKQPKFIGIGKKRKSNPQAGLKLAKFRSVRDQKQTIQFDPTAYKGGRWMVSTTKHLPKPKFKGNNHCILTDGSTELTYNKGRWFAHFPVEFTTEPTLTRKVVALDPGVRTFMTGFDGNQFLEFGIDDFQRIAKLCSHLDKIKSNHDQAKGHKNKHKRYRLKAAMERLRTKIKNLRTEIHKQVASYLAKNYDVIILPTFETSQMVVKKKRKLRSKTARAMMNWAFYQFSQILEHLCNRYGSRLVRMTEEYTSKTCTKCGHIHRKLGSSKNFKCPKCNYEIHRDFNGAVGIFLKAMWDTTFLNNVGDVVLSVSDTIDSNVYDVMVCQG

SEQ ID NO: 43660 - protein, 395 aa, unknown
  TnpB Polypeptide
MRLVERHIVKDNQFEDICLKSGLLYNYVLFNIRQGIFDGNYLKEYDFSTKLCKENQFDFRNLPTAVSQQVIAQVFSSIRSWIRSKKEYEKNPSKFLSRPKLPKYKRGKKQNMVVFTTSACRLKNDGCIHFIKNIIQPIKTKIGENKLCQVRIIPQATCYVVEVIYEKKEQDLNLDKNNVLSIDLGLNNLCSCINNAGKKPFIVNEKIIKSFNQWYNKKRARLMSYIGDKGTSKRLRRLNNYRNFWIEDKIHKVSRFIVNYCINNNIGRLVIGLNKGWKNRISLGKKTNQKFVEIPFSKLIDKISYKCKLVGINFQVNEESYTSKVDHLAFEKLGKHDVYLGKRKKRGLFQSSIGKLLNADINGAIGIGRKVFDDSYVSRIIDSGLAFNPIRVNIL

SEQ ID NO: 43661 - protein, 322 aa, unknown
  TnpB Polypeptide
MAIDCYRDALANAKTWRKNPYKGRRPRVKNLCMLLHHGSGYRIEDGYVEIIGGIRMEIIGWDRRYDQYENREARLVHRGGEMILWISKRIPKPKPYQPRDVIAIDINEKKIVYADDRINKDIDTAIDRAYKWMVLAESLQKKYSSPRYPAWRRRKAILNRIGSYHRKARNILEDWARKSSLKMVRLAMRLQYAIGKEDLTGLVEAHRKLSKNHRTRLIVIGYSRSERWIDWQAMKLGAPLAIVDPRGISNECPQCDSKMTENDYRRLRCSRCGFEADRDVVGKLNIRRKALKTLGIKAFSGGVLSPNADVSPNKLGKPMNRL

SEQ ID NO: 43662 - protein, 312 aa, unknown
  TnpB Polypeptide
MLKTIRVKLLPTQDQKEILLATMKAVNSACNSISEFAFQNKVFNRFELQKQMYRSIRSEHSLGAQITILACRKVADSYQTSIKKREELTLHTYRTRGAIAYDSRIYSIQGTSVSVWTPNGRMKVPLQTRYSFPDTREADLCYDRTKNRFYLAISVEVPEEPQYEAESYLGVDLGIVNIAATSDGVQVPGTACEQVRQWYLDRKRTLQQVGTRSAKRRLKKLSNGENRFKKNVNHIVSKTLVALAKDTSRGIALEDLTGIRERTTVRRAQRDRHAKWAFAQLREFISYKAARAGVPVVLVDPAYTSQGCSACG

SEQ ID NO: 43663 - protein, 408 aa, unknown
  TnpB Polypeptide
MQRAHKIRLNPTPQQTEYLRKACGTARFAFNWGLAEWQKEYAAGRKPSAYTLKRQFNAIKRKQFPWALDVSKCAVETGFRNLDDAFTRFFRRCKNGDTKKGYPRFKSKKRSKLSFRMDGTRVRIDGHWLKLEKLDKPINMAEVLRFNGEIKSVTISENAGHWYAAVNVEIEPPEHKHPQGAVGIDVGVRTLAVLSDGKRYENQVLLRSRLRKLKRLSRELSRRQEGSGRWNRTKKKLATLHRRIANKRLDYLHKMTTEIARTYRIIGVEDLNVAGMLRNHRMALLISDAGLGEIVRQLRYKSEWYGGVLVKVDRFFPSSRLCPMCGVVKSDLALSDRTFVCECGYTADRDLNAARNIEREALRLINRGRSGFTDSLNGRGQDVRPFGAVLDEASKLAEERQPTKPAVV

SEQ ID NO: 43664 - protein, 376 aa, Okeania sp.
MKSIRTKLKLNNKQKTMMAQHAGYSRWCYNWGLSLWNAAYKDGYKPNARKLREVFTNHTKPLYPWMKNLSSRVYQYAFPSECFPTGCYANANIHLGETFKRFFSCGMLPYGMLRKRKQGLGKHPRFKKKGQHDSFPTECYANTIDNCGKPIKLNGWNHKLPFIGIVRTYEPIEVATQKITISKQAGSWYLSLAFEFTPTSTPKTTEVVGVDLGVKTLATLSTGVVFPGAKSYRSFEDKLSRLQYLHRNKIIGSANWRAAQLKIAKLHRKIANIRLDTLHKLTTYLAKNHSVVAIEDLNISGMLANHKLAKSIADQGFYEFRRQLEYKTHWYGSELVVVDRFFPSSKTCSNCGHVQDLPLNVRTYDCPDCGISIDRV

SEQ ID NO: 43665 - protein, 457 aa, Okeania sp.
MDIPQDDFIRSNRRKIINKYRFIDQGFCVKIPDMTLIMNYRYRIYPDAIQEQTMLHWLEISRKVYNYALREIKDWVNSRKCSLDYCSLEREYIIPADKPFPTYYAQQNALPKAKKEFPLLGQAPSQVLQTTIRRLHEAWNYFQNRGFGFPRFKKFGQMKSMLFPQFKTNPITGWQIALPKVGKVPINLHRPIPDGFVVKQARVCQKADRWEVIITIESEVSIPHAQPHGDALGIDLGLEKFLTTSHREFIPRPRFLTSLYRELELLQRKYARTKKGSANREKARIKVAKFHNHIVNVRKDWQFKLANHLCTKEGIGMVFVEDLNLKAMSRGMLRKHSLDAAFGQFLNLLEWVAKKHQVYFLRVNPDGTSQTCPKCNTHTGKKELSERVHRCGECGYETDRDHAASEVIRLRGLQLISTQGLCGIENAYAVGLPGVEEKSPSRSEAKSRKRKTRNAKS

SEQ ID NO: 43666 - protein, 401 aa, Okeania sp.
MKVVDRHIINRTHQYWRVCDELAFKSKHLYNLANYYCRQHFFKCSKSLDLTKLYHATKDSDAYRALPTKVSKQIIKCLVATWRGYFQAIKEWSKHPQRFLGKPKIPKYKDKTKGRNVVIYSNESVYKRRLKEGICHLSMSDIKIPVVVESVVEVRIVPATGCYVIEVVYEKTQQQHIESTYVAGIDLGIDRLVALATNKPGVKPLLVNGKPLKSVNQLYNKRKAKYQSVIKGQKKTSRKIEALTYHRNRFVENYLHNTSFLVVEYLTTNNIGTVVIGKNDHWKQGANIGKKNNQNFTQIPHYKLIQQITYKCQLAGVKVIETEESYTSKTSAIDLEEPICHENYLGKRVKRGLFRSATGKVINADINGSLQIIRKKFPGAFTAEGIVSCAVQPVLVNPISR

SEQ ID NO: 43667 - protein, 561 aa, unknown
  TnpB Polypeptide
VTSRKLRAIAEPFVVAPAAGARVRTRLQVSPADDGVLRQLGEHLGHLASADLAGRCRAGYLDAGSKAESRRQRKQAMTAASSARWAGAITRTSEDSWQLAVRNLAAEARSLRARIAQIRRRLQVPVGQQAGRVRGYADHNERWEKQRRLQHLTARLAAAEQQLADGNLSICRGGRRLARARHNLQDAGLTEASWREQWEAGRRFITADGETDQLLGNLTIRWHPDKHWLEIRLPGPLERLANRPHGRYRLSRLVAFPYRGGDVAAQAESGSVRYDIAFSPERGRWYLDASWGIQPPEQPGLAELRQAPVLAVDLNVGSLAAWVLDPAGNPVGEPRTIALELAGLPAQTRDGRLRAAVSELIAVARGAGTRAIVIEDLDFAAARAEGRERAGRRPHRGKRGRGFRRAVAGIPTGRFRDRLAQMTSNSGLAVIAVDPAYTSRWGAEHWLAPLRQQASGVTGHHAAAVVIGRRALGQRARRRARCDSTRPEDRDERATRSAAWPGPAPAGLPDARPRNAGPHEARGQLARQLETRQADRSSPADQAAQDRSGPPADPGSLLISA

SEQ ID NO: 43668 - protein, 290 aa, unknown
  TnpB Polypeptide
VVIGDLRIVPMGNTFIVELTYRVRREEKDLSKSVSLDSSEALFCDLGIDNFATFVSTKPGVRPFLIKGKVLKSLNQNYNKQVAELRSKGHRAHICTKGVKRYWRLHDLLHKASRLVINYCLAYDVGHIVIGVNQEWKQEVNLGKRNNQNFVMLPHRKFVEMIRYKAEDYGIRVTVREESYTSKASALDFDEMPTFDKKESGAKPVFSGRRIKRGLYRSAKGQLINADINAAANIGRKELRDEWLKKLLELDGGVLVDTPAVVRNLHTSKNIRQWLELGTRSQETAHVSGR

SEQ ID NO: 43669 - protein, 457 aa, unknown
  TnpB Polypeptide
MYSIYQIVLKDKEINKTFNDWSFVGHYLYNETLFVIRNLFTGLSKDYNKATDNERFVIDDVIKAFYLYDSPNSIGTRNKVPSYKFLNYYFAVYKNSENYRYLPKHTAQYIIKLALGNFRNWLKAIREYKVNPFKFKGKPKMPGYKKESTTFGISNQEATIKKKKHSWELKLPSKEKYKPMYISLNIDLKGKRLKEVTVNKYYGYNKITLITENIIGFTPIEKDKTVKAGLDFGVNNIVAMSTNTGKSLLVKGNVIKSKNQWFNKMIAKNLRGQTIGTDNKPVSSKALQKIYMKRNNYMRDMLHKIAKKVIYWCVNNDVGVLVLGRSNFWKQKVNIGKSNNQNFVQIPIYILIGYIKDKAYMNGIEVIEQEESYTSKSSFLDMDYIPVYKKNDDTKYVFSGTRKSRGLYKTKNKMIINADLNGACNILRKKFPDEKFELENIEYLQSPEVYKIDKIVA

SEQ ID NO: 43670 - protein, 414 aa, unknown
  TnpB Polypeptide
MLIHKAYKYELKPNKTQLALFNRYAGCARFIWNWGLARKKELWEKEQKSISAFSLHNELVELKRTDENYKWLYDISSDIPITTLDYLDKAFQNFFRGLKQGRKVGYPKFKAKGRYDAFTLRGRKNQKAIEVFPKAVKLPKLGVIRLKEKTDNFKADRILRATVSRRADRWFVSIIVELEIPEPEQPDGEPIGVDVGLMHFAVLSDGTKIEAPKFLDKSMKRLKRLSRQLSRKKKGSNNFKKAAMKLARLHMHVSNQREYFLHNLSKELVCKHKAIVIEDLAVKNMVKNDHLSKSISDAGWGEFRRQLEYKAQWYGSEVVVADRFYPSSKTCSKCGYVLPKLNLSVRIWECPNCGEIHDRDINAAKNLVKWYNININNGTEVSSGIYACGDRSCGGTDLVGSTSTRSLKQEADCS

SEQ ID NO: 43671 - protein, 414 aa, unknown; identical to SEQ ID NO: 43670
  TnpB Polypeptide

SEQ ID NO: 43672 - protein, 453 aa, unknown
  TnpB Polypeptide
MQQIITAKLKLITTSEQFVALRETQLAYRDALNVVSRYAFEQGKTSNVTKLHKGMYTELRVRYGLPSQLACSVERQVAATYKGLWTKLLKNVEHRHAKITKKRFKGLDQPPHYSSPTVQYTYERDYTFQRNQQVSIGTLNGRISISYQGYDQHTALIRQGATIGDAKLWYDQSRKTFYLLVSLSIDVPDLPPACLQEVVGVDVGIRYLAVTSTSTGKASFHPGKQTRHQANHYARLRKRLQKKGTRGAKRRIRRIAQRERRLKLQANHTLAKQIIKEHPHTLIGLEGLTDIRERTRRRKRKRKKHGKGFERVSSKARKANRVYSQWSFAELHALISYKAVLSGSLAVKVDADYTSKRCPMCGHTAEENRPSKGLLFVCQNPECGYTLHADLVGARNVTLRTLLVRQDWIRTGCLSLIPDASDREAKAARLSRYAELRWSPDVTTSLRSLSGGD

SEQ ID NO: 43673 - protein, 440 aa, Propionimicrobium sp.
MLEAVKVALDPSPAQQRLLLSHVGGARFAFNACLAHVKACIEQNVKPPWSFYELRKWWNANKNLLAVNTDTGEVWWPQNSKETYSSGIEALAKGLSNFFDSKKGVRKGRKVGFPKFKSKTKSVASFAYTTGSFGLIPGDPKALKLPKIGRVHCFENVAARVGQARILRMSVSYRQGRWWASLTIEADNPTPTRKARLDPVGVDLGISHLAVLSTGEVIENPRPLKNSLTKLKKAQKSLSRKTKGSTRRRQAKARLSKVHARVTNQRTDCLHKLTTRLASTHHTVCIEDLNVAGMGRNHHLAQAIYDASFGELRHQLEYKTQKFNTQLKVVDRFFPSSKQCSGCGAVKTKLSLATRIYRCQDCGLAIDRDLNAAINILVAGSAPETINAHRGDIRPKTLKRLGADSAEVRTKQPAQVGIRLGADLGNEVIQTKSNKFVTVI

SEQ ID NO: 43674 - protein, 443 aa, Propionimicrobium sp.
MARRKSVPENLSDEDRLAKNARIKATIAATKARRAKMDCRTFQIKVDASHLSHAQREAIARMFLEAKWLKNSCIANSRFDRAYLKELGGQVQVKTPAGMEAREFKVLGGQLAQAIVDELRSNLKALAVLKAKGHKVGRLRFRRQVNCINFPQYGNSHKVNRERNRIKLANIPGWLRVRGLQQLPAEAEFANAKLLDRPDGLFVKITCYTNKQKQDFQPETVIGLDMGVKTHLTLSNGVKIDALVEESERARRLRRKLTRQVKGSNNWHKTKRLLDHVLAKQTNQRNDIANKIVAELTRNEVIYFQDEPLKQWFKRDGYIRCGKRLQGSILGRVKAKLAAHPRAVMLNQNAPTTATCVCGHQTPHNPDKRVFACPKCGYRADRDIHAAQNMIRLGQSLNVPTVERSRTLVDKPIRPPATMNLASVIADGKVWVKQEAPTSLALG

SEQ ID NO: 43675 - protein, 470 aa, Propionimicrobium sp.
MIYMARRKSAPKNLSDEARLAKNARIKAAMAETRARRASMDCRTFQIKIDASHLNHAQREAIARMFLEAKWLKNSCIANDRFDIGYLKELSGQVQVKTPTGLETREFRVLGGQLAQSVITELKANLKTLAALKAKGHKVGRLRFRRQVSCINFPQYGNSHKINRERNRIKLANIPGWLRVRGLQQLPAEAEFANAKLLDRPDGLFVRITCYTNKQEQDFQPATAVGLDMGVKTHLTLSSGVKINALVEESERARRLRRKLTRQVKGSNNWVKTKRLLDRVLAKQANQRNDIANKIVAELTRNEVIYFQDEPLKQWFKRDGNIRCGKRLQGSILGRVKAKLMAHPRAIMLNQNVPTTATCVCGKRTRHTPDKRTFVCPKCGYRADRDIHAAQNMIRLGQSLNVPTVERSRTLVDKPIRPVATMNLASVAAIGKVWVKQEAPTYASVGVVHSYRTVCLAATRRSAEQENPAG

SEQ ID NO: 43676 - protein, 347 aa, unknown
  TnpB Polypeptide
VIVTLKYRIKDSASSKTLNKMAQSINFVWNYCNEVSAKSLDYNGTWLSQYQLQTLTSGCSKDLGINASSIQEVCREYVNRRNQFKKRKLNWRSKKSLGWIPFKFNNIVINGDEAIYCKKVFKFWKSREVGKIKIGSFNQDSKGNWYINLVCEIANSNLEKTNKSIGVDLGLIATATYSDGSSYEGEKPIRKYTNKLAMAQRANKKKKVKSIHKKITNIRKDSISKETTRLVREYDFIVVGNVSSKKLTKTKMAKSVQDVSWGIYKSMLAYKTIRFGKELKVVKEHWTSKTCHVCNNVANFGGLSGLSVREWTCSNCGKTHDRDVNAAINILRIGHDTPIKGILRTCA

SEQ ID NO: 43677 - protein, 433 aa, Streptomyces sp.
MSRFRMYPSPAQAEQMLTHCAHARYVWNLAVEQHAHWRRWRRSAPGFVEQCRQLTEARRENEWLGSGNADVQQQALKDFARAKNARFTSGFGEPTWRRKHVHEGFRVIGTDRVPEHHADGSAKLNAKTGRQVMGRSVVVQRLNRRWAQVKVPGCGWVRFRLSVRGKGARLPAAKTFRVIFRSGQWHIAFAVVPEPVPAPGTDTVIGIDRGVTVTVALSDGRKLNCPQLTLKERARIRKHQRRAARARKDSARKSAEYAKVARLKAREANRRKDWCEKTSTMLARSYDLVRFEKLNIKSMTRSAKGAVEQPGRNVAQKSGLNRAILAQSWGLLRQRTGHKAPGRVEDVPAPYTSLRCSACGWIDKNSRKSQAEFVCSSCGFTCNADSNAAINVAAGQGGIPRPRRTAGAGGTTPPIKRSSVREPQPTWVGIPLF

SEQ ID NO: 43678 - protein, 542 aa, Streptomyces sp.
MADLRPITAPFVAPGPSGVAVRGRLRDLTPEDKKVLRTVGAHLGSLASKDLKARCRDGLEHSAQSWAARKRELTAESSSRWAGSITKATHDQWALARRGQAAHTQSLEAGVTTIRHRLALPVGKKGTKRTPGGYRCAHEWFHKARRLHVLENRLDQVRADREAGRVQVVRGGRRLLGTRHHLEQAQLTEAEWRERWEAGRRFLRADGESGKRFGNETIRITPEGEVSIRLPAPLADLCNAKHGRYVLAAKVRFPHRGQEWADRVEANRAVAYRIHYDTGRERWYVDASWQIPPTLPIPLEAALVEGVIGVDTNADHLAAWRLDTHGNPVGRPRRFSYDLSGSAPHRDAQIRHALTRLRNWAKTCGVKAIAVEDLDFQAEKTREKHGRKRRFRHLVSGMPTGRLRARLASMADATDIAIIAVDPAYTSKWGAQHWQQPMTGPTRTTTRHDAASIAIGRRAQGHPIRRRTAPPRAHQSDMHGHRTDQADRRAPGREEPRPRTPGPRTRSVPPNAASTRATRTSTTARGVRGDQAWVQDSLLLTD

SEQ ID NO: 43679 - protein, 296 aa, unknown
  TnpB Polypeptide
LNAAYANFFRRVKNPKIKEKGFPNFKRKNAKNSFRVQCVNSNIKVDFKRKKVKLPKIGWINYHDPRIIEKLNIHSATVSKTTTDKYYVSILYDVEIPEPKQLDLKAKDLKVKGLDMSLTNFFVDDEGHSPMYDRNYRKFEKRIQDIQKRLSSETKKCKKAKLRKRLSKVHEHIANKRHDFIEKLSCKLVHENDVIVVETLSLKDIAKFRTWEERKNSSDKSNHGKSTYDLGWGIFLNRLKTKAEENGKMIIEADKWFASSKTCNHCGYVNKDLAIEDREWTCPKCGSKMMRDMNAA

SEQ ID NO: 43680 - protein, 543 aa, Streptomyces sp.
VGELRSIAPTFVASGPSGVTVRTRLKHLTPGDEKVLRLVGAHLGSLASKDLKTRCRDGLSHSGGAWAVRKRELTPVSSSRWAGSITKATQDQWALARRCQSAHIHNLEAGVRTIEHRLALPVGQKGSKKAPGGYRSQREWHAKSRRLRVLQDRLTAARADREAGLVHVVRGGKRLARTRHHLDAAQLTESAWRRGWEAERWFCQADGESGKRYGNETIRVSPDGEVSIKLPAPLVHLSNAPRGRYVLACRVTFAHRGGEWTDRVAVNRAIAYRIHLDTGRDRWYLTASWQIPPTPAIPIEAALAHGVIGVDMNADHLAAWRLDIHGNPTGSPRRFFYDLTGTAEHRDAQVRHALTRLLHWARTCGVKAIAVEDLDFAAEKTREKHGRRKHFRQLISGMPTAKLRARLASMADQTGIAVIAVDPAYTSRWGAQHWQKPLTTTIRKTTRHDAAAVAIGRRAQGHPIRRRTTPPPQHRSDAVGHRTVQARSGVPGREGTRPRIPGPRTRSVPPGRGANAGHQNAQHRPGRSAEHETWQQAPLPLSL

SEQ ID NO: 43681 - protein, 404 aa, Paraburkholderia sp.
MEILVAFKYELMPTGQQARSMRRFAGSCRFVFNKALALQKERYESGEKKLGYAGLCKQLTEWRNAGGIPWLKDSPIHPAQQALKDLELAYSNFFAKRADFPRFKKKGIRDSFRYPDPKQIKLERENGRIFLPKLGWIRYRNSRLAVGTLRNVTVSSNGSKWFVSVLMRREVEQPRPQGPSIGIAVGVACFATLSDGALLTPLNSFKKHEQRLAKYQRRMARKTKFSNNWKKAKDRVQRIHSSIANVRKDFLHKASTQISKNHAIVCIDDLQVRNISKSASETVEAAGGRVAQKKGWNKAVLDRGWGEFRRQLEYKTRRKGGEFVAVPSAYTSQTCPCCGHMSRKNCRTRARFACVSCGYENDTDHVGAVNILAAGHAVLACGEPVLSGRSGKQEPIEATAQSIA

SEQ ID NO: 43682 - protein, 403 aa, Paraburkholderia sp.
VLPEIKASRPEFVELGSHALQQTLRKLDLAFQAFFRRVKAGQAPAFPRFKASKRFSGFCYPDPAGWKLAQNGTRGATIRIGSGKDGMSIRARGRHRFGDGAKPDDLTITRKNGKWFASVTLRVSADACARARSGVAHRGVDFGLNEWATFDNGETIANPRFIRNEMPRMAELQRQRARKKRGSIRYKRLGKQVAKVHERIGNLRREFLHQTTSHMVASCAVIATEELRTKNMSRSAQGTQDKPGRMVKQKAGLNREILSAGLSMAHNMLAYKAVEAGTRLHVSNTRLLKPSQRCAACWKIVPKTLAQRMHVCTHCGHTAQRDQNAASVVLIDAHTPGTGVAARLKPLAQQRQVKVRDPRNLRYSGDRRLAVGEFISGSLNRACTRASHCRMRSGFGSAQKLHV

SEQ ID NO: 43683 - protein, 425 aa, Paraburkholderia sp.
MQRLQAFKFELMPNGDQQRDMRRFAGSCRFVFNKALALQKQNHEEGGKFIGYVAMAKRLTEWRNGAETPWLKDSPVHPLQHALKDLERAYKNFFTKRADFPRFKKKGQRDSFRFPDPKQIKLDQGNSRIFLPKLGWLRYRNSRDVLGMVKTATVSLVGGKWFVSIQTARELEQPVPQATSAVGIDVGIARFATFSDGTFLAPLHSFKKHEARLRRYQRAMSRKTKFSSNWKKAKVRVQRIHTCIGNVRRDYLHKATTTISQNHAMVCIEDLRVRTMSRSAAGSTEAPGKNVRAKSGLNKSILDQGWSEFRRQLDYKLAWNGGWLIAVPPQNTSRTCPRCDHISAANRKVQARFACVRCGFEANADHVGAINILSRGMQILRDEGQDAGDASPGCASTARIACGEPAQSGRSAKQEPAEATAQINA

SEQ ID NO: 43684 - protein, 381 aa, unknown
  TnpB Polypeptide
VTVVKKSVRVRLYPTEEQKILINQTIGCARFVYNQTLADCKQSYEQSKHFPSQNERIKNLVPLKEKYKFLKEVDACALQQSVRDFNSALNNFFKNRNHFGFPKFKPKRNLKQSYRTPHRGGKADILDSKRIKLPKLGEVKTKRFNIPKVYKIFNITVEKTNTNKYYASICIETEVQPLPKTGKQVGFDLGLIDLLIGSDGTRFERPKFNYRNKDKLAEEQRKLSKMRTKLERADLNLDECKNYQKQKHKVAKLYEHIANSAKDFNHKLSRKLVEDYDLLAFEDLNIEGMKKNHYLAYSVSDVRWSQLLNFVRYKCNWYGKEFKQVDRFYASSKICSCCGAYHKDIVNSLSVRDWTCPDCGSHHDRDANAAMNILTQALGVA

SEQ ID NO: 43685 - protein, 370 aa, unknown
  TnpB Polypeptide
MKLTLKIKLLPTDEQSNLLLNTMKEANTVCDAISKVAWEKKVFNNFKLHHEVYHTYKPKFKLSSQMLIRQIAKVADAYKIDKKTKRKFRQLGGITYDNRIMTYKSKNLVSLWCIGGRQKINFVCHNMKYFPYIKGEADLVYKNEKFYLFQTVDIPDTEVEDVEKFIGVDFGLKTIAHTSDNVEFSADGLNEYREHRQKVRSSIQSKRTRSSKRLLKRLSRKERTHATVINHTISKKIVESAKQQGKGIAIEDLTGIRFTSKKRNKKFRTKLGKWNFSQLRVFLEYKSLLNGVKLVVVNPRYTSQTCNNCNNIGKRTNKVFQCTNTNCPTTTIDADYNASLVIAGLGVAINQPERQTMFCSIASHLSLSKT

SEQ ID NO: 43686 - protein, 408 aa, unknown
  TnpB Polypeptide
MMTNQAFRYELKPNNHQAGLLMRCCGVARFAWNWGLAQRKELYQTQIGQNRFTSAIAQHREIVVLKQDEFLWMYEVSKCIPVQALRNLDRAYSNFYRGLKTHEDIGLPKFKKKGKGDSFYLTGIIKVLNKSIQLPRLGKIRTKESTSKLKGRILSATVSREADRWYCSLCVEANRKETLPSTNEIVGIDLGITDFAVTFNGVEYSHEKSPRPLRNKLKKLRRLSKQQSRKKLKSNNRKKDNLRLARLHRRIRNIRKDYINKITTELTKTKSVIVIEDLQVKKMTRKTNRKRHLSRSISDVGWGEFRRQMEYKSIWYGSRLIKTPKSYPSSKMCSVCGYIKMDLTLNDRVWICPECGTEHQRDENSSRNMRNYGLRILSTESCSGSYACGETIRPIGASLAEAGSERIL

SEQ ID NO: 43687 - protein, 480 aa, Escherichia sp.
  misc_feature (282)..(282): Xaa can be any naturally occurring amino acid
VKRLQAFKFQLRPGGQQEREMRRFAGACRFVFNRALARQNENHEAGNKYIPYGKMASWLVEWKNATETQWLKDSPSQPLQQSLKDLERAYKNFFQKRAAFPRFKKRGQNDAFRYPQGVKLDQENSRIFLPKLGWMRYRNSRQVTGVVKNVTVSQSCGKWYISIQTENEVSTPVHPSASMVGLDAGVAKLATLSDGTVFEPVNSFQKNQKKLARLQRQLSRKVKFSNNWQKQKRKIQRLHSCIANIRRDYLHKVTTTVSKNHAMIVIEDLKVSNMSKSAAGTXSWLVEWKNATETQWLKDSPSQPLQQSLKDLERAYKNFFQNRAAFPRFKKRGQNDAFRYPQGVKLDQENSRIFLPKLGWMRYRNSRQVTGVVKNVTVSQSCGKWYISIQTESEVSTPVHPSASMVGLDAGVAKLATLSDGTVFEPVNSFQKNQKKLARLQRQLSRKVKFSNNWQKQKRKIQRLHSEAGCFSPIQKAGTE

SEQ ID NO: 43688 - protein, 306 aa, Escherichia sp.
RAAFPRFKKRGQNDAFRYPQGVKLDQENSRIFLPKLGWMRYRNSRQVTGVVKNVTVSQSCGKWYISIQTENEVSTPVHPSASMVGLDAGVAKLATLSDGTVFEPVNSFQKNQKKLARLQRQLSRRVKFSNNWQKQKRKIQRLHSRIANIRRDYLHKVTTTVSKNHAMIVIEDLKVSNMSKSAAGTVSQPGRNVRAKSGLNRSILDQGWYEMRRQLEYKQLWSGGQLLAVPPAYTSQRCACCGHTAKENRLSQSQFRCQVCGYTANADVNGARNILAAGHAVLACGEMVQSGRSLKQEPTEMIQATA

SEQ ID NO: 43689 - protein, 184 aa, Escherichia sp.
  misc_feature (184)..(184): Xaa can be any naturally occurring amino acid
SWLVEWKNATETQWLKDSPSQPLQQSLKDLERAYKNFFQNRAAFPRFKKRGQNDAFRYPQGVKLDQENSRIFLPKLGWMRYRNSRQVTGVVKNVTVSQSCGKWYISIQTESEVSTPVHPSASMVGLDAGVAKLATLSDGTVFEPVNSFQKNQKKLARLQRQLSRKVKFSNNWQKQKRKIQRLHX

SEQ ID NO: 43690 - protein, 400 aa, unknown
  TnpB Polypeptide
LLKAFKTEIDTTEEQKQKIIRSIGIARFLYNQYISYNIRRYRMYQRGMLDDNQKSFISAYDFDKYVNNVLKKKEGFEWISLCGSKARKKAIMNAEMAFKKFFQKKSKFPRFKKKSRQDVKIYFPKDNKGDWKIWRHKIMIPTLKHVKLKEYGYLPVGLNASSGTVSYEAGRFYVSIIVDIDENSKYNKDLKISYKQYSSGIGIDLGIKDLAVVSNGKVFKNINKSSKIKRLEKRLKREQRRFSRKLELKKRKGGTATPSANIDKQKLKVQKLYRRISNIRVDYENKVVHEIVEQKPRFITIEHLNVKGMMKNRHLSKYVAAQRFFSFREKLERKSKNIGIELRIVDRFYPSSKTCNSCGHIKKDLRLKDRIYRCEECGYIEDRDINAALNLRDAQEYQIA

SEQ ID NO: 43691 - protein, 391 aa, unknown
  TnpB Polypeptide
MLRVYRYLLRPSRTQAAAMFRSLDLLRELYNGALQERRDAWRCQGHRVSAYDQMRQLKAIREERPEFAGIHVHLLQDAITRVDRSFAGFFRRCKNRSGKPGYPRFKGRGRYRTFTFKDAAHRNGAALVAGGNRVRLTGIGNVRFRQHRPMEGRTKQVSVTLSGDGRWYVAFVCDQVPIHPLPPTGKEVGIDLGITCFAALSDGPPGIDNPRPMEKAQWQLARSQRRVSRRKRGSSRRKKAVALLAQRHDRIAAIRRDHHHNAALLLVRNYDRIGIEDLEVRGLARGMLAKQVHDAGWGQFTTILRAKAESAGREVVAVDPRGTSQECSACGREVNKSLAVRVHNCPYCGLIVDRDINAARNILQRMGRIRRGEVADVRLLQDPRSPRLATG

SEQ ID NO: 43692 - protein, 341 aa, Cyanobacteria sp.
IKRVDFAYTRFFKGLGKYPRFKSIRHYSGWTYPCISGWKIETEGKNGYLTLSNLGRIQMRGKARTWGKPTTCTIVFRNGYWYASITVQCQPQRETGTGSVGIDLGCKEAITLSTGEKIAKPDFLEAGQNKVKNASKRLRRKRSCNRNKRVKASRRWKKERLKVSKLQRKVTRQREDWLHKTTSNIVSGNSLIAGEQLNVKGMTASAKKGKRKKQKAGLNRSILEVGFGIIGDLLTYKAAEAGGFYLESPTRELKPTQRCAQCWELTPKTLKDRTHFCSNPLCGHIEDRDVNAAQVNVIWARGQELASLDGESLSSTSCSKHEATGDEEASETSSMRLAWAG

SEQ ID NO: 43693 - protein, 415 aa, unknown
  TnpB Polypeptide
VANYTYRTAITRLKATTEQQERLEETISEYRRGCQIATDLGWTDYTDKSALQSLAYDDIREQTELQSQHAILASHAAAEAMSGCERRLERGRPVSKPRFTSPTVQYDSRTMTLFEEGAVSLATTKSRVRCSLVLPEDDDGYQWQYLEDDAWKITESSLTARDGDYYLHLGFRRHMTSPEHETAEDGTVLGVDLGVENIAVTSTAQFVAGGEAKHIINEFETVRAGLQQTGTQSAHRTLQSVSGRQRRYLRDLTHRVANNIVDEAKRYECTTIAFEKLDHIREETTGSWGHVWAFRRLIEYVEYKAHEVGIGVQQVSPAETSIRCAECGHTDKNNRPERTRFTCEECGVEANADYNAAKNIGMRCIRRGQQSSRRAGDGQLALKSGTVTPTSGFSPYPDGFEVEFTDKSSNFTSPS

SEQ ID NO: 43694 - protein, 442 aa, Oscillatoriales sp.
VYSPKLNKSTNFPEKEVARVKKAMGVQQVLLSPTKEVEAVLQYLCRQSGKLYNSAVYFARQTFFKTGKLLTGKFDLSFEPSISKSMVAKSLPSTPMQQTLISVTEAFKGFKELRALYNEGNLRFKPKPPNYLTRSKLFKVAYPNSGGLKPTLVVDQLRFSLGLTVRRWFGISEFFLPRPSNIDCTKVKEFTILPKNGAFYLEMSYEVECQQHDLDRNQALSIDLGTADNLAACVDTLGNSFLIDARAMKAMNQLWNKKVATRKEGKPTGYWDSWLDRVTRKRNHQMRDGINKAAKLIVDHCLKHGIGNLVVGWNQGFKSNVDMGKLNNQKLVQMPLGKLKERLKQLGNLHGIKFTETEEAYSSKASFLDGDSLPRYGEKPPGWKASGRRIKRGLYRSADGTIVNADLHGAANILRKVASKLGVKLNRLSSRCLATAARIRLW

SEQ ID NO: 43695 - protein, 413 aa, Murinocardiopsis sp.
MKIVVQVRLMPTPEVASALECTLHTANDAANWLSGQAHERGETSRKALQGFAYLDLKERGLSAQPALHVLRKVADAYSTLKANIRAGNLGKPGSKRRRKAEAKPITFRGDAAQPYDDRCLSWQVDEQTVSIWTTSGRIRGVRFACSEQARKLLAEHRKGESDLAHRDGMWFLIATCEVPEAERYEPDGFIGVDLGIANIATTSTGYRAAGRGLDRHRKRQLGLRAKLQKKRTESAKRLLKARARKEARHAANVNHIISKKIVTEAERTSKGVALEDLGGIRQRVRLRKPQRVTLHSWAFAQLGQFLEYKARRAGVPLVYVDPAYTSQQCAECHHIEKANRVDQAHFICRGCGVVAHADRNASHVIAYRGETVWIAGRESRVPAPHNGVSGRRSQSSSQLGVTSRPGPLGLGSS

SEQ ID NO: 43696 - protein, 452 aa, unknown
  TnpB Polypeptide
VGECQSKHLNIHSPIKKLMSGLTKTLSFGLTIHTGSPDNLREGCIEARRIRNEFNRLDKENRDWKKIHDTVVDNANHVKNTTQLIVQKAFKEIETYHENKNWGRPYPYIHETYPMRMNHNEGYALTLNDSGDVQFRVSYKPRNFVRGTLRGSPNHLEQVKTALESDEWRVGTAEVVYRHGEWQLHVTITHKTKTVNNPENSETVIGVDLNEDCIALAAMMEDDVQDSIVIEYPDIKRVRHEYFTIKKRMQKAGQEVGRIGEENFVHDQLHKVSRDVTKWVSQFNDPVIVFEDLKGMRDSIDYGTRMNRRLHSLPFASLRDMITYKAAWKSIPSADINPEYTSQRCPCTDCLHTERSNRRKKRFKCKECGLQDHSDRKAAVCVAQEWFSVNGNVPSLDMLPRVWKVRRTASGLCEGADSHGLVTSSGVYRHGMSARDANQAREELNTVAPTVG

SEQ ID NO: 43697 - protein, 399 aa, unknown
  TnpB Polypeptide
MIVNKGFKYKIKPTENQLKNILQQGGNSRFLWNKLLEINMNKYKEEGKFNFSYSMVMDIPRLKEEFPFLKESFSQSLQTVGRQLNTALCNFLKERKTNKNIGFPVFKSKSKENDSFHCPQKWGLYKNCVQIPKIGKVQWIKHRPLQGKPKSITISQDGNDWYCSVLCEVNIKDKELKKDNIVGIDVGLKDFAILSDGTSINRERVIKKYEDKLAREQRKLSRKAKGSKNRDKQRRVVREVHKKIKNERLDFLHQTANRMIIKYDGFCVEDLAVKNMMRNHKLSKNIADVSWGEFYRQLEYKSLWNFKHYIEIGRFYPSTKKCSKCGFIKDSISLDERVFICNDCGFEISRDLNASINIKDIGIENTFGQKGINASGDDKVHAQKSRWSSMKEEKELHIN

SEQ ID NO: 43698 - protein, 467 aa, unknown
  TnpB Polypeptide
MILAHVYKLKPSQRQSQTMSDWLDMLRGLYNFALRERIEAYEQVKATVIGDFCRLDNQGECCPLTCSVSKSASHAYPWKVGKDGNHKRRSAFEMQCASLPDMKESRPWYKRVNAQAAQQTLRQLDTAFKNFFEHGRGYPAFKRRSHFRSFSYPPGVAKLNGNRAYLPGIGWLRFFNSRPVPEGFSVRTVTVRRKADGWYVSVRLENKDVPTIPTVQPNEVKTVLGVDVGIRKLAALSTGAMIANPRFAQQVERRKRIRQRRASRKVKGSKNRCKAYQRLALLDQTVEQRRTDYQWKVANKLNRQAQCLIFEDLNIKGMVKRCKPKQDENGNFIGNGQAAKAGLNKAILDAAWGALKQKSMAVAAKSGNLVWSTNPYQSSQECSDCHFVSPTNREGEKFLCESCGKLDDADTNASSNLRLRGMAELGISLEAVPRVPRKLGKSTPSELSLALAGEPGNPQQIVERRGA

SEQ ID NO: 43699 - protein, 408 aa, unknown
  TnpB Polypeptide
MSVRSAVFYLDGHLAPEARFMMEDFRLATNGAIRAGFQTGVTSRNALCKLAYRDFREDHPGMYSQHLVSAFAVAAGILKNHRRRSKKSKTGWTVRPPYVKRLMMKAENQAYKLDRKEGIVDLPIRAGLHVKMKLLVSQYHRRYLDDEAWSLGSLTLLLDRVIIAFRRISPKPYAPESVLSLDTNERSLDGVLIGEGSGIPIRAEFPNVAVIQQRHHDRRKRLQKKKANDRRTSSTLCRREGKREHRRVEYRLHQVADIILSFAKSQESAIVLEDLTGIRHKKNKDMNRRLSMWPRRELHRIIEYKAEDKGIPIVKVDPRYSSKKCPICGSIKHSRMGTEFECECGWHTDRHINASINLLQTASSKGLAGGLRFDPGAFRHDAMMILYEPAMAARSEPNGMSEEGVVGP

SEQ ID NO: 43700 - protein, 569 aa, Escherichia sp.
  misc_feature (388)..(484): Xaa can be any naturally occurring amino acid
VKRLQAFKFQLRPGGQQEREMRRFAGACRFVFNRALARQNENHEAGNKYIPYGKMASWLVEWKNATETQWLKDAPSQPLQQSLKDLERAYKNFFQNRAAFPRFKKRGQNDVFRYPQGVKLDQENSRIFLPKLGWMRYRNSRQVTGVVKNVTVSQSCGKWYISIQTESEVSTPVHPSASMVGLDAGVAKLATLSDGTVFEPVNSFQKNQKTLARLQRQLSRKVKFSNNWQKQKRKIQRLHSCIANIRRDYLHKVTTTVSKNHAMIVIEDLKVSNMSKSAAGTVSQPGRNVRAKSGLNRSILDQGWYEMRRQLEYKQLWRGGQVLAVPPAYTSQRCACCGHTAKENRLSQSKFRCQVCGYTANADVNGARNILAAGHAVLACGEMVQSGXXXXXXXXXXXXXXXXXXXXXXXXXXXXXXXXXXXXXXXXXXXXXXXXXXXXXXXXXXXXXXXXXXXXXXXXXXXXXXXXXXXXXXXXXXXXXXXXXSGGQVLAVPPAYTSQRCACCGHTAKENRLSQSQFRCQVCGYTANADVNGARNILAAGHAVLACGEMVQSGRSLKQEPTEMIQATA

SEQ ID NO: 43701 - protein, 183 aa, unknown
  TnpB Polypeptide
LIQSIGSRFSDWSLDWLHNRANDLIAEAQATDVDGIIFENLDHIRENIATGSKFQQWAYAKFVELVEYKVESTALFVDTVNPAYTSQRCSNCGFTHEDNRDDKQFECVDCGYEVNADYNAVVRLCLTGSKREAFATAKNIASRYCGYIHRGQKSRGGWATSQLALKSGTLNVNGDYTPAELLG

SEQ ID NO: 43702 - protein, 367 aa, Firmicutes sp.
MLKAYKYRIYPNNEQKIQIAKTFGCCRFVYNQTLAYRKEVYEKEKKSVSETDCNNYCNRQLKKEYEWLKGVDKFALTNAIYNMDAAYQKFFKEHAGYPKFKSKHDNHKSYTTNFTNGNITVDFGCNRVKLPKLKGVKAKLHRNFIGQIKSATISQVPSGKYYVSILVETEHVELPHINQNTGIDLGIKELCITSAGKKYENPKIIRKYEKKLVKLQRQLAHKEKRSQNYCKTKKKIALCHEKITNTRKDYLHKMSHEIISENQVIVSEDLQIKNMVKNHRLAKSISDVSWYELTRQLEYKAKWNGRKYVKIDTFYASSQLCSVCGYQNTETKNLSVREWVCPVCGTTHDRDINAAKNILEEGLRRIA

SEQ ID NO: 43703 - protein, 416 aa, Paenibacillus sp.
MFLTVKQQVKHLSKKDYVSIRKLAHVAKNLANEALYNVRQYYFQEGEYLNYQKNYALLKNSPNYKTLNSNMAQQILKEVDGSFKSFFGLLKLAKKGKYNIKDVQLPHYLPKDGYTTLVIGFVRLNGNKLVLPYSNQFKKEHSKVVITIPPILLDKKIKEIRIIPKANARFFEIQYTYEVQEEQRNLNKKKALAVDLGINNLATCVSSTGESFIIDGRRLKSINQWFNKQNSRLQSIKDKQRFGKRTTKRQNAIACDRNNKVNDYMAKSARYIINYCLEHDIGTLVLGYNETFQRNSNIGKVNNQNFVNIPFGKLHQKLKYLCQLYGITFVKQEESYTSKASFFDKDIMPTYNADDPVDYEFSGSRIKRGLYQTSAGTTLNADVNGALNILRKSNVVSLSGLYDRGEVDTPIRIRIA

SEQ ID NO: 43704 - protein, 357 aa, unknown
  TnpB Polypeptide
MYLGLQVKDRFQTDEVCAVLEYLSRSEIINDKAINKFLDKAYCIDTYRPCYATLVPKFIRGKYRVYLHLTIEGKAKPKYDRFGDPRHKFGKGSIGADIGTQTVAYTSNTEVGLKNLSERGSSIQTSERKERLLYRAMDRSRRATDPQNYNDDGTVKKGRKTWKYSNHYKKLKAKHSELCRINAINRQLAINEDANHLRSLGDVFITEPKNASKLMKRTKDTTVNSKGKFHKKKRFGKSIKNRCPSGFQTTVERKFKTSGGIYIEVPNNYRASQYDHTADDYIKKKLSDRIYKLTDGTLVQRDWYSSFLLYCYDYRTKDIDKNKCISEFDKCYNKEKALIEWIKANKIKILNSGIKIA

SEQ ID NO: 43705 - protein, 373 aa, Bacillus sp.
MLVNKAYKFRIYPTKEQEVLIAKTIGCSRFVFNRFLAQWNHTYKETGKGLTYNSCSAELTQLKKELVWLKEVDSIALQSSLKNLADAFNRFFKKQNNPPRFKSKKNKVQSYITKETNGNIAIVGNKIKLPKLGLVRFAKSREVEGRILNATIRRNPSGKYFVSILIETEVQELPKTGSYVGADVGLKDFAILSTGEVFGNPKWFRKLEEKLANAQRILSKRKKGSSNWNKQRVKVARIHERISNARTDYLQKISTHIIKNHDVIGIEDLQVSNMLKNHKLAKAISEVSWSQFRTMLEYKAKWYGKQVVAVPKTFASSQLCSCCGYQNKDVKNLNLREWDCPSCGTHHDRDINAGQNLKNEAIRLLTVGTTGIA

SEQ ID NO: 43706 - protein, 280 aa, unknown
  TnpB Polypeptide
MPKFYQDNIKIQFSNTHVKFEGFSSSRKRNKQKLNWVRLAEHGRIPTDAKYMNPRISFDGLNWWISVCVEFPDCIEKLNDDGIGIDLGIKDLAICSDGAKYKNINKSQKVKKLEKQKCRLQRSISRSYEKNKKGESYCKTNNVIKKEKLLLKRNHRLTNIRKNYLNQTTSEIVNRKPRFICIEDLNVSGMMKNRHLSKAVQNQGFFEFRKQLEHKCSDKGIQLIVADRFYPSSKLCSGCGNIKKDLKLSDRIYKCDCGNVIDRDFQASINLKAYGERFAS

SEQ ID NO: 43707 - protein, 324 aa, Proteobacteria sp.
LSLYETNAMLTTWKQEHSALTAVHSQVLQNAQERVDLGYKAFLRRVKAGEKPGFPRFRGPGRYDSFTFKQSGFRVQDSLVSLSKIGSIRMVLHRPIEGTIKTVTVRRTPTAKWYVCFSVEAEPLTLEPCPLAVGVDVGLTHFATLSTGDHLANPRFLRTDEHALAQAQRRLAKADKGTPARAKYRKVVAHIHERIANRRYDFCHQTARRLVNTYGVLAFEALQIPNMMQNHCLAKSIADVAWGQFVRIASDKAACAGRLVVQVPPAYTSQDCSRCGYRVPKPLRQRVDQCPACTLSMDRDHNAAINILRLGQQSLGLVPRSPWL

SEQ ID NO: 43708 - protein, 395 aa, Atopobium sp.
MGVSMAYEIRIYPNAAQRELAERTFGCCRWVYNRCLETRKAEYEKTGKSPSVYQLQKLVTAWKRTDAPWLAEVDSHALQQAAVNLGRAFDGFFRRCRAGGKPGYPRFKSKRDTRQSYRTNWGISVPDARHIKLPKLGLVKARISRPVKGRIVSATIKRVPSGKYFCVLGVEDAPVEEWPEARTPVMGVDAGVKDLATRSDGIKIANPKALAKGERKLAREQRRLSRKRKGSASRRKQKRKVARIHERIANQRKDAIHKATTEAVRESQAIAVEDLDVRGMEKNRRLAKSVADASMSEMARQLEYKCAWHGRRFVKVSRWYPSSKMCSCCGHVLEELPLSVRAWTCPVCGASHDRDLNAAVNIAREGARLLNKADGTAGLAGTGDAKAPRTLVEQA

SEQ ID NO: 43709 - protein, 383 aa, unknown
  TnpB Polypeptide
MKKHFAHKIRLYPTKEQSILINKGIGCNRLMYNLMLSERKEVYELNNKNKDLVYNWKYKTIKEIKKEYPFMDEVDSQLFNWTDINLKNAYSNFFKSLSGKRKGGSVGFPQFKKKKEYGNYTTSNINNTIRYIDDTHIKLPKLGSVKFKNKRDLDGIIKQVTISKTPTGKYYCSILLEQDVEEPIKIELNNNSKIIGLDMSLSNFFIDSNGNSPHYTKKYKKYEKKLKRLKHILSRKKKDSNRRKKLRKSINRINEKIHNQRTDFIHKLSTSLIRENDVIVVESLNLKAMSQCLKLGKSVMDLGYSQFINQLQYKSDWYGKHLVQADKWFASSKICHNCGFKYTDLTLKDRKWVCPNCGTTIDRDENAALNLKQLGIGYVHKCI

SEQ ID NO: 43710 - protein, 364 aa, unknown
  TnpB Polypeptide
MKSVKTVSFCYKPTAQTREVLETFRMMVNHAIQIALEEKVKGRLNLRNRIYREFRQRYEVHSNYPYSVAEVAWSIIKKHNRWHRKPSAERLIMKLDNESYSLNYSIICLPFRMGEPRIFIPLHYGDWQRSFLMDATLKRGSVTMTESTIIIAFSKETTVVEPLMKVGIDLNEKSVVLSDGARYDLSKVGRLHTEYGVRRRGFYARHPVDQRLKRKFCKDSREKVRVRQFLHLVSKKITEGAKAKRQAIILEELKGIRYVHERGNGESRGRRRRISQWPFGLLQQQIAYKAAWAGVPVEFVDASNTSKECSHCGYLNKGLKMTEREWRCPSCGVTLDRDLNAADNIERRGTIPCLAVVRSGAQGG

SEQ ID NO: 43711 - protein, 379 aa, Halogeometricum sp.
VEYRRTAVIKLDTPEGADPLLRETVEQFKHCANTASEWCWHGDDGYHVTSKAKAERALYDQLRDETNLTANLVQKGIRRAVEAIKSGVERLKRGENTSRPYFSADSAVYDKRSATFHRDHVSLSTVDGRIECDYILPDDSENRRPSTSPTRTSSFGWRTYSIETVTGRARLDAESRSEGTSESESKHRTVLGVDLGVNNLAVASTGRFWSADEFNHWRNEYEKRRGSLQQCGSRHAHANIEIVGRKSTGRFEIYLHSVANELIEEAIENDCSHIVFEDLTHIRENIPEATWQHVWAFRRLYEYVEYKARSTASEPYRLTRGTPRSGVRRVGLPMMTTGLVKRSVVRSAGTRTTLTTTLQRTSVCSISVVGKTQTTEAHP

SEQ ID NO: 43712 - protein, 394 aa, unknown
  TnpB Polypeptide
MESLTSKRMDMKARKLTIMKTYKFKLYSNHGNRELQQTIDSHAEVWNHFVALCRRYYAIYSTYPGKKSLMRHLTKLKRLSRYTHWNLLPSQSLQDIIQRLDKAYTQMFADRKSGKRCGLPRFKKRFRYKSYTLKQAGWKLLQNNYIRIGKRIYRYFKSQDILGTPKRCTVKRDSIGDVWIIIVTDHVEIPLNRPTTGNSAGFDFGLKRYLTGSDYSDYDSPQFFKRSLNAIKRANRNHSRKVKGSNNRERARLNLARRHRRIANQRQDFHWKLAHELTDRYDWISLETLNMKGMKRLWGRKVSDLGFYDFVQTLKYINSKKQNREVRFIDKWYPSSRTCHVCGIVNQALNLRDRTWQCPSCHTELDRDRNAALNIHRVGASTLSEEVVSPNSPG

SEQ ID NO: 43713 - protein, 515 aa, Xylanimicrobium sp.
MFAAVRHQAPMNQGKANDLAPLFDAYRAVLPAVIATMRTDLLRGNPVSSWPTVKPADFASPLSGRHFKSVWNMAYAAFDAWRATLKDTVRATITGSSLDEDTRTVLYRVNRAGAWHVPGLHLDWQVTDTGELVVPPPKNKRKEFEAATIVSLPVDPQTMFLARHIVAHARTRHPFPNLSRVHTIKLDSPVAPIHHRPGSLFPWWVRVSTLHAGKPVWVPLTRNPRLDTWLGQPGAVLAGNVQLHQGTDGQIGVSLVVKAPNVTERDGEHYLGLDWGACVLFATSDGRLYGRRMLTRLRELDAVLTAHTADLNRRHIKWKTDRYYRVLHAKITGYVTNEVGRVLNLIANDTTVTGLVVEKLDFRHGGLSKTMNRIISIAGRATVKKKLDRLTETHGITHTGVQSAYTSQQCSHCHYTHKSNRRTRDRFRCKCCGLSLHADINGARCIQARRSDQEINTSNGAYKSGRDAILRTLTTRHTQTCHRDHTQRTRPLTGRRDGQDQHNPALATTASPKIP

SEQ ID NO: 43714 - protein, 406 aa, unknown
  TnpB Polypeptide
MMTRKGYRFLLKPTAEQAELFCRFAGSSRFVWNKALECQKSCLKNGKGVFSYAEICGRLVEWKDEFHFLKEVHSQPLQQSVKDLSLALKHCFDGSKGFPKFKKKGDHDTFRFPQGTKLDNKKVYLPKIGWVKFRKSQEIEGTIKNVTVTRSMGNWFVSIQVEMDVQDPMHPSKNEVGIDMGVTRFATLSDGSFVAPINSFGQVRSKLAGALRKLARKQKYSNNWRKQKRKVQRIHSKIAHVRKDFLHKLTSSISKNHAVIVLEDLKVKNMSASAKGTIEDPGKNVKAKSGLNRSILDQGWHEFRRQLEYKQQWRGGQVILVNPSHTSLQCSECHHRAKENRVSQAEFKCVMCHHEEHADLNAAKNILAAGAPCKPVEILSRMLLKPRNLPSFRAERTSTKSPCLHG

SEQ ID NO: 43715 - protein, 382 aa, Rhodococcus sp.
VQLRYQFRVYPTPGQQNMLARSFGSARVVFNDALRARQDAYETGVKLSDTDVQKQVVTAAKKTPQRAWLAEVASVVLVQACQDARRAYRNWFDSMSGKRKGRRVGAPRFRSRKDNRQAIRLTRNGFTIRPNRKLYVAKIGELKVAWSRDLPSDPSSVTIIKDSAGRYFASFVVEVDQAPLPEINTEVGIDLGLTTFAVLSNGKTITSQKFLRRAERTLRKAQQNLSRKEKGSNNRAKARLRVAKAHAKVADSRRNFAHQQSTAIIRDNQAVYVEDLAVSGLVRTRLAKSVHDAGWAMFTTMLEEKAARYGRTFVKIDRWFPSSQLCSACGVVDGPKPLSIRQWTCAACGAVHDRDLNAAINILAAGRAERLNACGGTVSPAA

SEQ ID NO: 43716 - protein, 402 aa, Streptomyces sp.
VIRAYKFRLRPTVRQCQALAEMLRDHCSLYNGALQERRDAYRHASKTSITYRQQSAQLKEIRTFAPESQGRWSFSSQQATLRRLDKAFQAFFRRVKAGAKPGYPRFRGAMWFDTVEFPKDGDGCRWGSTPHDPVTRVRLQGVGHVRVHQHRPVKGRVKTVSVKREGRQWYVILSCDNVAAEPLPATGAVTGIDMGVTHFLTTSEGAHVENPRHGKRNADALTEAQRALKAFPRQQRESRSARHRRAVEKVARLHRKVRRQRLDHAHKAALALVRSYDQIAHERLNVANMVRAPKPKPDLETPGAFLPNKAALKAGLNRTILDAGWGVFLGVLTQKAESAARVLIPVDPRNTSRTCPKCGHIDAKNRDGERFQCTSCWHIDHADRVGARNIALRAGLALPDVA

SEQ ID NO: 43717 - protein, 393 aa, unknown
  TnpB Polypeptide
MFYVYRFRLYPTEEQVEFLNRQIGHCRFVYNKLLEIAKESYEKERKKWNYYEYKKLLPELKKEFPFLKEANSQSLQESVKWLDRAFKNFFKGLAKFPKFKSKKRVNSVSIPQHFRIEGNRVKIPKLKTPIKFRKHREIEGKIKSISITKLPSGKFYLNVLVDREIEPLPETGRVIAIDVGLTHFCTLSTGEKIENPKHLSQTEKRLKKLQRKLSRKVKGSNKYRKLQKKIAKLYEKVVNQRNDFLHKLSKKIIGDNQAVIVEDLNIKGMLKNSNLLKHIADASWRKFISYLEYKAKFYGRKLIKVNPLYLSSKLCFVCGYKNENLKLFDRRWRCPNCGTEHDRDYNATLNLLKEGLKLLKESLTLRAVGVERPELTPVESAVALVEAGSSSFQ

SEQ ID NO: 43718 - protein, 229 aa, Halobacterium sp.
VVRVRRQPPPRRRSRNTRLRDGRRSHVLGWHHHGDRFHTHHIHVPGRGNLERHAHHYRCLGKPARPPSRAYEYERRRGNLQQTGTRFAHLTIKSIGSRFARWSADYLHRVSKAVVREAVENDCTAIAFENLTHIRERISNLSKFQQWVFRELQRHVEYRAEEYGIDVETVAPAYTGQRCSHGDCGFTHEDSRDGDEFECLKCGKELHPDYNAARNNGWRLLQHWLTSGS

SEQ ID NO: 43719 - protein, 418 aa, Halobacterium sp.
MEVRRTVPVTLDVDSDDAALLKDTVDTFLWSAQYVVDHAFQGEYVTTSKTQLDDETYDDVREATNGFNGGLVQAARNKAAEACKSVVARWKNGKKASKPRMTSPHVVYDHRTATFHDEYVSLATTDGRIEADYVLPDEDSDTPHAEYLYSDEYEITGAELHRKHGEWQLHIHCKTDVESDTSTQAATENGTVLGVDFGVNNLAVTSTGTFWTGDEFDHWRREYEKRRGDLQECGTRWAHENVQAVGRKEEGRFKMMLHRTSNELVAEARDHGCSVIAFEDLTDIRERTGASWGHKWAFNRLYEYVEYKAAEYGIDVAQVDPENTSRRCSHCGFTHPDNRDSESFNCQKCDYENHADYNAAKNIGLRYLRRNQTGGDEGAPLGVRLNSGALNVNGEYESPADVSARTGVHAESHPFTGG

SEQ ID NO: 43720 - protein, 370 aa, unknown
  TnpB Polypeptide
MGGYIVKIAFQDMESVMAMRFRYEASEELSSLFEEFRLMCNDAIRIALEQKPKSRFMLIELAYPRLKEYGLHTHYILSACEVAYSACKNQKRKSRPCVRRPFIKLDSQTYTLNHLIVRIPTRPRHFIYLTLHSSDYHLSFVDDPRLKRGSITLTDSALAIAFTKKSVEISPRGRMGIDVNERNVTWADSAGTVRKEDTSVVAELKERYKALRAKIAQGTSKDRRIQRGLLSKYGRRERDRTAQAFHRVTKRIVEHAKANGQAIIMEKLKGIRKLYRRGNGQGSSFRGRMNSWTFREIQRQVEYKARWEGIPVHYVNPRGTSRKCPRCGSSLTELEGRRLMCPSCKQVEDRDDVAAMNLVACAVPQARPGG

SEQ ID NO: 43721 - protein, 417 aa, unknown
  TnpB Polypeptide
MQYVYRFILNTDVSTKDTLVEMCSVSKCLYNQALYEIKQTLKKENKFLFYQDLEKIMKTKTNLEGNINYRLLKAQVSQQNLKTLDKSIKSYLNSLKEYKIHPEKFTGKPELPNWNKGKYRQLIFTNQSAVIKNGNIFVSKTIKFSIPQYDRYKDLISNFNQIRILPKRRGTALECEIVYEIPEMHFDLDYERYASIDFGVDNLVTFVNDYSNPVIYSGKQIKSINQYFNKRLAKLNSSLKKCQDTYTSKQKTNLYEKRERRINDIFHKVSKHIVDELVKRNVGNLVVGYNSGWKDSINLGNKNNQTFVQIPYAKLVKYLKYKCESCGIYFIKHEESYTSKCDSIALEKIGKHEKYSGKRIKRGLFQSASNKLINADVNGAMNIMRKVVDDSYASMIINSGRLFLPLKFNNLYDLKTL

SEQ ID NO: 43722 - protein, 420 aa, unknown
  TnpB Polypeptide
MIKAWNYIVSNDSRLDKMMSDSLAIYDQALYYQRQKFFETKEQKKIKTYSYNELWNIVKNDSAYKDSGLDIGPKTYAIRQVTNMWSAYIKARIEYKKNPKKFNGEPKIPNYLYKKKSFNLVQIDKSRFRKKNDKENSIQVPCSDYKISIPKQIKLKDVRQVTIQKFYGKTKINIVYEEREVKKNNYDLNSSIGIDLGINNLCAITANDKSFSYVVNGRPLKSMNQFYNKKLAEMKSKLDVCNKGQYTSKAIQRLNAKRHNKIMNYLHNTSRAIINLCIENKVGNIIIGHNNQWKTECNMSKANNQNFVQIPFNTLINQLQYKSQEYTDLYVTTVEESYTSKCDHLVLEEMKHHENYSGKRVKRGLFKSSTGKLLNADINGAIGMLRKVNAITDEQLLFLRDRGDVVSPVVLNPLTYKQSL

SEQ ID NO: 43723 - protein, 180 aa, unknown
  TnpB Polypeptide
MIQYHNRNKQLENRKQGVKASNNAKKYYDKIRKQHHQIACQRKDFLQQTTTYLCKTYAHIKIESLNVKGMMANHKLAASIADLGMYEFKRQLTYKAEWYTNRIDVIDQWYPSSKKCSNCGHKKEKLSLSDRLYVCDECGFEIDRDLNASINLEQAPESVIVEKIGWVTSELTSVDSIKSS

SEQ ID NO: 43724 - protein, 407 aa, Halostagnicola sp.
MEIQRTAVVKLSIPDHRRDDLKRTMDTFRDAVQRFADRGWEGDDNGYVITTRTQLQPLVYDEVREDTGLHADLCVGAVNQAADALSICVKKMKEGERTSKPVFTSNTTVYTTNAITYFDGYCSLAAYGNGRVHAEYVYPDESPQAKCMESDEWNKQGARLRYDQQSDTYYLHVSVTQEREVSSGEAENRTVLGVDRNVDGNLAVTSTGAFIGNADLLNHKRREYNRCRARLQQQGERSAHLTIQSIGKKFSNWSEDFLHRASKRLVSEPVSQDCTTIVFEDLEQIRERISNASKFQQWAFRELKRQTVYKARAEGITVETVNPAYTSQRCSHTECGFTDDSNRDGDAFVCQKCGKELHSDYNAARNIAHKFIQNRRTSGSGGATYHLALKSGTVNGNGEYSPSTAGG

SEQ ID NO: 43725 - protein, 431 aa, unknown
  TnpB Polypeptide
MKTVKLTISNKIDVLDDMRLFSSIVRVAFNRYQEGLEEKEIRVYCNSLFNHNSWFIQSAVKEAAALYKLNGEKHILFGGRNNLHQYLKGLIDKATFKYRRMFPIGIQGEKLSKGNRLFVLDLDNQRLIYKPSKERHIEIQFLPMKKNVAKELSIVQELAEQNRITVSVKLSDKYVWLTYDEGLIYDARYKKLQSKRVLGIDMNPNYIGLSVIKFDKNDEFNVLHKQVFDLSKMTISSGKVSTDPSSKYITNKLKHETIAIAHEISKLMDVWKCKTVSIEDLSIKPKDQKKGKKLNKLCNNKWERRLFVNKLKMLANLHKFNLVEVNPAYSSQVGNIAYGDENTPDMVAASIEIARRAYRKFDKGWFYPRFNIQFRDERWKQTLGPVDDWKTLFSKIKETGLKYRFLLRDYIQNAVFSKNYIQKCYSIYTFA

SEQ ID NO: 43726 - protein, 500 aa, unknown
  TnpB Polypeptide
MQVRWNYKLQPNKTQQALMSEWLVTLRKHRNYCLAERKRGFESNNQDSDQPVMYEYGAFCDIDSQIEYGAFCPLTCPVIKHGVMSAELTKTSKKHGLMWGNVSDIQSKRTSELRAENPFYSRIYSGVLQGNLAKLDAAYAGFFQHKRGFPAFRKASNFNSFQYKPGQAKLTVNRSSNKKRCYSHVSLPGLGDMRYLDSRAIPIDADIRTVTVKKEADGWYMSVLLVLPESLPGVAELETVQSAVGIDVGINRLIALSDGSFVENPKFSTNKKARRQLRIRQRRVNRKVKGSSNRRKAGIEVAKLHKKIADRRNDYQWKAAKKVVETAEAVVHEDLNIKGMKSRCKPKRASGRFMPNGQSAKRGLNRSISDASWGELFSKIAWLAAKSGKPVLSVNPKHTSQECSACHHVSKSNRDGEKFVCEQCGHIDHADTQASRTILRRADLKFVSIRRKNLPGDSRKVAPNRDDSAIRGKRDQVGNRIFKAMPENRILIEQLRLQLF

SEQ ID NO: 43727 - protein, 257 aa, unknown
  TnpB Polypeptide
MYRESENNTARLKLFDGKDWKWFPVKLLHTDMEYLRKKWSGKKASAPTLEKRHRKYFLQFSYTEEMVLAKKPAKEQIICSVDLGLNTDAVCSIMDADGTVLGRKFINFPSDKDHLYHVLGRIRRFQREYGPGQVQSRWAYAKRLNVELSRRVAAEITGYAREKQADVIVFEYLKMQGKITGKKKQKLHLWRKRDIQKLCEHQAHRHGIRVLRISAGNTSLLAYDGSGKVIRSAGNHSLCTFKTGKQYNTGRYTVDYL

SEQ ID NO: 43728 - protein, 525 aa, unknown
  TnpB Polypeptide
MQEQSKLLEHQQVNACTMSVVFLHQGKNEEKLSIVGLAPETKNQTLNLRFNISEKDIQTTSLLKISEVGLTSKEKDLMPYWDQSSMGMSQKLLSLTETGSAALDLTSSNPLLVNTTAHSWFVTSQSSVLNPNLYKTCFPSYTFSPAVFTVLENTLVRSKKIRIYPKIEDLNQFKRYLGLSRYWFNQTIDYLKKPETKASLQEVRCIQKQEHPEWALDCPQRIREHAMSEACEAVKNAKLKCKTTGKYQEIHFRKRKDNIQRFGFDVQSLKDKSIFSMLKYKVTFHISEKENSELEGTKVVCEDHRWFLIIPQKRHIQRPENQRLPFVALDPGVRTFMSFYSPYVFGKIGDGDFKRIYRLCLGLDRLYSKMATDPSKKRKFKLAAERQRWKIFDLIDDLHKKTAHFLVTRFSEIVIPTFEASQMVTKLRSKTARSMLTFAHYRFKQFLIAKAEEYSCKVRIVSEAYTSKTCSYCGRIQNIGSKKRFKCSCGVNADRDLQGARGIYLRALGALPWVEHLFYPAIVNQ

SEQ ID NO: 43729 - protein, 408 aa, unknown
  TnpB Polypeptide
MSLRSHKIRLDPTAAQEDYFRRACGTARFAYNWALAEWQRQYHAGEKPNQMALSRKLNSIKKQEFPWMVDVTKCAVQQAVKNLGMAYTNAFRRCKLGKRKGRKNQFGFPQFKKKGRRDSFRADNGPRDAISNAVDVDGKSVKLSRCGVVRMREAVRFSGRIIATTVSRVADGWYISIVVETDDCLRGNADAADVVGVDLGIKTLATLSDGRTIPAPMPLRTLLQRLKRLNRSLSLKVKGSANRAKAKTKLARLHNRISNVRNDALHKLTHTLATQFKTVVIEDLNVSGMMKNRSLSRAIGDVGFFEFRRQLNYKCEMTGAQVHLADRFYPSSKTCSGCGQLHDMPLGKRVMSCHCGLQVDRDLNAAINLRRVAPSKSVESEALTLPLCGDVKLRSMKQKSVVAQLAIC

SEQ ID NO: 43730 - protein, 364 aa, unknown
  TnpB Polypeptide
LNKAYKFRIYPNAEQQIILTKTFGCVRFIYNQMLSDKINHYEETKQKLNNTPAQYKSEFPWLKEVDSLALANAQMNLQTAYNSFFRNTKIGFPKFKSKKSNRRSYTTNCVNGNISIDNGFLKLPKVGLVKLKQHRLILSNYKLKSVTISQTPSGKYYASVLFEYENQIQEQELHDFLGLDFSMHGLYKDSNGNEPAYPRYYRQAEERLKREQRKLSLMQKGSKNRSKQRIKVANLHEKVANQRKDFLHKQSRQIANAYDCVCIENLDMKAMSQSLNFGKSVADDGWGMFVTFLKYKLEETGKRLVKVNKFFASSQICNVCGYKNTATKNLSIRAWDCPECGTHHNRDINAAINIRNEGMRLVLA

SEQ ID NO: 43731 - protein, 476 aa, Micromonospora sp.
VKRYEPPAGWTVQAYRFALDPSDAQVLGLRRNTGAARFAYNHMLRRVSAVKAQRAAEASYGVAEADLTPWQGWSLPDLRRTWNEIKQWVAPWWAECSKEAFNTGLANLSAALGNWHASRTGTRKGRRMGWPRAKKKTGRRSARFTTGAIRVDPSYRHVMLPRLGRIRTHESTRKLARRVRAGTATILSATVTETAGRWFCSFQVAVQRTVGRRPAHAPKAGRVVGVDAGIKHLAVLSTGEMVPNPAPFKAALRKLGKAQRRAARRIGPYDPQARRKRTASNRWQRAQDAVARLHATVSAVRADSWHQLTTRLAQQFTTVVVEDLHVAGMVRNRKLARSLTDAAPATLRRHLGYKTGWYGSTLYVADRWYPSSKTCSACKTVKPKLSLAERMFHCTACGLSLDRDVNAARNLAALVRHVDLELLGDAKTGRRAYVRPVRPASAGGAAGREASRPVHPVNVARQRTTANHESRLLTER

SEQ ID NO: 43732 - protein, 307 aa, Haloquadratum sp.
LTLEYIFHSDVGRLRWQGRGEFRSVSYNQSSRFNVDHNTGDEGFVRLRLEKIGWFKIRANRDVPPAGDIDEGILKKEPTGEWYVSLVTTVEDTPEKPPLTEIDPDDCIGVDLGITSYIYTSENLSVGTLDLSDEYDRYAREQRKLSRKEHGSSNWEKQHRKVAQAKRAIKRKMRNYQHKLTTWLVQEYDVVAVEDLDVDVKPMLETSQNAKNKQDAAWSRFIELLEYKADLHGTHVEKVKPEGTTKECAVCSVETEKPIWVREHSCPACGHTEDRELNAAKNILNRGLKQLGAGRSELTSSEIRSLS

SEQ ID NO: 43733 - protein, 262 aa, Haloquadratum sp.
MRIEKSIKAFSGLKQNGYNVGSLNWKSPSEFQIFTYVQSGFEFDKKNGQTVLSLSKIADIPITVHHDFPEDVTVKEVYIKKERTDEWCASFAVEGKKEPKKPDNPNRCIGIDLGILKYAHDMGGRAVGSVDLRGEQERLKREQRSLSRKQQEQGSNNWEKQRLRVAECHQRVKRKRHDFLHKLSNYYATEYDLVAIEDLDVKSMLESAGNSQNTVSAAWDTFTTLFEHKCKREGTHFVEVDPEDTKGMCVMWRQNRQVAVCT

SEQ ID NO: 43734 - protein, 303 aa, Haloquadratum sp.
RTFQSMTFSQSGFELKNTSDRHATIWLSKIGDIPIRYHREIPDEADIKEVTVKKETTGKWFVCFGLETDDADLPEKPDVESLNTTNSVGIDLGSLNYIYTTDGKTVDWLDLEDDYERSRREQRKLSRKQKGSNNYEKQRREVAKLKRHIRRTVLDYQHKITTWLVREYDAVFVEDLDVKGMLEQSHNARNKQDAAWRQFITLLEYKAGLYGCHVVQIKPEGTTKECASCGVETAKPIWVREHSCPSCGFECDRDANAAMNVLQRGFFEVGLEWPEDTPVETALPTDTHSVSAKRVIETGSLGA

SEQ ID NO: 43735 - protein, 284 aa, Haloquadratum sp.
MRIAKNIKALGKLKQQGYRVGELRWKSPREFRSFIYNQSGFELDKKGGQTVLSLSLSKLDDIRIELHRPLPDDATVKQVTLKKAKTGEWVAIFGIEMDTEPPAKPPLEDIDTGEMVRIDIGILKYARDTDGTAVESLDFSEERDRVEREQRNLSRKEYGSNNWEKQRRRVAEWHLDIKRKRRDFLHKLSNYYAREYDLVTVEDLDVKGMLESPRNSRNMASAAWNTFTDMLETKCERDGTHFVEVAPEGTTKECAQCGSKPTNSCGYVNILVLPVASKRIETQT

SEQ ID NO: 43736 - protein, 144 aa, Serratia sp.
LGLKDYAIPSEDEKLAAGKFYRDLQPASGKAQRARKKARVRAIHARIRNRRKDALHKFSTARVNSHAAIFMGDVSSKKRVKTRMAKSILDAGLFMLKTQLEYKAIARSVVFEVVNERYSTQACSCCGAISANSPKGRAGLRIRE

SEQ ID NO: 43737 - protein, 174 aa, unknown
  TnpB Polypeptide
MPKFFRKAQKRLAKLQKKLKNKEKSSKNYEKQLRKVAKLYVHVANQRRDHLQKLSTAITKQYDYIIVEDLNMRTMANKGFGNGKATMDNGFGMFQDMLAYKLKRKGGKLVVIDRWFPSSQLCSVCGYKNKKVKNLNVRSWICPVCGTEHDRDENAAINILVEGLRILYEEREAA

SEQ ID NO: 43738 - protein, 348 aa, unknown
  TnpB Polypeptide
MNRDVYCEAFHLDLDDPKTIYHSIQLGLVSREVRSMRVKDERQRITSMKTRAFEPLLPRITLKDRKLLLHLPFQQKIEKKEHSKPSSSKDANDAKVGMGIDLGLKHIATISIRDEENDIEMARYFLSPKELLDMVFDETTGKFRYQDRLRDDENVRHHSNIKSTLIRLRQQISDIQRRKNEYEQRCLERTIKNYKERVKWNVICRQLSQCWASVYRINLQLVNHLSNCIMKIARFWNVSTIKVEDLRFSMRSRKQAAGLFLAFWQVHWFHSQAQQAIKLQSTLHDIRVTKVPARNTSKRCSCCGKLGNRSGKQCTCPHCGLSLDADLNAARNIVNYKKPKHASSGASH

SEQ ID NO: 43739 - protein, 231 aa, Nostoc sp.
LNCRFDNFFVCSYRISSIDSSDKTLHHTIKYFCKRSNIVGIDVGLIDFYVASDNTRIAAPKYLRKAERKLKSAQRRVSRRKKGSNRRKKAIIKLGIQHKKVADTRKDFHFKAANNLLKKYDVIAVEKLNIKGLAKSRLAKSVNDAGWGQFISILTVKAENAGLKVVAVNPNGTSQECSNCGTKVIKPLSERTHNCPNCKVSLCRDLNASLNIKARGAHALKAQIMSSLKSL

SEQ ID NO: 43740 - protein, 435 aa, unknown
  TnpB Polypeptide
MLKAIKIRIYPNQEQKIYINKLLGSCRFVYNNCLAYKIERYNENKSTIGFALLGKYLIELKKKEEYSWLKESHSKVLQQSLINLEYAYKSFFKNSQGFPKFKSKKDNKQSCRFPVDAIGEIHGNRINIIKQIKNIHFKCGVTDEKYLNKNQGLIKSATLIQTKSGKYYFSILIDKTNAKQLPKTGNIIGIDLGIKDFIVDSDGNKFENLKLIRNNKKKLIKLQRQLNKKQMIGSGEYKLNKYGKEIEINKSSNNREKARIKLAKLNEKLNNIKENYLHQITNQLLNENQIIVIENLNVNGMLKNHKLAKSIQELSINRFKNILTYKANWYGREIIKIDRFYPSSKLCNNCGYKNNNLTLKERKWKCPECGEIHDRDYNAAINIKKEGQRILSIKENKIGLSSPEFTLEDCPPMDDKAVMPLKSYDRLIQEKNELL

SEQ ID NO: 43741 - protein, 496 aa, Methylacidiphilum sp.
MVDVHFHGQKCKSVLDATLRDESLAGALHLAGEHFPTILRNPYEVVRNLIVRPSGFSGLQCIAHVPRITGMERVRILSLKGISRRLQALIRDGQAESARVWTLCRDMHLAARQKNQPWPGKREFHEATRGGKFALHSQSVQQVFRAFDAAVQSTRENRKAGCREIRYPYKDKRFYPLMWPAQAMCLEEKRIVLPMGRGRHSLVLPRPAWLESPRACKIVWNGVHDELHVSIPETGGPPDTTAPAEKHATVDLGQIHQAAVVTNTGEALVVSGRGIRSLKRLHSKQLGEIQKKRANCQKGSRRWRKLGRTRAKLTLRHKRRVRDLRHKGTRAVVDFCEDRGIEALFVGNPDGVRRKHAGRHHNQRMSQWEYGKDIQYLEQKSEQDRIACFTGSERGTSSRCPVCGHRHKPKGRIWRCKTCGFEGHRDIVGAVNMHPIAFGQGVPFPQRITYLRPGNLRRSSSPDTGQRCLAESQASSTTPETARVPSGSSPRLAICG

SEQ ID NO: 43742 - protein, 418 aa, unknown
  TnpB Polypeptide
  misc_feature (119)..(119): Xaa can be any naturally occurring amino acid
VARRGASGTGRWPSGTNNTRQAAGQTPWRSKNSSTPSSTPTRSGSTRTDGLGCKTFTGMPTPSRSGISPKHGKDSSLTSRRAKKRTSHGSRKKAVAATAFMLPTTSSPWRARRSACPGXEELRFAGKILGATVSRTADRWFVSVQVEVPDAQFYRRRASHEVNGVDLGIKAAATISSGEVVKAPKPLKVALRRLKIRSRRVSRKLEAAKEAAGFGRHALLPKGTRLPVSNNRQKSAATLARLHARIANIRADFIHKLTTRLCRENQALVIEDLNVKGMLENEKLARSISDVGFGMFRSQMEYKATRYRTRLVIADRWYPSSRLCSVCGWKNEALTLQDREWVCVECGTHHDRDLNAALNLKRLATETALPVASPSSNGGAASGTVPAVVGKVTPVRYECCLQEASGQEKNCAHLRALS

SEQ ID NO: 43743 - protein, 392 aa, unknown
  TnpB Polypeptide
MSRYRLTPSAAQQVILLVHCSHARYVWNLCVEQESHWRPGRGRMPGFTARCRQLSEARAANPWLAEGSVIVQQQAVRDHDQAMRNFYAGTHRSPSWRKAGRDEGFRIVHVKPGDVRRLNGRTGEVRIPKAGWIRFRWSRRVPPGVKSLRVTRDRAGRWHVAFAAIPGPVPAPGNDETVGIDRGVVVSAALSTGELLHCPALSGPQQQRLRRLHRRLARARHGSNRRRHVRQAIARLRAREADRRKDWCEKTSTDLARRFDVIRVEDLRIGNMTRSARGSPEEPGRKVGQKAGLNRGILGSGWGLLVRRLQDKAPGRVEKVHAAYTSKRCSACGHIAAGSRASQALFRCMACGFACNADVNAAGNIAAGHAVTARGGVRDAGPANREPQLFTS

SEQ ID NO: 43744 - protein, 464 aa, unknown
  TnpB Polypeptide
VARQPNEGQLSHAGIVLSRAVTFQFALDLNREQEILFATCAGARRFTVNHHLARVKANLDARSTERDAPREGGDSTELSTSSLSWTAFSFINEFNAWKNGESDDSPVNEDGSRGLAWRHELPGDVFECASVDAARALENFATSRRGERRGTPVGFPRFQAKGKVTPSFRLRNRATPGRTPSSQPIRFGDPSHLRLPKIGPVKLFGPTGKVRRMIGGGRFHIYSATLSQRAGRWTVSLTGVAAEFHQAERSRTNRHGVPVGVDRGIISLCVAADANGVPFESFEGVNTLKQAQASLKAANQALARTTPGSKGRERARARLAKRHRKVANARQHLVHQVSKKLVDRAQVLVIEDLNVAGMVRNRHLARSLSDAAMGELSRQILYKALWHGVEVRVADRFFPSSKTCSGCGALKSDLDLSTRTYACATCGLAIDRDLNAAINLARWQPKDPSADLPVPGRVLLLSTA

SEQ ID NO: 43745 - protein, 464 aa, unknown; identical to SEQ ID NO: 43744
  TnpB Polypeptide

SEQ ID NO: 43746 - protein, 290 aa, unknown
  TnpB Polypeptide
MSSRCRFLAAEKEDFRMNLMKRAYRYRCYPTSEQCQVLARTFGCCRWVYNQALAKKTAAYRAAGQRLSSGDLSALLPVWKTHEGTSWLSEVSSVPLQQSLRHLDRAFVNFFEGRARFPKFKKKHRLQAATYTATAFAWKDGQLTLAKTQTPLAICWSRPLPEGATPTTVTVSRDPAGRYFVSLLVEEELASLPPVESAVGVDLGLTNVVTLSTGAKTGNERFFRQNEQRLARLQRRHARKRKGSKNREKARRKVARLHARIADRRRDFQHKLTTRLIRPEPAWCVSSHWP

SEQ ID NO: 43747 - protein, 649 aa, Streptomyces sp.
VLRTGVDEKTGELLSATVLAERVGWCAALVSDMAGALTVERWNTADVDTLASGEDAGGRKLPSNAWMALRRLGWAVAPAEGVKVNDRIVRMAQEQAGRVLRSAKWRADLTAGVLKTWPADPSKRTTGEWDAVREAVPGGQFLPSSVIKSRTRQIAAFTRKHGRMPVDVFELEVAPRTARMLLLSACDGQQAAIERADEGGRALLRLQLPTRPDPASHKDWAWVACPVSLPPTIPAAAMLHLPTLRIYQGNVRADLAYTHAVPKTQRTGHTIALGVDWGLNTLLSAGAARLHGDGQITALGSGGQFRAAGVLAKQHRLRRLSEHLHSKADRYQRLTAGDEQHSLTARHTVLSDEIRHVCDRRSHLNDALAWAAARWTVDQAITASATVIYVEDLRSMEAKGMGRAMNTRLSQQVRGQIVDHMRHLAAEAGIAVVTVPARNTSRHCPHCLTPLRHRKAPDRPTTPGWKWALCPSCRWQGDRDQGAWRRIAARGLTHQAKTVVDRTSSAMVIRTVVDTLEARAVITPAADKTSRKDRSKAGSTQRHTARPTPRRRRTPSPTRPTGPEGKRPEGHAHTDRTRLPRAAHRHQDVTTISTPFPKLPVSRERGETPSRHQPRGAALGAGFHLHAHATPPRWETPSPDTTSDTGSLS

SEQ ID NO: 43748 - protein, 419 aa, unknown
  TnpB Polypeptide
MIKAYKYRLYPTKAQEELLLKHFGCVRYIYNWGLDYKTKHYKETNKNIGYMQITGKDGALSKLKKENEWLKEVNSQSLVSALGNLDRAYSNFFAHRSGFPKFKKKSEKQSFQVPQHGWFDTKNNRLYIPKFKNGIYCKIHRKLPIGRQGTITVSKNPSGKYFASVLVEIDENISERQMPIKESTIGIDFGLKTFITTSNGSKYNSPEFLKQSLTKLQKLSKRHSKKQKGSKNKEKERIKLARLHEKISNQRLDFLHKLSSKLISENQAICIEDLNIQAMSKLWGRKTNDLSYYTFTQMLLYKSVWNGKTLIKIGRFDPSSQICHQCGYRNHNLKITDRTWVCPECNSKLDRDINAAINIRDFGLNEFNLRQELSEVKPLERKALAKRNRKKSLSETVLDESGKKKSQSEMEAREALASS

SEQ ID NO: 43749 - protein, 387 aa, unknown
  TnpB Polypeptide
MIKAHKIRMHPTPEQAVYFAKAAGTSRFVWNWALAEWNRHYAAGEKPTVFKLKKQFNEIRREQFPWTWEVTKNASDQPFLDLGKAFTAFFEGRARRPKFKSKKRSKPGFYLANDQFELGDHLIWIPKLGWVNMAENLRFAGKVTGARITKTASWWFVSIQVEMPDEIPLKKPAACGIDVGLNRLATLSTGEEIENQAFLKMALKKLRRANKRLHRRRLGSNNREKARRQVARLHYRITCLRDDVLHKLTTQLAACYGIIGVEDLHLKGLLKNRKLARSFSDAALGKLLTLLTSKIEQRGGQVIKVGRFFPSSKTCHSCGWKWEDMQLSDRVFVCQNPDCAYHQFAQDRDHNAALCILTEALRLIGLRDQAVSGTGSDKDVNLAVDAG

SEQ ID NO: 43750 - protein, 465 aa, unknown
  TnpB Polypeptide
VEGLVPLNAWARLQLGQGGDPRGSGGSGAQAVSVQRVDTLRLLTTPELEDFLWRVGDAAARLVNMENFRRRKLFFERARSNARKKIDCSWKSAWERRKTEYFEIYKLLGSMNFHETCRLISDQWRSFLGLLKAAKEGGLEPWQLVRPPGYRKRDGQRVPIIVVRFDNYRVDLERRVLHLGYWNVSIPFTGKPRWLTKPGAKLERLIITYDPVKKRWYAKIAVEVTLERKLNHGLKAGIDLGRERLIAFVTEPLNGSGEGVALLYRGGPLKSDYFYFEKKIAEIDRMLSDPKLEEIDRVVLKEMRRRLYEKRKRHRDQVFANSAADLARRARELRVDTVFIGGLRGLAHDKPGKGNSNMWSYRELKQRLAITLENHGIAAFELPEDNKSKVCARHGCEVVRKPRGLVRCPYGHTMHADVNAAMNILKRGGGKVPAQVKVLSFIPTASKVIAVNEKKKNSNPAPSAG

SEQ ID NO: 43751 - protein, 402 aa, Streptomyces sp.
MAQQVKRAFKYRFHPTDEQAAELSRTFGCVRLVYNKALEERTRAWYGEQRRISYVQSSAALTEWKKAEELAFLAEVSSVPLQQALRHLQTAFGNFFAKRAKYPRYKSRKKSRASAEYTRSGFKWRDGRLTLAKMSAPLDIRWSRPLPEGAVPTTVTVSRDAAGRWFVSLLCEDMITPAPATDAAVGLDAGITSLVTLSSGEKIANPRHERRDRKRLAKAQREFSRKAKGSNNQEKARRQVARVHARITDRRRDFLHKLTTRLVRENQTVVIEDLTVRNLLRNGKLARAISDAAWADLRMMLEYKCAWYGRELVVIDRWFPSSKLCGACGTVREKLPLNVREWTCDCGAVHDRDVNAARNILAAGLAASACGDGVRPQRESSRTGRSSVKQEAQRVTAGVPCL

SEQ ID NO: 43752 - protein, 500 aa, unknown
  TnpB Polypeptide
MFVYTLKLDANNKLKQQLGRRFKMAQDIYQRTIHEILKRDEKQKKDPRNKTIKAIYRQIHALKDQITELETNLNDKPKKEQTAIKKITKDLTKQIKELEAEAKPIFRQMAEDYDIVGKYTFGKYANDYRNARNYSFYIPSDAAGVLGMRAWSSYEKMKFNKGAKKINRYPQLNSFETMKKTGIMIKDGLLKMGTKNKKIEVPVIYKNDEFEQEVFKNELKYNRLLRKFENGEVQYYVQMIFDGIPPQRMDNYIKGTVGIDVGLTKVAISTPNEVKILSLAPNLQNFDKEIRRLSRKLTRQRIANNPDNYNSDGTIKKGKKTWVNSKGYLKTKHKLADLKRKQAEYRKISHKELANAIIQMGDKFIIKQSNFEKLKEKSKVDRKSATGKNLSKKHAGKTINSHAPGFFIQQLLYKAEFQGKETQVITNKDFNPYEYNHASKEAIENKAHLKSINIDGFEVQKNLYAAFLVSQYENMENDNVIKSNFEKFLRNQEFYIENIA

SEQ ID NO: 43753 - protein, 371 aa, unknown
  TnpB Polypeptide
MLKAYKYRLYPNKEQQEYFSKCFGCVRFIYNRMLSDKIEYYKETKQKLNNTPAQYKKEFPWLKEVDSLALANAQINLQAAYNNFFKRPGVGFPKFKNKKNHYYSYTTNNQRGNIYVSDRHIKLPKIGLVKVKRHRDFEGIIKSVTVSKIPSGKYYVSVLVNCKEQEKLPQSNNEIGIDLGIKEFAITSDGEMIENPKHLRKSEKRLRKLQKDLSRCKQGSKNREKCRIKVAKQHEKIANQRKDFLHKLSKKIIDENQVIALESLKVKNMMSNHKLAKSIADVSWSEFVRQLEYKANWYGRKIIKIDTWFPSSQICSSCGHKDGKKTLSIREWTCPVCGTHHERDINAAINILNEGLRIYNENKIVGTTRIV

SEQ ID NO: 43754 - protein, 281 aa, unknown
  TnpB Polypeptide
MKTLKLRIKDKHCKVLDQLASEVNFVWNYVNDLSFKHLKRTGDFFSAFDMTQYTKGTSKLCGLHSQTVQGITEEYVDKRRQHKKAKLKWRVSNKKSARRSLGWIPFKKVAIKYADGYVQYGKQKFKLWDSYGISKYSVRTGSFVEDSRGRWYVCLVVDSPKQDKPTATKAIGIDLGLKDVATCSDGTVISNPKFYRNYEQKLGIAQRARNKKRVRALHAKIANCRKDHLHKASTLLVKENALIVVGDLSASKLVKTKMAKSVLDTGFSALKTMLKYKWGIV

SEQ ID NO: 43755 - protein, 404 aa, Microcoleus sp.
MIVVERLYIDGQHQFYKQFDDLSFLLINLYNPGKYYMRKHFFPSVSKVGTTRLIRQLSAILKSTDGSQSFPVKISTQILKPVVHDWEDCQKSRIAYDLDLPRFSFLPSISQYKHKIWRRNLLSPDNQSREKRGGDKNNGLLHLSQNDIIISTKFPNLIKVRRGFPTASYFVEVANQKPVTLVDLNCHLRPGTHLGIDNVVVLASNKPTFTPTIYDKKHHKSINEGFNQRRAFLRSKLHQGKSTTRQIQQITFNQNKRLENYLHQTSSLIVKRLVDEKIIQLISGTKVRDKQNIRLEKKPQNFVVISHTQLIKFITYKTDLFCIKVIITQASYTNKPSFWDLEPVGKQESCQGKRGKRGWFSSFNESRINADVNAALNMIIKVNVNSPLEECHNRICVCNFTSPG

SEQ ID NO: 43756 - protein, 501 aa, Nocardia sp.
LYRRELAARIAQGTLDRTRQADYRADRKRALTAETSSRWAGAITRSVEDQYQSGMRALAAHARSLDSAVATLAARCTLAPNERDGKVAGYRDTAERFAKTRRLAALRVVAERARRNLAEGRPSIVVGGKQLWRNRNHLADVPMSEAGWRQQWDAARMFLTADGEAGKVGGNETIRVAPETRRLRVKVPAALADRFGTHLEIAAPVTFCHRSTEWTGRIAARQAVRYDIVFDPTRDRWYLDASWSLAPTPTVPLTAIRTGPVLGVDLNAGHLAICVLDRYGNPVGEPATIALPGHGLSSSRRDGHLRAALTALCDQAVLTGCTAIVIEDLDFADARGTGRETMGRGRRGKRFRRVVATIPTRRFRERLRAIATRLDIAVVAVDPAYTSKVGAKHWRTPLQEQTQTSDRAVTVHHGAAVAIGRRGLGVKLSRHSSGPRHAQRSVAGQPPSLARATAQRRVACEKPCPALDPLGRPDRSGSKHHTPAAKTVRAATERYPLSLTD

SEQ ID NO: 43757 - protein, 402 aa, unknown
  TnpB Polypeptide
VRGGPAGQAGAAAGGGDGVRGPRREGPAAREEYHDRRRAHPGPVAGAVGVGPAVPDRRRRGGKGVGERDDPLASRRGLAGDQAARPAGPSGEPAARPVPAVVPGRVLLPGDEVAAQAVSGAVRYDISCDRARGRWYIDASWTAAPDPAASLDDLRQHPVVAVDVNHGHLAATVIAADGNILGAPATIALGLAGLPSATRDGHLRAAISTLIGTAREHCARAIVIEDLDFADARAEGRERGGSRPSRGRRGRAFRRVVAGIPTGKLRDRLVQMAANAGLPVIVINPAYTSRWGAKHWLRPLREHHLEATGHHAAALVIGRRGLGHRARRRATGNRTAPEEAARPAQARTRTKPATGTAPRKPAAPPGPWQPPGAKTARPHRITAGNQAAQDRPRPPAGQDYVR

SEQ ID NO: 43758 - protein, 398 aa, unknown
  TnpB Polypeptide
MRRTVKIKLELEQPEKLEETIRQFKHACNQVTDEGWNEDELKTYNKNKLHEATYHEIREETELPANLVTQARDRASQAIKGCVQRMKEGEKTSKPFFSSDSISYDKRTFSIWIDDKKATFSTVDGRIETELIFDEDKGYYQKYLSYDWEVTSSTIEKHSYEEGEPYYLHLGVEKQIQQDEEEFKAPKVMGIDLGVDNLAVTSTGRFWSGGELNHQRRRFEEVRGKLQQKGTQSAHRTFQEMSGRENRFFCDTLHRISKEIVHHADDHGVDVIIFEDLKEIRKDISNGKKFQQWTFRKLFDLVEYKAEEKEIRVEKINPEYTSQRCSECGHTTSGNRDGSEFECVKCGKQLHSDYNAAKNIGSKFLRNGPKSSMRKSHGQLALKSGTVNLNGDYTAYPA

SEQ ID NO: 43759 - protein, 391 aa, unknown
  TnpB Polypeptide
MTKNYKCVKIEIKPTSEQIEKINKTIGTGRYLYNFYITYNKEIYEKEKKFVTGFEFSKYINNIFIKENPDKVWIKDVSSKSNKRAIMDGEKAFKRFFKKLSKFPKFKKKNCNNQSCYFPKNNKTDFEFYRHKIKVPTLKFVRLKEYGYISKNANIKSGTISKETDRYFLSLVLEIEKKFKNTKNLQIKNGIGIDLGIKDFAICSDGKVFKNINKTCKVRKIEKELKREQRKQSRKYLVCKKSGKKLYECKNFQKQKLVISKLFFRLNCIRNDYINKIVSEITKTKLNYITIEDLKVSNMMKNKHLSKAISNQKFYEFRMKLLNKCKENNIELRLVDTFYPSSKLCSNCGHKKHNLKLKDRIYKCDNCGIEMDRDFNASLNLKNAENYKILA

SEQ ID NO: 43760 - protein, 370 aa, unknown
  TnpB Polypeptide
MFKAFKYRLYPTAPQAEKINQNIGCARFVYNQLLDDRIKVYKETKQKSKKTYSDLKEEYEFLKKADSRALLHAREALDEAYNKFFKEPNTGFPKFKDKHKSKWSYTTDNNSDSIRFDGNRFKLPKIGYVKVVEHRLHEGRILTATISKERSGEYYASVLCEIEQPESLPVTDKFIGIDLGLHDIVVCSDGTRVEAPKHFRKAEHNLARRQRAFSRTQKGSNGHERARLKVARCHQKIKNQRNDFLQKLSTKLIHENQVICLEDLSVKGMERNHKLAKSVTDASFSRFVSMLAYKAEWYGRKIVKIDRFYPSTQLCSGCGYKNESVRGLKGLKVREWICPNCGEVHDRDLNAARNILKEGIRVFEPTERGG

SEQ ID NO: 43761 - protein, 381 aa, unknown
  TnpB Polypeptide
MITRSNRLTPNSGEEVPITKGQVIEEPCDEKLSSTVLKGRWGAVMPPSTPDAYQSFFKGLRGKPKFKSIRHYSGWTYPATSGWKIHTTGDNGYLELTDLKVNIRMRGKARTWGKPTTCTIVYRNGCWYASITVECTPIRETGTGAVGIDFGTFHAAALSDSTVIDNPRFLAQSSEKIKKASRQKRRKKAPNFKKRVKASKRWKKASKKVVLLQRKVANQRMDWTHKVASQIVSGNSLVATEELNLKGMTRKAKKGSKRKTQKTGLNRSMLDVGIGNLTWAIEYKLQEAGGFLIKVPTKIVKPSQTCPDCGHQRKKDLSERVHHCLECGATYDRDVAAALVMLSWAQGTCVLNRGEGIPTSSPRHTGGWKQISSKKRQKPRT

SEQ ID NO: 43762 - protein, 387 aa, Nocardia sp.
VQLRYNFRVYPTPGQQVSLAQAFGCARVVYNDALATRREAHQSRSPYLPDAELSKRLTEAKKTPERAWLAEVSSVVLQQALADLNTAYRNFFSSVSGKRKGPKVAPPQFRSRKDNRQTIRFTKNARFAVTSSGKLRLPKIGDIPVRWSRDLPSEPSSVTVIKDVAGRYFASFVVQIDDDPLPPSESEVGIDLGLSTFAVLSDRKTIASPRFLRQAERRLRKAQKALSRKEKGSNNRAKARLKVAKAHAKVADTRKDWAHKHSTAIVRENQGIYVEDLNVKGLGRTRLAKSVHDAGWAMFTRLLEEKAARYGRTFGKVDRWFPSTRMCSECGAIGEKKRLHVREWTCICGVTHDRDLNAAKNILAAGRADRRNDCGAEVRPELVPALG

SEQ ID NO: 43763 - protein, 444 aa, Streptomyces sp.
VIAVSELGLAKRRFGHRARLALSPAEIRVMDDQAHAARTMWNCLHAWWQMMPKDKRTLAAADAAIREARKELDFLAELPAQASQAVLKTYFRAWVNCWEGRADEPNFKARFRSAMSVDIPQGRDLNIVRVHRRWGMVNLPKVGRVRFRWTKDLPVGKRAGTDNRITGARLVKDALGWHIAFRIQTLEAKPQPHQGPEVGIDAGVNIPLALSNKDHQDHGRPPRLPHGTADRDKWLTPKEKAKLLKLERQAAHRKSLRKKGEKTSRRLQHTYDQIKQLRVKATRRALDWQHKTTTYLARTYGVIVVEQLNITNMVKSARGTIEKPGKNVKAKAGLNRSIAQEAWGRTVTILTYKLARYGGRLVKVPAPNTSRRCSACGFTVPGSREDQATFVCKNPDCDFQCNADWNAARNILHLYRTGHDIVEVPAAGRRGRRAAKTVKPVAAR

SEQ ID NO: 43764 - protein, 206 aa, Microcoleaceae sp.
  misc_feature (206)..(206): Xaa can be any naturally occurring amino acid
MKLRYRYRIYPTTQQKRLLSQLFGCCRVVFNDALAYCKQEEQNGNKKPSSIELSKRLTEIKKTEGKQWLTEVSSIPLQQSLRDLEQAYSNFFKSCKGQRKGKKVKPPRFKKRKSKQSAKFTGNGFKLAPDSDYIYLAKIGEIKVIWSRQLPAIPSSVTLIKDSADRYFVSFVVEFNPQQLPKNDNSVGIDLGITDFATLSNGEKVX

SEQ ID NO: 43765 - protein, 273 aa, Microcoleaceae sp.
  misc_feature (206)..(259): Xaa can be any naturally occurring amino acid
MKLRYRYRIYPTTQQKRLLSQLFGCCRVVFNDALAYCKQEEQNGNKKPSSIELSKRLTEIKKTEGKQWLTEVSSIPLQQSLRDLEQAYSNFFKSCKGQRKGKKVKPPRFKKRKSKQSAKFTGNGFKLAPDSDYIYLAKIGEIKVIWSRQLPAIPSSVTLIKDSADRYFVSFVVEFNPQQLPKNDNSVGIDLGITDFATLSNGEKVXXXXXXXXXXXXXXXXXXXXXXXXXXXXXXXXXXXXXXXXXXXXXXXXXXXXXXFTNCQLRLFVKTKQ

SEQ ID NO: 43766 - protein, 336 aa, Enterococcus sp.
MLKAFKFRMYPTEEQKQQLIRTFGCVRFTYNHLLKERQKSWQQTGVADFSLTPATLKKEYPFLKEVDSLALANAQLNLDRAFRNYFKGRASFPKLKTKKSMWQSYTTNNQTHTVYLKNGHLKLPKQKELIKINQHRPVEGTIRSATISARYNEEFYVALLCDVSSIKKESSAKWIGIAYHPKTLIETSQPIEVTLPKFDQIEEKLQHAQRKLSVKVRSAHHRNTRLDKASNYQKQKRKVMDLYLKQKNQREDYLEQLSGKLVKQYDYLFVESFPKEEAHADFSIHDWHKLITKLRYKSQWYNKKFLLINTDGAEESNSVRKSQVLEQLGRYSVIKE

SEQ ID NO: 43767 - protein, 479 aa, Candidate division WPS-2 bacterium
  misc_feature (43)..(43): Xaa can be any naturally occurring amino acid
  misc_feature (91)..(92): Xaa can be any naturally occurring amino acid
MDETTFTRELLVGLTPEQREAVMSPSRRLLVRATAGSGKTHVXREHRHAARRTPGRHRRSQPHEVPVLVAVVVDPTLELGEGRCRPVAPRXXDVTKHAFRSGVTNAAVALKNYHESKKGVRKGEPFGFPKFKNRYSKLSVTFTETGTQGGWFAEDSRHVRLILPLRATDPRIARRRVQLQWIHSTESVSRFKKKVTCGEWTIQAVTVSFVGGRWQASFSVRQFVAPAPSMIHHLKPLVGIDLGVKHLATLTSPVIGLSDVSGYVENPRHLDAQLVRLAKLNRQHSRCVKGSKNRAKVLKRRQRLYGRITRTRDLHLHRLTTTLAGGFETVVIEDLRVAGMVKKSKKNTTNELRRSILDAGWSELRRQLTYKTEDRGHRVIVVNRFYPSSKKCSQCGETKAKLALSDRVFECGKCGMSLDRDVNAARNIRDEGIRLLANEESTVAGHQPETLNADSRDRETDALRCDGGDRYQSRTTQPV

SEQ ID NO: 43768 - protein, 397 aa, Bacteroidales sp.
MVAVKMFKYRLYPSAKQELRLVNQFKICKETYNTLLDLNKKLRVTRKFDLNGLVMDLKCANPLLAKKVHSQVLQNVSDRLSKAFDNFFERLKLREQGVKVKAGFPRFKSKVTSLTFPQNNGAFKFISDKKLKISKVGVLPIVLHRVPRGKIKTLTVKREKSGKWFAVFSCEVEPEQSVPLGERSSVGLDLGLETFAYLSDGEFVSNPRFFRKGEVKIRRAQRRLSRKKKGSRNRSKQRVRLARTHERIGNQRSDFVHKTSNDLVSRYETIFVEDLKVKNMIKNKRLSKSIGDVSWRGFVDSLSYKAVMSGGQVIKVSPKNTSKTCSKCGFVKEELSLQDRQFVCGGCGFVVHRDLNAAINVFRVGMGGAEFTPVGHSVRPLFSGAVVDEAGTIYNET

SEQ ID NO: 43769 - protein, 449 aa, unknown
  TnpB Polypeptide
MIKSSKVKQDKERKGYKFSLIVPNSEIERQLTKIVGSCRFVWNKALALLKQDDDEYRTMVQMSKMNGGDETGISTFFKFNPYNQLSALLTEWKQQPGSAFLKDAYSKSLQIVLEELGQAVAEAKSKINPKRYPVFKKRGVKDSFSWNGTIKHDIENSRIFVPKIGYIRYNKSRDVLGMVKNVTISKQSGKWYVSFQTERPLSQVNPEWVNANEIIGIDVGIAKAVSSSDAISFEYQGKQITSNQLDSINPLREHQVKLAKLQKDLARKTKFSRNWNKQKAKISKLHSKIANIRNDFVHKVTTAISKSYAYVTVEALKVKNMSKSAKGTAAKHGKKVKQKSGLNKSILDQGWGMFRQFLAYKLKYNYGTELIEVNPQYTSQKCSSCGYIHANNRKNQASFKCVKCGLSMNADLNASINIKVAGLAVLACGVDGMPSIQKRYDEAGTHRIS

SEQ ID NO: 43770 - protein, 364 aa, unknown
  TnpB Polypeptide
MAIRSHKIALDTTAVQRSWFSKQCGYARFAYNYALSDFKKNPSHWQILAKRFNVAKRGIGWTSNMDQRAALFGIKNLGNAISRWRKGQNRFPKHKKRSHRQSYSTDPNSVTVEGNRIKLPKIGWVGMFEGLRFEGEIVKITISRMAHRWFASITLDTGTPHAPRDTRGLPVVGVDVGINTLATLDNGTKYLNPRPLKRYERKLKREQRKLSKKVFLSQNWYKQKRRVERIHYRIACIREDAQHKASTEIVNNASAIGIETLKITNMLKNKRLAKALSDSALGGFLSKLKSKAEVIGIPIIQAPQFFASSRTCSCCGHNKEDLTLANREYHCVFCGYTQDRDINAAINLKYLAVGQTESLNACGV

SEQ ID NO: 43771 - protein, 362 aa, unknown
  TnpB Polypeptide
MQHQSNTIKLGNMLDDMWHIHVHIMTLQRRYYRRYKKNISAYRMNAHVKKLKYTTKPHWKSLPSQVVQDVVLRYGKAYDAFFRNIKEREAGLTTRKVGRPHIKPRHKYNSMTFTQAGYKLEDNRIKINCIETWFSFHKHREMKGVIKTITIKRDLCGDYWICFSCDTVDDSELFAKTGKRAGFDFGLKTFLTSSEGGKIASPQFLKKSLNKLRSLNKSLSRKIRGSGNWYRAYRAVCRHYRDISNQRLDWHWKLATHLCREYDALVFETLNIDGMKRLWGRKVSDLSFAQFLLIMEQKCAKHGKTFEQVGKWTATTKPCSDCGYKNKDLTLLDRQWICPKCNTTHDRDINAAINIEQAGLAA

SEQ ID NO: 43772 - protein, 396 aa, unknown
  TnpB Polypeptide
MSRFRLLPTPTQEAVLRHHCTHARYVWNLAVEQHAHWHPGRKVAPGYLEQCRQLTQARAEHPWLAAGCQMVQQQALRDFGQAMAAFFDPGNPARQPSWRKAGRHEGFRIVAVKPGHVRRLSRKTGEAWVPKAGWIRFRWSRAAPPDAKSYRVTRDRAGRWHLAFAVIPEPVPAPGSGQTVGIDRGIAVSAALSTGELLHVPGLTGRERSRLRRLERKLARAKRGSNRRAGVKLAIAALRARETDRRKDWAEKVSTGIVRRFDVIRVEDLQIGNMTRSARGTIQDPGRNVRAKAGLNRGIMRSGWGLLVRRLSDKAPGRVLKLSPAFTSQRCSACGHVDARSRESQARFACTVCGYVCHADVNAARNIAAGHAVTARGGFRNAGPVNREPQLLLQLA

SEQ ID NO: 43773 - protein, 363 aa, unknown
  TnpB Polypeptide
MISVIYTQQVQKGRCKKTQSSFFTSPYAFQHIPLAFRPKTYAERHLQISQQSIRDLDRAYKNFFRRVREGGKPGFPKFKSRRHARQSYRTNGGKVLDRNHIALPKLGNVRAKVSRPLQGRFISVTVSLDAAGRYFATFLCTDVPAKDMPATDRKVGIDLGVETLATFSDGTKIGNPRHLKKYERKLAREQRRLSRRKGARRGEKPSGRYLKQRKRVARIHAKIADARTDALHKVTTMLADENQVLCMEDLNAKGMVRNRRLAKAVSDASFGEFARLLEYKCAERGRTLVRVDRFYPSSKTCSACGHRLDALPLSVRSWDCPACGAHHDRDVNAARNILTEGKRILSNTEGTAGHAGTVAAITA

SEQ ID NO: 43774 - protein, 377 aa, Dictyobacter sp.
MLTYEYKLQGNRAQYAAIEEALRVTQFIRNKCLRLWMDEKRIAKNDLQAYCAVLAHDFDFAHKLNSQARQAAADRAWHAITRFYENCKSQKPGKKGYPRFQRDNRSVEYKTSGWKLEADGNHITFRDGCGIGRLRLIGTRAIETFPLQQIKRVRIIKRAAGFFCQFCVQADRVIDHVPTGTSVGIDVGLKAYSTDSNGHTVDNPRHYRKAEARLKRLQRRLSRKKKGSKNRLKARQRLAKAHLKVQRQREDFARKQANALVISHDLIAYEDLKIANMVRNHHLAKSINDAAWGQFLAWVSYYGARHAIAIIKVAPHFTSQNCSGCGTLVKKSLSVRTHICPNCGLVMDRDKNAAGNILKKAQNGTAGHAGTDAPVSA

SEQ ID NO: 43775 - protein, 402 aa, unknown
  TnpB Polypeptide
VKRLQAFKFQLRPGGQQECEMRRFAGACRFVFNRALARQNENHEAGNKYIPYGKMASWLVEWKNATETQWLKDSPSQPLQQSLKDLERAYKNFFQKRAAFPRFKKRGQNDAFRYPQGVKLDQENSRIFLPKLGWMRYRNSRQVTGVVKNVTVSQSCGKWYISIQTESEVSTPVHPSASMVGLDAGVAKLATLSDGTVFEPVNSFQKNQKKLARLQRQLSRKVKFSNNWQKQKRKIQRLHSCIANIRRDYLHKVTTTVSKNHAMIVIEDLKVSNMSKSAAGTVSQPGRNVRAKSGLNRSILDQGWYEMRRQLEYKQLWRGGQVLAVPPAYTSQRCACCGHTAKENRLSQSQFRCQVCGYTANADVNGARNILAAGHAVLACGEMVQSGRSLKQEPTEMIQATA

SEQ ID NO: 43776 - protein, 377 aa, Rhodothermaceae sp.
MEARRTYKYRLYRSKRDKHLVRQIEIASEIWNWGVALTRRYYSIYGKHLGYYRLKRQLAKRKKRDMGRWYGLNSQAGQNVIERLDKSYQRFFSDPKAGRPGFKKRTKYPSFTLTQTGWKLPEGQHSNRLRIGKHNFKFVLSRPIEGEVKTVTIKRDRSGDLWVCFSVAQDARPSMPQTGSAVGVDFGLKDFLVLSDGQTVESPQHLRASLKEMARLQRDLSRKKKGSNNREKARRRVAKLHRRIADQRRDFHFKAARAVLERHDFIAIEDLNLDGMKRLWGRKVSDLGFYSFVEILEHLATRNGKRVVKVDRYFASSKTCHDCGWVNKDLTLADREWVCKGCGCVQQRDLNAAKNIRDRALSHVVGDVRPAGRAVAA

SEQ ID NO: 43777 - protein, 522 aa, Halomonas sp.
  misc_feature (10)..(61): Xaa can be any naturally occurring amino acid
  misc_feature (418)..(452): Xaa can be any naturally occurring amino acid
MSRCHWHRAXXXXXXXXXXXXXXXXXXXXXXXXXXXXXXXXXXXXXXXXXXXXXXXXXXXXGQGAERGSVMTTVTRILHATSQDLSRLLAMCRTMGFIRADLWRRYGALGTVGKSASAVRKEITQGGWHTDLPLDGTVRAESTKDVINDILTYKAAAKHKVRRAVAARTTDETERKRLYTLLKQDKWLEDTYLHRMMRKHFRHGKSQCSNQFVVRSDKHSERIIDGQLVITLHLSKKVGGSITLYTTTSGKNVSLEKKNLRVIVREGKVEIHYAYEKPPGRPHGDKVMGVDKGYTEAFTDSQGQHHGESFGQVLTAYSHQVSATGKARNRLHALEKKHRAAGRIAKAERIRANNLGKKKQVARRQRTQQHLRTIAYQAAHTIMDEAALLASEDLTQPIAGKVQWRDYNRRMSHWAKGXXXXXXXXXXXXXXXXXXXXXXXXXXXXXXXXXXXMLRGMSWQGLMTPTLRGTCRTARSSEYCWDVSPAQLSVKRPELFASTACQPGADKSFLANDGQALRSSTP

SEQ ID NO: 43778 - protein, 400 aa, unknown
  TnpB Polypeptide
MERLQAYKFQLRPKAEQENLMRRFAGCCRFLWNKALALEKETYEADKKRLGYYALAGKLRDWKKEEDTSFLAEAHSQILQQTLKDLDRAYKNFFAKRADFPRFKKKGVHDAFRYPQSFRLDEGNSRIFLPKIGWMRYRKSRATEGVPKQVTVSLSAGKWYVSIQTEREVPEPVHPLQTAVGIDMGIARFATLSDGSCIKPLHSFRKHEKKLAKLQRKLAKRVKFSANWQKLKAKIQRLHRTIANVRNDFLHKTTTIISKNHALVVIEDLKVQNMSRSASGTLDHPGKNVRVKAGLNKSILDQGWFEFRRQLAYKLAWLGGTLLLVPPQYTSQTCSHCGCVDKSNRVSQAKFKCTACGFECNADHNAALNILAAGQAVSACGAGRAQAPVLNQEPAYGAAR

SEQ ID NO: 43779 - protein, 331 aa, Crenarchaeota sp.
LAVKSVWQYYIPTQDVLRLLELFRRMMNDAIRIALAYDATTLRRLSLLAYNELARYDSPSYYKLCAISRAAGILAARKKSIRRGFTTRTPYAFRQQLVSCYGFKIENGYLHIPVSRGKHFSIPLTRHTLEIVSQPGIKVRSFTLTRNRLSLCIARDTPMIECRSTVGVDRNLRDLTVGNDQQTHYYDLSKCVRIANTTVRIVASFARNDDRMRTGIASMYGKRRTSRTGHILHNATKTIVAIAVQRKTAIVLENIEGIRSLYRKGNGQGRRYRRRMNSWSFSEAQRQIEYKARWVGLPIIRLSRRETRGSSVTCPRCGERLQSDKRLRRKL

SEQ ID NO: 43780 - protein, 394 aa, unknown
  TnpB Polypeptide
MERVVTTTVQIRLHSLTQRKEQLLSREHSEFQRAVRGDTDVNLYSATTQQAVKVRKNKNPREDTIQPIVFRNDCITIEQDEETVLSDWWFKVPVYDPEKEQGSSIWCPAIVPEKDEHLLQDEYICDSELINKNGKWYIHLVCERSVAVADEYDDVLAVDMGAQWIACSVFLSDRDTKFHGEEVRRVREHYKQLRKSIGKAKVRQGAQVIECLCDKESRTVEDALHKIANEIVVRARKRNAVIVFGDMTGLRSDNDEGRYVNDKTHKMPYAKMATYLTYKSHLDGRECIPVEEYDTSVTCWRCGSQDTSRDVQGRVECHECGLDDNADKNGASNIGQRAVGKDIQSPLSTAGAVVAQPETQVRLTGTNGEKEPANSPEDVGLIFSEERPRPQSWE

SEQ ID NO: 43781 - protein, 414 aa, unknown
  TnpB Polypeptide
MKEIKIKSRKQTIKRRKSMICKTYELKVDMSKLSQKTLEDFRRLFLEAKWFYNYLLSQENIFDINTTHIKQVIVMNKDKTTRIEEFKIIPAKFKQIIREQIVISIKSLSTKKKRKQKIGKLKFKSFVKCILLDNQCYKIKENNYIDLLKIKQYLKVNGLNQIFKESEFANAFLIRKHGSYFLNVVTFLPKEKPIECAKAIGIDFGIKTQMTFSNGIKAEFKIPVSRRVKKLHQNLSRKTKGSHNHFKNKLQLEKAYSKTNNIKKDISKKIIHYLKNNYIICIQNDNIKAWMSYNFGKQINESAIGGIISGLKQIPETLVAHRFFPSTKTCYNCGHIQKVDLGERVFVCEKCFYTEDRDINSAKNILKRSFEVLPERKEFTLAENETSTLKMLEYLNNIPHLKASLCSLKQEAIL

SEQ ID NO: 43782 - protein, 633 aa, Micromonospora sp.
LLRSGVDEESGEVLSQAVLAQRVGWCADLVAGMVSGLLAERWNCADVEVLASGHDAGGRKLPSNAWMALRRLGWTVTAPVGVRVNDRIVRMVQEQAGRVLRSASWRAGLTGGVLATWPADPRKRTPQEWEQVRASIPGGEHLPSSVIKSRTRQAARFLAVNGRLPVDVFELEGVPRVARMLLLAACDRQQATIERSDTDPRRVLLRLQLPTRPDPRAYADWAWVACPIILPPTVPASAVLHLPTLRVIGRQVHADMAYSHPVPKARRTGHTVAVGVDWGLNTLLSAGALRLHEGGRITALGAGGQFRAAGILAKQHRLRRLSERLHAKADHYQRLAGRDEQHHLAGKLAVLRAEIRHVSDRRTNLNAALAWAAARWAVDQAIASRASVIYVEDLRSLEAKGMGATLNTRLSQQVRGQIVDRMRHLAAETGIAVVTVPARNTSKHCPQCLTPLQHRKAPDKPTVAGWKWAVCPNQSCRWQGDRDHGAWRRIAARGLTHQAKTVTDKTNGHMVIRAVVDKLETAAVITKSHRGDRSKTGPTRRKPSRPAPRRRGAPSPTRPHSRAGKRPEGHAPTDRRLPRAAHRHQGVNTTSTPTTGHQPRGAALGAGFHFHAHASPARWETIPETQPDSGSLS

SEQ ID NO: 43783 - protein, 197 aa, unknown
  TnpB Polypeptide
MTGPFLLTASTFSARLEAMSKTQKKAYKYRFYPTPEQAVMLARTFGCCRVVYNWGLRERSDAYSQRGERLSYDDLSARLTTLKKQEAYTWLTEVSSVPLQQTLRHLDRAFLNFFEGRAKYPTVKKKHGPQAATFASSAFTWNGSHLTLAKMTEPLDIHWSRPLPEGAKPSTITVTKDCAERYFVSILLEEEMAPWPR

SEQ ID NO: 43784 - protein, 211 aa, unknown
  TnpB Polypeptide
VAPVNKQVGLDLGLKSMVITSDGQTYGNLKFFAKDEKKLARAQRRHAKKRKGSKNQEKARRKLAKLHTRIADRRRDYQQKLSTAIIRENQVVCVESLQVKNMVQNHHLAKAISDVGWSEFVRQLEYKAQWYDRTLVKIDKYYPSSKRCHHCGHILDLLSLDIRHWECPECQMSHDRDINAARNVLAAGLAVAAFGERVRPGRAKARSGSAQ

SEQ ID NO: 43785 - protein, 383 aa, unknown
  TnpB Polypeptide
MRMTYKYRLYPTKAQRRQLDQALELCRWVYNETLATRKNAYKQRGERLSFYDTKRMLPAWKAERPDLKQVHSQVLQDVTMRVDLAFQAFFRRVKAGEKPGYPRFKGKGWYDSLTYPQYGNGVKLDGDRLTLSKIGTVRVKLHRPIVGTIKTVTICRDSVGNWYACFSCELEPSPLPPSHEVVGIDLGLKTFATLSNGESIPRQRWMKRDEKDIARLQRKKEKLPKGSAERRKVIRALCHAYRRANNRRNDFAHQESRKLINRFGLIVFENLDIQEMLSNGNRVVNRNIADVAWGRFVQFSAYKAESAGRAVVLVNPRGTTQQCSGCGEIVPKDLSVRVHDCPHCGLKLDRDLNAALNILARGLASVGAGVPVSHRSPSLEAWE

SEQ ID NO: 43786 - protein, 390 aa, unknown
  TnpB Polypeptide
MILAHKIQLDPNNKQSTYFAKACGVARFSYNWALDRWKKQYEAGEKVSEGKLRKELNAIKREEYPWMLEVTKCAPQLAIKNLGKAFQNFFAKRADFPLFKKKGQNDSFGLSNDQFSIKDKTIRIPNLGYVRMTEELRFEGKIMGAVISRKADKWFVAIQVEMPEPEPIHNSESQAVGVDLGVKKLATLSDGTKITGTKPHKALLSRLRRLNKSLSRKQGANKGEKKSKNFRKAQKKLSRLHAKIANIRNDETHKLTTMLTEKYGTIGIEDLNVSGMSKNHRLARAVLDMSFFELRRQIEYKSKMKGGYVIIADRFYPSSKTCSNCGYKYDELTLSMREWSCLNCNTHHDRDINAAINLKNYAGSYSVSACGELVETVTSMKQELNITNQV

SEQ ID NO: 43787 - protein, 402 aa, Streptomyces sp.
VPQQVKRAFKYRFYPTDEQAAELSRTFGCVRLVYNKALEERTRAWYGEQRRISYVQSSAALTQWKKSGELAFLTEVSSVPLQQALRHLQAAFGNFFARRARYPRYKSRKKSRASAEYTRSAFKWLDGQLTLAKMAEPLEIRWSRPLPEGAEPTTATVSRDAAGRWFVSLLCEDSIARAPATTSAIGLDAGITSLLTLSTGEKVANPKHERRDRARLARAQRELSRKAKGSANRKKARRRVAKVHARIADRRRDFLHKLSTRLVRENQTVVIEDLTVRNLLKNGKLARAISDASWTELRSMLEYKCAWYGRELVVIDRWFPSSKLCGACGAIAAKLPLNVREWTCECGAVHDRDVNAARNILAAGLAASACGDGVRPQRESSRTGPSSVKQEPQRATAGIPRP

SEQ ID NO: 43788 - protein, 421 aa, Geitlerinema sp.
MKTRYRYRIYPNIRQSRMLARTFGCVRVVFNDALHLRQEEYQTNGQTISSTELQKRLITQAKHTTERWWLAEVTNIALQQSIQDACLAFKNFFQSLKGQGTGRKVGFPRFKRKSNAQSFRLTRGGFKLRDNGKLYLAKVGDVKVQWSRELPSEASSVTVIQDAAGRYFVSFVCDVEPIEQPTLSDGVGIDLGITTFATLSTGEKLANPRILQRQLKKLRRLQQSLSRKVRGSVRYQIARKKVARLHARIKDTRTDFLHKLSTKLVRENQALVLEDLNVSGMVKNRKLARAISDVGWRQFRVLLESKSIRYGRNLQVISRWEPTSQRCSCCGQIGGKKPLNVRTWTCLHCGAEHDRDVNAAINIKACIERSRNAAGGHSEALNACVEQRRNARGGLQKTGSPAAADEARTRLEVEQLRLFAC

SEQ ID NO: 43789 - protein, 379 aa, unknown
  TnpB Polypeptide
MLRAIKVRLYPNKMQEQALNKVLGCYRFVYNHMLARKQEAYKADKTNLGLTELSKYFHGELLKDEQYVWLKEQNTKVLKQSIRQMLTAYDKFFKEHKGFPKFKSKRDKQSALFPYEAISKTNTFEARKITLTKKLKNIKFRCSDLFFRRLQKYKDNIRRATLSKTKSGNFFLSILLEMNDNELIKFGKTSRDVGIDLGVKDFVITSDGDVFENKHFYKKDEKKLVKLQRQLSKKRKGSSNFNKQCNRIAKVFNTITNKKENYIHSVVNYLLCKYDTIYMEDLNTSGMLKNHKLAKAIQEVGFFKFKTTLQNKALQNDKKVFLIERYYPSSKTCSQCGYIHKELKLQDRQWQCPNCGTNHDRDKNAALNILHEGRRISAA

SEQ ID NO: 43790 - protein, 359 aa, Pseudonocardia sp.
VSEKISPTEVQRRIITQAKTTPERAWLGEVASVALVQSVRDAHRAHANFLDSLTGRRKGRRVGCPRFKSRKDNRQSFRLTRNGFTLRPNGRLYLAKIGDVRVRWSRELPSVPSSVTVIREPDGHYYASFVVEVDPTPLPVAAQECGVDLGVSRLATVATSAGGRIDVANPKHLGRKLRKLRRLEREKSRRAKGGTNRAKTRRKVAIQHGKVSRARRDYHHKQALALIRDNQAVYVEDLSVAGMVRNRRLARAISDAGFGRLVRILEEKAERYGRTVHKIDRWFPSSKLCSACGAVQESMPLAVRSWTCACGAVHDRDHNAAKNILAAGRAEKLNACGAGVSPLTRVAVGDEAGTTPDAA

SEQ ID NO: 43791 - protein, 441 aa, Westiellopsis sp.
MLKVVKVRLYPDAQQQQELRSAFGCCRWLWNYCLNLMNQTYKETGKGLSGYAVKKIIPQLKKEHEWLTSTYSQCLQQVCLNLGVAFNNFFEKRAKYPRFKYKHGKQSIQYPQNVKVDDNCVSLPKIGDVTAIIHRPIEGKVKTVTISKNCSNQYFAAILFDDGKDNRESNTDGKAIGIDLGLTHFAVTSDGAKFDNPRILNKHEKNLKLKQQQLSRKKKGSNNRIKSRNKVASVHRKITNCREDFLHKLSRRIVNENQVIVVENLNIKGMMQNHCLAKSIHQVGWGMFCTMLKYKAEMGGKVYQEVDRFFPSSKTCHVCLNQVGSLSLDVRFWTCENCHTKHDRDVNAAINLRDEGLRILTRQVLYAGEPVHRTGSSGTGDKACRPDVSRSNRGRKKSTTALSVGQEAYTVLQEYSVGSSLQYNKNSMVVVSRMRRIKDVD

SEQ ID NO: 43792 - protein, 398 aa, unknown
  TnpB Polypeptide
MLKAFKYRIYLTDEQKVLLAKTFGCCRWFYNFALNLTNETYKATGKGLSRNEIINKLPELKKELEWLTEVPSQALQQVALDLSSAFLNFFEKRAKFPKFKKKGNKQSVRFPQGIKLDGEYLTLPKLKKVYCKVSRLPEGKLKSVTMSMTPSGKYFASCLYDDGIDLPKQNSEGKAVGIDLGIKDFAITSDGSKYGNPNHYRKYEQKLAKKQKQLAKKQKGSNNRNKARKAVAKVHEKITRCREDFLHKLSRKLVDENQVICVENLAVKNMVKNHKLAKSISDCGWGQFCTMLKYKAEWEGKYYIEVDRFFPSSKTCNHCLQQVDSLSLDMRLWQCPKCGTIHDRDVNAAKNIRDEGLRILAVGHIASASGERVRPSKGTAFVRHRSVKEESPTIARRV

SEQ ID NO: 43793 - protein, 493 aa, unknown
  TnpB Polypeptide
MASGVKFRTYPTRQQQILLNRWISAQAEVYSAKVAEAEQLRLGRLKKDSSEAEKTASSSQFDHLQLGGDCLGVPVEILKAGASRWRHSFWRYLRGMGGKPVPKKRKYGKQTVALWPGTFQFYSLIETRQVVLDVGGGVGPLRYKAHREYKIPRSLTITREAGRWYVSFAYGSWSCPDIEPEVSPFDFQEEFLSRAMRKTAAELENCSLAAAGCLPVVDSDGVVYDLEAGARRSLEVKDRRRNRYLRRLKRMRPDSNRRRKLQEKIDRLNQHRTNTLRDYAEKVSRKLADHPAEVIMFESVKSPGLNWQQMPGHTRTRMRITSRTIVKCGSRKLIAVLPQKQGTFGVPTVPTSDPVALRERGLSNIRCGMLQLWQRRSYKKDVKLVSKPTVHLVRVGHAEFKCGDNREATLLGLYAVLHADVTKFGKDSSTEQDVISLLTSERKISDEIAQYVCSEIKQESILNLHKADMFLKRVGILRDEQSLQVLQKYGLLP

SEQ ID NO: 43794 - protein, 397 aa, unknown
  TnpB Polypeptide
MQKAYHYRIYPTPAQIQQIERTFGVCRLVYNMALRIKKDAYREQQKNVSAYDIIKHLPGLKEECPWVAEVDSQALTASILRMEAAYKKFFTGGGFPKFKNRRGKQSFAAPCNKREVDFDNQTLTIPKLKNIPIVISRPFKGDIKTVTITRVPSGKYFASILVDNHIPLPKKQTIDPNKTIGIDLGLKDFAITSDGRKFSNPKYLKEALDRLKCLQRRASRKKKGSSNRRKANKRLAIQHERVTNKRKNFLHKLSTSLVNDSQVTTICIEDLAVKNMVKNHNLAQAISDVGWGELRRMLQYKCDWSGKNLVVIGRFEPSSKTCSKCQAINDTLTLKDRGWFCSSCGTLHDRDINAAENIKQFGLNNSGRGTPGEPVESRTLVWAKKQEYKKLTLEKGK

SEQ ID NO: 43795 - protein, 389 aa, unknown
  TnpB Polypeptide
MTLRMYQYRLYPSKKQKEILLNTFNICKEIYNNLLETSIKIYKETGKTLRKFDYNKQLTNKYPDVFSQVKQNISDRVDKSFKNFFRRCKDTSCKKKGFPRFKSRVHSITYPQFGFKFKSQRRLNVSKIGNIPIVLHRIPKGKLKTMTIKRNRASQWFAIFSCEVKEETVKHPSAEKIGIDVGIETFATISNGETVDNPRHIIKAEKRLERLQRRVSRKIKGSNNRRKAIHRLAIQHVKVTNQRNDFLHKISKNITQRYGFISVENLNIKGMVQNHHLARYISDASWNRFIQMLEYKAVTSGSTLVKVNPRNTSKTCSRCGTIVDMPLKQRMFNCPNCGFVSHRDLNASLNILKVGQDLSEPNACEHDVRPSLKAIVDETGTTHNKLARS

SEQ ID NO: 43796 - protein, 495 aa, unknown
  TnpB Polypeptide
MKKIIIIRTVKHTYNDTNLLKKQNLYSALMEYHNACQFYIDYYWKIYAEDPNSNYYLPVYLDYKVLDDKTKEIIAPNLTGRALNSACDEVTGKLKSALATKAKLQYALKKNIEKNEELKQQSLPEKDLSKLKEKYDDLKLYKPTLKPEKVSADISSKCVTILYPKLDNLQSELSITASQSNDKIQSLLSKIKVKPTKTDISKFVIEKNKLKKENEGKFKHFNIFLEVRLTNTPIFIPVKFNKQDIKFLNKNGRLMNGIEFRRNSFDLRYELKDIPKKNNGRIVGADTGVNSIVTLSDGQVTPYKNKHNKTFPGILEELSTCKKGTKKFLRLQRQRENFINEAINTLDFSEIKQINLEHISNLFYGKNTSPLLKRWTNSIIEEKIQSKAEDEGVLIVLQNSAYYSQRCHCCGMVKNTQRKGKIFSCTNPDCKMHEVHFDADLNSAINHEQELFELPKWIFKSGVNKKGFFWKEDNLYLIKSGKFVILEYNDTIKTG

SEQ ID NO: 43797 - protein, 509 aa, Actinomadura sp.
MLQLVGAHLGSMAGRDLKARCADGLNHDADRWAARKRDLTFESSARWAGSITKATHDRWALARRSQLAHIQSLEAGISVIEHRLSRPINEKGTERAPGGYRSKQEWFVKSRRLGVLRDRLATERSDWEAGRVRAVRGGRRSLATRHNLDAVGLEEEQWRHRWEARRWFLQADGESGKRYGNETIRISPEGEVSIRLPSSLTHLANAGHGRYVLSARVAFQHRGVEWADRVTANRAVAYRIHLDTDRNRWYVTASWQRAAAPILPLETVRAHGMVGVDTNADHLAAWRLDRYGNPMGQPRRFGYDLRGTAQHRDAQVRHAITRLLHWATTCGVAAIAIEDLDFDKEKTREKHGRRKRFRQLISNMPTGRLRARLVAMAAESGLAIVAVDPAYTSKWGAQHWRKPMTSKTRKVSRHDAASIAIGRRALGHPIRRRTAPPPRDRSDRAGHRTAQAGPGLPGREGTRRPVTERAHDAHPPTKATRTRATSASNTVRDVRSTGTWVQYSLLDTA

SEQ ID NO: 43798 - protein, 340 aa, Acaryochloris sp.
VKAFKVGFVTYDARIFSFREKDWTVSLTTVDGRERFELAIGNYQIGALKGSNPKSATLVKRQDGSYYLQICLESEPPSPQESENVLGVDLGRTDIAHTSEGQTWEGKSINKVRDHYANLRAKLQHKASKGTRSTRRRVRGLLQWLSGRERRFQSWLNHNISKSLVQTAKSKQASIAIEDLTGIRERTNQQARTKTERRRSNSWAFHQLRLFIDYKALGAGVKVVMVNPRYTSQTCHQCLHIHPVTGKSYRKGKRFVCGHCGWHGDADLNGAKNIKTIGSSVIWPGGSWLSCEIAGGLLKLPGLMDAPALYRLSGTAPGRRYSIPNGLSPEMKRLKLVIWK

SEQ ID NO: 43799 - protein, 387 aa, Escherichia sp.
VKRLQAFKFQLRPGGQQEYEMRRFAGACRFVFNRALARQNENHEAGNKYIPYGKMASWLVEWKNATGTQWLKDSPSQPLQQSLKDLERAYKNFFQKRAAFPRFKKRGQNDAFRYPQGVKLDQENSRIFLPKLGWMRYRNSRQVTGVVKNVTVSQSSGKWYISIQTESEVSTPVHPSASMVGLDAGVAKLATLSDGTVFEPVNSLQKNQKKLARLQRQLSRKVKFSNNWQKQKCKIQRLHSRIANIRRDYLHKVTTTVSKNHAMIVIEDLKVSNMSKSAAGTVSQPGRNVRAKSGLNRPILDQGWYEMRRQLEYKQLWSGGQVLAVPPAYTSQRCACCGHTAKENRLSQSKFRCQVCGYTANADVNGARNILAAGHAVLACGGCQQTG

SEQ ID NO: 43800 - protein, 415 aa, Lactobacillus sp.
MSKTMSELPFHYGLKMKCYPSFKQKQIIETNINASRFAYNEMVAIDKELYILSKCKLPIKQVQDRIAYLKKRKSTKYIFGLHSWLGSNKVGTDVINTSKKSYQSSWNMFRKIHNHGTPNFHKKKYDGNFQLPNRYSSKVSPNVFNGNIRFVDNKHIKLSLIGAIRVSGSQKRLLQRNQDIRIGTVTVSKDSIGDYYISMQLASDEPFVDIPSKTDKKIGIDLNTDNFLTDSNGETVGNPRYYRRIKGRLAKAQRKLSLRQIRAKKEHRKLRESSNYQKQRLLVSKLQKSVMNQRANFLNSLSTTLIKNHDLVVAEDLSSKNMLKNHALAMSISDVGWGTFIQQLEYKAELYGKNFVKVNPYNTTQTCSDCGYLMKDEEHLTLSDRKWTCPNCDAFHIRDHNAAKNILAKGLLTIA

SEQ ID NO: 43801 - protein, 410 aa, Streptomyces sp.
VIVMQLRYAFRLYPDSGQRRALAKAFGCARVVFNDAVRAREDARAAGEAFPTAGQLSRALITEAKRTAERSWLGEVSAVVLQQSLRDVEKAYRNFFASLKGTRKGPKVGAPRLKSRKDNRQSIRFTANARWHLTGSGRLNLPKIGEVKVKWSRTLPATPTSVTVVKDAAGRYFASFVIDTDPAADATRMPDTDRSIGIDLGLTHFAVLSTGEKIDSPRFLRRAEKKLKKAQRELSRKQKGSRNLAKARLKVARAHAKVTDARREFHHQLSTRLISENQGIAVEDLSVAGLARTKLAKSVHDAGWSSFIGMLKYKAARYGRTLVSIGRFTPTSQTCSTCGAVDGPKPLNVREWTCAACGAVHDRDHNAAINVKTAAGLAVSACGAPVRPGVTPAQREETGSHGFPTGNRAA

SEQ ID NO: 43802 - protein, 212 aa, unknown
  TnpB Polypeptide
LDEGSQIPQARCGVDLGIETLATISRGPVNERESPKPLHNALRKLARYQRRLAKKVKGSNGYRKLRLRIARLHKRIADIRVNTLHQLTSYLSDHFAEVVIEDLNIKGMMANGRLARHIADVGAFEFRRQMTYKMDWRGGVLTVADRWYPSSKRCSACGAHRPDLTLADRVYHCQVCGHRQCRDANASKNLENYTARSAGIHAAGDDGSARAV

SEQ ID NO: 43803 - protein, 418 aa, unknown
  TnpB Polypeptide
MLLSKKTSIKVSREYANLIGHMCYAASKLWNVCNYERQHYKETGMEQYPDWYYQKKAHKEDLWYKQLPSQTAQEVCRLLDKAWKSFYALKRTGGIETPRPPRFKQESIPITYMQMGIVHERDTDRVRLSLPKTLKKYMEETYQIHENFLYLENKIFRGMDQIKQLRIYPPEKGSCKIIVVYEVPDQEELPQNGHELSIDLGLHNLMTCYDSGNGKTFILGRKYLALERYFHKEIARVQAQWYGQQSGKGVKHPVTSKHIRKLYKRKHDSVTDYLHKVTRYLAEYCREQGITCVVAGDIRNIRREKDLGHRTNQKFHSLPYNRIYIMLEYKLKRYGIRFIKQEESYTSQCSPLSPEVGKRYAEPSKRKERGLYRDGNRTYNADAVGAYNILRKYHSVSGVKKELSVTGLKTPEIIKVAV

SEQ ID NO: 43804 - protein, 283 aa, Escherichia sp.
VKRLQAFKFQLRPGGQQECEMRRFAGACRFVFNRALARQNENHEAGNKYIPYGKMASWLVEWKNATETQWLKDSPSQPLQQSLKDLERAYKNFFRKRAAFPRFKKRGQNDAFRYPQGVKLDQENSRIFLPKLGWMRYRNSRQVTGVVKNVTVSQSCGKWYISIQTESEVSTPVHPSASMVGLDAGVAKLATLSDGTVFEPVNSFQKNQKTLARLQRQLSRKVKFSNNWQKQKRKIQRLHSRIANIRRDYLHKVTTTVSKNHAMIVIEDLKVSNMSKSAAGTVS

SEQ ID NO: 43805 - protein, 465 aa, unknown
  TnpB Polypeptide
MTESTSTIERAYRVRLRLKPAQERVLLRLFGARRFVWNWAIRRKDEAWRADGTKLNAIALSSEFTQLKAAPETAWLADMPREPFDQTLRDFDKAWSNFFAGRARRPRRKKFGTVNSARFTLDQRRGQVNREAGRVQLYGIGKVRFRVTEAMPGRLRSVTVSRDAAGRWFGSFTADGVPAPAAGVATAAIGIDLGLKDAAVISDGETHHKVAAPKHLAAQQKRLRRYQRSYCRQRDAAMVRQGLDPAKRIPKGTRIAVSNRMRRRKAQIGALHARIGDLRRDHQHQLTAAAVAGAAVIAIEDLAVKAMSRGMGRRAFRRRVGDAGLGEIRQQLEYKAAWRGHVLVAVDRFYPSSKTCSACGELHAGLKLADRRWRCENCGTDHDRDINAAKNIRREGLRLLAEGTGPDGRTRRSRGTEARGEDACAAGRTSPAGQPTSTNRELAYRTAKPRTTRRHRDGPAPRVEG

SEQ ID NO: 43806 - protein, 423 aa, Cyanobacteria sp.
MSNYGGQQHLINPCPDLAAILEFLCSESAKLANCGTYYARQLYFKAGKIPRKYDLHKLLKNNSHFQAMYSHVAQQCLTTVAESFKSYIGLLKGMKKGTVEQRPKLPGYRQGGLALVTYPKADVKLKDGLLRFPLGSKVKTWFGLEAFYLPMPSNLKFADIKEFRILPRNKCFYIEYVYKQPDVAVPNLDKSKVLGIDHGLNNWLTCVSNVGTSFIVDGKALKSKNQWYNKQVATIKENKPQGFGNEKLAHITEKRNRQVRDAVNKAAKLVINHCLNNQIGTVVFGWNKGQKKSSNLGKKNNQKFVQIPTARLKDRISQLCEQYGIQFVETEESYTSKASFLDNDVLPKFREKPEGWQSSGTRVKRGLYRTAKNILLNADANGAANILAKVAIKLGLNLSGISRVSLIAPLKIRLWTLQESPGL

SEQ ID NO: 43807 - protein, 415 aa, unknown
  TnpB Polypeptide
VRKQVARTVAVNCFGNRFTRQILKSAEDAYRRMVEEMVRYAVEHGASQATLHRVFYAKFRREYPWLPTRLIKGAYRDAARRAKSFRAMKRRGRAYTEAPEVRRVTLTFADAQDWRLEGGALKLRIGGKWAELRCSGHKQLYRYLYGGWRLAEELRLRRAGRRWVAYLSFKREFEVEPDPRNVVAVDVNEDNVTAAVFVGGVLKEVWRIETGLGRMAIAYAERRRRITEGRHPSDREVRTKLKRLRERRRKMDVLRKAAKFIERLAEEHNAAVAIGKITQRAKEKMAEDKGRRLRHRIHQWSVRTLTKLLDEKPIQVAEVPEAGTSSRTPSGAHITFTPLVIRTAVRGASGRIRPLKMRLRVGRAGGEVWERDVLGAVNIGLRYLQMGGVVASAPTGAHAARAMLMNPRLGPIIIY

SEQ ID NO: 43808 - protein, 363 aa, unknown
  TnpB Polypeptide
MNKGVKFRIYPNKEQQNLINQTLGCCRLVYNLGLDMRNKAFEDGEKVNYSKTSAMLTELKRSDEFSFLRDADSVALQQSLRDLDKGFVNFFQKRARHPQFKSKHNNHQSYRTMNQNNKIRIVGKCIKLPKLGYVKFRQSMEVGHINNATIKRTPTGKYFVVLNVDFEPKVKQNAGGSIGIDVGIKEFYSDSNGNVVSNPKFLEKSSRKLRREQRKLSRKKKNSNNRNKQRIRVAKVHEKITNQRDDFLQKISTMLISENQVICIEDLKIKNMVHNHKLARCISSVSWGKFFGMLEYKANWYDNEVIKVPTIYPSSQTCSCCGYKNPLVKNLAVRKWECPNCHTKHDRDTNASINILNKGLSIA

SEQ ID NO: 43809 - protein, 363 aa, unknown
  TnpB Polypeptide
MQKGVKFRIYPNKEQRNLINQTFGCCRFVYNIGLAMRNDAFVNGQKIGYTQTSAMLTALKKQESFIFLKDVDSIALQQSLRDLDGGFENFFQRRAGHPRFKSKHNNHQSYRTMNQNNKIRIVGKYIKLPKLGYVKIRQYMEVGHINNATIKKAPTGKYFVVLNVEFELELKQNDSSSIGIDVGIKEFYSDSNGNVVSNPRFLEKSSRKLRREQRKLSKKQKGSNNRNKQRIRVAKVHEKITNQRDDFLQKISTMLISENQVICIEDLKIKNMVRNRRLARCINSVSWGKFFNMLEYKANWYGNDIIKVPTMYPSSQTCSCCGYKNPLVKNLAIRKWECPQCHTKHDRDTNASINILNKGLSVA

SEQ ID NO: 43810 - protein, 390 aa, unknown
  TnpB Polypeptide
MFQKWYNEIKKESEVKKMANKAIKYRIYPTTEQRIMFAKTFGCCRKIYNLMLSDKIAYYKATGKSIQTTPAQYKDEYPYLREVDSLALANVQLNLQAAYNNFFNKKRKVQSGFPKFKSRKARNSYTTNNQKGTVVIIDDKYIKIPKIGKVKAVIHRKASADWKIKSATIFKERDDSYYISILFEYDKAENTYIVDKTNAIGLDYKSDGLYMDSNGNVGANHKYYRESQKKLAKEQRKLSRMQGSKKNEPKSNNYIKQLRKTNKIHRHIANQRNDNLHKLSTEIANRYDVVCVEDLNMAAIGNKGFGNGKATMDNGYGMFLRMLEYKLSDRGKTLVKVDRFYPSSQLCSCCGNRKKLELSERKYVCTCGLEIDRDLNAAINIKNEGLRLLA

SEQ ID NO: 43811 - protein, 471 aa, unknown
  TnpB Polypeptide
MSHKTIIIRLFPNSVDEIKLLDLCRRYSSCTRYAYNRLLEGETYGDLRKSLQSKFELNARYAAEAVLEAQAKISSIEELGHIDPTKIVFGSKKLFEQLNNKGISDIQRSKLREEWVEKRQCNLYNSGDTYKDGNRHIRFVDNHKLRVTVGHKEWIYLDYKGHHKLYWSDFQISIALGTPYAVRVQRRNNIWLAYVTFKIVKKKVTKKQKMLGIDFNASPHSIAVAIVKEDGNLQSHENIKTGELTYLSTKRRELKRYELANQIVDQALSTDSSIAMDGVNVQNSKKGSGSSKGLRRVIGNFGVQSLRNKITSVAERKGVVIVETPCAYTSVIGVLKYAPRLGLSNHCAAAMVQARRAQGFTEKVPKNLRCLSSLQDDRSTNGRNRDSRMNSKESFGKWQTLKKVTLTELGTRWKSLKRQPSPIQRLNRQIPMLSKNTLEEIPGIPRLISFCKFIQPGKTIMGNTTNCRFHK

SEQ ID NO: 43812 - protein, 337 aa, Bacillus sp.
LEIFFASLKDYKKNPNKYAGTPRIPKYIRSSEKEILYTNQDCIIKNGRFLKFPKTKLQLNIGKLGFTEGKLKQVRVIPKYNEYVVEMVIDVPSEQQIIEENARYMSIDLGIDNLATIVTNTGMKPVLVKGKHVKSINQYYNKMKSHFTSILRNGKQTNEGPFTSKRIEKLHQKRYLKIKDVFHKVSHHIVKLAQEEVCKIVIGQNKSWKQEMNMGKRNNQSFCHIPHSLLIQMITYKANAVGIQVVVTEESYTSKARFLDNDFIPTYGENDQNTTFSGKRIKRGIYRSANKTLIHADVNAAANILRKVIPNAWTNGIEGVGVKQLANVLTPLTLIVR

SEQ ID NO: 43813 - protein, 304 aa, Bacillus sp.
MNGDKAFKKFFNGLSKFPRYKKKKNEDVKCYFPKNNKTDWAVERHKVKIPTIGWMRLKEYGYIPKGAVVKSGTISKKAGKYFVSVLCELKEQKAKPTLHSTGLGIDLGVKDFAVRSDGIAHENINKTIQVKKIKKRLRRAQRSLSRKFENIRKRGEHSVTNKKANIDKNILRVQKLYARLANIRLAYVKSIVTNVVKTKPTFITVEDLNVRGMLKNKHLSKTIAKQSFYTFKTWLLTKCKEYGIELRQVDRFYPSSKLCSYCGQKKADLKLSDRVYECGCGNVMDRDLNAAINLLQAKEYIVLT

SEQ ID NO: 43814 - protein, 352 aa, Chloroflexi sp.
MHSGVPWKLPTPRVTSSAQLRGETRTFGKFALQKRCYEQVRADFGLSAQLTIRAIAKVGDAYKLDKDTMRTFRPLAAMAYDDRILSFALPASKVSIWTLDDRQPIPFVCGERQRSMLETRQGESDLRFHRGAWYLLVTCEVEEPDPQDVDAVLGLDLGVVNLAMDRDGDVHSGKDVERKRQWYANRRKALQSVGTKSATRRLKQWSGRQRRFQKDVNHQIRKQLVAKAERTKRAIGVEDLTHIRTRARVSGPVQRARHRNWAFRQLRAFIAYKAQRAGVMLVAIDPAYTRQRCTVCGHTERANRRSQAAFCGVVCGHASPADDNAACNIRDRADVRRPMVSNLRVEAQAHEL

SEQ ID NO: 43815 - protein, 412 aa, unknown
  TnpB Polypeptide
MRSQKIRLKLTKEQENLAWWYSKVSRNFWNLLVDIDKRNNKGEFDEILKKNGNNTYYSKFHNREIYSLNQSDYRNLAKIVVAKNYEENSEKWSWYYQGNQSFIYGFISRELVKIRKQNKGKLNFRSVDKVQPNFNVRCDVSANGKRPSRIYLKENGKLQIPTIGDLNFGSVRKGFDLSCKKQVANISFDGKYWYLSYTEDIENQVTNLPDYTNGIGVDLGIKTLATVSDGTKVPNIKTFRRVRILNKRLKRLQRKVSRKYRINKCNKHNKTKNIIKLEKQIKLIYRSIKNIRINHIRKFVSELIKKQPQYIAIEDLNVKGMMKNKHLAKDIANCSFYTIREHLIRKANERRIVVRLVDRFYPSSKTCSNCSSYKKDLKLSQRVFHCNSCQEKIDRDLNASLNIAKTDKYVLA

SEQ ID NO: 43816 - protein, 358 aa, unknown
  TnpB Polypeptide
MAKAVIRTAKNQLKLLTESARYQFKNLYKRRKSLYKKIQKYKSMLSLSSTSLKQRKVTKLRLFWTQMKLNKVNQLIANGLKLHLTFGTKHLLKANKQKFFAKRDNQVVYFGDKNETCGNQQLQVQFNSKYNRFDYKLRLDNQWVSDSEKYIFGSFVLKNNEAKKDILKTLSEKKSNPLTYRILKREADLYLQIMYRREVVDITRTNHGVLGVDFNKGFISVSEIDSDGNLKYLTRYNYLHTGQSTKTKTSMLELVSKLVAQAFSVGKDIVIEDLVSLDSNKKQEKTTSKDYNRMINSLKFGLFKRFLLSKATKEGVSVHIVNPYNTSKIARKSYTNRMKLNVHDAASYVIARRFYQYD

SEQ ID NO: 43817 - protein, 413 aa, unknown
  TnpB Polypeptide
MMRSQKIRLKLTKEQENLAWWYSKVSRNFWNLLVDIDKRNNKGEFDEILNKNGNNTYYSKLHNRDIYKLNKTDYLNLAKIVVAKNYEEDSETWSWYYQQNQLFIYGFLARELVKIRYRNKGKLNFRAVDKIQPNFDVRCDVSANNKRPSRIYLKENGKLQIPTIGEVSFGSARKGFDLSCKKQVANISFDGKYWYLSYTEDTEISVTNLPDYTNGLGIDLGIKTLATVSDGTNVPNIKTFRRVRILNKRLKRLQRKVSRKYLINKCNKHNKTKNIIKLERQIKLIHRSIRNIRINHIYKFVSELVKKQPQYIAIEDLNVKGMMKNRYLSIDIANCSFFTIREHLIRKATERRIAVRLVDRFYPSSKTCSNCGSYKKDLKLSQRVFHCNNCQEKIDRDFNASLNIAKTDKYKLA

SEQ ID NO: 43818 - protein, 407 aa, unknown
  TnpB Polypeptide
MVEYRRYSIVVKKNNPLYQEIDMVCFLSKNLFNSTLYAERQSLFKDGVFKFYNTINKEFTHSKHIDYIALPAKVAKHTQMKVNEAIKSFIKLKKSNVNFKPKLPKYLDKDGRFVTEYESGALSFKKDGFIKLSKTNIIFPTKFKKGDIKVVRLIPKTGYYLIEILYDKKIKKVKNKRNKKFASIDLGLNNLATVTSNSFKPFIINGKPLKSINQYSNKMIAKYQSLLPRKQYYSNKINFIRYKREMKVNDYLSKSAKYLVNYLVSQSIDVLVIGTNAGWKQNINIGKRNNQNFTNVPFYKFKNKLAYLCEEAGIEVVEQEESYTSKSSFLDNDPIPTYPNTSNISFSGKRTCRGLYKSKNKTINADVNGSLNILKKYLISNAAWNGNIFSDLVEVCSTPRKVTVSFN

SEQ ID NO: 43819 - protein, 412 aa, unknown
  TnpB Polypeptide
MRSQKIRLKLTKEQEALAYCYSKVSRNFWNLLVDIDKRNNKGEFDEILSKNGNQTYHSNFHNREVYSLNQSDYLNLAKVVVSKNCEENEDKWSWYYQPNQSFIYNFLSRELVKIRKQNNGKLNFRSVDKVQPNFNVRCDVAINGNRPSRIYLKKNGKLQIPTIGGVGFGSARKGFDLSCKKQVANISFDGKYWYLSYTEDVDTQATNLPDYTKGVGIDLGIKTLATVSDGTKVPNIKTFRRVRILNKRLKRLQRKVSRKYLINKCNKHNKTKNIIKLEKRIKLIHRSLKNIRINHIRKFVSELIKKQPQYISIEDLNVKGMMRNKHLAKDIANCSFYTIKEHLIRKSKERNIIVRLVDRFYPSSKTCSNCGSYKNNLKLSQRVYHCNSCQVKIDRDFNASLNIATTDKYKLA

SEQ ID NO: 43820 - protein, 381 aa, unknown
  TnpB Polypeptide
MMLRGHCAHARFVWNLAVEQHPHWRPGRAGAPGYLEQCRQLTAARAEHPWLAAGSQMVQQQALRDFAQAVANYFGGTHGRPSWRKAGRDEGFRIVAVRPGHVRRLSRKTGEVWIPKAGWLRFRWSRALSPGVKSYRVTRDSAGRWHIAFAAIPVPVPAPGNGQVAGIDRGVTVSAALSTGEMLHVPGLTGRERTRMRRLERKLARARRGSERRRTIRLAIARLRIREADRRKDWAEKTSTDIARRFDLIRVEDLKVRHMTRSARGSAQNPGRNVRAKAGLNREIMRSGWGLLVRRLEQKALGRVQKISPAFTSQRCSECGHVDANSRESQARFVCTACGFAGNADVNAARNIAAGHAVTARGGDGVARPVNREPQLLLQSA

SEQ ID NO: 43821 - protein, 246 aa, unknown
  TnpB Polypeptide
VVRLDPDRTRGRKSNTSRRCHRHRPGHRPLRYLERRHVLRAARQLQAARGRLAQGTTGHEPQGEVSNNWTRAKARVQRIHARIGNASRDYLHKTTTAISQNHAMVCIEDLQARNMSKSAAGSTETPGKNVRAKSGLNKAILDQGWFAFRRQLDYKLGWNGGHLIAVPPRNTSRTCPCCKHVSADNRPAQARFACVACGFEENADLVGAINVLRAGHARLACQASGAVMPPATGTHRSDPEVAQCLA

SEQ ID NO: 43822 - protein, 402 aa, Escherichia sp.
VKRLQAFKFQLRPGDQQECEMRRFAGACRFVFNRALALQNENHEAGNKYIPYGKMASWLVEWKNATETQWLKDSPSQPLQQSLKDLERAYKNFFRKRAAFPRFKKRGQNDAFRYPQGVKLDQENSRIFLPKLGWMRYRNSRQVTGVVKNVTVSQSCGKWYISIQTESEVSTPAHPSASMVGLDAGVAKLATLSDGTVFEPVNSFQKNQKTLARLQRQLSRKVKFSNNWQKQKRKIQRLHSCIANIRRDYLHKVTTAVSKNHAMIVIEDLKVSNMSKSAAGTVSQPGRNVRAKSGLNRSILDQGWYEMHRQLEYKQLWRGGQVLAVPPAYTSQRCAYCGHTAKENRLSQSKFRCQVCGYTANADVNGARNILAAGHAVLACGEMVQSGRPLKQEPTEMIQATA

SEQ ID NO: 43823 - protein, 388 aa, unknown
  TnpB Polypeptide
MRAVKAVQQHYTPGPEILQMLEQFRQMLNDCVRIGLAENVTSLKSLSSKAYNQLATYDAMSYYKLCAISKATGILGNYRKARRKNPEIKEPYARRPQLTTCYGFKIKTLEGALLLPFKPKQPLSIPLNAHVLHVLSEPNIQIRSVTLTEEQLSISYAKEVEPIQPRGLIAIDRNLDNLTIANSDGQMKKQNLAKATEIKAMYGEIRSHMRRNDLRIRQRVTGKYGRKQREKVRQILHHASKQIVLDAKRREFGIVMEKLTGIRKLYRRGNGQGRGYRGRMNAWSFAELQRQIEYKAAWEGIPVIYVNPSGTSVKCSICGSRMKPEENRTLKCRSCGFSVDRDVNAAGNILARGVRFAPFASASEAMVQEPQRRVILKVDADELTKSVS

SEQ ID NO: 43824 - protein, 424 aa, Limnoraphis sp.
MRLTHIYKLQPSAEQVAKMETWLEMLRRHHNYALGQRFDWRRRTRCQIDRCSLVSEPIGDIPENFPGYNFQARELKTTKELFPVYKEIHAEVQQQNLKRLDLSWDRWMKPDKSGKRAGRPKFKKKGQLRSFTFPRINCPKAGVNRIENGLLTLSKIGSMPVIMHRPFPDGFELLTATIVKKADGWYVAISLEDDTVPTPKPIDEIKSAVGIDLGLKSFQVTSNGESVDVQQHYRKTQRHLARQQKKLARKQSSSVNSQKQKPKISLVHQRIGRKRKDFHYNVAHQLVKKYDLIAVEDLNILGLARTRLAKSIYDVAWGKFLTILEAVALRSGVHFVKVNPHSTTVDCSSCKTKVPKTLSVRLHQCPKCGIEIDRDENAAINILYKGLTTVGLTVAACGRLSDYTPNEAGIPNSDVRMLTLYSQN

SEQ ID NO: 43825 - protein, 178 aa, unknown
  TnpB Polypeptide
MKYNELMSQVLTISCKLKVSPSQAAKLDATMEAFGQALNWVNQNTPEKIVNAVKLQSLCYYEIRARFGLSSNLAQQVCRRVAGSRKVARQRNRPVKEFKRRFVTYDARIFSFREKDWTVSLTTVEGRERFELAIGNYQRGMLAGSNPKSATLVQRKDGSYYIQICVEKKHPSNKIPTG

SEQ ID NO: 43826 - protein, 173 aa, unknown
  TnpB Polypeptide
MQRTVATAVWQGETLSSAWVNHRISKAIVSRAKATNSAIALEDLTGIRERVNQQPRSKTERRRANSWAFYQLRQFLEYKARVAGVSLVLVPPAYTSQTCHRCLHIHPDPAQSYRSGKSFKCGHCGWEGDADLNGANVIALLGAVVNQPRGPGLFCSLVEQNRLRATESPLRTA

SEQ ID NO: 43827 - protein, 431 aa, Metallosphaera sp.
VSKNLRIKSFQPEEEYVYLTYSLKNDKKEESKILVENYKILLQKALDWLWDRTKVERKQVKKGKKIFTKIKITLPERKEVYKTLRDELEKVNVLASHYVDRAINDSFSILKSWKRRAEKGQASLRKPKLKKVYVRVKSTLRKVEGKSVRVTVKPYEYITFSWSHTWFSRRVKGLELGEPIIKEDKVYLPFRYELPWSTPIDFLSVDTNLYTLDAYDGDKFVTFSIKELYSLKYGMQLKMSRVRSFASKQTKKGMELMRKYSHRERNSVVDYIHKFVNKLQETYPITMFAVEKLNKQAMFEDANDSLSKKISKTVWRSIHRLLKYKAPLYGSFVKEVNPHLISKSCPRCGRVSRKVGRTFRCERCGFTLDRQLNASLNIYLKMYGFPHICDIPRVWVGVTPLKGRRGMNGAMPRDFGEVQGLRIDMKYYEIL

SEQ ID NO: 43828 - protein, 458 aa, Metallosphaera sp.
MDFLVTPPGQHTGDEEREPTSTPAIPGGVYEVEFKNMRTNVIRLLPNGSQRKKLLKLADTSAKLFNELNYERRQQFFREGKVDFKGTWGKCYEKYKGVLGVNAQAVMKNNEAWSFFSLLKLKKQGKLPPRMGRVSPPRYLKDRESKEREKILVVRQDRYEVHEESHKIVLKDFMEIDFEGRLRWYGKQGRLEIIYHEDTDRWYAHIPVEVGVETTKRGKKSKHVVHGERRSIQVSPKGNKVASIDLGVNVLASAVVDDGTWLLYKGIRAKEDYFHFEKRVAEVQSLAHKARNVGECEAYEELTREKRRLFKKLERRFLHLYRTLARGLVEELHELGVSTLYLGYPYNIGQDKGSKYTVNAWSYRKLIDAIELKAQEYGMKVYEVVEYNTFRLCAYHNVEVRRKPRGVITCPLDHKLHSDLNALNILRQATGKVINAVKKPLSFIVDHNRIAPVKGSNP

SEQ ID NO: 43829 - protein, 281 aa, Metallosphaera sp.
MARRVKAIRATVSMKIALSDSLLTLVNNHVKALHFTLFWLKENVPNPNEKGVLGRIHEELYTRLREEYNLPPRIAEDCYRDALATYKGWYNNPKRGRFPRVYKPTVWLTPKASYNVDLDNMTVRIAGVGELPILGYPRNLKDYMSWKMKEARLLIKDGKAFLKVVFERPLEKVEAKSSVAVDINMSEVVVGKDDKHYVRIPTRIEEVHHWKSLAENLQMKYSRRWRENRRIVNRIHSLHQKARRIMEDFARKVGKWVVEEAERMGAKVIKLERVSRTQIIE

SEQ ID NO: 43830 - protein, 287 aa, Metallosphaera sp.
MWRAKGKSDVIQLSFKYRIYPTKEVEEKLLKVMQIEAKVYNALLDAVNNARKEGRKITPEDTQDMLKGLKIDGKDLVYSKALQMVNNQLWYNINALHELKRKGKKVGKLRHKKIMKIINYNQSGFKVEGDKLILSKIGEMRVLFHRPLEGKVKGVIIKKSVTGWYAVFQVEVEKKHLDKAGKVVGVDLGVDKLVTTSDGVVLENPKVFDKVERGMKILQRSLSRKKRGSRNYEKVREKLVKLHEHAKNLMSDFIHKVTSWLVEQYDEVYVEDLDVTVSGMQIFRRKY

SEQ ID NO: 43831 - protein, 408 aa, Metallosphaera sp.
MWRAKGKNNTIQLSFKYRIYPTKEVEEKFLKVMQIEAKVYNALLDAVNNARKEGRKITPEDTQDMLKGLKIDGKDLVYSKALQMVNNQLWYNINALHELKRKGKKVGKLRHKKIMKIINYNQSGFKVEGDKLILSKIGEMRVLFHRPLEGKVKGVIIKKSATGWYAVFQVEVEKKHLDKAGKVVGVDLGVDKLVTTSDGVVLENPKVFDKVERGMKILQRSLSRKKRGSRNYEKVREKLVKLHEHAKNLMSDFIHKVTSWLVEQYDEVYVEDLDVKEMVEDSESKTLRKHILHSNLSRFMSYLSYKAERAGRRVVKVNPAYTSKTCARCGYVKKDLSLADRVFACPNCGWSIDRDYNASLNILHTGSGLPLEPVDRRPLLYIPFSEGVYSKFPGRSRKSPSRGGDAPS

SEQ ID NO: 43832 - protein, 336 aa, Metallosphaera sp.
MKRTNVVKLVLDKETHERLKRLAIATAKCWNEVNWLRTQQFKKGRRVDFNETEKAVYAKYKTILKVNAQQVMRKNAEDWRSFFTLIEMKKESKLPSWFKPRPPGYWKENGKYKLVLVIRNDRYVINEERREIHLKDFHLTLKFKGKLKWKGKQGRLEIIYDEARKSWYAHIPVELEHRVEKGNLTASIDLGIVNLATVYVEDGSWYLFKGGSVLSQYEDYSKKIQITQKTLARHKQERSMKLRLLHEKRSRLSRHALNSMVRKVMELLKEKGVDKLVVGHPKDIVRSRGNKLTVNFWNYGYVIKRFKEVGEEVGVDVVEVDEAIYFKNLFLVRGSP

SEQ ID NO: 43833 - protein, 365 aa, Metallosphaera sp.
VDEDERKIVLKDFNLEVHFEGRLRWYGKQGRLEIVYDEITGRWYAHIPVDVGVETTKKGKKSKHVVRGERKSIRIATPRGNKAASIDLGINVLASVVVSDGTWIMYKGVRAKEDYFHFEKRIGEAQSLEDKAKNLGEDQASSESSREKRRLFGKLGRRFLHLYRTLAKGLVEELHKLGVSTIYLGYPYNISQDKGNKYTVNVWSYRKLIQAIEMKAQEYGMNVYEVVEYNTSRFCVYHGVEAKRGPRGVIRCPLNHKLHSDLNGALNILKKNTGRVVNVVKKPVSFLVLHNGIAPVKGSNSQDPSRTSALYGRPQNHLRKNKSILLLSVFSRVNIKSLRSDRSSRKQRMSSNLNSSLLMTSLNTV

SEQ ID NO: 43834 - protein, 387 aa, Metallosphaera sp.
VANQIFLGRSLKAEVKVTIQGKILNPNREKRHKLNVVLEKYRKAVKFFASFKIRDKTLLQEKAYKEARMRFGLSSTLTQTARDKAVELVKENEGREFHVHRVSIRVNYRAFKLVKRDTKLTPYWLYLQLDGEGAWYPVQFGKRQEEMIEDALVEDEWSLQQVELVKRGGEWYAYFTLEKPFKGYKPQTAIGIDLGKRNLATVVALVNDKPVKGTFFRSSKIKEVRHKYFNIRKKLQEKRRLDVVRRLRGKERRIVNHELHVISKKIVEYAKQFPSPVIVMERLTGIRENFERGKKLNRRFHSLPFRKLQSMIEYKAKLEDINVIYINPKNTSRTCHRCGHVTRADRREYRCPKCGMIYNRDLNASINIARALTRGTGRVSVNGPKGR

SEQ ID NO: 43835 - protein, 430 aa, Metallosphaera sp.
MDSPLVVKDKCTFFKILLMPDVGFRFRAYTNSQTLRALKAQLRMACELYNTLRWADSYFYARDGKGLNQTQLRQLALDLRKQDGEYKQMHSQVAQNVADRFYEARERFFKGLSRFPKERKPHRWYSLVYPQSGWKVLSAKIIRKNSREAREGHPKKLIKLSLSHLGVFKVLVHRDFPLDKVKRVIVKLMPSGRIYISFVVDYEFPKLPQVNKVTALDVGVKTLIMTSHGEYFPNLKPYEKALWKVKHLHRILSRKKFLSKNWFKAKVKLAKAYEHLKNLRKDLYMRLGKHFARNYDVLVMEDIQVKKLVGNSLRRMRMRLHDVAFHELKMILKYQMEKHGKSIALVDPAYTSKTCAKCGYVKEDLTLLDRVFSCPRCGWITDRDYNASLNILRRSGSVRPLGPVEFRPLPVLRYWQGGARKQEVQSVRAG

SEQ ID NO: 43836 - protein, 367 aa, Metallosphaera sp.
MARRGEAIRATVSMKIALSDSLLTLVNNHVKALHFTLFWLKENVPNPNEKGVLGRIHEELYTRLREEYNLPPRIAEDCYRDALATYKGWYNNPKRGRFPRVYKPTVWLTPKASYNVDLDNMTVRIAGVGELPILGYPRNLKDYMSWKMKEARLLIKDGKAFLKVVFERPLEKVEAKSGVAVDINMSEVVVGKDDKHYVRIPTRIEEVHHWKSLAENLQMKYSRRWRENRRILHRIHSLHQKARRIMEDFARKVGKWVVEEAERMGANVIKLEGLKNLIKNVGKLPKEYRDKLYLMQYRRVQYWIEWQAKKHGILVEFVNPKYSSVSCPRCGKRMKEVSHRYFSCPSCGYENDRDVTVSGMQIFRRKY

SEQ ID NO: 43837 - protein, 174 aa, Okeania sp.
MQSIKTKLKVNNYQKTILAKHAGVARHAYNWGLATCITEYESNKKRLSAITLHKRLVREVKSENPWYYEVSKCAPQEALRDLERAFKNFLTIPKRGFPAFKKKGKKDSFYLEGSIKILKGNYIKLPRIGIVKTYEILPSVPVKNVRIASFPAECYANRGAFLSECCANANKKSR

SEQ ID NO: 43838 - protein, 441 aa, unknown
  TnpB Polypeptide
MEKHYSISEFLKLSEISKTTQTTIVTNCVLYNDLNKELYDYFEEVTPLFAFLVRRTIHHLRHKLKDETELSYRTRLKQEYNITNRFAKSIINTAKNQLKLSKEAGKYLHSTYNKKIKKVDAKIIKTKDVLNNQMTSQKRKKKLKTKLFWLEMKKNRLIQLKNNGPKPMLTFGTKKFLKTNKSEFLEKRDNQIIYLGDKNDYKGNQQFQISYNKKYNNFTYKIRLENQYIKNSKHIKGQFIIKDKKAKREILKILNKPKSNSLTFRIIRKNNLLYLQIMYRTGSRFKTLSSHGVLGVDFNKGFITISEIDETGKLLNLDRINYIHKGRAGVTKNSMHHLVKDLVDIAIKSGKDIVIEDLKSLNKNKQEKTERKHYNRMINTLKFGKFRKFLETRCDKSGVGLSLINPYNTSIIAASKYCYNMKLNIHSGASYVIARRFYDLD

SEQ ID NO: 43839 - protein, 563 aa, Saxeibacter sp.
VIVKLRTGKQARAVVAATGGVPIPAMPRKDGTAGTSVLVDIGPDFGAVRSAIDTVTVLYLLFDGDADSYLATGNPGLRVPTGWAVTGAQFEVCWPEDPERASLIRSHFGARRKAYNWALGTVKDDMDARTQDQTHTSTRWTLADLRRRWNTEKDTVAPWWAANSKECYSSGITDLVQALDNWGSSKAGRRKGKKVGFPEFKSRRKDRSRVRFTTGAMRLEADRRTIVLPVIGGLRSKENTRRVQRHLTSGRARVLNMTLTQRWGRLFVSVGYALHTPTEHHRTPVMPGVRAGVDLGLRTLATVAYLDPATGETVHEEHANPAPLRATLTARRKAGRQMSRRIPGSHGHRAATATLHRLDRRAVYLRRETAHQLATSLARRFGEVVIEDLDIAAMKRSMGRRAFRRSVSDAALGMIRPMLTYKTSRFGSTLTVADRWFPSSQLHHGHTLPDGTGCRLESVKGPIDKHLVCLETGLVVDRDLNASDNLRDWPDMPVGAQLVPRPRTSAVPPVAGKTAGQTQGGPHGSTEDLASARKTRRKRTAARSEVRTHTAPGGRRNPEKGAT

SEQ ID NO: 43840 - protein, 354 aa, Geitlerinema sp.
MKLNSHMKALYTSAAQPTCISVGKAFKSFKELLKPWRKGELPEKPKPPQYRTSDSRFQIGYPQRWLKLVDGVVKVPMGKACKTWFNLSEVFLPFPTHLDWNQVQKLQIVPRAGYFDVVWIGKGKPVEPVDFAPDKALSIDPGLNNWLTCTTTEGTSFLVDGKHLKSLNQWYNKRVANIKEGKDKYFWCNPLDRITGKRNHQMREAVNQATRIANEHCLEPGIGTIVLGWNQSQKQRSEMGRKTNQKLVFVPSSRLKKRIQQLAEQYGIIFIEQEDSYTSKVAALDLDVIPVFGKKSGGWKPSGKRVKRGLSRSADGTEVNADAKARWNIGRKANVTGMQSTPATGVLTSPKRLR

SEQ ID NO: 43841 - protein, 403 aa, Rhodococcus sp.
VTEVKRIVTIKLAVTDEQAAALKQTLLTCNRAADVVSDVAQQSSDRRAFALQKTVYTQIKALGLSAQPAVRVIKKVCDAYTTRKANLKAGNYGRPGTKRYAGVADTAVRFRPLAAQPFDDRCLSWQLDSSTVSIWTVSGRMKGVRFVCAPWQRKLLADRKGECDLVFRDGSFYLYATVDQPSPVPVVPVKDPVAGWVGVDLGIVNLAVTTDDDPNELDVRWSGGAVTARRKKNQVMRTALQKVRTKSANRKLKTRRRKEQRFATDINHQLSKTIVAGAQRTARGIAIEDLSGIRERVRLAKKRRAQVHSWAYAQLRDFVEYKAETAGVPAAVVNPRNTSRTCSQCGYCDVKNRRSQARFECRECGWTAHADHNAARNIAALGHEKYWAAQSTVPIAATALASS

SEQ ID NO: 43842 - protein, 413 aa, Firmicutes sp.
MKSALCNNCSTSFESCYPKAMKRTFKYRLYPTKAQQTKLRQALVRCCFVYNQTLAARRQAWEQEKKSLSLFDTQKLLVCWKQEKPELKQVHSQVLQETQKRLDRAFQAFFRRVKAGEKPGYPRFRGSNGYDSLTYPQYGNGVLLNGSMLWLSKIGTIRVQLHRPLEGRIKTVTIRRTAGKWYACFSCEVVEKLLPPSQEAVGADLGLQTFATLSNGETIKRQRWMKQDAKDIARLQRKKEKYTIGSLQRRKAVIALNHAYQRSKNRRQDFLHQQSRKLVNRYGYLFFEDLDIRKMQQGNDPKINRKALNRNISDVAWRRFLQHIAYKAESAGRVLLLVNPQETTQRCSRCNSIVPKSLDERVHHCPYCGGLILDRDLNAALNILALGLQSIGTATQLRPVEAPGFSPGDVGRG

SEQ ID NO: 43843 - protein, 389 aa, Marinobacter sp.
MLKAIKVRIYPTPEQAEFLNRQFGATRFVYNKALHIISSQYRRHGRKLRAKQDLKPLLAVAKKSRKYHWLRDFDSIALQQACINLDKAFQNFFDPKHPAHYPKFKRKHGKQSSYHCTSVSAGENWIKVPKMEPIKARIHRELTGNLKSITLSRTVTGKYYASLLFEDGVEAPSPLKTVDAVLGVDMGLTHLLIDSEGNKIANPRFLKRAAANLRRKQKALSRCQKGSKGRAQARLKLAKAYERLANARADFQHKLSRQLIDENQAVVVETLKVKNLLKNKKLAKNIADASWFSLIQKLEYKAKAQGKYLVKIDQWFASSKTCSCCAHKVDSLPLKVRNWSCPVCHTEHDRDINAAINIRQQGVIKLRAEGLSVPANGGLRKPGHAPAAA

SEQ ID NO: 43844 - protein, 526 aa, unknown
  TnpB Polypeptide
VAPGPSGVAIRDRLRVLPADANVLRLVGAHLGSLAAGDLAVRSRDGLDHGKDTWAARKRDLTASSSSRWAGAVTKSTHDQWALARRGLAAHIQNLDAGMAAVRRRLALPVGQKGSNGEPGGYRSRREWHTKSRRLAALERRHQTASADWQAGRVRVVRGGKRLANTRHHLDRAQLTPQQWRQRWDAARMFLSADGESGKRYGNETIRITDTGKVSIKLPAPLAHLANCPHGRYTLACTVAFPHRGEEWRDRIEANAAVAYTIHHDPDRDRWYVTAAWQRKDTVTVPLDAALAAGCIGVDTNDDHLAAWRLDPHGNPIGEPRRFFYDLGGDAAHRDAQIRHALTRLLHWARQTGVGAIAVEDLDFSDSKTREKHGRKKRFRRLISRFPTARLRARLASMSAEAGIAVVAVDPAYTSRWGAEHWRKPLTTPSRKTTRHDAASIVIGRRAQGHPARRRTSPPPRHQSDGVGHRNVQAGQDTAGREGPRRRDTGPRPAGVSPVTGRKRATSAPNTVRVARTDRDSLPVSV

SEQ ID NO: 43845 - protein, 486 aa, Streptomyces sp.
MKKFKPLPGFTVLAHKLALDPNATTTRRLHSHAGAARAAYNWAVAYVTAVWWQRKAEQSYGIPEDELTPWRSWSLPSLRKAFNEDKRTNARFAGWWEENSKEAYNTGLAGAAAAFDNYAKSKSGKRKGPRMGIPRFKAKRKARLTCRFTTGTIRIEHDGRHITLPRIGRLRLHENRTDLRALIDAGHLRILSATACLDRGRWFVSLQVEQKHQLVKVARPDTAVGIDLGIKTLAVLADSDGVRGEEPNPRHLDRAHKQLRCASRVVSRRQGPDRRTGQQASKRWEKANRVRNKVHHRVANLREDTLHKMTTRLAREYGTIVVEDLNVAGMGRNRRLSRRIADAAFGEIRRQLTYKTRRHGTRLIVADRFFPSSKTCSRCGVVKAKLPLSTRVFECDNCGLVLDRDANAGHNLVALAARTTGTGVAGDLDNAVEAESKPRGADRKTRTTRPSRKAQAGRAGGTIPSPRAGKETGDRQQATRTQLALW

SEQ ID NO: 43846 - protein, 405 aa, unknown
  TnpB Polypeptide
VIKINRVEKHIIKPNNKYYSLLDEFCYKSKNLYNCANYIIRQEFINNGKWIRYNDLDKLLKQEGNNFDYKNMPLASTGQQCLKLLDKNWKSFFQSIKDYNKNSNKYLGRPKLPKYKQKDSRNLIVLTNQNCKINKGIIKFPKAFKGFYLKTKVSNLQQVRIIPKDKYIVIEVVYKTEDIQLLQDNNRYIGIDLGLDNFVTITNNCGLIPLVINGKGLKSINQYYNKQMAHYKSIAKRVNKLDYTNKMRKLTLKRNNKVEDYIHKASRFVVDYCRNNEINTIVIGNNKNWKQNSKMSKRVNQNFISIPYYSFIQKVQYKAEEFGIQVIITEESYTSGTSFLDNELPIKENYNKSRRKYRGLFVSNEGIKINADVNGSYQIIKKVFPKAFADGIEGVGLHPFKVDLL

SEQ ID NO: 43847 - protein, 387 aa, unknown
  TnpB Polypeptide
MVKAIKVMLIPNNVQKTKLFQYAGASRFAYNWALAREIENYEKGGKFISDAELRKEFTKLRHSDEYAWLLNISNNVTKQAIKDACTAYKNFFRGLQKFPRFKSKKRSMPKFYQDNVKIRFSNTHVKFEGFSSSRKANKQKMNWVRLAEHGRIPTNAKYMNPRISFDGLNWWISVCVEFPDCREILNDDGVGIDLGIKDLAVCSDGTKYKNINKSQKVKKSEKQKRRLQRSISRSYEKNKKGESYCKTNNVIKKEKLLLKRNHRLTNIRKNYLNQTISEIVNRKPRFICIEDLNVSGMMKNRHLSKAVQAQGFFGFRKQLEYRCSDKGIQLIVADRFYPSSKLCSCCGNIKKDLKLSDRVYRCACGNMIDRDFQASINLKTYGEKFAG

SEQ ID NO: 43848 - protein, 566 aa, unknown
  TnpB Polypeptide
MNYIQKKAKRRKKHKELSEQYKQINAEKIADFVNKIALHKDKLWCPTLYNKFAWQYTNSCYDMSICRSNKSFDEVTFISNKINDKVDDKLNDKVDENTKCLKINMVVTNEQHKILQRWFNSYIMMYNETVNYIKSKLSFNDIKLLKNSYTIEKNLNSLKKTNTKHLTNLQKQKTKLLSSLNSIIKKKNKGWNKKLDIIRNDIHVTNQNITNTNKELHNLNIEIEQNKKYHKKVYNIVNFYKLRTELKNNRETIIETSQHDQLNYNTKINVHNIDYAIKSACTSYKSCITNYINGHQKSFRVKFMRLNKKRKVMDIESSFIKQNQICYKILGEIKYTYNNMPYILTSTKNVKIFYDSELEMYNLLVPEIVNTPQTTAKRYIGIDQGIRTFATGLSNDHAIKIGTNMSGTIKKYFKRIDTINAKEENEKIRKRKVKKYTRKMKAQIDELHWKSINFLTENYKDIIIGKFSIKDCIKKEDSVLDKMTKRIGQLLSPYKYRQRLQYKCATRGNNYIEQDEGYTTKICSKCGNYSKTIGGKKVYDCNKCHVEIDRDVNSGRGILIKSMKSE

SEQ ID NO: 43849 - protein, 378 aa, Tissierella sp.
MKKIIKGYKYRIYPTEKQKLQINKTFGCCRFVYNYFLAIRIELYKTEQKSLFYNKCSDILTQLKKEKEWLKESDKFALQNSLKDLDSAYKNFFKEIKKGNSNQGFPKFKSKRNNYKSYKTNFTNNNIELDFANNEIKLPKLRWVKCKLHRKFTGKILSATISYVPSGKYFVSFNVEREHKELPKNSNTIGLDLGVSNLLITSNGETFENNKLTYKYEKKLAKLQRKLVKKQKDSKNFHKQRIKVAKLHEKITNIRKDKLHKISSQIVKENQFIFSEDLNVKGMVKNHKLAKSIHDASWYELTRQLQYKAEWNGRIYHKVDRFFASSQICSNCGYINKNIKDLSIRTWTCPNCSTKHNRDINASINILNQGIKDLELAV

SEQ ID NO: 43850 - protein, 492 aa, unknown
  TnpB Polypeptide
MIFKHEPDIIPWTGPIPEELQRMLGDYVVIVNHLLALGLYHKVGLEEHYYPLADGDGTGERKKIPPDRELRDLAKDWFVEYYKSIYKVHYLDSAASFAMQLIKSWRSNGGDINRLPYLRKPIARLNNDLYSIERSKKDGSLRLKVTIAPHKFVTMNIKVEHRHFVEWSKNRPGALVILPSGLRLCFTDDSPVKRSKKTVAYDFNFKRVIFSKDNGEQLESDLSDVMAIQENHRRKRISVQRTLRHNPAKAQRLLEKNRGRETNRVDDRLHKKIHGRDSEIKGFIQGHHLGVEDLTGITQDILKDDHGRRFNVRMSSWIHGKFADIITHHHPDSELYYTRGTSRYCPFDGSPVTHPSWKESKCPVCDVTYDRDWLESVHGLVRTLPPRHKKGQKWKTAGEVLPKKVVERLKRQSRITFKPTDVGMGTSLTKRSSLFALNVPSSVQSKSDTGIGQRTDVVLGNRYDAVHSNECAKKLGYDANDEVGERHVRFST

SEQ ID NO: 43851 - protein, 305 aa, unknown
  TnpB Polypeptide
LDNAYKRLFNKTGGYPKFKSKYNRNSYNTTAVYNKYKDKEYCNIELDLTNRQIKLPKLKWVKIRGYRNIDNINGKIKSATISRESNGKYYVSVLYEMYDKIPVINHRTIVGIDLGIKKLLTLSDGTVYDNNKYIDKYAKRIKRKQRELSRKEKGSKNYYKCKKELAIFHSKLANARKFYTHKITKDITDEYDIITCEKLKTKEMIIKGKDSRLSSKINDATFSEIIRQFQYKAKYKGKYFYQINTYYPSSQICSRCDNKDKRYKDLTRREYKCTKCNQEIDRDLNASINIMFEGLKLHMKNYAKM

SEQ ID NO: 43852 - protein, 461 aa, unknown
  TnpB Polypeptide
MMKRTNKLRLRPTKEQEKALFSLCGMSAVLWNKVNYKRRQSFFAGEIDWDTKEEYEEFKRIIGSATAQQIIRKNDEAWRSFLRLLKLKQKGKRPPHIKKVSPPHYWKDRLTGKRKLLTIIRNDCYRIEGVGNKKYLVLPKGLRIRITGSIRWRGKQGRLEIHYDYDSGQWYALQSVEIKIEFVKSAKRAYADLGVINIITAWIEGERQCIAFSGKRLLSDWWYWSLKISKHQSQLKRVNGRNTSKQLRRLYRTRQRRYRHLINTITYRFVKLCFNEGVREIVIGDVSHIRDGNDKNRKINAIIHNFWSFGYVIDRLKTTAENFGIKVRLVKENGTSSRCPWCHSKNVRKHKRLFVCLNCGVKAHRDVVGVLNIALLCCEGEDKSREGFNGVLAHPLLLRVEEGVKVKADETPMSVKPLEARISTALTVESVNVTPPGNIYSVQFTRIIHDVVFESGKYLWN

SEQ ID NO: 43853 - protein, 457 aa, unknown
  TnpB Polypeptide
LDETYKLAKTNRKVIMQVKKSLKIPIHYDTTKSKINILDNLTARITYCIMRISELITDETKIDRSITRKLVKDNNIALKTGLSAGFIDQCIDKVIWAWNSYKRLHREWEKKLKRAEERVQSAKDEKEKEKREKSLQKMLKREPSKPSFQDKTACRIDYRTGKVERGKGKLTPLWIHISTLEKGRTIDIPLNPSQYHVNQLNNAEIDDFEIIKANKKYYIHISITKVVEDKPISSIGGIDQGLNRSLAVVLLDAPMPREEHLLDAAKRELLDKYDTIIASLQEAEKWDKLRELRNKRANVSIHGDWCLANQTAEFTEKSLIAVGNTPFRQTQFRGNGMPQLRKRIGKWSYGRQRKFIALKRAERGYPTLLVDEYNTSRKCHICGSMLTTRKWVDGYSWILCHSCGTKIDADFNAAYNISDSIIPTAVWVYNSSIEYALRCRDDRLKVQMNMEKIHASA

SEQ ID NO: 43854 - protein, 223 aa, Acidimicrobiaceae sp.
LNVQCVTVPAIPLEPTGRTVGIDLGVTNMVATSDSVFEEGEHFGSKAQHGLARAQRSLATKQLESKRRRRQVEEVARLHRKIKNQRCNFAHQLSRQLVNEYDFIAYEDLKIAKMVSTPTARPDPEQSGAYFPNGARRKAGLNRSIHDAAWGQFLSFLIYKAESAGRTVVKVNPRFTSQTCAECNYVDAGNRVRQEEFRCLACGHCAHADNNAARNILRAGRAL

SEQ ID NO: 43855 - protein, 373 aa, unknown
  TnpB Polypeptide
MLKATFQYRLYPTPAQETAMQRTLDECRWLYNRLLEERKVAWEETETGVSLYDQVTRIPALKAERPALDRVYSQVLQNVATRIDLAFKAFFRRVKAGEKPGYPRFRGAGWYDSFCYPGSGHKVNSNRVFLSKIGHIKAVIHRPLEGTIKTCCVKRTGTGKWYVTFSCAVDETPLPARESAVGIDVGLASFATMSDGVEVANPRFFRTDEAVLAKAQRRLSKEPRPEKGQRATPERRKRRKVVARIHERIANRRKDFAHQQSRKVVNQHGTIAVEDLSVDRMVHNHCLGKSISDAAWSMFTSCLSYKAASAGRRYVVVNPAYTSQNCSRCGHRQKMPLSERVYQCPCCHLTLSRDVNAARNIRRLGLQSFGEEP

SEQ ID NO: 43856 - protein, 393 aa, Desulfacinum sp.
MIRTYKYRLYPTNAQDRALDFLLWQGRLLYNAALEQRINAYKNDGKSVTYPQQWAYFRDQRHENPDTLGKLNAASVQQLLRRLDKAFRSFFRRLKAGEKPGFPRYKGRTRFNSLEYRHGDGCKLKFDAKHRALLYIQNVGDVKVKYHRPIPDEARIKHVVLKRKNRKWYICLQIELPDPVVGEHSGPAVGIDMGLHSILASSDGQTIENPRWLRKSLAKLRVAQRRLSRRKKGGARRRKAAAQVARLHERITNQRLDFWHKTTRRLVDTYGLIAVEDLTLNFLTSNRHLALSAHDAGLGMFRQLLAYKAESAGVRVVAVNPAHTSQVCSSCGELVEKTLGVRIHRCPSCGYTADRDVNAARNILDLAVKSARTGPPGVNVAGCGVRSLGSSLL

SEQ ID NO: 43857 - protein, 496 aa, unknown
  TnpB Polypeptide
LPTKKQQQVFKRWLGSYNYTWNKTLQYIKDNKIFKPKYVSLKNKFTVLNPNHLMGQTNPDVPLFMAFTSSKIRARAVQNLCTVYTSAQSNLERGNIAGFNIKPKCKKNQTRCFSLPIPKDGISFTEDANQRKTHISIFPDVMKHCFGNVKPKATSKNQTIKSHLDYKKRVGSNEMYQEYLSFMVSCGVPITLRDEILRKHYQSSSGLDVWNDYFDYMIYNGFHDNIDSDYKLVYKNNNEKVAKPKLEVKPSNSTLIRFYHRKNDKLLYNLSANYDCTLKYEYGSWYMIIPYIRKPKYEPEQRNTIVGLDPGIKTFQTFFSENMHGKLQQTTRFKTIRHVLDRYHELYKNKKIKYCKFKFKTNQLYRKQSNLARQIHYETINFLTSRYNWVLLPSFNTHDMVRGYGMSKETKRETSQLQHYKFQQRLLSHCASMKNCKVLIVSEAYTSKTCGRCGHLKNNLTLKDRIYKCSHCGLHIDRDINGSRNVVLRNIQTDCL

SEQ ID NO: 43858 - protein, 408 aa, unknown
  TnpB Polypeptide
VRIYPNKSIIKQFKTWIAGTICIYNKVIYFQSNCSEQDKNMSHFELREKFVNEMIVTRKDVSELNKELKGNRKLNGAILDSIPNPELNTWVRKVPKVVRAGAIKDYCTSIKAAFENLKRGNIASFKMNYRKYINDPAFHIEKQANSVSNGKYIKLFPSILKKAKIYNPCILVNKSDRQFVEKYIGKKPDQDCKIKYEYGQWYLIVPYQSEITPINEVRGACAIDPGVRTPLTLYDAERLISMEYKKEIYNKLIKKLQLLQSLRAIKKIRNRSYKKARYRTRKRWVNLVNDMHYKCASYLVSNYKVIGLPPFKTSEMVTSSKLNKKTKLEMLNWGHFKFRTRLESKARQLSHVLKIDESYTTQSCTNCGTLKYMGSNKIYDCLTCNHKIGRDDGSARSIFMCMMHLRYV

SEQ ID NO: 43859 - protein, 564 aa, Streptomyces sp.
VGGLRELAASFVVPGPAGVAIRDRLRVSDADAAVLAEVGVFLGSLAAGDLAERSRQRLAHDAASWAVRKRSLTGRSSARWAGSITKASHDQWALARRGQAAHMAWLRRQIASIEARLARPLGAKADKRAGLARGYATRGEWHAKSRRLQMLKDRLAVMEADRAAGRVHVVRGGKRLANTRHHLAAAGLDEQVWRERWQAERMFLAADGESGKRFGNETIRVTETGQVSLKLPAPLAHLANAPHGRYLLDATVRFQYRGAEWLDRVTVNRAMAYRIHHDTGRGRWYITASWQRAAAPLLPLQVALARGVVGVDMNDDHLAAWHLDVHGNPVGEPQRFFYDLTGSTQHRDAQIRHTLTRLLHHARRCGAAAIAIEDLDFTDGTSREQHGHNKRFRRLLSRFPTAKLKARLVSMAAEQDVAVVAVDPAYTSRWGAQHWQKPLTTPTRKISRHDAASIAIGRRALGHPIRRRTTPPHGDQSDRRGHRTVQARPDTRRREETRPRIPGPRTDPCHRTRSESGRPGHPTPFGMSAVTRYGSKTHSCSLIRNGYGSASATRAHSSTSLQRG

SEQ ID NO: 43860 - protein, 369 aa, unknown
  TnpB Polypeptide
MTVRQNAYKFRLYPNQEQKQLFAKTFGCSRAIWNMMLADKIKHYEETKETLYNTPAQYKEKFPWLREVDSLALANVQLNLQKAYKNFFQSGFGFPKFKKKNHRQSYKTNNQKGSITLENGRIKLPKIGWVRVKAHRQTKGIIKSATISMTPTEKYYVSILCETEIAPLPKTNSSVGIDLGLSDFASLSTGEKIGNRRFLNQLSKKLAKEQKTLSRKALVAKKEGRKLSDSKNYQKQRVKIAKIHEKIANQRRDFLSKLSTTLIKNHDAICIEDLSSKNLMKNRKLAKSIGDVSWSAFVGMLEYKANWYEKQVSKISRWYPSSQICSDCGFSSGKKPLSVREWTCTNCGSHHDRDINASINILREGLHLL

SEQ ID NO: 43861 - protein, 587 aa, unknown
  TnpB Polypeptide
VRRSCDQQALSYPIRLPDEAQANALRLLDVSREVINQVIVTLWSQVDAFGERNTVYAYKQVEPMIAPPVFHGSRLWRCQAEQAGRILRGQAERKKQFALILPVLEQGMIMPKAENKRGGKNRKAIREALAALRDAETSGGNAVELQSLIEQACNFYLKNGCFPERYEDMQPVPVLKAGILPYAGDDGADVGQAYRLCLDLEQRTARFAFRFPNDSGIWGRTWRENLLTLTLPDRLIEHLKKGAIQAPNLREIVEPDGTRYAVLDFIVQVAVTDPEAWEEVQSVLGFDWGVRTLVTACVVDLDGHYRGRPFFLDTGHFDGQQARTRRQIDLLKAKIAKLEARRDSFPVADPRRAPSLKNLTVLRRELGRCWRKYEARNQDLAHLAANVLLLLATVQGCSLIAGESLKSLKSAGRGRDAKGRWRNWRNNVQIRGELWRVLRYKCHLTGIRLEWQHPRKTSHTCPHCAKPAETYREPSPCSKREDWGAWLRCPHCGWNGARDYAAALNIARLGAYFIKHYLATGRFSHAAIVDKAVNPVSYMGAGPVLRLPPAIPRNRLLHAGKVYLNGWRQSVTLHSGYSSEIMLRLCG

SEQ ID NO: 43862 - protein, 251 aa, unknown
  TnpB Polypeptide
VIVRLTAKVKLLPTPEQVDHLKQTLETANDACNYISEQAWDTKTFHQFPLHKLAYHDVREKFPLSAQVVVRCISKVSNTYKLDHKTRHIFRPHGAIAFDNRILSWKIHEMTVSIWTIGGRQTIPFAAGMRQMELLLQQRGESDLCLINKEFYLLSVCDVEIPKPIDVEGILGIDLGIVNIASDSDGEQFSGEGVDDNRRKFEHRRKNLQKKQTKPAKRKLRKISGKQARFQSHTNHTISKRLDKSARNSYY

SEQ ID NO: 43863 - protein, 415 aa, Halolamina sp.
MCVRRTAVVKLAVSDEQRDALHRTADQYLYCANRTADYCWSGTAFTECKTNKRDVRDALYSDLREETELQAQLVQAAIRRAVEAVKAVVERWKKGQRVSCPTFTTETLDYDTRSATFYRNKVSLATVEGRVEPSFVLPADSPTPYERYVLSEDYEFRESTLRYDATTDEFYLHISTRQIDSDDEVSEDTGHSDQTVLGIDLGVNSLAVTSTGTFWQGDDYDHWCREFEKRRGEMQQRGTQAAHNALLRLGKREEAWRKQYIHTVANELVSEAVEHDCDVIAFEDLTDIRERLPHAKWHHVWAFRRLYEYVSYKAPEQGVSVEQVEPNHTSQRCSRTDCGFTHENNRHGEHFECQKCGYEVNADYNGAKNVGLRYARKRRHRLRSSPTSGGGDARVDVRINGGTLNGKSHQRIAGD

SEQ ID NO: 43864 - protein, 410 aa, Halolamina sp.
MEVRRTVPVKLDVTDEQADLLHETIDEFLWAANYVVDAAWDGEWAETRSSVLQELTYDEVREQTRLHSNHVQSARNRAVDALKSVVAKWKKGEYASLPSFSSPFCDYNQRNATFHDDHATLSTVNGRVTVEYVLPDKTRDTPHSEYLRSDGWETTGATLHYRRGEFYLHVRTKADVEDPVPVENGTVLGVDLGIKNIVVTSTGVFWSADELNHWRQEYVERRTSLQECGSRWAHENVQAVGRKETGHFEQYLHRVANDLVAEASESGCTVIAFEDLTDIRDRMPDARKFHEWAFRRLYEYVSYKAEERGIRVEQVNPKNTSKRCSSCGFTHAENRPSQDTFCCQSCGYENHADYNAAKNIGYRLLRNQTGGEGGAPVGVRLNSGMLNANGVKPVPDSVRAGVHAESSQPQ

SEQ ID NO: 43865 - protein, 436 aa, Halolamina sp.
MLEIHRTHRARIRNHSQAVEPLDRHGWSASKLWNVANYYSRQKWKDTGEIPGHEELKSELKDHDKYRGLHSQSSQRVLEELAEAFNSWYSSDDDRDNPPGYRKRSYYDDQGRRVHEEHPRSTVTWKQKGIRHDPKHNRVRLSKGANHKDHPRDRDYIIVEYETRPGISVENLQQVRAVYDNAKERWELHLVCKDEIETPDAPGGETAGIDLGISNFAAVAYSTEEADLYPGNRLKQDGYYFPKEIAKCDDSGGERATRLHRKWSERRRHFFHALAKHIVQRCVEKGVGRVNVGDLSGLREDESGEAKNWGQHGNLDLHGWAFDRFTSILEYKAKAEGIEVVEVDEGSTSRTCSVCGKEDDGQRIERGLYVCEECDAAFNADVNGAENIRLDINDSASNSESPSGDRSTGWLAQPGVYLYDLSCGFEPQAEVVDSKP

SEQ ID NO: 43866 - protein, 425 aa, Halolamina sp.
MTDSQALIKTLDFQLDIQSDNESLLYDATLEARSVYNQSIRLAKEGVDWDAIPDRVARDASLVKNTMQRVVAKALGAMENYYEYDDYNKPSHTKDGMYPLRANYEEGYNLSLTDDGDVAFRISAKPYKHVKGVLDGDDAHLDILKTALESDAWTIGTAEALFRNGNAELHINVTSSEGTVRDKGNSRTVVGVDVNEDNVALTALSEGSVEDTVVIEFPDIKFKRHRYFTMRKRVQNARKDSIHDTLEGREERFVRDRLHKVSRHIVEWSRQFEKPCIVFEDLKEMRDGLDYGTRMNRRLHRLPFRALQHYTSYKAAFASIPTAWINPEYTSQCCPMCGHTERSNRHKKRFKCQSCSHQDHADRSASVNIAVKGIEEHQEWTVPALNSLPTVRTVRRQASGAVDAPTVTHDAVRGYQTDGVVGVSD

SEQ ID NO: 43867 - protein, 277 aa, Halolamina sp.
MFNRILIPTDGSDQVKPAVDMALDLAETHDATLHVLYIVDQPPSVSGMGEGFSSFDDLLNALEERGQQATKDYFRVRRGLQDKGTRSARQALERLSGRENRFVLNRLHNISRGIVEEALRHDCAYIAVEDLTHIRERMDAHDDRLKRQMHNWAFRELQEQIAYKAAEYGIRVESVNPAFSSQTCSKCGHQSSTNRDSDSWFACNECGYEVDGDYNAAKNVGLRLIALPEGKRPSGLGNGQLALKSGTLNVSDVSNVHSSLEFERESTDKPTASAVGR

SEQ ID NO: 43868 - protein, 439 aa, Halobacteriales sp.
MLEVHRTHRAKIRNHSQVADSLDRHGWSASKLWNVANYHSRDVWEDTGEIPNHDELKTELKTHNKYNGLHSQSSQRVLEELAEAFNSWKEKRKSDSRANPPGYRKRNYYDSQGRRVHEEHPRSTVTWKQKGIKHDTKNNRVRLSKGANHKEHPKAWEYILVEYETRPGVTVENLQQVRAVYDNAKGRWELHLVCKDEIETPTAPGDETAGVDLGICNFAAVAYSTEDADLYPGNRLKQDGYYFPKEIAKCDDSGGERATRLHHKWSERRTHFFHSLAKHIVQRCVEKGVCRINVGKLEGVREDENGESKNWGKHGNLDLHGWAFDRFTKILTYKAKVESIEVVEVSERGTSKTCCICGREDNSQRVERGLYVCESCDAAFNGDVNGAENIRLDVNQSNSESPASLDGNRSTGWLAQPGVYLHDLSRGFQPREEVVDSKP

SEQ ID NO: 43869 - protein, 471 aa, unknown
  TnpB Polypeptide
MGQVSRTTKVLLDLGKRKEGGANTEKRAALDATAAVLTAARAFYIDFFLAHADKLCERVTYYSQEHLEWRERLISAHALLTWAESATVVTAAHPSPWTGWNFTERFPGMPFAYRRSVIKDAIGKVRSYLSNRANWEASGKQKGKPGWPAASDHPTLYQGCLVLDLETLDTREAFVRINVYTGEDWTWMQYPVNSSRYTVERLKETDWQRQSPTLVLRAHAAELHIPQVRKITAKKVMERKQDPDLVTVAVDLNVKNLAVITARQHGTIIKTVFVTDHGLDAHRYRHLKRIAKKQWLSGKPVKGEHSNQQLWRHVERQNADAAHKVAHSIAEVCASYPGCLLLFERLRTIKPGKGSKSRRMNRKRANQLRGKIREHAKDKAYVQQIVTVEVNPHGTSQYCSRCGAKGERFSYQKGQRVFVKWGKLFYCPVCHYEANADFNASVNVHHSFYREWHWRPRQAKAPPPAPVAAGP

SEQ ID NO: 43870 - protein, 277 aa, unknown
  TnpB Polypeptide
NNPSSKRKSLGWLPFKQSAIKHIAAHQTGKKGLKSTLQLSLAKGQKLIINLWDSYNLSLYQINTCELVQDARSRWYACITVKDYPKTQCGTGSVGIDLGLKDSATTSNGDKLTIKQTLKYAKDLAIAQRAKNKRRVKAIHAKIKHTRQDLIHKFTTQLVKDNALIVVGDVRTTQFNSKKGKLAKSVYDAGWFELKRQLTYKCKHAGCRFEIVNEKYTTQRCSCCGDITANSPKGRKSLGIREWTCATCGTWHDRDINASRNILAVGLDRLVEGIPLL

SEQ ID NO: 43871 - protein, 461 aa, Deinococcus sp.
VVEFRQALHLTPAQESALRQLWTGIRDVQHVLNTYLHHLAAGHSGTLQDAILRAVQSQGVPALPGLPAGQARVPTLTLKALKDEIRAARQQSGWGDALPATAVTWVATEILADWRALGRSQNVQASNLPHAWSADRRAELHLGNGVQPLDEVTLEIAALSPTTDAVVLADVFLLPEPFRAALWHQHAQRLAKEAGRLDAVDRAWLDHGDRDAQREALRLRGRYAAARIMLDGQQLPPAPPKNTPLWQEKTVVRAVPGGGWEVVWSFQVSGQQVRWMHDDTLGLDPGQRNVWAYASANLSGVISRPCGGVWEPPDHGPAGQPLTRPHNERRAQAELRLALYRRMAPAHAQMLALALMHRACAVEDVRWSGFTWRKNNFAQYAVYTGLRASIDWLITLAPLHGVQVLLAPPGHSTATCSRCGRLGSRPRGTTFSCSCGHREPVDINAARNHRQRALAGQGRRP

SEQ ID NO: 43872 - protein, 390 aa, unknown
  TnpB Polypeptide
MTQKAFKYRFYPTPEQETLLRRTMGCTRLVYNRALAARTEAWYERQERVGYTETSSLLTAWKKQEDLDFLNDVSSVPLQQGLRHLQSAFSNFFAGRAKYPNFKKKRNGGSAEFTKSAFKWRDGQLFLAKTLEPLNIRWSRAIPQGAEPSSVTVRLSPAGRWSVSLLVDLDIEPLPQSPNAVGIDLGITSLIALSTGEKIANPSCFKAKRHKLSKAQKALIRKQKASKNREKARLKVAKVYAEISDARQDFLHKLTTRLVRENQTIAVEDLAVKNLVKNHKLALSISDASWGELVRQLEYKCKWYDRTLIKIDRWFPSSKRCGNCGHIVEKLPLNLREWDCPKCSTHHDRDINAAQNILAAGLAVKVCGANVRPDRHKSDGSCYETERSRK

SEQ ID NO: 43873 - protein, 412 aa, unknown
  TnpB Polypeptide
MTFIQQVEKHVIKKSHPYYNMFCEYTHLAKNLYNHANYLVRNEFAETGKWLRYSDLDKILREDLEFPDYRNMPAAQSAQQVLRLLETNWTSFFNSIKDWSKNKDKYLGKPKLPKYKPKDGKLVLIVTNQQVRQRGDLLHFPRSFCGFTVKPRCVTLENFEKINQVRIVPKGQSFGLEIVYSVSVEFELRSDNGRYMSIDLGLDNLATVVTNTGLNPIIVNGKGLKSNNQYYNKKKAQYQSVAKQMNNQHYTNRLYRLTQKRNLKVEDYLHKASRYIVDFALENQINTIVIGNNKNWKQSGSLGKVTNQTFVSIPHQKLIDKICYKAQLCGIQVRLTEESYTSGTSFLDNELPEKIYYNKKRRVNRGLFVSNRGIKINADVNAAFQIMKKVFPNVFTDGIEGVVLHPVRVGIV

SEQ ID NO: 43874 - protein, 412 aa, unknown
  TnpB Polypeptide
MLRAYKYRIYPTDDQKVLFAKTFGCCRFVYNWALNLKIEAYKQDKKYVTYKEVQDRMVNELKKGNQWLTEVNSQALLNSIRNLDTAYKNFFRDTHAVGSPKFKSRKSKQSFQCPQHCNVDFVNGTISIPKAKDIPAVLHRKFKGTVKTVAVSMTPSGKYFASVLVDTAIQELSASAIQGDTALGIDLGIKSLAVCSDGRTFDNPKSLQRSLDRLKFLQKRLSRKQKGSSNRNRERIKVAKLQEHIANRRRDNLHKITYALTHDSQVRTICMEDLNVKGMMGNHNLAQAIGDASFGMFMTFLEYKCRWYGVNLIKIDRFAPSSKTCGKCGYVYKRLKLSERSWICPECGTRHNRDFNAACNIKEFGLKALPTERGKVKPVDCPLVDDRPRVLKSNGRKKQEKRGGISLRSSCL

SEQ ID NO: 43875 - protein, 285 aa, unknown
  TnpB Polypeptide
MISYKYNIYKSKNTKHLDKMLRECAFVWNHALNLQKRYYRRFGKYISLNRLQKHFAKRIKRILLHSQTVQEILGRLDNSYKRFFKKLCKRPPKFKKAEKFNSFVFKQGGFALNGNVFTINKINKRFKFSYSRPYDGNVKQVRVLRETCNRYSIVIVTDSKSNKTYEKSRNGASVGIDFGLKTYMTLSDGKSIQSPLFFNRYQKKIKKCNRNLSRSEKGSNNRKRRLFELHQTNRKIMNLRSDFQWKLAHQLCKQYDYIFIEDLNIEGMKRLWGEEDFRSQSFFFY

SEQ ID NO: 43876 - protein, 385 aa, Lactobacillus sp.
MVLRTQKVRLYPNKTMQKVLDDLCDYRRYCWNAGLALWNDMYEEALILDDKRLRPNEYKVRNELVANKADWQYRFSARCLQLAISDLNKAWKNFFDKAQVDWGKPSFKSKKATRQGFKTDRAKIIKGKLRLDKPHRIKNWYDIRMSGAKLLTGELKVVSIYRENGKYWASLPFEVNIETKPKTDHVTAIDVNVGHINYTEGKINTLPDDLKHLYKRIKHYQRTLARKRVVNGKRATKSNDYVKTRAKLQRDYRKVANIQHDIMQKFTTQLVEEYDKIVIEDLAVKEMQMTHVASKGLQRSMFGHFRQILGYKCDWNGKKLILADKYYPSTQRCSKCGHIKTGADKVGLNGNLKHGTKHNEYICYECGSVMDRDENAVYNLLALIN

SEQ ID NO: 43877 - protein, 224 aa, Streptomyces sp.
MVGVDTNADHLAAWRLDAHGNPIGQPLRFGYDLTGTAGHRDAQVRHALIRLLHWAKRHHLSIAIEDLDFTAETTREKHGRRKRFRKLISGMPVSRLRARLVSMAAELGITVIAVDPAYTSKWGAQHWQKPLTTSSRKTTRHDAAAVAIGRRALGHPIRRRTAPPPHDRSDRAGHRTVQARPDIPGREEPRPRIPGPRTTDTIRAHRTRSERGEPGRPTPFGASG

SEQ ID NO: 43878 - protein, 248 aa, Nitrosomonas sp.
MGLARFATLSDGTFYAPLNSFRQHEAVLCKAQQAMNRKMKFNSNWKKAKAKVQRIHSRIGNARRDYLHKTTTTISQNHAMVCIEDSQVRNMSKAAAGTTEAPGRNVRAESGLNKSIFDQGWFKFCHQLEYKLVWNGGWLVTVLPQYTSRTCPCCGHISAANRQRQAQFLCIECDFVENADVVGVINVLRVGHARFACEVSGAVMLPAAGIHRSGSGADQCRSQINGRRGETALGKSRLTCSSGSRCSA

SEQ ID NO: 43879 - protein, 414 aa, Streptomyces sp.
VIVKLVVQVKLLPTPVQAAALEATLRACNQAATWVSGVAFEKDVKRNFALREHTYAEIKTRWGLGAQAAQHVIKKTCDAYATLKANLKAGNLGKPGSKRYQRAVGKPVAFRADSAQPYDDRMLSWQIPERLVSIWTVSGRMKDVTFTASPEQLATLALYRKGESDLVRRNGMWFLLATCEVPETEPNTDPVDFLGIDLGIVNIATTSDGVIMAGRQINRTRVRERKLRAKLQKKNTPSTKRRLKMRRRKEARRAKDINHKIAKHVVAEAERTGRGIALEDLTGIRERVRLAKPQRATLHSWSFHQLGSFIAYKARRAGVPVVYVDPAYTSRTCAECGHINRANRVSQALFACRNCGFVDHADRNGSRNIRARAWELWRRGAESTAPTPPPHRRSGAGRKRSTTASDARYASPSL

SEQ ID NO: 43880 - protein, 527 aa, unknown
  TnpB Polypeptide
VLAKNQTYKAFTMRPSHVLDLNGVLLDSTPVLAQLTSEVQGISGYATFVVRNDMKLGDELSQVTATQPAVAGRRAGVTMPKFFVEDEDGEQIVGKSGRSRKEALIQHRVVTEHRSWQERISAANGTSSKYISQCWKRTVNASPPSYGEDYINLGAVNKQYAAIENNPFATGEIVLKMVIRGQWYRLIFNFDNSRFREGKVTLPLIKIENRQPVFIFTVVTDNPVVQFSGDYVLGVDVGINDYATVVVRNTKTGQVVHETTLSQRVHSLWNSVRASERQVKQLRKKAKSLLYDRQARMSALDEAQLHREAVSRKKRELAILAAQEIADLSHQWGNAVVAVEDLSWVTNTMQNGRWNRGELVKWLTHYVSQNGGWVVAANSANTSQLCHTCSARVAHPTHKVSVCPAHGVMDRDVNAATNIAARAVPKVEKARRTRAKNRKLQPQAPPKTPPARSSLRYPGRDRTKSVATPKRKNHHRISKGVVLPSRPARVSMITVLADQDVSGILETSMAAIKQGNVAYNCRLCNLN

SEQ ID NO: 43881 - protein, 373 aa, unknown
  TnpB Polypeptide
MEEKETVPCFILKLPLRVDSAGRRVFARDFLYALQLRNATLGTVLRRDRKMKQSDEWKEICRLPKGPERNQRFQKIRKDYGLSSVNDFEKILKEHAERSGRKKQLNSNLGQIIADDLYRSYVDWIFHKKGRPRFRGRGRGLHSLRGKNNATEVVWKHKEQSVRYGKRLYRAVVDPKDRYVREALADPADPSTPRRVRYCCLVRKRIRGKERFYVHLVLDGVPPARTVAAPKEECMGIDPSLRNVTCVHANGSVAKIDISAPKEDAKEVRRLQRAMDRSLRAVNPDNYNENGTTKKGARKWVRSKHYLALQAELADLKRRGVETRRNIHGRVVRILVGSAGTIRVEENNWKALQRGRYGKSVLNGAPSEFIERL

SEQ ID NO: 43882 - protein, 404 aa, Scytonema sp.
MIVLEFKAKGKTTQYTAIDSAIRTTQFVRNKAIRHWMDNQGVGQKDLYRLSKVLRDEFPFVKALNSSACQAAIERAYSSIARFYDNCKKSIPGKKGYPRFQKNCRSVEYKTSGWSLSETRKQITFTDKKGIGKLKLKGTWDLNFYQLEQIKRVRLVHRADGYYVQFLIRTESVVQDVQPTGKNIGLDVGLKEFYTDSNGHTEPNPKFYRIGEKRLKFRQRRVSRKNIGSANRKRAINKLGRVHLKISRQREEHAKRAARCVIQSNDLVAYEDLRIKNLVRNHCLAKSINDAGWYQFRKWLEYFGIKFGKITVAVNPAYTSQECSKCGTHVKKSLSMRTHACQCGFVLDRDSNAAINILKLALSTTGHVGTWVYDPNASGDSTSTLAGAILSEQVGSMNEESPRL

SEQ ID NO: 43883 - protein, 384 aa, Dethiosulfovibrio sp.
VKKAYKTELKMTEKQLEKLVKTIGVCRYLYNLYLQKAQDHYKETGEFLSGYSFDKWINNVHSKQDGFGWIKEVSSKARKKSIMNGECAYKKFFLKKAGFPRFKKKKNQDVKVYLPKNSETDWTAQRHRIKIPTFNFVRLKEFGYIPENAKVINGTLSIKAGRVFLSLLCDVPEPTIERAVAPGVGIDLGIKNFAALSDGSIYPNINKTSKVKRQEKKLKRESRALARKQNAKKKAGKTVGSGSNLIKNTLRVQKLHYRIGNIREEYRRSVVNAVVKTKPQHITVEDLNVRGMVKNRHLAKAVTDQGFYAFKLFLLAQCHKHGVELRQVSMFYPSSKTCSNCGAVKKHLSLSERTYKCSSCGLEIDRDLNAAYNLRDANQYSILT

SEQ ID NO: 43884 - protein, 392 aa, unknown
  TnpB Polypeptide
MIRAHKIRLNPTPEQANYFARAAGTSRFVWNWALAEWNRQFEVGGKPTAFKLKKQFNEIRREQFPWTWEVTKNASDQPFIDLGKAFTAFFEGRKNGKKIGLPKFKSKKRCKASFYLANDQFELGDHRIWIPKLGWVNMAENLRFTGKVTGARITKTADWWFVSLTVELPDALPEKGQAAIGIDVGLNRLATLSTGEGYENQAFLKTALKKLRQANKRLHRRKPGSKSREKARRQVARLHYRITCLRDDVLHKMTTMIADCYGTIGIEDLNLKGLLKNKRLSRSFSDAALGKLLNLLTGKVEQRGGQVIQVGRFFPSSKTCHSCGWKWENMQLSDRVFLCQNPMCAYHLFPQDRDYNSALCLLREALRLIGLVDQAVDDIGSGDDVNLTADAG

SEQ ID NO: 43885 - protein, 213 aa, Dictyobacter sp.
MMQLVEKHMIKQTDPRFAALDRAAFDRAAFASKNLYNAALYEIRQHFIFTGTYVNYHAIDKIMQKHEAYRALPTKVSQQVLRLLDKNWTSFFAALKAYKATLVGISVMVQEESYTSKASFLDLDTIPVYGKMGEQKPVFSGRRISRGLYKAKSGRAFNTDVNGSYNILRKALPDAFSNGIEDVNKALVALPASLVVHPVRIVIPSQPKMSRKR

SEQ ID NO: 43886 - protein, 361 aa, Dictyobacter sp.
MEAAQVWDACMEAHKAARLTHAPWPGRDALQKTTKGRFALHSQSVQMIVAAFLANIETTHKLRQSHPHMQMKYPWRTKRFYPVKWPAQAVSKEHGRVVLPMGKHRPSLVLLIDLPETSGACSLVWNNGFELHVCVEIAQAEKAPGTAQATVDLGEIHLAAVTTNTGAAMIVTGRGIRSLKHLRSKQLGKIAKKQSRCKKYSRRWKKLQRAKNKQCRRSERRIRDVRHKATRQVIDFCVEHQVGTLFIGNPHGVRDKNNGRHHNQRMALWEYGKDIDYLTHKSKAAHIMSFSGSERGTSSRCPVCGHRHKPKGRNWACRHCQFSGHRDLVGSVNMHQLSFGFARDVSSFLHVSTSAWLVQAK

SEQ ID NO: 43887 - protein, 381 aa, unknown
  TnpB Polypeptide
MEQMKAYKFRIYPSEIQKQLIEKSFGCTRFVYNHMLALQIKMYKEQGKSYSKYDLVKMIPSLKKEHEWLKEVDSTCLQASIDDLDSAYQNFFREIKKGNNQGFPKFKTKRNPKRSFESKRVNNNITIKDNLIKLPKLKWIKVKITQTIDGKILNATVSKTSTGKYFVSLCCKADIEQLPKIDSNIGIDLGLKEFAICSNGNIFHNPKWLRKANYRLKIEQRRLSKMQKGSNNWNKQRIKVAKIYERIVNQRKDFLHKLSTKLIKENQIICLEDLKVSNMMKNHKLAGAISEVSWYEFRRMLEYKANWYGRTISVINKTYPSSQLCSHCGYRNKDVKNLALRNWTCPSCGTSHDRDINASINILNEGLRLMRLEQPCKLVNA

SEQ ID NO: 43888 - protein, 376 aa, unknown
  TnpB Polypeptide
MFRTVKVKLPFEQSLLQTAVAFNKACQIVLDYGSTHKTHNKDKLNKATYRQIRDSIPNLPSALVQTARDEASEMLLRTDFAKVVKKRLSVRYDNRCFKFFADSNYVSLTTVMGRLTFPFKHYDYIDTWKGEYTNAQLVVRGNRVFLNVQVKLPDVAVKAVGKVLGIDRGILNIAACSDNTFFDSKHLRAVKGRYQFLKRKLQHVGTRSAHRKLQQVSGRERRFVLNTNHCISKEIINKPFDVFALEKLEISKKKKNGRRFNRKLGGWSYAKLLLFIQYKADAKGKCVVLVNPKYTSQRCSKCGFIHKQNRKGLDFRCGNCGFELNADLNASRNIGVLGKSEYLRLFVNEPNVASNEASPTGVVDGSYKPMASVIGN

SEQ ID NO: 43889 - protein, 95 aa, Clostridioides sp.
  misc_feature (90)..(90): Xaa can be any naturally occurring amino acid
VIAVEKAYKFRMYPNKKQQELINKTFGCCRFVYNKYLAKRIDVYKNDKETFTYKQCSSDLTNLKKELKWLKEPDKFSLQNALKDLENAYXLSNTT

SEQ ID NO: 43890 - protein, 422 aa, Streptomyces sp.
MFCISATTQVRSVIRMQLRYSFRLYPAPGRRAALARAFGCARVVFNDAVRAREDARAAGRPFPTAGELSRTLITQAKRTAERSWLGEVSAVVLQQSLRDAETAYRNFFASLKGERQGPKLSAPRFKSSKDHRQAIRFTANARWSITPSGRLNLPKIGEVRVKWSRTLPGVPSSVTVIKDAAGRYFASFVIDTDPAADAARMPSSDQTVGVDLGLTHFAVLSDGTKIDSPRFLRRAEKKFKKAQRELSRKQKGSKNRGKARLKVARAHTQVADARREFHHQLSTRLIRENQAVAVEDLAVKALARTRLAKSVHDAGWSQFVGMLEYKAKRYGRTFVKVGRFEPTSQVCSACGHPGGPKPLHVREWTCPACDAVHDRDHNAAKNVKQAAGLAVTACGAQVRPEPVLAQRDEAGSHGSPLCARAA

SEQ ID NO: 43891 - protein, 423 aa, Desulfurococcaceae sp.
VCIELLPDEVADERLRTLCNLSSKLWNEMNYARRRQFFETKRVDLKQTYKEFYERYKKLIGSVTAQQILIKNYEAWKAFFSSLKAKKEGRLPPYIKKVNPPGYRKKGGRRTLWTVLRNDQYRIEGEYIVIKGLGAIGSIRVRYSGRIHISGKQGRAEIHYDYDEKKWYMYISYEVEKKIVRGSSFRIPLKPLGNKEAGIDIGINNLLAVYVDDGSALLVNGRPLKAISFYWREKISEYQSTLNRYGFKTSKRIRRMYKKWRRQIKSYINWAVRNTIEWLYHSGVKKIYVGHPKYASQEPGKGSKVNFEIVHVWSYGYLLRRLKEVAEEYGIEVEHVDEKDTSRTCPICRAIENHKRISRGLFKCYKHNIVFNADLVGAFNILAKSRAITPSPALCGVGVTRLRPGVRLNPAEAGDVAPNLPTL

SEQ ID NO: 43892 - protein, 420 aa, Cyanobacteria sp.
MILTYCYRIQPSAAQVATMLYTLELLRRHWNYCLGQRLDWLRQTRCQVDRCSIVSEPIGEIPTTVSYYTQQSDLKQTKVLFPDYKNIWAESQQVNLQRLNKAWERWLFPDKLGKRGGRPKFKKAGELRSFVYPRVNCPKAGATLNNGVLKLSKIGEMSVIMHRPIPDGFALKTCTIVYKADGWYCCISMQDDTVPEPMPLDEVKTAVGIDVGLKEFLTTSVGETVPIQQTYRKTQSHASRQQRQLARKEKGSNRANKQKNKIARIHQRIGRIRENFHYNTAHNLVKKYDLIAVEDLNIKGLAQTRLSKSILDAAWGKFITILDAVAVKCGVRVVKVSPHGTSQNCSSCGAKVPKTLSIRLHECHKCGLQMDRDENAARNILDRALNEVGLTLSAHGGLGDTQPVKCEAFSGWDGVQLSLF

SEQ ID NO: 43893 - protein, 234 aa, Cyanobacteria sp.
MLVIEAKLKGTQAQYSKLDEAIRTGQFIRNTCLRYWEDNKEVNRNDLQKLCSVLAKNKETPWTKKLNSQARQAHADRAWSAIQRFYENCRLGKPGKKGYPKYKKFSRSVEYKNSGWKLSANRRQITFTDGFEVGTMDLWSSRDLVWYCEKKISRVRVIRRADGYYAQLLVDWDRRDEHKFQGKMTGIDLGLKEFYTDSDGNTVENPRYLRSSERRLKMLTSQGFQKTYQRKEAI

SEQ ID NO: 43894 - protein, 380 aa, unknown
  TnpB Polypeptide
MLRTFKFRLYPSKAQQKVFEETIETCRILYNNALAERKNAWEKESQSIAYREQQNNLPTLKDCRPDLRLVHSQVLQDVLRRLDKAFRNFFRRAKASEKPGYPRFKAANRFDSFTYPQSGIGFEIRCKKLWLSKVGEVNIKLHRELPADAKIKTCTVRHDADQWFACLVVELPDAHAASREIKSAVGIDLGIANLVALSNGETIENPHWLKQSEQKLAVAQRLLARKKNGSKKREIQQLRVAKLHRKIRRQRTDFLHKLSRTLVNSFDLIVFENLNIKQMMTKSYVAKSIADAAWRELVFFTRYKAEEAGAVVQFVEAANTSRQCSSCGTMVLKALQERVHSCPSCGLVIGRDINAAKNILTKSTVGRTERACRSTAIAGC

SEQ ID NO: 43895 - protein, 448 aa, Streptomyces sp.
MARFRMYPTSEQAGVMLEHCAHARYVWNLAVEQHTHWYKGRRSAPGFAEQCRQLTEARRDNAWLAAGNADVQQQALKDFATAKNARFASGFGEPTWRRKHVHEGFRVIGTDRVEEFEADGSPKLNAKTGKQVMGRSVVVQKLNRRWARVKVPGCGRVRFRLSRPEPPRAKTFRVTFRNGRWHIAFAVVPVPIDGPGTGEVIGIDRGVAVSAALSDGRKLNCPQLTVKERAQVRKHQRRAVRAPKGSEQKTAEYAKAAKLKACEADRRKDWCEKTSTMLARGYDLVRFEKLNINNMTRSARGTTERPGKQVRQKAGLNRVILAQGWGLLRQRTGHKAPGRVEDVPAPYTSLRCSLCGWIDKNSRKSQAEFCCSSCGFTCNADTNAAANVAAGQGGIPRPRRTAGAGGTTPPGQRSSVREPQPTWVGIPLFSRGGGCQALTGMLFCSPQP

SEQ ID NO: 43896 - protein, 146 aa, Lachnospiraceae sp.
  misc_feature (9)..(9): Xaa can be any naturally occurring amino acid
MQQFFIKCXKTKKKIALCHEKITNTRKDYLHKMSHEIISENQVIVSEDLQIKNMVKNHHLAKSISDVSWHELTRQLEYKAKWNGRKYVKIDTFYASSQLCSVCGYQNTETKNLSVREWICPVCGTNHDRDINAAKNILEEGLRQIA

SEQ ID NO: 43897 - protein, 258 aa, Bacillus sp.
MEEYRRTKTTVSLINYHFVFCPRYRRKIFLDSKVELKHKLGTLRITKKSDKWIAQISVSIPTTQKTGLKVMGVDLGLKVPAVAVTDDEKVGFFGNGRQNKYKKRKFRSVRKALGTKKKINAIRNSKDKEQRWMEDQDHKVSRAIVNFAKENKISVIRLERLANIRQTTRTSRKNEKNLHTWSFYRLSQFIEYKAELEGIKVEYVNPAYTSQTCPKCSGKNKAQDRKYKCKCGLEKHRDIIGAMNIRYAPVVDGNSQSA

SEQ ID NO: 43898 - protein, 280 aa, unknown
  TnpB Polypeptide
VSILVETEHKELAHTNHNIGIDLGIKDLCITSDGKVYENLKIIKKYEKQLVKLQRQLSHKGKRSKNYYKTKKKIALCHEKIRNIRKDYLHKVSHEIISENQVIVSENLQIKNMVKNHHLAKAISDVSWYELTRQLEYKAKWNGRKYIKIDTFYASSQLCSVCGYQNPDIKDLSVRTWICPKCGAEHDKTTRLMLKLEFDGVIDMKIREVNENKKQFIALLLLADEQENMIDHYLEKGTMYVLEDGNVKAECVVTDEDNGILEIKNIAVDPKIKDRAMGKH

SEQ ID NO: 43899 - protein, 463 aa, unknown
  TnpB Polypeptide
MERLQAFKFELQPNGEQAQQMRRFAGSCRFVFNKALALQQTRHEQGEKKLSYAGLCKALTEWKAQPETLWLKETHSQPLQQTLKDLERAYVNFFEQRADFPRFKKKGMSDSFRYPQGCKLDQGNGRLFLPKLGWLRYRHSRDVLGDICNVTISQSGGKWFASIQTRREVPAEQPTGGIVGLDMGIARFVTLSDGSHIDPLNSFKKHQQRLKRYQRRMARKVKGSKNWNKAKKKVQRIHAEIANVRKDFLHKATTAISQQYALVVLEDLKVRNMSKSTKGTVESPGKKVRAKSGLNKSILDQGWYEFRRQLEYKMQWQGGWLMTVNPRNTSRTCPVCGHVSADNRTTQAKFACVSCGHQAHADVVGAINILARGMQNMRHGGKDMPPNACIESFVSSPCEEMEETTCTYDLVCPEGHAKESQGFPLRGNRDSSHGGDVSHAKLARVKHASPMKQEPTEVILQDE

SEQ ID NO: 43900 - protein, 461 aa, Amycolatopsis sp.
VSKVLQAYRFALDPGVAQESALRSHCGAQRFAFNWGLAQVTANLAQRNAEASYGLEGDSQTAPMSWSAYDLRERWNTVKAEVAPWWRENSKEAYASGLANLATALTNWKDSQTSRRKGAGVRFPQFKGKRAVLSCRFTTGAFGLVDRDRRHVKLPRIGVVRTHESTRKLARQVAQGNARIRSATITFRAGRWFCSFSVEIARTDPLPARPDTVVGVDLGIKSLAVLSTGERVSNPKHLEIAQRELRRLQRQAMRRCGPDKRTQQKPSQRWRQTQARIAKLHVRVANARRDGLHKLTIRLVRSFGTVVLEDLSVSGMLRNHRLARRIAGIGMAEFRRQMTYKTAWSGVRLHIADRWYPSSKTCSGCGVVKAKLRLSERIYTCENCGLTLDRDLNAARNLAGLAELSSPSCGATRNEPDGNPHQTRLVRAAGIATGRPTHGVGQRRHGNASARDTPQRFLNGQ

SEQ ID NO: 43901 - protein, 408 aa, Halobiforma sp.
MRYNDEDGFEGSVWNVDTGRLEGKYKSVLAASTAQQVIAKNSEAWRAFFQLKEQHHDESNSSVTEHPKPPGFRGNKDDGRILKGVIRNDAYSIKWGERSRLEIVVGDDLRDNHNSPGSRLRLEIVGDPNWSEYEKQGRLDLWYDETDSTFRASQPVTVSSDEQATPLADETAALDIGANNLVACTTTTGEQYLYEGRELFDRFRETAREIARLQSKLEEGRYSSDRIRRLYRRRTRRRDHAQEALCRDLIERLYAEGVDTVYIGGLTDVLETHWSVETNAKTHNFWAFKKFTDRLACTAEEYGISVEVRSEAWTSQECPQCGSTERTTRHQDTLTCECGFDGHADLTASATFLERQTETAVRPMARPVRFQWDDHNWSGTPHPHESPNEQRTDPSTVHRDGNIASGES

SEQ ID NO: 43902 - protein, 409 aa, Halobiforma sp.
LVVADEYLRRTAITRLVLADEQQELLEETISQWKTACNVGSRIGWEADETRATVLQGMVYDEIRSRTDLGSQHVVLAVRQAAAALEGTAEIEAADENYEVSRPTFTSDTITYDTRSMTLFDDETVSLATTDDRIRCDIGLPSDEEGYQFQYLRDDGWEITESTVSKRDGGYYLHIGFRKPKPTPRAEKMSDDEDRTVLGVDLGIVNIATTSTAYFASGRELRHRHREFERVRSNLYETGTQSAYRTVRRMSGRESRYVRDVLHRVANDIVEEALTYDCEYIAFENLKHIRDRAPPVKQFHQWAHRQLVDLVEYKAKAEGIRVEFVSPENTSRRCPGCNHTCRRNRKTQSEFECEQCGETANADYVAAKNVGLRFVRRGLQSSRRTGDSQLALKSGTVTPNRAFTPYATG

SEQ ID NO: 43903 - protein, 174 aa, Halobiforma sp.
MQNAGKSSFDRTFEQKEERFVHDQLHKLSQQVVEWVSQFEKPAIVFEDLKDMRDSIDYGTRMNRRLHSLPFRKLREFITYKAAFQGIPPNEINPEYTSQACSRTACEHTTRANRDKKRFKCVECGRQDHADRNAAINIAKKGLKKLDRNVPALNTLPQVMKVRRQTSGPSTPQP

SEQ ID NO: 43904 - protein, 216 aa, Halobiforma sp.
MTSLVIDFPEIKFERHRYFTMRKRVQNTGKESIHDALEGREERFVRDRLHKVSRHIVEWGQRFEKPCIVFEDLKEMRDSIDYGTRMNRRLHHLPFRALQFYTSYKAAFEGIPTRWIDPYKTSQRCPLCGHAERANRNKKRFKCRSCSHQDHSDRGASVNIAVKGIEKHQDWNVPALNNLPTVRKVRRQASGAVDAPTVTHDTVRGYQTDGVAGVSD

SEQ ID NO: 43905 - protein, 418 aa, Halobiforma sp.
MLETTRTYVARITNHSQVRDDLDQCGFAASKLWNVGRYYIQDRWDEDGEIPGEAELKSELKGHERYSDLHSQSSQRVLEELAEAFNGWFNSDDGNNPPGYRKRGDRHPRSTVTWKQKGIKHDDKHGQLRLSKGWNLKDGRSDFILAEYETRPDVEVENIQQVRAVWNGDRWELHLVCKKEIPVEDAPGDKTAGIDLGISNYLAIDYEGSSKELYPGNVLKEDKHYFSREEYQTEGENGPSKRARKARRKLSRRKDHFLHTLSKHLVQRCVEEDVGRIAVGDLSDIREDDSGDSRDWGASGNKKLHGWEFDRFTNLLEYKAEEHGILVDRVDEENTSKTCSCCGQIQESNRVERGLYVCESCGTAMNADVNGAVNIRRKITQSPPTGDMSNGWLAQPGVFLFDRESGRFTPREQGVCKP

SEQ ID NO: 43906 - protein, 492 aa, Vulcanisaeta sp.
MLRRAVAVELEVTKELNILLYSVESAYLGIVREVVEYAVKHNVTSAIQLQRLFYHKYRREYQGLHAHLVIQAIRQAVQITKSFVERKKKGLVNKPYPEVKAVSIRFTEFTWNYEEFVKSIAPVRLSLSLLGGRREAWLRPHKRFWFYWWLVLSKEAGLGRTLIIKRRTNKWYAVFVFEIKPRQEVLQHVVAFDINENTIAVGKIDLTSTVGMVTNWNRQYLTPQLYMIRTDFGRLARRYERVRSAIIERLKPEFALPSGNYVNVTSTREFRKRVKRLREGGRKVGRVRQIANELTKTPAIIITEDLGERPQDEMISDLESRGLRHRIKQIPFKALERVVEDKALERGSKLFRVSSYRNSRVCPIHFTKLESTNDWHILYCPKGHYVNRDYASVLNMAWKIAPEAWTKAFWWDMKSLSKNMNWRKHEGRSNPLVPYGIAILLQHIMENAKASLEQSPAVLARGSPMNPAGGANEGWARKPPKKEEVRQSQVLG

SEQ ID NO: 43907 - protein, 335 aa, Okeania sp.
LRTVAESFRSYYGLIKAYSSGKISDRPRIPNYRKKGGMATVSYPSQALKLKDNLLRVPLGNTCKRWFGVDSFLIPMPSNLAFSTLKELRILPRNRCFTQEFVYEKEAVVKPQLNQENVLGIDHGVNNWLTCVSNVGTSLIIDGKHPPLSPPGRGTKGVGWYNKQISTIKENQPTGFWSNRLAAITEKRNRQIRDGINKAAIIVINHCLKNSIGTIVFGWNKGQKNQIELGKKSNSEFVPIPTARLKERIAQLCYEYGIKFIETEESYTSVASFLDGDYLPNYGEKPNDWKPSGKRIKRGLYRTGNNCFVNADCNGAANIITKVSRKAKFKLKPTV

SEQ ID NO: 43908 - protein, 180 aa, Okeania sp.
LINGRPLKSINQYYNKVKSFLQSQLQENQSSKRLKKLCNKREFKINDYLHKSSRLIIDTLTNQKIGTLIIGHNEDWKQKINLGKKNNQNFVSVPYNKLIEMLSYKAKMVGIDVIITEESYTSKASFIDNDILPVYRKGQKNQVTFSGKRVKRCSAVLGVSPMSDCIKTKRFVSYRQQRIN

SEQ ID NO: 43909 - protein, 430 aa, Acidimicrobiaceae sp.
LVGVDLRSLGRVRVRADRPQLHRTLLGRGGMRRAYKFRLRPTAKQHVALSQCLGVHRELYNAALLERREAYERVVRRSPNYWSHSRPKGPVSYGRQSAQLSDIRAGRPDISSWSFSSQQATLRRLTKAFDAFFRRVKAGEEPGYPRFKPAHRFDSVEWPKDGDGCRWHPEASRVYLQGIGHVKTTVHRAVEGRVKTISVKREGRRWFLVLSCDDVPRKPLEPTGRSVGIDIGIASFATTSDGLHIANPRHGRAGAERLARAQQVLARKRWGSNNRTAARDVVAARHRTVASQRRDFHHKVARDLVETYDVLCVENLSITNMVRSAKGTEENPGTNVAAKCGLNRSITDAGWGQFRSILCGKAEEAGRTVMDVNPRHTSQTCAECGHVDPGNRVSQAIFRCRGCGHEAHADINAARNILRAGLARPVAHAT

SEQ ID NO: 43910 - protein, 404 aa, Catonella sp.
MKLNQQVRLYPNKTMKRVLDSLCDYRRYCWNKAIACWNEQYEARLIGLPQSVLDKLKCELELMPNEQVLVDRYPKPSYYSVRDELVSQKEDWQYTLSSRVLQLTVKDVASAWKLFFQNRETAGRPTFKTRKASKQGFKTDRSCIRDGYLLLDKPSGYQGRWYPIRFKGLSIPDGKLILCSVTRIGSRYTATFTIETPSIGSPHTGRKTAVDANVDHFDTTEGRTSLNPTVLNPLYNRVRHYQRSLARKRCVNPRAIHSKGYEATRTKLQRTYERIAHIQKDLLHKFTTHLYQQFDTVVIEDLDVKKMQMSKRAKNLHRSLFGQFRQMMEYKARKFGKTLVVADRFYPSTQRCSSCGFIKTGDDKITLNGNQKHGTRHNEYICYHCGYTDDRDRNAALNLLALVK

SEQ ID NO: 43911 - protein, 398 aa, Planomonospora sp.
MSRYRLSPTPAQEAALSEHCAHARLVWNLAVEQHAHWKPGRKSAPGFAEQCRQLTEARAAFDWLRAGSIIVQQQALKDFAQAMANFFGGTHRRPAWRKRGRAEGFRIVAVGPGDVRRLSRNVGEVRIPKVGWVRFRWSRAVPGGVKSFRVTCDRAGRWHVAFAAIPAPISAPGTGEIVGVDRGVAVSAAVSTGELLNVPGLRESEEKRLVRLQRRLARARRGSNRRAKVKAALARLKARQTDRRKDWVEKTSTELARRFDVIAVEDLKVRDMTRSASGTIDAPGVNVRAKAGLNRGILANGWGRLVARLEHKAPGRVVKVDPAYTSQTCNACGRRAAESRESQSRFRCVACGHQANADVNAACNIRDTAPGRGVAARGGSGLPGPANREPQPELLRSA

SEQ ID NO: 43912 - protein, 396 aa, unknown
  TnpB Polypeptide
VLRAYKYQLDPTPSQKSWLAQAFGNARYTYNWGLTQRIKAYEQEKKRLTAYDLCKMLTNLKKDKDKLWLNNTPVVCLQQAIRNMDTAFTRFFREKNGFPKFRSKHGSQRIQFINYVEVDFESGKVKLPKLGWVRAFVTRPFEGKMGTVTVSMNAAGKYFISILVDTPQSTPIKTNIKESTTIGIDVGLKHFAVLSNGERIYNPRHYQSNEKRLAILQRRLARKQKGSKRRQKAKLAVAKQHYKIACQRNDFLHKLTSQLVKSHDSIVIEDLNVEGMLKSHLLAKHIKNAAWSEFFRQLQYKCEWNGKNLIRIGRFEPSSRMCTCGLVNRELKLSDRTWTCPSCGSKHDRDLLAANNIKMFGLQQQNLIGQKSGEAIATKDVETLASAKSMKRQVSP

SEQ ID NO: 43913 - protein, 400 aa, unknown
  TnpB Polypeptide
VRSNLETFLQKKKFLYLPSMLTYNARIKSVKKGDEKLLIALLEQQRDVVNEASKMQFEKKLKSLPELHKEFYYQAREQFSDVPSQVVIKSEQESIARYKAMNTNRLPAKKPFEKKSLSLRLDKRISSRTKNPARINIITTEKRKEFDILLYPRLKELMNRYEFQDPLVFVRNGQLMISLTFDVSKPQQESTICLGIDLGIRRAAACSDGRLIIDREFNKQKRKLRYLKRCLQSKGTKSARKHLQKLRRKERNKNKNQTHLIANIILQTNADCIALENLSGIKAKRHKFQNKNRISQVPLFDLRRILTYKAMNAGKSVRLVSPAYTSQTDSRTGKREGERKGCRFYAKNGKVYDADLNAAINIALRSKLPVSHGNMLDGQGVVSRPNACKPLTKVGALQAH

SEQ ID NO: 43914 - protein, 369 aa, Vibrio sp.
MLIAHKVELRPTKPQADYLNKCIGHSRNIYNNLLRHFSQEGVKWSKKEARIKFMELRATDCPYYDEISADFLRESINNLDNAYKHFFRRVKNGEGKAGYPTKRKLGVHDVCALRDKKKFLVGDDGLRFEKFNKRKTQSPIKLREKLRFTGTVKQMNISKRAGKYFCSFLVDTEDYNPKDCDRQNSVGVDFGIKDLAICSSGKKFGANQKLKASLKRLARKQRRLAKQVKGSNRRAKTKQAIQKLHKRIADQRTATLHEVSDCLTRSFDRIVIEDLNVSGMVKNGKLARAIADCGFYELRRQLEYKSQWRNCELVIADRWFASTKICSHCGHKNSDVVLGVESWECPKCLTMHDRDSNASINLDNYQKVA

SEQ ID NO: 43915 - protein, 362 aa, Hormoscilla sp.
MLYGFKTELKLNNQQRTTLAKHCGVARHAWNWGLGLTKQILDHNRDNPLERIKFPTAIDLHKWLVALVKPECPWYYEVSFFAPQYALKQLVSAWRRAFKKTSKPPRFKKKGRADSFTLDGAIKLDHFRIKVPKIGWLRTYERLPVCSQPKSVTISRTADRWFISFKLEVEPVNYPKPHPVVGVDLGIKTLAVLSTGGVFEGASSYRKYEKKLSRLQWLNRHKQVSSANWKKSQVKIARLHRKIANIRKDTLHKLTTYLAKNHSRIGIENLNVSGMMANHKLAKAIQDMGFYEFKRQLEYKCQLYGSILVVVDRWYPSTKTCSQCHTKKDGMSLSERVFRCDNCGFECDRDLNASLNLEQAAS

SEQ ID NO: 43916 - protein, 315 aa, Hormoscilla sp.
LGKHCGVARHAWNWGLGLTKQILDHNRNNPEEKIKLTTAIDLHKWLVALVKPEYPWYYEVSFCAPQSALRELADAWKRAFKKTSKPPRFKKKGRADSFTIDGSIKLDHFRIKVPKIGWLRTYERLPVCSSPKSVTISRTAARWFISFKLEVELVNHPKSHPVVGVDLGIKALAVLSTGEVFEGAKSYRKYEKKLSRLQWLNRHKQIGSANWKKAQVKIARLHRKIANIRKDTLHFTTYLAKNHSRIGIENLNVSGMMANHKLAKAIGDMGFYEPFSVAPQNWVWSKPVGRRPRRPHPKGPGYMNKARLRGLYTCI

SEQ ID NO: 43917 - protein, 295 aa, Photobacterium sp.
MLKATKVRIYPTQEQADFLIAQFGAVRFAYNKALHLKSHMYRKHGVKLNPKKDIKPLLSVAKKSRKYHWLKQYDSIALQQSVINLHQAFDNFFNPKLKAKYPQFKRKHGKQSSYHCVGVKVMDGAIKLPKMKPIKANIHHEIIGTVKSITLSLSKTGKFYASILVDDGIDAPALINTVSKVTGIDLGLSHFAIESNGKKTANPRYLKRAEKNLKRKQRQLSRKKKGSANRAKARLLVAKCHEKVANARADFQHKLSRTLVDKNHAVIVETLKSANMMKNQPQPKLREHRKGVVAK

SEQ ID NO: 43918 - protein, 387 aa, unknown
  TnpB Polypeptide
MKKLLKSFKTEINPTKEQIVKINKTIGTCRYIYNFYLAHNKELHANGEKFMSGKSFSVWLNNEYLPNNPDEQWIKEVSSKSVKKSIENGCTAFTRFFKGESKFPNFKKKGKSDVKMYFVKNNPKDCFCERHRINIPTLGWVRLKEKGYIPTTKDGYVVKSGTVSVKAGRYFVSVLIELPDTKIANNSNSGIGIDLGIKDLAIISNGQTYKNINKSARVKKLEKKLCREQRCLSRKYENLKKGESTQRANIQKQKLKVQKLHHRMDNIRTDYIDKTIAEIVKTKPSYITIEDLNVKGMMKNRHLSKAVASQKFNEFRRKLKVKCDENGIELRIVDRFYPSSKMCHCCGSIKKDLKLSDRIYKCSCGYTEDRDFNASLNLRDAKIYKVA

SEQ ID NO: 43919 - protein, 359 aa, Trichococcus sp.
VLRSYQFRLYPNKEQQSYFANCFGSVRFIYNQMLADKIDHYKNTGKMLKNTPAQYKEEFPFLKDMDSLALANAQLNLEKAYKNFFRDKSVGFPKFKVKHKSKASYTTNNQGGNIRIEGGKIKLPKIGFVTIKQHREFDGLIKSCTISMNKAGNYFISILVEQETPEWLPEEHKIGIDLGLSDFAITTNDAGESVKYANPKCLYRSEKKVKKAQRALSRKQKGSKNQEKARLILAKKHEKIANQRKDFLHKLSNQITDENQVIVIETLRSSNMMKNHKLAKAIGDVSWSEFCRQLAYKSEWKGRTLIKADRFYPSTQICSTCGHRDGKKAPHIREWTCPACGATHDRDINASKNLLALAK

SEQ ID NO: 43920 - protein, 372 aa, unknown
  TnpB Polypeptide
MEYSYRFRIYPTKAQENLIQRTFGCCRFVYNYYLAKRKEVYETTKETLSSNACMIDMACLKKELEWLREVDSTALQASIQALETAFQNFFRRVKQGKVPGYPKFKSKRDHRKSYKSKNIGNTIRVDKTHIRLPKLGLIRCKVSKEINGRILSATVSQNPSGKYFVSICCTDVEIEPLSQTGASVGVDLGVKDHAITSDGDKYPNNKFLYKSEAKIKKLQRQLSRKTKGSKRYEKSRIKLARAHERVANQRTDSMHKLTTDLVRNYDIICIEDLNVSGMVKCHNRAKSISDASFSEFRRQLEYKAAWYGKTISVIDRFYPSSQLCSDCGYQNKLIKDTSIRDWICPVCGKHHNRDVNAAINILMEGLRLLEAS

SEQ ID NO: 43921 - protein, 379 aa, unknown
  TnpB Polypeptide
MECSYKFRIYPNKPQEILIQKTFGCCRFVFNYYLAKRKEIYETTKKNFGYNDCCKDLTILKKEFEWLGEVDSTALQFSIRNVDDAFVNFWNRLKKGEKTGYPKFKSKRSHLQKYKSKDTNAIKGFPSIRIIGNAVKLPKLGFVKCKVSKDVKGRILSATIEQRQSGKYYVSLCCTGVEFEPFPKTGAAVGVDLGVAYLAVTSDGKKFPNNKFSYRSEKKLKNLQRKLSRKTKGSKRYEKARIKYARAYEHVTSQRHDSMHKLTTYLVRNYDIICIEDLNVPRMLKCRSRAKWISDALFAEFRRQLEYKAKWYGKTVVVIDRFYPSSQLCSECGYQNPLVKDTNIHDWICPVCGKHHDRDINAAINILMEGLRILGLRAA

SEQ ID NO: 43922 - protein, 415 aa, unknown
  TnpB Polypeptide
MVSAPVVRSLSFPAQELPQALLGLLAEFRLVVNQSIRIALREDIRSRARLARAAYGVLSAEHTIYKQYIPSAFEVALGVLKAYRRRVRKGRKTNTPYVRRLFLKAENQSYWLDRETGRLRIPIRGTEGVQLMLPLSEWHRSFLSDPSWDLGSLTVAPERIIVTVRTGAPEPYEPMAAMALDTNEDSLDGVEAAGTSARLLTIPFGGVRTVQATHFRRRRRLAKKKAHDRRVKRKLLRSEGRREHNRVKQRFHRVSKALVAAAVKAKAAVVLEDLTLHGAGGRSRRTNRRLSSWPRGELHRQIEYKAALAGVPVIKVNPAWTSKTCPVCGARRRERVGQDFVCSVCDWEMDRQHNAALNILQSALASNEALARAVRFRPGALRHDAMSPLYDPLRGGGGAREEPSGVESPRVVNAR

SEQ ID NO: 43923 - protein, 373 aa, Thermoplasmata sp.
MQRTYKFRLYPSKQQEEKLLWTLDKCRFTYNLLLENLNKQDKPSKLKFQSMLPELKNQYPELKEVYSKVLQYECHRLFSNLKALSRLKKNGKKVGKLRFKTKNRFKTMVYNQLGFKIIYTGKRCQTLHLSKIGNIKVRIPKKQTIKGKIKQVIIKRYPSGKWFSIICVDIKAKIKQKPIKKKIGIDVGIKHFLTDSEGRQIENPLFYEKLLYKLQYEQKKLSRKQKGSKNREKQRIRVARIYEKIVNKRDDFLHKLSRFYANNYDFIAVEDLNIKNMVKNHRLARMIIDSSWNKFIQLLSYKVESTGGKVVRVNPRGTSKEYKYGKLDRDYNASLNILERGLSGQGLSFEPVETRPLREILASLVVEAGSPIL

SEQ ID NO: 43924 - protein, 390 aa, unknown
  TnpB Polypeptide
MKMIKSIKVMLLPNNKQNSKLFENSGTNRFAYNWTLARQKENYENGGKFLSDNDLRKEFTQLKKSDEYKWLNGYSNNITKQAIKDACDSYKRFFNKQSGFPKFKSKKKTRPSFYTDSCKIQFTETHVKLEKISDSKKKNRAKLNWIKLAEKSRIPTNCKYMNPRVTFDGLNWWISVGVEYEDINYAPMNNGIGIDLGVKDLAICSDGSTYKNINKTNKVKKIEKKRRRLQRQISRKYQNNKEGSSYKKTSNIKKLEKKLLKASRRLTNIHKNYLHQTTTEIINREPMFIVMESLDVQGVMKNRHLSKAVQQQSLYEFKRQIKYKCLWNNIRFVQADKWYPSSKTCSECGSIKKNLKLLDREYVCTECGCVIDRDFNASINLMRLGLQSIA

SEQ ID NO: 43925 - protein, 426 aa, Streptomyces sp.
MRGLGWADSVVAVKLVVQVKLLPTPVQASALQATLRACNEAATWASEVAFEKDVKRNFALREHTYGEVKARWGLGAQAAQHVIKKTCDAYATLRANLKAGNLGRPGSKRYRSASEKPVTFRPEGAQPYDDRMLSWQISERRVSIWTVAGRVKDVVFTASPEQLATLTLYRKGESDLLCREGMWFLNATCEVPEAPLDQVPSDFLGIDLGIVNIATTSDGEIMAGRDLNRIRARERKLRTKLQKKNTASAKRRLKKRRRKESRRAKDINHKISKHVVAEAERTGRGIALEDLTGIRERVRLRKPQRATHSSWSFHQLGSFIAYKARRAGVPVVYVDSAYTSRTCAECGHIDKANRVSQAWFVCRNCGFVDHADRNGSRNIRARAWELWRRGAQSTAPAPSPKPDGRGGAGRKRRITASDARCASPAL

SEQ ID NO: 43926 - protein, 426 aa, unknown
  TnpB Polypeptide
MFFLKNIIMQVAKSIMVKVSKKVNRDKFLSLRNFFNTYQTIARLYYSYILENSLEEKLCSGEITSKDLKNLLHQKLYRQIKESFDIGSQTVQEIRDVVVEAINSYAQLIRKGKKASLPKVEEFTVRVNYPRVVSVFEQGKKFDFFFKVKVNGDKRITIPIECGKMQKQLLKDALNGEYKIGAFQLIRRDDWFYFSIPIKKEVEIKQTYDGIIGVDLGLRYNAIITLLYKNGKITKVEFLKYRKLMHKIRMLWHRIDELKSMLPEGQRTSKRIQKLWKRIRRMNDWIAHNVSKRIVEIAKENNSIIAMENLKRLYPVKGKNLRKNNRRISNWIRGKVVKYTIYKAKWEGIRVKLVSPKNTSKTCHLCGSQGLRINATFFCEHCKHTYNADFNASANIGIRATLPNVKGCVNHPLGLMAYKAPCNSWE

SEQ ID NO: 43927 - protein, 462 aa, unknown
  TnpB Polypeptide
LLLIPYPHFSAEIQSASDEREFEGTAICFGKLRAFFHGKNAKVSFPSTCFLSNFFERKISTGKPPYPFLYILLFPNFSEENSMERIKTYKFRVYPTKKQEELLNHHLWLSKELWNVLLQKEKEHYNETGKFIEKTELQKLTKNSGLFSQSAQAVCHRLHNAIMKMIRERKQGKNIGFPRFKNFFRVKSLYYPQAGFKLEEKLEVSPFGEIKIKKHREIHGAIKTLTLKRSPSGKWFAMFVVYVEKKIPKQNNGPKTGLDFGLMNFATLSDGFTIPNPKPLSKHEQKLIFFQRRLSKKKKKSRNRNKARIKLANIHEKIKNMRLDFLHKTSNSLLSNYSFIAIEKLAAREMTIKGHGKGINDAGWGMFAFILCSKAEEAGCKVEFVNPMNTTKECSRCKAIVPKSLHTRTHGCPNCGLIMDRDQNAALVILNRATSGHGGSNALGDGRTKIPSLIKEPGNPIL

SEQ ID NO: 43928 - protein, 381 aa, Persephonella sp.
MIAEYTYRFRLYPNKEQEHFLNIQFGHCRFVYNYFLALSKEEYEKQGIKWKYSRYQSMLPELKREYPFLKQANSQSLQVSLQNLDTAYKNFFKGKAGFPKFKKKKSKQTVHIPQHFAIEKVSKKRGLLKIPKLKTPIPIKMHRDIDKSLIWATEREQGQIRSISITKTPDGRYYLNILTRKEIQPLKPANKTAGIDVGIKEFATVYDGENTHHIENPKYLQKSEKRLIKLQRQLSRKQKGSKNWEKARQKVAKQHQKIANQRKDFLHKVSSAITKQYDAIVVESLNIKGMIQNQKLSKQIADVSWYEFMRMLEYKAKWYGRQIIKANRFYASSKTCSVCRYKNNQLTLSVRKWKCPVCGTQHDRDENASKNLYQIGLTHLR

SEQ ID NO: 43929 - protein, 425 aa, Microcoleus sp.
LYIVEQVFNLIYEFKLKPTTAQVATFAEWLEQCRRVYNYALCERKDWANSRKSPLNACSIKYEYIIPADAPAPNYSSQCESLTQAKKNIPALKQVHSQVLQQTLKRLQKAFEGMWENGRGFPRFKKAGRMRSFVFPSMGKDPIQGRSVKFPKIGRVKFIQSRPIPDDAIIKQARIVRRVSGWYVQLTLQWKVDVPFGKLRASPEISPTGTSLGIDVGLMHFAALSNGRTFPNPRPFKHLEGKLKSLQKKVSKKRPGSNNRAKAQAKVSRLHERIACHRKNYHWELAHNLCDWADMIFAEQLNLKALGRGFLAKHCLDAGWGQFLDILSQCCFKRGVYFQKVPAAGTSQTCPNCLEDTGKKKLSQRVHKCQYCGYECDRDVASARIIEIKGLQAVGHTVGKLSEGKGFILEDVKLCLPVTEESPAF

SEQ ID NO: 43930 - protein, 411 aa, Ferrovum sp.
MELRKITYRMYPGTSQTEKLDELLGLHRRVYNTALEERIRVYGESKKSLGFAAQCKEITVWRKQCEVLATVNAQSLQVTLKRLDLAYASFFRRVKAGETAGFPRFKAVQRFSGWGYKTHGDGWRLHAGDKMRHGHVRLSGVGMVKLRGQARTPGIVKTAEVQHKDGRWYLSVTVECEPRRTGGTEAMGMDWGLETFATVCSGENDTLSVPNPRFLDKPQRQKIKVLKQAVSRKTNKRSNNRRKAVALLSAESRRVANRRKDFLHKTSAKLVNQYGLIATEQLSIKNMTANGGEYKKGLNRSILDTAPSTFLNLLKTKAEEAGSLWVEVPTRQVKPSQTCHRCGSQRKKLLSERKHQCDCGASCSRDENAARVMLNWALSGNATGQELSEAGSGCRLAVQNRETPLIAALAA

SEQ ID NO: 43931 - protein, 222 aa, Ferrovum sp.
MQARISGHWCPIRYAVPSSALALIGNQSINFGNTGFKGYIRLGNVIQSETLSYIAFQKNYGKSVKVRAPGMFVEQLRRKAESAGGKLIDLHTWSLKMSQYDHTTEVCTKKPLSQRWHVLGDGSGVVQRDVYSAFLARCVMSNTHHPSHIETMWAAQKPVLLQTGWLRSEPAKIEPSGKITVATPLEQVVCDRGFAIGHGLDAVAATREPGDPGGFALRTPCL

SEQ ID NO: 43932 - protein, 508 aa, Ferrovum sp.
MKRTATPTFVLSIPLVVKPGEDRILIGRMEAGRRLYNATLGEALRRHGLLKQSKDWQHTRTIADKKLRSDEFKRLSKEAGFTPAAIITFARTCKNEAGWKDRLGSNVTQRIAEQVFAAVQQYAFGKRGRPRFKGASRPLHSLEATTNAANIIWKPETGCIEFGDLTLPALLPSKTQDPYLHQALTNKTKYCRVLWRVVSGSRRWFVQLMQEGIAPAKHEQACGEIVGLDIGPSTVAVVGDNSASLVKFCDTVVQPWKETRRLQRAMDRSKRATNPLCFNANGTWKKGQKFTPSKRYTAIRTEYAEVERKLAAERKRAHGELANQILGLGNVIQSETLSYLAFQKNYGKSVKVRAPGMFVEQLRRKAESAGGKLIDLHTWSLKMSQYDHTTGVFTKKPLSQRWHVLGDGSGVVQRDVYSAFLARCVISNTHHPSHIETMWAAQKPVLLQTGWLRSEPAKIEPSGKITVATPLEQVVCDRGFSIGHGLDAVAATREPGDPGGFALRTPCL

SEQ ID NO: 43933 - protein, 484 aa, Ferrovum sp.
MMQIGNRFRCYPTPAQEQTLLQWIGCQRNIYNAKVREDRYLRCFARKSLQHVGQYAPIDQKYGQFKTELTPYLDEVPSVVLRNGAVLWKQAYGRYFSNLGGRPTIHKRHGKQSVWLTSEVFKFVPVAEGYELHVGIKKFPVGVLAFKAHRDYKIPASLHISIHARRWYVSFNYDDGIQEPSDKEIADWLIQFDEAELRKMTAGLDRGVNLPLAGSDGQKFGFSKVQDKRLLAQERHKKRWQRRQDRRTEYSSGWFKAKHKAARYQRYGVDVRRDVAHKTSHTLACDPLYKLYVFEALKIKNMTQRAKAKKDAQGRWMRNGAAAKSGLNKSILASTWGQTKTYLQYKARRQGKLVLEVPPFYSSQECAACGHVHQDNRVSQSEFVCLSCGNTDHADHNAAKVIAMRGVKLLKSGEYVEKKKKRCKITRSTQCAPARGEVGAEGSRTGCEKSQSTPSETSVSRRSGNTSARWSLNLETPVTRPLGL

SEQ ID NO: 43934 - protein, 243 aa, Ferrovum sp.
MDRSKRATNPHCFNANGTWKKGQKFTPSKRYTAIRTEYAEVERKLAAERKRAHGELANQILGLGNVVQSETLSYIAFQKNYGKSVKVRAPGMFVEQLRRKAESAGGKLIDLHTWSLKMSQYDHTTGVFTKKPLSQRWHVLGDGSGVVQRDVYSAFLARCVISNTHHPSHIETMWAAQKPVLLQTGWLRSEPAKIEPSGKITVATPLEQVVCDRGFAIGHGLDAVAATREPGDPGGFALRTPCL

SEQ ID NO: 43935 - protein, 404 aa, Streptomyces sp.
LIRAYKFLLRPTVGQAVALGEMLRDHCSLHNGALQERRDAYRHPSRTSIRYGMQSGQLKGIRAFDPERQGRWSFSSQQATLRRLDKAFVAFFRRVKAGDTPGYPRFRGVSWFDTVDFPRDGDGCRWDSTPHDPVTRVRFQGVGHVKVNQHRPVQGAVKTVSVKREGRKWFVVLATEQPRPEPLPATGSDIGIDLGIASFLTDSNGTHIPNPRHARKAAARLEAAQRALSRFPRCRAKDRTRNHQRAVEKVGALHGKVRRRRFDHAHKTALRLVREHDFIAHEDLKIRNMSKAPAPRPDPDTPGVFLPNGAGAKAGLNRSIADAGWGVFLTILNAKAESAGREVMAVDPRNTSRTCPACGHTAKENRPTQEKFHCLDCGHQAHADEVGALNVLRAGLVRRNANTA

SEQ ID NO: 43936 - protein, 398 aa, unknown
  TnpB Polypeptide
MLIRRAFKFELKPDGRQACQIGKFCGCARYVYNRTLSLEKSLYAKDDKHSFRYTEATKRLPEWKNKHPFLKECHSQVLQQSLKDLDRAYTNFLEKRANFPKYRKKFRHDSIRFPQGVELDEAKHQIRLPKIGWVGYRKSQDIIGAIKNVTVIRRGDKWDVSIQTEYEDKPPAPTPSEIGIDMGVKHFATLSDGKVFEPLNPFKREQEKLAILQRKLARQKKGSRNSRKTKRKIARLHRHIADSRRDFLHKTSTQIAQNHSTVYVEDLKVSNMSASAAGTIENPGKKVKQKSSLNRSILDQGWYGFFRMLSNKLERRGGKLIKVDPKNTSRTCPLCGLVSAENRKTQASFACVACGYRANADLVGAINVLRAGRARLACGMSGGVRPLSAGTQRDLLQH

SEQ ID NO: 43937 - protein, 393 aa, unknown
  TnpB Polypeptide
MMKIQMGMKFRIYPNQTEKARLAIQFGHARFVYNSTLAARKEYFELTGKGLSKAACDKIITALKKDENFSWLRDADSQVLQQKSADVDTAYKNFFKHTAGYPSFKHKSSEQKIRYPQRVKFIGNTTYLPKVGYIRTKFHRPLVGSQKSVTVSKTKTEKYFISVLCEYETDQPVHNGPAVGIDLGLKDFLITSDGAKTKHPKLLKEKEARLKRSQRALSKKKKGSNNRAKARLQLAIQHEKLTNARKDFLHKESARLTSDFGFIGTESLKVCNMLKNHCLAKAISDSGWGEFVRQLEYKSAWKGGYVVKIGTFFPSSKTCNNCKHINSDLKLSDRTWVCPNCRSVLDRDINAALNILEEATAGAAGIKACGEDVRLNAFLGTKLTSEKQEAQGL

SEQ ID NO: 43938 - protein, 394 aa, Acidobacteria sp.
MFFVPLVWLTELPPGLERGVKVILAHRIELDPTEKQKEYFRQACGTARFVWNWALEEWNYRYDLGANTDACEIKRYFNSFKYEAFPWLKNIHRDAHAQPFAALGKAWKAYFNGQVEGRPQFKKKGKCRDCFYVACDKFSSSGKTVRLPVLGQVQLREPLRFTGKIQSATVSREADRWFIAMAVEIPQKEVHPPSGEALGIDLGLTTFAVLSNGRKVEAPKPLGRGLERLRRLSRAHSRKRRGSHNRQKAALRLARCHRRIANMRRDFLHKFTTKISKNHAEIFVENLNVKGMVQNRHLSRAIHDVGWSELRRQLEYKSLLNGSVLTVRDPFYASSKTCSECGYVMEVLPLSVPGVPNHARPRRERSDQPETKYRGLHGNQRLGTGRLWLGWHSK

SEQ ID NO: 43939 - protein, 495 aa, Okeania sp.
MLLKYKYKLKPHKSQTAIIANWLELARRQYNYRLAERLNWFEATRTPVNACPLNVSVVVGTLHATSVQQIYQNIPEFRTQTRDGRKKDISGNPITRKGDKHPNIVNGYVSWETVQLADLPQTKKLFPEYKSMHSQVLQDIIQRVQTTMDNFAKPDKNGKTSGRPKFKGKHYYNSFSYPQLSNTNIVKNANGRYCVNLPKVGLVPFVFNRQIPKGFKVKTGTVIREVDGWYISLTIEDKTVPLRRVEIQPTEKNSKGIDLGLLHYAVTSDGEFIEVPKFFRFSEHRLSKLQVRLARKQKHSKAWKILKRKIAKLHQLIARQRLDWQFKLAYHLFSNVSVIFVGLLQISNLVRRCKAKLGDNGQFLPNGQSAKSGLNKSLQDAAFGQFVQVLEYVAWKLGKRIIKVDPKGTSQHCWECLRKVSKSLSDRWHSCPECGQELDRDYNSALLIQKIGLLSTQEEDITSVKTAVRAALAEESRALQPPFGRGEGSVGSMSK

SEQ ID NO: 43940 - protein, 390 aa, Nonomuraea sp.
LKFLLRPTSKQAVALAACLEDHRQLYNAALEHRCTAYRKAGVTVRYGDQSGLLKHIRADDPDGQARWSFSSQQATLRRLDRAFSAFFTRVRQGRTPGFPRFKGRGRFDTVQWPKDGDGCRWDSQPEHPTATCVRLQGIGHVRVHQHRPVKGRVKTISVKREGSRWYVVLSCDDVPAEPLPATGAVAGVDMGVASLVTTSDGVHVANARHLAVTADRLAAAQREPARKKRGSRRRRKAVARVAALHGKVRRQRLDGAHKAALALMGCYDVIVHEDLRITNMTRSAAGTSERPGRNVAQKSGLNRSILDAGWGVFLTVLAHKAESAGRKLIAVNPAGTSRTCSRCGHCARENRVTQAEFACTACGHTAHADVDAAINILRAGLALRQAAEAA

SEQ ID NO: 43941 - protein, 512 aa, Escherichia sp.
  misc_feature (75)..(111): Xaa can be any naturally occurring amino acid
VKRLQAFKFQLRPGGQQEREMRRFAGACRFVFNRALARQNENHEVGNKYIPYGKMASWLVEWKNATETQWLKDAXXXXXXXXXXXXXXXXXXXXXXXXXXXXXXXXXXXXXKRLQAFKFQLRPGGQQECEMRRFAGACRFVFNRALARQNENHEAGNKYIPYGKMASWLVEWKNATETQWLKDSPSQPLQQSLKGLERAYKNFFQKRAAFPRFKKRGQNDAFRYPQGVKLDQENSRIFLPKLGWMRYRNSRQVTGVVKNVTVSQSCGKWYISIQTESEVSTPVHPSASMVGLDAGVAKLATLSDGTVFEPVNSFQKNQKKLARLQRQLSRKVKFSNNWQKQKRKIQRLHSCIANIRRDYLHKVTTTVSKNHAMIVIEDLKVSNMSKSAAGTVSQPGRNVRAKSGLNRSILDQGWYEMRRQLEYKQLWSGGQVLAVPPAYTSQRCACCGHTAKENRLSQSKFRCQVCGYTANADVNGARNILAAGHAVLACGGMVQSGRPLKQEPTEMIQATA

SEQ ID NO: 43942 - protein, 399 aa, unknown
  TnpB Polypeptide
MNAVQAIVCWLYKPFALQQVTGIIYSMSNQILKAYKFRLYPSLKQQEFFAKSFGCARFIWNKMLNDKIEHYEKTKTTLKNTPAQYKGEFEWLKEVDSLALANVQLDLQKAFQSFFKSRFGFPKFKKKGIKDSYTTNNQKGTVAVTSHSVKLPKIGPIKAKIDRAINGLIKSVTVSKTPSGRYFVSVLVETIANPLPKTQRNVGIDLGLTDFTVLSDGTKVANPKFLAKLEHKLAREQKVLGKRREVAKAAHRKLSESSNYQKQRLKVAKVYEKITHCRNDFLHKLSFNLIKNHDVIAIEDLNVKGMVKNRRLAKAISDSSWSKFTQMLAYKADWYGKQLVKIDRWFPSSKTCSGCGHVLAKSELTLAMRQWQCPCCKVSHDRESMPVSISSMRGYGACK

SEQ ID NO: 43943 - protein, 383 aa, unknown
  TnpB Polypeptide
LKVTLRLKLHREPATQKALKETLLQFTDCFNAVCTYGWEQNERNGTRLHRATYKSLRKAHPDLPAQLVVAARRKAGEALKSVQERKKQGCSVSCPQSPLCPVRYDARSYWVRLQDGCASLATTQGRVCVPFRLCDYYTRYAHWQPCSADLCFRDGAFSLHVVVEAESPEPVCEGVLGVDLGIVELATDSNGNTYSGEAVKAVRRRLKRLRSLLQKRGTKSAKRHLKKIRAKQSRFVKNTNHVVSKSLVRTAVQSRKALALEDLRCLEQKRFLARCDGSSVTGRSCNCVNLSPIKRRRQECLLCWLTRATRLALVLYADIAPKPTVRARAAFDVNSVALRRMLISMRRETSRHGAKVQTPYCVGRRHTLPTRHKPLCFSQGYLT

SEQ ID NO: 43944 - protein, 445 aa, unknown
  TnpB Polypeptide
MEKKRESAQSSKKTPKKPAKKKKKKKKSKNEDDDEEEEEEEEGEEEKAELKTKKIRLFPNTEQQQVLLKWFGTTRWTYNQCVAACTRKEKPEPAEKKNLRSLFINSNAPDIPTWTQEVPYDVRDEAMSDFIKAFSTQKMLVAQGKHQHFTMKFRSKRRDQSIVVRPKHWKRAHFLDSNKFVGAPLVSAEPLPLTLAHDSRLIRDKCGHYFLCLLLPLDDHLAHTPENELIALDPGVRTFMTGYDPSGKILEIGAKDMTRIYRLCDTMDDIQSRFQQPTTKARKRYRLKRAWKRVQTRVRNLIDEIHKKVTLVLVKSYKTILLPKFETSQMVKKAQRKIRSKTARGMLTWAHYRFQQRLIDKTREYRQCKVVIVDESFTSKTCGACGHIHKKLGGNKVFKCPQCGTCLDRDVNGARNILLKFLTDFPTPKRTGNCALSLTSTQKGA

SEQ ID NO: 43945 - protein, 408 aa, Streptomyces sp.
MQLRYGFRLYPNGPQRAALARAFGCARVVFNDALHARETARAAGLPLVTSGELSKRLTAVKKTPERAWLTEVSSVILQQSLRDLDTGYRYFFDSLKGKRPKMGPPRFKSRKDTRQAIRFTANAGWKITLGGKLRLPKVGDVTVKWSRTLPSVPSTLTVIKDSAGRYFASFVVETGPQEVLPTTTPEIGIDLGLGHFAVLSNGTKIDSPRFLRRAEKQLKKAQRSLSRKEKGSANRDKARFRLARAHARVADARREFHHQLSTQLIRENQAIAVEDLAVKGLARTRLAKSVHDAGWSQFVAMLEYKARRYGRTFVRIGRFERTSQVCSACGVKDGPKPLHIRQWTCGACGAVLDRDINAAVNVAQAAGLAVTACGAQVRPERVPAQRDEPGTHPKPRPTTARQTGIALH

SEQ ID NO: 43946 - protein, 310 aa, Bacillus sp.
  misc_feature (179)..(272): Xaa can be any naturally occurring amino acid
MKKELVWLKEVDSIAIQSSVRNLADAYTRFFKKQNSAPRFKSKKNNVQSYTTKQTNENIAVVGNKIKLPKLGLVRFAKSREVEGRIVNATVRRNPSGRYFVSLLVETEVQELPKTHSYTGIDVGLKDFAILSDGTHYENPKFFRSLEDKLAKAQRVLSRRMKGSSRWNKQRVKVARIHXXXXXXXXXXXXXXXXXXXXXXXXXXXXXXXXXXXXXXXXXXXXXXXXXXXXXXXXXXXXXXXXXXXXXXXXXXXXXXXXXXXXXXXXXXXXXXREWNCPSCRTHHDRDINASINLKNEAIRLLTARTAGLA

SEQ ID NO: 43947 - protein, 370 aa, Bacillus sp.
MTKQNKAYKFRLYPTEDQAHLMRKTFGCVRFVYNRMLAERKEAYEKHKDDKDQLKKQKLPTPAKYKAEFEWLKEVDSLALANAQLNLQTAYKNFFRGQNDFPTFKSKKDRKSYTTNVVNGNIILLNGHIKLPKLKMVRIKQHREIPQGHIIKSCTISMTPTGKYYVSILTEYEKEIVQKEVETVVGLDFAMDQLYVSSEDERANYPKFYREMLDRLAKAQRVLSRRTKGSGRWNKQRIRVAKLHEKVANQRKNFLHHKSKELATHFDVVAIEDLNMKGMSQALHFGKSVADNGWGMFTSFLAYKLHEQGKQLVKIDKWFPSTKTCSSCGNMKNMSLSERVYSCICGVNLDRDYNAAINIKNEAIRLLALV

SEQ ID NO: 43948 - protein, 398 aa, Streptomyces sp.
VTTTHVKRAFKYRFYPTGEQAAELSRTFGCVRKVYNMALAARTEAWARQERVNYNATSAMLTAWKKTEELAFLNEVSSAPLQQCLRHLQAAFTSFFGKRAKYPRFKSKKKSRKSAEYTTSGFRFRDGRLTLAKMCDPLVIVWSRPLPAGAKPSTVTVSQDAAGRWYVSLLCEDPRVKPLPATATAVGVDVGLDHLLTLSTGEKVANPRHERKDRAQLALAQRRMAKKTKGSANRAKARQRVARIHARIADRRRDGLHKLTTRLVRENQTIVIEDLTVRNMVRNRSLARAISDAAWAEFRSLLEYKAAWYGREVIAVDRFFPSSRLCSTCGTLQERMPLHVRTWTCDSCGTNHDRDVNAARNLLAAGRAVSACGAGVRPQRSSPGGQSAMKQEVFRREP

SEQ ID NO: 43949 - protein, 395 aa, unknown
  TnpB Polypeptide
MFLESINHSYDKYIIIDRQEENQMLTLEFKTYAKPNQFQAIDEAIRICQFIRNKSIRLWIDGGAKSWFELSKYCAIWASEFDFANNLGAMARQASAERAWASISRFYENIKKGIKGKKVGFPKFQKDCRSVEYKTNSWKLSEDRKAITFTDKCGIGRLKLKGTRDLNFYQPDQIKRVRLVKRADGYYVQFCIQVDRLETIVITGKTVGLDVGLKEFYTDSNGKTVPNPKFLRRGETRLKRAQRLVSRKVKGGLNRRKARVILGKRHLKISRQRKDHAIKLARCVITSNDVVVYEDLRVSNMIKNHCLAKSIGDASWYQFRMFLEYFGKVFGRITIAVNPTYTSQECSNCGEVVKKSLSTRTHVCECGCEMDRDHNAAINILNRGIGTTGHVGTSI

SEQ ID NO: 43950 - protein, 408 aa, unknown
  TnpB Polypeptide
MIRSSKVTLKFANTEKRQQINLFIDEYKNVISQFIDLLWNLEKVPNLIPKEISSQISTWLSARAIQCAGKQASGIVRGTRRKQEQRLFIINKFLQEGKIEQANKLQKIYNNVKISKPNIFNICPELDERFIKQDWNNSTIFDGYITLASLGNKLKIEIPVKKHKHFNKLNEKGNLLKGIRLSKNFITFNFEISEPQSKSYGKIIGVDIGIKKTFMSSDKQHSTKNSDLHDLDNILNRLSKKKKGSNSFNKLVNLRKNYINWSINQLNLSDVQKVNIEDIKNLRFKNRTSRKLSHFVYKEIFDKLESHCVENGVRINKVPSAFTSQRCSSCGWVQKSNRYRELFKCKICKFTCDADLNGAMNISFDLPKLSKQVLLSKINKTGFYWNLISQEFIVPDSPKTNVDICLQN

SEQ ID NO: 43951 - protein, 398 aa, unknown
  TnpB Polypeptide
MSKVKRKITYRMYPTKKQETLLLEILDHHRLLYNSALKERIDAYKTTNKFISRSDQEKQLTEIRKEFPEYKKFNSQSQQRTLKRLDLAFQNFFRRIRNGETPGFPRFKFERRFTSFGFNSHGDGYKLLDNGKLRISGVGQIKLRGKSLYSGEPKESQVLYRDDKWYFSLTLETCSRRNNNDSKYDVIFADWGIKNILTLAKISNLNTPNSIEYEEISNPKFLNKYRTELEKIQSKRDKTKHKTCKRRKLTKKYRALNRKIRNIRGDFQNKLSNRLAKLTRAFVTEKLNVKGMVEGEIEKLGKNNKGLHRNILDSAPASLFSKIRYKVEETGSEYRELDTRTLKPTQRCSECWKLVKKGINDRVHECSCGYKQGRDRNAVRVMAKHFIKSQELALKACL

SEQ ID NO: 43952 - protein, 418 aa, unknown
  TnpB Polypeptide
MEVTKQKKNYLTCTNRLRLSKNQFNLVSELSYFSKNLYNAALYETRQHYFQTDELLEYVDNYHRLKLNENYQILPSQVAQQTMKVVERTMKSYFGLLRERDKGNYNRPVGLPKYLPKSSKFILIFTKAHFKITNRKIKLTCNKELLKKYNLISLSFDFPKHLVGKEIKEVRINPRYKSFNIEYIYNDGKNYSKVNNSSNTLSIDLGLNNLIAMISNVNPQPTLIDGREIKSKNRWVNKKLTRLQSIAKTVNHLDYTFSINKLYQYRNNWINNKFHHISNYIIEYCLSNNISNIVIGYNQEWKQNINLGSQNNQNFVQIPHGKLLGMIKYKAKNHEIAVELQEESYTSKCDALALEPIKKRDLYLGKRLKRGLFKSSTGRLINADINGALNILRKCKGKAFVKELVNSGCVNQPVKIRI

SEQ ID NO: 43953 - protein, 371 aa, unknown
  TnpB Polypeptide
MKAYKFKIKRPSKAIVIKLDNTLDLCRELYNAGLQHRIGAWKERRISISYQDQQNVLPEIKEVREDLSNVYSQVLQDALKRLDKTFKAFFSRVKKGEKAGFPRFKGKNRYDSFTFPQANGCFRLEGNNLFLSKIGKVKIHLSQNILGKVKTCTIKKEVSGWFVIFTVETEKELLPKTHKSVGIDAGIENFLTLSNGEQIPNFKYFEASQKELRRKQRSVSRKKKGSASRKKAVIQLRKTHQKIKNQRNDFAHKLSTRLVTDFDVIAIEDLNIKGMSRGILSKQIYDVSWGNFYQKLEYKAENAGKKLIKVNPNGTSQTCICGARVEKTLAQRHHHCSECGLSIHRDIVSAKVILQIGLGQSPLAQTKAVGL

SEQ ID NO: 43954 - protein, 369 aa, unknown
  TnpB Polypeptide
MNSFEFRIYPTKAQEKLLSEQFSICAELYNILLQQRKTEYEQNRKSISLFQQHKFITQLKEQDLKYDSVHSQVLQNLAVRLDLAFKAFFRRVKAGENPGFPRFKSKERYNSITFPQVPSGCQIKGNHLILSKIGKVKIKQHRQLEGKPKTCTIKKSSTGKWYAGFSCEIEKSSIKSLKTKEIGIDVGLESFAHFSNNEKIENPRFFRQEEKSLAKVQRKLSKQAKGSKERKKAKKIVARIHERIKFKRKNFAHQESRKIVDKYSHIFIEDLNINKMQHDNFRCMNKSISDAAWNMFFNFLSYKAEDAGKILIKVNPAYTSQTCSNCNHRNKLKLSDRVFQCECCNFQASRDLNAALNIKTLGTQSLAKA

SEQ ID NO: 43955 - protein, 408 aa, unknown
  TnpB Polypeptide
VSSLIFENSCLERSHKNFGYNLFMLRSHKIQLIPNQKAVEYFRQACGCARLAWNVALAKWKEGYQNGDRPSGSGLKVWFNSIKREQYPFVYAVTKCATERPFTNLQNAFNRFFSKQGGHPKFKSRHRSRDSFYVSNDKFSVSGKYIRIPRLGVVRMTEKLRYQGKIFGATISRTADRWFVSIQVEVESPIGSDALRKPSVGIDLGIKSFAVLSDGTSIDNPRIFKRFEAKLRRLNKSLSRKVKGSSNWKKTKAKLARLHYRIACCRLDFVHKFTHFIAQNYSTVCLEDLNVAGMLRNHKLAKHIQDISLFEVRRQLEYKCNEVHFVSRFDATSKTCSCCDWKNENLALEDRVFECSSCGLVEDRDLNASKNILRWASPKVKPVDQKALARNVKSRVKPSGMKQELGVG

SEQ ID NO: 43956 - protein, 381 aa, Sulfuricurvum sp.
MLKAYKFVIRPTTEQITLIEKHFGACRFVYNYFIDQSKDKVMKKSDMQKMLVGLKAEKEWLNEINSQSLQVATHNLYNAYGRFFKKLGGYPKFKSRKDSYQSFSIPQNVEIKENRLFIPKFKKNGIRVKLHRQIPAGSIIKQATLSRHNAKYFISVLIDDQQELRNKVQPVNSVGIDMGLSQLYIFSNGEKIDNPKWLRASERRLTKAQRILSRKKLGSQNRDKAKLRLQKLHTKISNQRRDYIHKMTDAITKQFDIICIETLAIKNMIQNLHLSKSIQDASWNEFARQLAYKAQWKGKYFVQINRYYPSSKTCSVCGHYRKDMPLQIRSWICSECHTKHDRDVNAAINIERQGLSSLPVEVTRLLAPMKQEAAAVLAYPT

SEQ ID NO: 43957 - protein, 411 aa, unknown
  TnpB Polypeptide
MKRVNKFRLRPTKEQEKILLSLCEMSAVLWNKLNFIRRQAFFKGEFDWKEGVDDLYNEFKRILGSATTQQIIRKNNEAWRSFFSLLKLKNKGKLPSHIRKISPPRYWKDRESGRRKLMTVIRNDCYRIEEVRGKKWLILPKGLRIRITGEIRWRGKQGRLEIFYDDGRWYAYQSVEVNQPRRTISPVKAFVDLGVVNIITAWIEGEKQPIAFSGKPLLADWWYWSKKIAHYQSIAKKVNGVNITKRIREYYRIRQLRFRHAINTIVFRFVKLCYDKGVTEIVVGDVSGIRQNNNKNAKVNAMIHNFWSYRYIINRLIMTAENFGIKVKLVKENYTSSICPRCGSTNVYKYKRLFKCLNCSLEAHRDVVGALNIARLSLNGTGGSNGGLALPELPRVHPSVAQTSPLGILAL

SEQ ID NO: 43958 - protein, 435 aa, Psychrobacter sp.
MKINKAYKFRLSPNAEQVVILTSLVDSARFVWNEMLALSLEMFAKNEFINAINLVNKIVGLKNNPEFAFLKSRSNAVSLQQKVRDLASAWSRFFDPKVHARFKESKKKPRKPKFVKLLDGTEIQHRPLMPQFKRNADRCDSMRLVQFDKYCRVEGNRVKLPNGVGFVKFRKSQEIVGIIKNVTISKKSGQWYVSFGTERELLQNPIHPSKSSLGVDLGITKLITTSENKTIKPKNSFKANQVKLAKLQRQLSRKVLFSQNWKKHNHKIQKLHSHIANIRHDYLHKVTTTISKNHAMIVVEDLKIANMSRSASGTMENKGRNVRAKSGLNKSILDQGWGMMIDMLGYKQHWRGGLVIKVNPNYTSQTCFNCKHVAKENRRTQVKFECVKCMYVANADFNAACNILSAGHAVLSAEGGCGKGRPMIQKTCDSREEVA

SEQ ID NO: 43959 - protein, 463 aa, Paraburkholderia sp.
MTTVTRILYATSSSLPALRAVCDVMAFVRADLWRRYGALGSVGKSAADIRKEVTASGWYANLAVDGTIRAETTKDVVHDILTYKAAACAKVRQAIAKRTPDADERKGLFALLRADRWLEDRYLHRMMRKHFRHGVSRCDNQFIVRSDKHESRLVGGRLTVTIRVAKQYGEPIVLATTSSGKHVDLTGCNLRIILKGESVEIHYATEKGEGRPCGTAEIGVDKGYTEAFTDSDGAHHGEKFGAVLSAYSNQVSKTGKARNKLHALEKKHRAAGRIAKAERIRANNLGCGKLEARRDRTQNRLRTIAYQAAHTMLDKAAVVGSEDLTSSIRGKTQWRNYNRRMSAWAKGVLAQALEEVCTQRGATHVVVNAAYTSQMDSFTGLLEGRRAGDKFYRANGDVLQADFNAARNVRNRIHDREIVRFMHHTQVKQILLARSSGATERQEASVGRRKSHQRSADKSTARL

SEQ ID NO: 43960 - protein, 427 aa, unknown
  TnpB Polypeptide
MNYNYRYRLKPTESQREALDYHRDTCRQLYNHALYRFNQIPEDEGTVKQRIRKIRDELPDLKDWWDALTDIYSKVLQPTVMRIAKNIKRLGQLKEQGYKVGELRWKSPREFRSFTYNQSGFELDKKSGQTVLSLSKLADIRIELHRPLPDDATVKEVTLKKEKTGEWFAIFGIEMDTEPPAKPPLEEIDTAEMVGIDVGILKYAHDTDGTAVESLGLSEERDRLEREQQNLSRKAYESNNWEKQRRRVAACYLDIKRKRRDFLHKLSNYYAREYKLVAVEDLDVKGMLESPRNSRNTASAAWNTFTDMLEYKCEREGTHFVEVDPDGTTKECANCGVETKKPLWVREHSCPACGFEADRDANAAWNILSRGLTELGVGYSESTPVETVLPTDTTVVSAQHVLEAGTSLRKDEAPASRSERKRASRQG

SEQ ID NO: 43961 - protein, 182 aa, unknown
  TnpB Polypeptide
MKTKQENDNVLIQSNNEASIDLGEIHSITSIDNNENAIIITGRKLREIKQLRNKHIGKLKSRRSKCVKGSRQYKRYSRAIKRLTFKTKNRISNIVHKTTKLYLDYCIKNNISKIYYGDLDSCTRNTKKEHRGNKITRQKLSQWNYGQIMRELINKLSRYDIQLVKVKEYYTSKKCPICKKIK

SEQ ID NO: 43962 - protein, 382 aa, unknown
  TnpB Polypeptide
LVVQVKLLPSPEQATALAATLSACNLAADFVSREAFQRRVFSRIELQKLLYREVKERGLSAQPAIHVIRKVADAYTALRAQIEVGLFGGIGAARRAKAENRPITFRVNAAQAFDDRCLSWQMDARTVSIWTIRGRMKDVAFTGEPSQLKTLAEYRKGESDLVRRDGKWFIVATCEVPEAPLNTNPVDWLGVDRGIANLATTSDGGNHQGRGLQRYRRRMARARAELQAKGTKSAKRKLKRRACRESRHAAHTNHKIAKTLVADAQRTGRGIALEDLQGIRDRVRLKRHQRATLSSWPFHQLGEFIAYKARRVGVPVLDVDPAYTSQRCPRCGHICRKNRPTRDDFICVVCGLAGPADHIAAVNVARRARTAWAFVNTPDAAA

SEQ ID NO: 43963 - protein, 129 aa, Okeania sp.
MRIAPTRYFLSFVVEIQPEILPQTDNSVGIDLGISTFATLSDGTKIDAPKPLKKRIKKYQKLSKLLSHKTPGSKRYEKARARVAKFHAKLKDIRTDFLHKLSTKIIRENQTVVLEDRKLSRARSDLGWI

SEQ ID NO: 43964 - protein, 375 aa, Acidobacteria sp.
MKLTLQTQLLPDKEQSAAMKQTVERFNAACSWLAEQAFAVRLSNKVKLQQLHYRDLREKFGLSAQMAAICIRHVGGTYSRDKDKLPKFRKHAAMPYDSRILSFKGVDRVSLLTLSGRVIVPFVMGKYQRERFTNAIGQSDLVLRKDGRWFLLVTVNLPDKTPTPATDFVGVDFGITNIATTSDGEVFSGAEVEQTRQRHHALSQTLQHKASKQSQAGKRPRSIHKLLIRKGGQEARFRSHTNHCISKKLVASAIGTQRGIALEDLQGIRKRIEKRFRRSQRAKVSGWSFFQLRQFITYKAQLSGITLALVDPRNTSRTCAACGHCAKENRKSQAEFECVNCHHQNHADINAAINIRGRAIVNSPQVSERAVSKAA

SEQ ID NO: 43965 - protein, 403 aa, Sulfuricurvum sp.
MLKAVKVRLYPNTEQQTAISQQIGAARYVYNRSLALRKYAYAKFGIKLGKFDLQKRITTLKKRDKTSWLKHADSQILQQSISNMDKAYQNFLKGGGYPVFKSKHHSRQSIQYPQRVKIENSKIYLPKVGWVKCKGLREDVTGKIKTVTVLYEANLYHAAILFDDGVNTLPVCTSTEAIGIDVGVSLVAADSNGGQIKPLDLVRELTKLRLRAQQLSRKSKGSKNRAKAKSRLAKQNLRIANMRKDFLHKLSLQYAENQGIVVVEDLKIKNMTKSAKGTEDKPGKNVKQKQGLNRSITQQSWGLFFEMLEYKVIARGGRFIKVDPQHTSQTCNVCGHVSKENRLKQEKFVCKACGHKDNADVNAAKNIRDRGIHGSNASLKIADKAMDEESTSFAGWSINNLVV

SEQ ID NO: 43966 - protein, 372 aa, unknown
  TnpB Polypeptide
MKTYKYPLYNQSNTIRIGNLLDDIWQVHVYFHEWQRQRYKDGLPYVNYEGMCDHLKHLKETTHPHWNALPSQAMQQELKRIHKAYDRFFKKLGGRPHIKPRRKFKSITYPSSAGWSLYNNRITLSFRKWNPDTRKWQFDKVPYTFHKPRQWHGTITEVTLKRDSCGRYWLCITTDYTDFRPLPTTGKSVGADFGMKDAYLTLSTGEKIQHPHPLKHSLKKLRSLNQTLSRKVKGSHGWWRCVRQIARLYEKISNQREDFHWQLASKLCKKFDTIVLETLNLDGMKRLWGRKVSDLGFYQFVKILRYKCSKHKRLLKEIDQWTPTTKPCSNCGYPNEYLSLSDRQWTCSECGSHHDRDINAAINILRAGIAVT

SEQ ID NO: 43967 - protein, 418 aa, Diaphorobacter sp.
MSEASNLRKTTYRLYPTPKQAAALAQLLCSHQQLYNAALEERISAWAKARKSISYADQCKSLTQLRTELPEWALANCSSQQMTLRRLNKAFAAFFRRVKAGQEPGFPRFKSLARFPGFSFKGHGDGWRFTPGADWRHGTLRLSGVGQIRARGQARQGGEIRSSDLLHKDGCWYLSLTLAVAQPERERTGNAAMAYDWGVETFLSGITHAGDRVNIDNPRWWQQAKGEIVALQQAVSRKANKRSNRRRKTVRRLAAARAKVARKRLDWAHQQTAALAGKYALVATEELTLKNMTRSAKGTAEEPGRQMAQKAGLNREILDTAPGLFTSLLRYKVLETGGEWVDAPTRQLKPSQRCPSCWRVEKKTLSQRVHDCAHCGHKESRDTASARVVLRWALESKPGQELAETGFIPRETPSFASA

SEQ ID NO: 43968 - protein, 494 aa, unknown
  TnpB Polypeptide
MKRAKTTSYIAELLLVTTREDELFLNHCRYLGLKADECMVKEANRRLNKYFRDPEVKAIRKKHRKKGHKLSKDDKAILDAKRKEYGLSEYAFQDYLKVYGRQLSNYLDANTVQKIATQVWRGASSVLFGKGKAVRFKDYDHFLSLEGKSNTTGIRYKDGYLIWGKNLKIPVRVPANDKWLHRAMQDRVKYCRIVARWHHTHWRYHLQLILEGVPPAKPKRKVVDAVAGIDIGPSTVAAASQCGVLLQELGAEVNSIEAEIARLDRKMDRQRRASNPDNYDPSGRIKRLKKGERRVWHYSNGYYKTRAKRRALYAKRRALLKQSHCMLANYMLEHLGNFFFVEKMSMVGLVKRSKKNKTSKKTGRPRSKRRFGKSIQNHAPSQFIEILARKAKANGGDLIRVDPTPLKASQYDHTNDTCKKASLNQRTKVLSNGDEVQRDLYSAFLLSCLEALDAICRSKCIANYSKFKRMHDALIQELRRQKKAGAEFPRCMGI

SEQ ID NO: 43969 - protein, 416 aa, unknown
  TnpB Polypeptide
MYLTVKQQIKHLSKEDYNSIKELCHTAKSLTNEAIFNVRQYYFNEGEFLKYEKNYVLLKNSSNYKALNSNMAQQILKEVDGSFKSFFSLLKLAKQGKYSFKDCKLPRYLPKDGYTTLVIGFVRLNGNKLILPFSNSYKKTHKSVEIKMPPILFDKKVKEIRIIPKANARFFEIQYIYEAECVQRNLNTNNALALDLGINNLVTAVSSKGKSFIIDGRRLKSINQWFNKENARLQSIKDKQHFGKKTTDRQKTIARDRNNKVNDYMNKAARKVIDYCIANDIGTLVVGYNETFQRCSNIGKKNNQNFVNIPYGQLRSKLEYLCKLNSIAFVKQEESYTSKASFWDKDAIPIYNADNPKEYQFSGNRIHRGLYRTAGGKIFNADVNGALNIMHKSNVVDLKILYGRGEVDTPVRIRIA

SEQ ID NO: 43970 - protein, 326 aa, unknown
  TnpB Polypeptide
  misc_feature (59)..(59): Xaa can be any naturally occurring amino acid
  misc_feature (66)..(66): Xaa can be any naturally occurring amino acid
  misc_feature (70)..(70): Xaa can be any naturally occurring amino acid
  misc_feature (80)..(80): Xaa can be any naturally occurring amino acid
LDTAYQNWFDSITGKRPDKVNPPKFKKKSKRQSARFTRGAFRFDKNSGTLSLSKIGDIXIPWYRRXKGEXSSVVLSRTPXGRYHVSFQVEQPLRVVGSAQNFALSVDINTKTFNFFNGRTWSHVALPRPLLPALSRLRTAQKHLSRCTKGSKNREKARIRVAKMHQRVSDVRTDFLQKLSTQLIHENQVIVVETLRTKAMLKNGRLARVISDAGFGDFIRMLEYKCKWYGRTLVKVDTFFPSSKLCCICHVKNVELKLQDRWQCPNCQTDHQRDENAVVNLYVEGLRILAEGRSVIVCGDTVRLERKPKHMSAKQETSLETCGNVA

SEQ ID NO: 43971 - protein, 407 aa, unknown
  TnpB Polypeptide
MRTYKLKIPYIEQLDLLNEASASVWNECRSLKEVWDYAHGYRTTGRIDEHCELWMDKQLSKSQPLHSQSIQAVRERYFKNRKAYRALRRNGDTTAKPPYKYKRFQTTTWKKSAIRFKETNCGYSVVLSNGKGTPPLQIPLPKLFNLSLTPNIVMVNLVYTHGQYELHFVYNTEKPETSESDGVVGVDIGEIHPIVSHDGQDTLIFNGRYIRGFLYRLRNKVVAEFSQAMSHCKRHSKRWWKLTRRKWKRIKKIDNQIKDALHKHTTNFVTYCHAKGIGTIVLGDLTGIRNNIKARKKERQKLHQWAFGKIAELITYKAKALGIKVKVIDEAYTSQTCPSCGNRKKPNNRNYACTCGFEYHRDGVGAINIREKYLGHFGVPVVADMDTQTMKMTPPLGFRLKVPVASS

SEQ ID NO: 43972 - protein, 383 aa, unknown
  TnpB Polypeptide
MHVILVARWCPLVLVDQHRLTRKGTAADVPVHRDLNVLKRVAPQDGGVPWMYESSKCAPQEALRDLGCAIKNFRAGRAKFPRFKRRSRGLGGVRLTGSITVELKMIRVPRVGRLRIKPGDHGYLPLGRHGQVSVTEEAGRWFVSLLGPEVEEASPNGKPAVGLDLGVSRLATLSDGGVFENPRALASSRRKLKRLSKALNRKKRGSMNRRKARAKLASVHARVSNVRRDALHKATTTLAKNHGKIVIEDLKVRNMTRAASGRGRKAKAGLNRVVLDAGFGAFRSMLEYKGKRYGCEVVAVPPHHTSQRCSTCGHVAAGNRTSQAGFRCLSCGFEINADLNAAINILEAGSCPDSRNACGAGVRRGDPRVTSQPAVKQESAVAG

SEQ ID NO: 43973 - protein, 394 aa, unknown
  TnpB Polypeptide
MIRVSKHTLKFANKHKLDVLERIYEDFKSCVILYIDLILKGDLPLKTNVSCKLLPNNVICHADWKGIAYRTASGIVRSNLKHTKNKTFKRYQKLYAKCKEQNIHKPFLNKKYSELSINYLKRIKIDIKTVSINLSSHLFNIKESNLFDSFIRIYTPYKIEGFERKYLNINVPIKQHKHSLKFKDWTRKNTIQLNKINGNFYITLIYEKEKCQVKQQGKSIGLDCGYNKLISDSNGVHYGEELKQVYIKLANKRRGSKSHKRLLQYKKNLTNQIVNSINLDPYSLVVVEDLKNVKHKSKFSTKFNNKLQYWSYKQVLAKLALRSEEEGFFLLSVDPAYTSQTCSGCGIIDKSNRRGETYQCTSCGLLIDADTNGAINIHNRGIYSSFNEQSESYQ

SEQ ID NO: 43974 - protein, 322 aa, unknown
  TnpB Polypeptide
MSVIGNNRYARGSAKIVQGIVESVEVLQKLGEDISLNDVELGDWWLLQSIGSRNDASEKGNRNIRLVGGNTVEVLVYDGASWRRVRATYRASKRYAKILEEVAVLGMECRLGYLARLVLLNYSPNRAYCELQITIPWSLYERYLPTKACARGDNVCGIDVNLDRLNLAIVSKQGILLDTFTSRFPELKVQGLDRSRRTSIVMRAIHEVLNYATTHGCSLVVLENPGTLGFLKWAWIKRGERRHTSWNRRVSLYTVEVIERILWHAAQYGFRVCLVNPAYTSKLAELVARDLGLDKHTASAYILALEFLGLDPKELYQHLQRP

SEQ ID NO: 43975 - protein, 427 aa, Richelia sp.
MSNIKSTSHSTKFANKGKLADLNIFLMEYRRCLQHFVDFLWNNGYRYTDSKGNIKVFNIKLNLLDCPSMLKSGIIQESGLHSFLSGRALKCCMGQAAGIVSAAVEKQRKRLYVLSKSKDSGSSKKQRKLLARKIRQNIPQKPNCSNAKAELCSICCDFRDSENFLRLKSITKTKLDIKIPIRPTRPSIKFSKIGKRLNSFLIGESCINIRWELPETILKEDGLVVGADQGLKDVLTLSNGTVTNKIDRHKHSLDLIIRKVCRKKRGSKAFARAKAHQTNFVNWSINQLNLSGIKELRLEKIWNIGFRSRTGKKLSHWQNTVIRNKIESKCRDEGVRFTLSSSTYRSQRCSVCGNVRKANRKGKIYECKNCGQKIDSDLNAAINHSVDLPEIPYVFRNLNLNRGLGFFWKSDGLYDLDGRSLQSPPHV

SEQ ID NO: 43976 - protein, 401 aa, Microcoleus sp.
VLHRAVKVRLYPTSEQEMRLAQHFGCARWWWNYGLNKSIETYRDTGKGLGRSALNALLPKLKKDEGTAWLGECYSQVLQAVTLNLTTAYKNFFDGRARFPRFKNKHGKQSIQYPQNVQVIDGAVKLPGKVGTVKAKIHRSIEGTIKTVTISKDPSGKYYASILTEVEGENPTPSVEGRVIGADLGIKHFAVTSDGNKVSKYENPRHLRQHEKNLKRKQQKLARKQKGSNSRHKYSSVVARVYERVGNSRADFLHKLSRKLVNENQVVVVENLHVKGMVRNHNLAKAISDAGWGMFTNFLAYKLEKKGGVLVEIDRWFPSSKLCSNCYYQIDELPLDVRQWTCPHCNTRHDRDGNAATNIRAEGIRMLQVDGTSISADGGEVRPKAGRKSVLRHSPLKSETA

SEQ ID NO: 43977 - protein, 354 aa, unknown
  TnpB Polypeptide
MKTLKIRIKDSSQTKLLCQLASEVNLVWNYCNELGFKYLQRTGKFLSAYDIDKYTAGASKECGLHSQTIQAISNEYVTRRKQFKKSKLSWRVSNPKSAKRSLGWIPFKKSAIKYGKDFIQYGKNIFKLWDSYNLSQFDIHTGSFVQDSRGRWYVCVTVDTPKQLPNQATKAIGIDLGLKDLATCSDGTKISNPKYHSHYQAKLGKFQRANKKRLVRTLHAKIKNSRRDYLQKQSTQLVKANGLIIVGSLSANKLTKTKMAKSVNDTGFSAFKTMLKYKCENAGVWFVEVSENYTTQICSCCGEISANSPKGRTNLGIREWTCSLCNATHDRDVNASKNILRLGHQTLAGGIPER

SEQ ID NO: 43978 - protein, 374 aa, unknown
  TnpB Polypeptide
MKLTVKMKLLPDAQQIESLRKTFEAFNAACNHVSEYAFREKCFSAFQMHYALYREVRTAFPSLSSQFVVRSLKKVEESYKLDKKVQRTFKKYSAVVYDPRLLSFPNLSTASINTVDGRYKIPVIFGHYRSLEGKKQKGQADLLYQGGKFFLHIVIEVPDDMPIDPEGFLGVDKGIVNIATTSDGDTFSGSRIDTVRERTAKIRQVLQKRGSKSEKRHLKKIGKRQSRFQRHTNHCISKEIISIAKGTSRGIALEQLKGIASRTRFRKADRQRFGNWAFFQLDAFIGYKAKLAGISVVFIDPRNTSRECSACGHIAKSNRKSQSLFSCGNCGSALLADYNAAINISRRAVINQPIAVHALSSVPGTAIPSPLATG

SEQ ID NO: 43979 - protein, 438 aa, Halorubrum sp.
  misc_feature (201)..(201): Xaa can be any naturally occurring amino acid
MELQRTAVVKLSVPNDRRDDLKETMDIFRNAAQRFADRGWEGNNDGYVITSRSQLQPYLYDDIRDETGLHSDLCVAAVNHAADALRGVVERMKEGEKVSKPVFTSNTTVYNTNAISYFDGYCTLAAYGSGRVKTEYVYPDDSIQAEYMESDEWDKQGAKLRYDQQTDTYYLHVSVKQERDDTQEEAEGRTVLGVDRNVDGXHVSVKQERDDTQEEAEGRTVLGVDRNVDGNLAVTSSGAFIGNADLLNHKRREYERRRGNLQQNGTRSAHLTIQSIGGDRFANWSENYLHHVSKEVVTEAVAHGCETIILEDLENLRERMSDLSKFQQWAFRELSRKITYKAKSDGITVEGVNPAYTSQQCSHSECGFTHEDNRDGDEFVCQKCGKELHSDYNAARNIAARYLQNRRKSGSGGATNHLALKSGTVNGSGDFTPTVSRG

SEQ ID NO: 43980 - protein, 366 aa, unknown
  TnpB Polypeptide
VLKAYKYRIYPNKAQETLIQKTFGCCRFVYNQTLAYRKNLYEIEKKSMSEFDCNKYVVRDLKPQYDWLREVDKSALENAVFAMDNAYQRFFRLHSGYPKFRSKHDNRRSYTTRITGTNIKVLFDENKIQLPKLKLIKAKLSRPFYGQIKNATVSQTPSGKYFVSILVETEHEKLPSTGGMIGVDLGIKDLLITSGGQKYDNQRITKKYEDRLARAQRSLTRKVKGSNNYNKQRIKVARIHEKIHNTRIDYLHKISHKLISENQVIVSEDLAVSNMVQNHKLAKAISDCGWYELTRQLTYKAEWNDRQYIKIGRFVKSSQTCHVCGYVNPETKDLSVREWTCPQCGTIHDRDINAAINILNEGIKQI

SEQ ID NO: 43981 - protein, 412 aa, unknown
  TnpB Polypeptide
MRSQKLRLKLTKEQEQLAWWYSKVSRNFWNLLVAIDKRNNNGEFDEILSQNGNKTYHSNFYNREVYSLNQSDYLNLAKIVVAENYEKDADNWSWYYQPNQVFIYNFVSRELMKIRKQNKGRLNFRSIDKIHPNFNVRCDTFPDKTRLSRIYLKDNGKLQIPTLGEVRYGSIRVDFDLSGKKQAAQISFDGKYWYLSYTEDVDTEVSDLPDYTSGVGIDLGIKTLATMSDGTSVPNIKTFRRVRILEKRLKRLQRKVSRKYHINECNKHNKTKNIIKLEKQIRLIHRSIRNIRINHIRKFVSVLVKKQPKYIAIEDLNVKGMMKNKHLAKDIANCSFYTIREHLIGKATERDIKVRLVDRFYPSSKTCSNCGGYKRDLKLSQRVYSCNHCQEKIDRDLNAALNIAKTDKYTLA

SEQ ID NO: 43982 - protein, 333 aa, unknown
  TnpB Polypeptide
VRVTYKYKLYNSKKNKHLHQTITLAGRAYNHGIALHRRYYRLYDKHLNQYALMKHFTKLKKRPHYAWLNDIPSQALQEIAQRIDRGYRLFFRNLKAGIKTAPPLFKKTRKYKSYTLKQAGWKLLGDSRAQIGKRVYKMCRDRTLVGDVKTVTIKRDALYDLYLCFSVEVDDPKVRPTSGKMAGFDFGLKSFLTVHDGFESYEIASPELFKQSLKSVKALSRCLSRKAEGSNNRRKARARLARAHRAIANKRLDWFFKLSHDLTERYDYLFFETLNLKGMQRLWGRKVSDLAFGMFLNVLQYVANKKGKVVALIDPFFPSSRLCPHCGCINEHL

SEQ ID NO: 43983 - protein, 380 aa, Lactobacillus sp.
MERLKAYKFRIYPTEEQEIFFAKSFGCVRKVYNLMLSDRMKAYEETKKDSAKKMTFPTPAKYKEAFPFLKEVDSLALANAQLNLDKAYKNFFRDQSVGFPKFKSKKNPVQSYTTNNQNGTVALIDNKFIKVPKLKSFIKIKLHRQPKGIIKSATVSRHSSGKYYISLLCKEEMVAFPKTDSAIGVDLGITDFAILSDGQKIDNNKFTSKMAKKLKREQRKLSRRALLAKKKGVNLFDAKNYPKQKRKVARLHEKVSNQRNDFLNKLSTDIIKNHDTICIENLNVKGMLRNHKLAKSIADVSWSSFVMKLPYKADWYGREMIKIDKWFPSSQICSECGYKDGKKSLKIREWTCSVCHAHHDRDINASLNILAEGLRLKQLT

SEQ ID NO: 43984 - protein, 433 aa, unknown
  TnpB Polypeptide
MRKIIHGEIYSLDFDKLNQLVSDWSSAYRFAFCRFQKDNLSLGECRNKTKIKYPSLNTRQISDAIMQAQGLYKRVKDKKVVFGGKKNQDKLVKKEISNQEWKDKRDNRVYARGDITKKGNPNIRLLNRNGDFYLRVTVGNRKFEEYKLFVPNKFQERLLSLFGEEKPYNVRLLKKDKQHYRIVIDYEIENPNIIIDFSSGVIGVDVNPDRVAISNISPDGNLIKSFSIFNNRVFFSSTNKRNYDVGCVVKQIINYALENNKGMVFENLKFKKEFENQGRKFNRIKSNFVWKKILTLLERKCVENGIQYKKVNPAFTSVIGKFKYQKMYNLSIHESASYVVARRGLVFNEKLSLYKYPSKLVKEIVFDHAGDKVKRIHSWSLWRKLRDNYKASLTAIQSRMSNLKELDGNLCYECGIPSGEIFQKELVSGSLNV

SEQ ID NO: 43985 - protein, 387 aa, Fusobacterium sp.
MLKAYKIEIKPTEEQIKKINKTIGVCRFIYNFYIAHNKEVYQNDGKFVSGMSFSKWMNNEFIPNNQSYLWVKEVSSKAVKQSIMNGEKAFKQFFKKETGFPKFKKKNRSNVGVYLPKNNKTDFIVERHRVKIPTLGFVRLKEFGYIPLNSNIKSGTITKKCDRYYISILGDKEFKKNNKQYSFGIGVDLGIKEFATVSDERIFKNINKTYKVKKLKKSLKKEQRKLSRKYESLKIRNKEEGGNVTRQNIQKQVLKVQKLHNRINNIRTDYINKTINELVKTKPEFINIEDLNISGMMKNRHLSKAIAEQKLYEFRNKLINKCHQNEIEVRLSNRFYASSKTCSQCGSIKKDLKLSDRTYICEECGAVIDRDLNAAINLRDNKIYKIV

SEQ ID NO: 43986 - protein, 379 aa, Anoxybacillus sp.
MIRSIKVRLEPNNKQRTKLFGSAGVARWAYNWTLEQQENNDKSGGKFIKDGDLRKKLTALKQNDPNYQWLYDYSNNITKQAIKDACKAYKDFFKGKTKKPRFKSKKRSKPSFYQDTEKIKFSDTHMYIEKVGWVRLSERGKIPTNTKYYNPRITFDGVHWYVSVGYDVPKPSVALNSHTLGIDVGIKDLAVCSDGRVFPNINRTKEIKKLEKRLRRLQRKCSRKYEMNKIQEKGGAVRYVKTRNIAKLERKMQKIQIRLEHKRMDYENQVVNELVRTKPSRIVMEHLNIRGMMKNRHLSKAIQQQRLYTLKQKIKHKCEWFGIEFVEADRWYPSTKMCHSCGYIQPKIKLSDRVFRCEHCGMEMDRDWNASINLSTYPA

SEQ ID NO: 43987 - protein, 419 aa, Brasilonema sp.
MLIMNYRYRIYPDATQQTVLFEWMEISRNAYNYALREIKDWCNSRKCMIDRCSLEQEYILPADLKFPSEVQQLNALPRAKKEFPRLGEVPSQVLQQAIKQLHRAWECFTERGFGFPRFKKYGQLKSLLFPQFKENPVTGKHLKLPKIGLIFINLHRPIPDGFDVKQVRIFKKADRWYASVCIQCNVSVPDSKPHGHPVGVDVGLEKFLATSDGDLVKPPRFFQTMQSKLKLLQRRLSRKQKRSKNYEKQRLKVARMHHTIDNTRKDFHFKQAHALCDTGDMIFMEDLDYSKMAKGMLGKHMLDAGFGQFRTITKYICWKRGKFFAQVDSRGTSQECPECGAVTKKDLKTRVHHCLVCGYTTDRDVASGQVIRNRGIASISTPGLGGTKTACAVDLPGTKISSSRQVTKSRKRKTRNAKL

SEQ ID NO: 43988 - protein, 430 aa, unknown
  TnpB Polypeptide
MLEEVLRFLSIQTSELDKEIEDLILSIKEKILEEKKLKRSSNLNNFDRFKFELDLYLSIDADLKKLQSKLPDLTLKEFNQIADIALSKTTPTIVEEDFVLEAKITKVESDKITEPVKVMSPVSGLVKVEFVVYDDIKVLIREHVVKTPTPGVVIIPKGFSGEITFDDFNQKRAILNPYPGKFQNVFDYPEDFFDGAFINKLNGILNNKKLKLSDLNSVFSKPTDYRITKNDLFAGIDIGGTPTNLLTIAFSNKTSGLQMGSSKIFEVSKKYENLFSQKVSSLNNSDQKLIKDGVKDLTENLFKRLDKRGVKVVVLGLVRGVNLSQSFTDKENVFQYFFRLLANQFIESKFFLILTDENHTSQVDPTNNELSCDKDFDQTKLKRSGHKVTLSSGVSVDADLNAAYNIIRIVRPFTKVAHKDNTYNLTSLIS

SEQ ID NO: 43989 - protein, 381 aa, unknown
  TnpB Polypeptide
MTAQKIASSVWRSVEKYLFDNGKCIHFRKYDDFDSLEGKSNTSGMRFKDGRLHWHWQVIQPQIRTDYDREALRSRVKYCRIRRKPMGTKYYYYLQLILEGRPPVKHSAGHGTAGLDIGTSTAAVVTEDSCLLTVLGSDAKDCSSQIRRIQRAMDRSMCATNPGNFLPDGTVRKGAQKWIRSKHYKRLQFRKKSLERRNADAVNASHHRLANEIASKADTVYVEKMFFHGLARRSKSATKKADGRFRSRKRFGKSIGNHAPAAFLKILESRLASSGGELIKIDTVSFRASQYNHVTDDYVRKKLSCRGSFIGSHYVQRDLYSAFLLKNSNDTGTAADRQKCIDTFPMFLITHDACMDIFLAENKKYPSSFGLRSYERYKCNC

SEQ ID NO: 43990 - protein, 379 aa, unknown
  TnpB Polypeptide
MLRAIKVRLYPNKTQEQTLNKVLGCYRFVYNHMLAHKQEAHNTDKTNLKLKELSKYFYNELRKDEKYTWLKEQNTKVMDQAIRQMLTAYEKFFNEHKGFPKFKSKRDKQSALFPIGAISKKNTFDVRKITLTTKLKNISFRCSDIYHKRLQRYKDNIRSATLSKTKSGNYFLSILMDIPQTELVKFKKTNKEVGIDLGVKDFVITSDGKKFENKHFFKKDERKLNRLQRQLSKKHKGSNNFHKQCKRIAKAFEHITNKKENYIHYVVNELLSSYDTIYMEDLNVSGMLKNHHLAKAISEVGFFKFNEILKNKSIANDKKVVLIDRFYPSSKICSCCGYVYKYLTLNERNWQCPECGEQHDRDLNAAKNILREGQRISVA

SEQ ID NO: 43991 - protein, 379 aa, unknown
  TnpB Polypeptide
MLRAIKIRLYPNKTQEQALNKVLGCYRFVYNHMLARKQESYKVDKTNLGLNELSKYFHGILLKDDQYQWLKEQNTKVMQQAIRQMLTAYDKFFKEHKGFPKFKSKRDKQSASFPIDAISKKNTFNTRKITLTKNLKNISFRCSDLYNKRLQKYKDNIRSATLSKTKSGCYTLSILVDLDVTEYANFKKINRDVGIDLGVKDFVITSDGEVFENKRFYKKDEKRLTKLQRQLSKKRKGSSNFNKQCKRIAKVFETITHKKENYIHSVVNELLKCYDTIYMEDLNTSGMLKNHKLAKAIQEVGFFKFKTVLSAKALQNDKKVILIGRFYPSSKTCSKCGYIHKDLKLKDRHWNCPNCGSYHDRDFNAALNILYEGRRISAA

SEQ ID NO: 43992 - protein, 432 aa, unknown
  TnpB Polypeptide
MEVNRVEQHRINKNKKNNEDDKIFKTIDNLCWKSKNLYNYGNYIIRQKFIETSKQKEQGLIETAYWIRYAELYQLCKNSEPYKEIGSAPGQATLKKLDKNWASFFATIKDYSKNPEKYLGKPKIPKYLPKENGRYEFGINNQKFKIVDGYIFFIWTPLKILNNIFRTKIPNDSKLMQVRFVPKGNEYIMEVVYQIDVPETENTVAERIAAIDLGVDNLMTVTTNCGVSPIVINGKPLKSINQYYNKKISEMRSALKLRNDSDWSNEMRRFTTKRNNQVNDYIQKSTKMVVDFCKCNNIDTLVCGYNSGWKQETVMGKKVNQKFVSIPHLSIVQRLEYKCENEGIKFIKTNESYTSGTSFLDGEEPIEKNYNKNRRIYRGLFQSEKGEYINADVNGSYQIMKKVFPKAFANGIVDIGSHPVVVNIPLQTANIM

SEQ ID NO: 43993 - protein, 491 aa, unknown
  TnpB Polypeptide
MAVEKTIKLYSEPLTLDELISLETLLDYREACKNYFYSRFSGIEYLDKLKFREIRDSLLKKEIKDEMKKFHLPARTWKMDLSEVISNVKSMWSNMENQIKHYIRNNEHLTNEDRHYLFYVLKSRNLWAEALQTKNITETKKLSEINISKSKEYLINLLCRYTRMSKPKISVSRNLKSIQFETGMYTLIDGTLSLQTQNKGQRLLIKLRNKATIKKGNIRIVLNRDNSVLEVHKLIFIPETELDKQDDIGLDKGYTKMLSSSSGKEYGIVLGDLLNRSCDFINKKNKVRNYYHSLVRNLEQELKENKYLTDIEQKKIKQKIKRIKQNNLSDKTYKRTRNRHQEIIKSYVNHEIKRFILTEHPNRIALEDLTFESVSKGNNKHYNRKKNLWIKGYIDERINYYAKKYNIKVVYVSAAYTSQFCSKCGARLDSRTGVHHEIGHCPNCGEIDANINAAKNIKARLYDSEIQLFTPYKQIEKILLDRYKKMHKQKV

SEQ ID NO: 43994 - protein, 438 aa, unknown
  TnpB Polypeptide
LKLTKTFNSLRNAQPFTIELAAYVSTNLVSLRSMQRKPTLKAYKYRIYPSDAQMVFFAKTFGCCRFVWNKMLDKKLQAYQKKERIPGVTPAEYKKDFPFLKEVDCFALVAVQNHIKNAFRNHFKNRKQFKLPKFKKKKDKQSYTTYNVHNSIIVDFEKGLLYLPKLREGVRIELHRKFDGKIKSVTISKTADGKYYASILVETENRRNKVVEPKSRACGIDLGLDHFVTVTNDFGSYKVEHPKYLRRGEERLKRLQKSFSKKQKGSKNSEKARLRLARQHAYITNARNDFLHKLSKAIIDENQVVVVEDINVKGLLKTRLAKSISDSGWSKFLSYLKYKAEWYERTFIQVDRFFPSSKLCHHCGHKNEDLALHDRTWCCPSCGETHDRDVNASKNLYFVGLGRPEITPVEQALVDDRSPYGLPKKPSCDETGSSTTYC

SEQ ID NO: 43995 - protein, 408 aa, unknown
  TnpB Polypeptide
MLLCKKIKMEVSEQDAATLEFMQGKCRGLYNWHIMKLRDGERWNFAEAKRSLQESKQHDPELEWVYGKLLAEVFYRIDGAMKAFWRRLSEGEEPGFPRVRPRHAFFTLCYPASYLKIEGNRLTLPTGGGGKHGPKHFPTIIVRLNEPAPTDFKEVAISRDARGNYYASFPSAALCAQEEPSDPGAPEVLAFDLGIKTLATGVNEQGRVYSIGGYHKGKQWYNKQLDKIRSKRDKCKKKSRRYIHLSKVYKRVSEKKRNKQQDSLHKATHLIATKLVERTVVVGDLSQRQMVIKEHQERNKSLNRSVYNDWGLYTFLQMLSYKCQLAGKDLQIVDERNTSKMCSGCGHLQPMPLWKRTYCCCECGLIMDRDENSACNIRDRYITGLTIFVAWYLARLGPHISERECGVL

SEQ ID NO: 43996 - protein, 474 aa, Thiothrix sp.
MVIFPIEFHQFSFKVGTHAGENATQVIQYGFGEYISAVFCHKDQVNMYFKNTMSSMSNVVVITHRPNYNIEMQRRQAFKYELMPNGEMQRQLRRFAGSCRFVYNKALALQQANHEAGEKFIGYVIMAKHLTAWRNGEETPWLKDSPVHPLQHALKDLDKAYQNFFAKRADFPRFKRKGSGDSFRYPDPKQIKLDQGNSRIFLPKLGWIRYRNSRDVLGELRNVTVSSNGGKWFVSIQTQREVAIVPSIAIAAVGIDLGIARFATFSDGTYLEPRNSFKTKAAKLAKYQRRMAHKQKFSNNWKKAKAKVQKIHTQIADARRDFLHNATTTLSQNHALVFIEDLQVGNMSKSAAGTAENPGKKVAQKSGLNKAILDQGWGEFRRQLDYKLAWKGGMLFAVPPHYTSQECPACHHVSADNRQTQARFVCVQCHYENNADHVGAINVLERGYRLLACGDAALSRSVKQEPTEVSQLSS

SEQ ID NO: 43997 - protein, 399 aa, unknown
  TnpB Polypeptide
MKRTNTFDLKPGKEEEAILRTWADNCAHMYNEINYKRRQSFFRGEFDWNTDEFYHKYKKSVGAATAQQIIRKNNEAWKSFFALLKAYKKGKIKDKPHPPGYWKDRATGKRILRIFVRNDSYSVGRKYIKLPFGLKIRWRGRNRWVGKPGRLEIVYDALSGRWICYMPVEVEPLHQPIGDKTAYIDLGVVNLLTYWIEGNERAEIYTGRCILSDWWYWTGKIAQHQSELKKAGKHTSKRLRRLYHKRKRRFRHVVNTIIARFVKECYESGVSVIIVGDVTHIRENGRKGHKTNAMVNNFWSFGYIYERLRVTAENYGMRVEKKDERGTSKTCCLCGKEHRGGRRYRGLYVCKEKGVALNADVNGVANIANPIFPKPVWDRDNWVVAHPLLHKVGVGTSAL

SEQ ID NO: 43998 - protein, 396 aa, unknown
  TnpB Polypeptide
VPLVSFKTELKLNNKQKTLLAKHAGVARHAYNWGLATCFKALENNEKLPTAIDLHKKLVAEVKPIYSWYYEVSKCAPQQALRNLSTAFKNWWIHKHTKCPRFKKKGHHDSFYLEGRVKVSGNRFKLPRIGWVNVHENLPAITPKNVTISRHADRWFIAFKYELDIANTPKIRERIGVDIGINSLATCSDGTVIKNRKAYRKHKKKLARLQRNLARKQKGSKNRQKAQVKLARQHKKVVQIRKDTIHKLTSWLAKNHSEIVIENLNVSGMLKNHRLASAVADCGFYEFRRQLEYKTEWYGSKLVMADRFYPSSQLCSNCQNKQKMPLSKRVYECKNCGLKIDRDLNASINLELYPTTHSLWGSKACGESNQLSGKSIKDSVKQEVNVHPMKSGNLTH

SEQ ID NO: 43999 - protein, 419 aa, Planktothrix sp.
MLVLEFKVRAALQQRKAIDEAIRTSQFIQNKCLRYWMDNKGVNKYDLNKYCRVLAHDFKFANELNSQARQSSAERAWSAIARFYDNCKRKVPGKKGFPKFKKNCRSVEYKTTGWQLNLETRKAITFTDKKGIGRLRLVGSYDLHFYQPEQIKRVRLVRRADGYYCQFLISINVQIKTEPTNKTIGLDVGLSAFYTDDQGNKVDHPKFLRKGEKKIKRLQRQLSRKQKGSNNRKKARQRLSKAHLKISRQRKEFSKRVAYSVIQSNDLVAYVGVACAKRIDLKIKNLVKNHCLAKSISDAAWYQFRIWLEYFGRKYGKITIAVPPQYTSQNCSSCGKTVKKSLSTRTHFCGCGCQLERDENAAKNILRMGLSTAGHTGTFGLEPINALGELTSTLTGAILLGQVDSLNKESHLTSRSDVR

SEQ ID NO: 44000 - protein, 355 aa, Lactobacillus sp.
MIYAAMHSVHLVQQQLNLVARSMESWRKARKAYAKNPGKFTGRPKLPKYRTKGGLSTIIVDNQTAKLRQNGSVEIPVMDHFKVQLAHPETTAIQEVRIVPQNQRFIVEVVYKTNLTIGYKPDNGRYLGIDPGVNNAFTLVTNVPGVDPIIINGKPLKSVNQYYNKQRAYLTSLYDLLGQPRASHRLARLDFHRNQKMNRFAHEASKRIVDFALSHELNTIIIGKNKGQKQGAQLGKRNNQNFIGIPHQTMINLLKYKANLAGIVVIQHSEAYTSQTSFLDREEPIRENGDKARQRKGLSPIKRRIKRGFYKADTGQLINADVNGALQIINKVVPKAFADGIVGIGLCPVKWSLRF

SEQ ID NO: 44001 - protein, 367 aa, Lachnospiraceae sp.
VLKAYKFRIYPNNEQKVQIAKTFGCCRFVYNKTLAYRKEIYEKEKKSVSKTDCNNYCNRELKKDHEWLKEVDKFALTNAIYNMDAAYQKFFQEDAGYPKFKSKHDNHKSYTTNFTNGNIAVDFKTGRVKLPKLKEVRTKLHRNFSGQIKSATVSQVPSGKYYVSILVETEHEEIQHTKQNIGLDLGIKELCITSDGRKYENPKTIKKYERKLTRLQRELAHKEKRSNNYYKVKKKMALCHEKITNTRKDYLHKISHEIISENQVIVSEKLEIKNMVKNHHLAKSISDASWYELTRQLEYKAEWNGREYIKIDTFYASSQLCSVCGYQNAETKNLSVREWTCPVCGAKHDRDINAAKNILVEGLRQIA

SEQ ID NO: 44002 - protein, 416 aa, Anaerolineae sp.
MPSYRKAQTACVVRIIPLRGLNKTQMALCSSLRREAGRCWTDILHAHIESRSGKWLKCGDLEKLAKGMYTLHSQTIQALAQKLDDNCKTARQLRKNDPEARYPYKDKSYQTVIWKDQAIRIVKGKIVLPNGRQNPSLTLSLPAEYHDCDIRKAELTWRADHYELCITIDTGILIPPLLEDGKTVGIDLGEINIAAAVTEEGEGLVISGRYLRSINRLRNKRLSAYQSLIDRCKDGSKRQRKLLKNKRKASTKYERQQRDVLHKASHQLVNFCREQGVSQIAVGDVKNIQTGVDLGRKTNQKISQWPHGQFVKYISYKARRLGIRMDQIPEDYSTKTCSECGQVLKNAPRGREYVCPGCGARLSRDGNGGANICSRFLYGEYARIQINQLTYLRPLKRSRAYDTSQSCSSLMRTPCL

SEQ ID NO: 44003 - protein, 421 aa, unknown
  TnpB Polypeptide
MAKRAFKYRIYPNYEQETLIRKTIGCARYTYNSLLEDYKQQLDNYNKNNKNTLLSPCIKEVTFLKTTAPFLNEVDSLALANAKQHLKQALTNFFNSRNGKRKGRNVKFPKRHKKSKAKLSYTTNNQGGNIHIQGNKIKLPKLGWVKFIEHTPLLGEIRSVTITQERNNTYYISVLCEYTPKTITKHKPISELRVVGLDMSYSEFVVSSDKSMDDTKPKYIRQYRTNERRRKLLNRRLSRKAAGSKNRDKSRIRLANLDRHIANARKDYCHKLSRFYADNYDVIILEDIDMQQQQRALHNGKSVGDLGFGMFKSYLSYKCMDNDSVLIYADKWFASSKTCNKCGYVKSNLSLSERKWECPICREKHDRDYNAACNLRDYFYRLIGTAGTAGNNAWGDTTNTLRETLVQVVSLNQEAPSFRWG

SEQ ID NO: 44004 - protein, 217 aa, unknown
  TnpB Polypeptide
MRIVVKGHDLVAQIVYDAKEDAASSNDNVMGVDLGIKCPAVSYCPDGSIKFYGNGRKNKYIRRHYNNLRKRFQKAKKPKAVVKINNKEQRIMKDIDHKLSREIVNTAKTHDVSVIKLERLQNIRSTTRTSRKNNHSLHTWSFYRLATFIEYKAKLAGIEVEYVDPAYTSQICPICGRIQHAKDRNYICRCGYHTHRDLLGAINICHSTEYIGNRYTA

SEQ ID NO: 44005 - protein, 421 aa, Balneolia sp.
MPKIIRSSEVSLKFTNHGKLGNLSAFMAEYRNVVQSIVDHVWENGVAVGSRVFSIKEESPNVPSFLPLSAVPVMNTTLSARAVKCASTQAMSMISAAVTRRRKDLFCRNKCLQAGTSTPKAVQDRLSKNLVRPCATRVKAELNSICAKVSWDSGTSFDGWLKLSSLGKVYGVINIPIKKHRHINSLIKTGTQLNSVLINKNTVGLRFEMRPTENNGTEVVGADSGMKTVLTLSNGDATVEKDKHGHSLESICESISRKKRGSKACKAKREHRKNFINHALNKINFNGISEIRLEKIHNINNGRRTSRKLTAWTSTLIRDKVKSLAEIKNVSFVQQGSAYRSQRCSKCGNVRKANRKGKVYSCRRCGLSIDADLNAARNHEQNLNPVPAAFFRTKVNLGDGFLWLPAGVFNLSGAELTVPLS

SEQ ID NO: 44006 - protein, 401 aa, unknown
  TnpB Polypeptide
MQLVEQHLIKRTDPRYAVIDAASFASKNLYNAALYEVRQAFIHQGIYLTYGKMDALMQQHEAYKALPAKVAQQVLRLLDKNWQGFFAAIKAWKANPSAFQGRPKLPKYKDKVKGRNVLIYTAQAISRTALRKGVIAPSQLGIEIISIQPEVNQVRIVPRNGQYVIEVIYEQEPEQEAVNPDLYASIDLGINNLATLTSNKSGFVPRIVNGRPVKSMNQFYNKERARLQSVLVKMDSKRHTSHRLDRLTNKRTRKIDHYLHTASMRIIDVLVSEGIGSLVIGYNPEWKQAVNLGSRTNQHFVSIPFARFIHMLSYKAELAGIRVKISEESYTSKCSFLDNEIIGKHEQYAGKRIKRGLFRSASGKCFNADVNGSYNILRKVAPDAFEQGSRGCVVHPTSLAV

SEQ ID NO: 44007 - protein, 399 aa, unknown
  TnpB Polypeptide
LIIGKKIRLKPTKEQEMLFWKSAGVARWSYNYFIATQNETYQSYLDNNKTGKKFIGDGEVRKYINNVLKPTTHAWLKEVGSNVMKQGVKDAKDAYTKYFKKLADKPKFKSKHKSTPSFYVNYESLKRIDGFHFRGEKIGIVETSEMLPKVKDKYSNPHIKYDGKYWCLSFSIEIEEETYQLTNISLGIDVGIKDLAICSNGETYKNINKSKEVKRLEKKLKRELRSFSRMRENNMINKIYYKSGDKKGRLKSFEYIRPLRECKNYQKQLKVVQGIYRRLTNIRNNHLHQTSSEIVKTKPFRIVMETLNIKGIMKNKHLSKAIQQQKLYEFKRQIQYKCKKYGIEFIEVDKFFPSSKKCSCCENIKKDLKLSDRIYKCDNCGISIDRDYNASINLANYSV

SEQ ID NO: 44008 - protein, 428 aa, unknown
  TnpB Polypeptide
MQLAKKIRIYPTKEQVDVLWEISDKCRIVYNFALNDRQDAYEKEARSVKYTEQQNKLPDFKKRNPEFKSVYSKTYQGILKKLEGSYNSFFGHQKNGNKKARPPNYKGRNYLMTIPYNQSGFHIWRNYISFSHSVNDTELVFDIGDLADGLKVKQVEIVNDNPYKARGKFYICLTYDVDLENTYFDNNIYQAIDLGITKIVTAINTEGKFFEVKTPRPDNYWNPKIDSAKSRRDHCIGVKKGSTKSRRFLRIARTVTKMSRKKANQVKDFQHKLSKTMVENTKANTIIVGDLSVQQMAQPKVKDGVKQKKTKQKKGLNRSTQGLGNLGRFVQFLTYKAEILGKLVIRIDEKNTSKKCCYCGKKHDMPTKERVMLCDCGNNIDRDRNSAINIMLRYLSQNALWTGYQQFVDNLRQYRLPDGIEIHRIEAK

SEQ ID NO: 44009 - protein, 428 aa, unknown; identical to SEQ ID NO: 44008
  TnpB Polypeptide

SEQ ID NO: 44010 - protein, 442 aa, unknown
  TnpB Polypeptide
MRTVRLRLLPNGAQERKLRRIADAAARLWNELNYVRLIQFRVSGKVDFKGTEHEFYHRYKSVLGVNAGQVIRLNNSAWKSYFKTLKLHRQGRLPRFYGKPSPPGFWRDKVLGRRLLRILVRNDRYYIEPINGGEGYLVLKDWNLRIKYAGRIKWAGRQGTLVIRFEDGRWFAYVPIEVGSKPARSNPRGYVKGTHEKIQIEKPKGGNKAFIDIGLNNLFAVVLNHTDTAILIKGSTIKAEYYWWKREIKTYQSIRDWLRNRGFNAWRKYHAFYLHAKYKQHERLRHYYRTAIRFLAKTLHGMGVDEVFIGYPYLVSQDDGNEYNTNVWWFSKIIKWLGDVLEEYGIRLHVINEYGTSKQCSICNANHENGRIKRGLYICPVMGIEINADLNAARNIAKRAGYETLMPKKILSFIITTNGVKPLTPKEGETTKTPKINPTSPR

SEQ ID NO: 44011 - protein, 246 aa, Oceanobacillus sp.
VELVFQIPAKAEKKESKNRFMSVDLGMDNLATIVTNTGKRPVLVKGKNIKSVNQRYNQLKAYYTGIFRQGKNTNEGPFTSKRLEKISQKRFLQIKDLFHKASSQIVKIALEEDIDTIIIGQNKDWKQHAAIGKRNNQSFTAIPHSLLIQMITYKAEKHGITVMLTEESYTLKASFLDNDEIPIYDQKSQSVVFSGKRIKRGLYLSKMRLLCIMIIPRIITLPFRYMLIYVRRNFVKLFQLHLPQYN

SEQ ID NO: 44012 - protein, 326 aa, unknown
  TnpB Polypeptide
VKRITITYSDSQDWKLKDGVVKVRTHKGWVKIHYRGHKQLHRYLYNGWKLSSELRLKLNSRKVIIYLTFTKNFEVAFNPNNVVAVDVNENNVTVAVFRDRKLCEVYRVETGLGRLVISYAERRKRITRGKSTKTRSVKKALKKLREKERKQDIIHKTARIIEELAIQNNAIVVIGNVRRGKRGLVERTRKSTLRHRIHQWSVSALVEALDNKPLHVVEVSEAYTSSIDPFTSKRIRKFTPSMTRYAVRGRKRVRVIKIQLRLAKLDNGLVLDRDVIGAINIGLKYLSSDGGWVVFTPTEPHEVWVKLMSPHQGLTPLTELKVLKTI

SEQ ID NO: 44013 - protein, 366 aa, unknown
  TnpB Polypeptide
MVNDAIRICLAEGIKGRLKLRDRIYKEFQERYGVVSCFPYSVAEVAWSVVKKHKRWHRTPHAKRLMLKMDARSFSLNYSILSLPFKKGKRALIPLQYGEYQKSFMIDETLKRGSVTVTESSIIIAFSKEPLTELPSSKVGYDLNEKSLVGSDGTTYDLSEVARLHTLYGIRRSRFYEGHPQDRRLKKKFASSRREKDRVNQALHNVSTSVVEKARANKEAIVLERLKGIRHAHQKGNGEGKARRRRIALWPFRRLLSYIDYKARWAGVPLEYVSASYTSKTCHACGEVNRKLKLTDRSWLCPCGAKLDRDLNAAINIERRGRIRCLGEACPEARDKDEAMTQEPRRQETAGNLVAEVPKSSRGCAS

SEQ ID NO: 44014 - protein, 361 aa, Clostridium sp.
VNKAYKFRLYPNAEQMNLLTRTFGCVRFIYNKMLGDKIDYYHETGKKLSNTPAQYKEEFPWLKEVDSLALANAQLHLQAAYRNFFRSPKSGFPKFKSKHRHQDSYTTNNQKGSIRMEEGRIKLPKIGFVKLKQHRPVPKDYAIKSATVSKTPTGKYFVSVLFEYEEVIQPVKAENVVGLDFSMKELFVSSDGVTAAYPHYYRQSMEQLSKEQRRLSKCRIGSSNRNKQRIKVARLYEKVSHQRKDFLHKLSRQITNVYDAVCIEDLNMQGMSQSLNFGKSVYDNGWGIFTSLLDYKLSEQGKKLIKIDKWYPSSKTCSCCGKVKEELSLSERMYQCECGFICDRDVNAARNIKEQGMLVLA

SEQ ID NO: 44015 - protein, 351 aa, Paenibacillus sp.
MQTVTVKIHIFPNDAFLLQEMGNEYIQTVNRLTEQAESSGIFPKLTSKDVKANLPSAVRNQAIRDARSIDKKTKKQGKRPILKRRAYYVNNQNYSLGRDTVSFPVMVDGNVQRQTVSACITEREQGLLSSGKLGLLKVVEKSGKWYVQISIEVKTEPAAGDVTMGIDLGLKVPAVAVTSTGKTKFVGNGRQNKFVRRKYQERRRKLGKLKKLSAIRKQENKEHRYIKDQNHKISRKIVNMAIEEQVSVIKIEKLTNIRQATRTSRKNAKNLHNWSFYQLQTFIAYKAALAGIQVIEVNPAYTSQTCPACSKRNKAKDRTYQCSCGFHAHRDRVGAINIMRQPVADGNSLSA

SEQ ID NO: 44016 - protein, 514 aa, unknown
  TnpB Polypeptide
MAKSTTQSFVVTRRIITGKRGYDKLNKIERITERMYNAGVRHCIKQLDELKKDVWYKYCLGQFFACRDEKESKQWSREIFICAAAYQLTEYDLHAYFGRGKASGYEGGIGINIVQKTATALYSAVKKAIFGKKIHFRKYEETFSFEDKKAASGIIYKPETDTVTVCGTVFNLKPVRESDIWLQEAMKHKVKYCRIIREPFGIHYRFFLQLVIEGIPPQKHTVGAGTMAIDPGVSTMTSYNGSKLSFEELAPDVSKYQEKVIREQNRFSKLTRINNPECYDDEGVHIKGMRIQYSESMKRSKMRLRTAYRKQRIYVGQSNNKLANEWLRASGSVVKIETMSYKGLQKRSSKTERQDKKSVVTDRNGRKRSIRKYKRRKRFGGSILKHAPSGFLSTVKRKVKATCGVVADVSASKLKASQYDHASDSYEKVSLSDREKIIDGHMVQRDCYSSFIIFHATDENKPDREGCLKGFEKFLVCQDELIKEMIHDNFSNPNFGTKLINIKKQQLHEGPAAV

SEQ ID NO: 44017 - protein, 390 aa, Cyanobacteria sp.
MLKATKVRVYPTAEQRKHLAQSFGCCRFAWNYALSLTNETYKATGKGLSRFAIQKEITNLKKKHEWMKKPYSQCLQVVALNLSRAFINFFEGRASFPTFKSKHQRQSISYPQNVFLVDDGLKFPKMGVVHAKIHREIEGTIKTVTLSQNCQGHYHASILTEDGKETPEKSADGKAIGIDLGINHFAITSDGSKFDHPKWIEKHEKNLKAKQKRLSRRQKGSNNRNQTRRQLARVHKKISDCRLDFHHKLSRRIINENQVVCVENLAVKNMVKNRNLAKAISQAGWGQFCTMLKYKAEWEGKVYQEINRFFPSSKTCSVCLHQVRNLTLDVRSWQCEKCGTNHDRDINAAKNIRDEGLRILSSGVGEIAYCPDISRDSRGRKTSTVSQSVG

SEQ ID NO: 44018 - protein, 383 aa, unknown
  TnpB Polypeptide
MRAYKFRIYPSEKQEELLNNHLLLAKNLWNELLEECKQMYKDFGYFPTKNTLQLMVKNYGLYSQTEQEIAHRVYNSVMRVFKLKKKGMKCGFPRFKSFDRMKSLHYPQYEIGFWLNKKLKVTPFGEIEVKKHREINGRIKTLTLKKESSGKWFAIFTTEEEKPIPKENKGKAIGIDLGLKTFATLSNGMKIDNPRHFKKHQERLAFIQRKSSFHKKRIKNYKKAKIRVAKLHEKISDYRRDFLHKISTGLVNDYSFIALEKLASKEMSEENYGKQIRDAGWNMFANMLAYKAEGAGCRVVFVNPENTSQECSNCHELVKKDLADRTHNCPFCGLLIDRDLNAAQVILKRATEGHSGSNACNSLHKERDVAVATSMKQEAHAYS

SEQ ID NO: 44019 - protein, 449 aa, unknown
  TnpB Polypeptide
MLTEFVEDMNQVITAKLKLNLTADQQSAVRDTALAYRDALNYASAIAFDNGKSSNGAKLQKLVYNNLRSDFKLGAQMACNVPRQVAATFKSLLTKVKQNNEAIKKGHTKKWFKGLDEAPRYSSRTVTLNYQRDYSFKSDQQVSIGTLNGRIIVPYEGWNKHLYLIKTCPNIGAAKIVYQRSSKTYYLMVSLEIDLPDIDPTTITRISGVDVGMRYLAVETDLNNKSAFYSGKASRHRASQYQKARRTLQRKDTRSAKRRLIALSGRERRFIADVNHQMSKEIAKPSSLIGLENLTGIRDRTKSKSGKKATKKQRRANRNKARWSFAQLHSYIDYKANLVGSLATKVPAHYTSQSCPKCGHTSKANRPNKGLMFRCECCGNELHADLVGARNIAMRTLLVRQDWSSTGVLSVSPDVSRDETKAEILQRFSELRWSVDTSPHCSGTPLSGG

SEQ ID NO: 44020 - protein, 214 aa, Armatimonadetes sp.
MTAARPGTIPRLSLSAATSRATSARISAAIAFPLMITADILSSSTPRALLFPSLVTAPIVPHHPGAVNAGLTLSCLSGTLARVGLLMRILRHRSSASASPHALAVDGQRALAIEDLKGTRERATVRKSQRYERLSWAFNGLQQLLAYTCEPAGVLLEVVDPRNTSQTCPGCTHCSRNNRRSQSDFSRQVCGFQELADHVGAVTMRHNALEARAG

SEQ ID NO: 44021 - protein, 407 aa, Micromonosporaceae sp.
MQLRYTFRLVPTPEQQVMLARTFGCVRVVFNDGLRARSDALRAGEPYIGDTQLQSALIVGAKATPQRAWLADVSSDALIQGVRDLHAAYRNFFNSVTGKRKGPRVGPPRFRSRRDTRQSFRMTRNGFRLRGNGALYLAKIGEVRVRWSRALPAEPSSVTVIRDNAGRYFASFVVQVCVATLPEVDMEIGLDLGLTSYAVDSRGHVIENPRFLRNQERRLRKAQKALARKADGSANRAKARTRVARAYARVADCRRDWLHKTSTRLIRENQAVYLEDLAVSSLGRTRLAKSVHDAAWGMFRRMLEYKASRHGRHIGIVSRWEPTSRRCSACGVVGGKLSLSVRSWVCGHCSAVHDRDGNAALNILAAGRADRQNACRDHVRPSSRTATVSETGTVPGRRKAARGKASK

SEQ ID NO: 44022 - protein, 446 aa, Helicobacter sp.
MLVTRILYAKNINKGKLKALKEQAQILGELRSAIWQEYGGLKCLKTSDRKIRDLWIKEKRTFKVLANAWKETLRDSMNNIKLYLEAAKTSIKKDIFRRYKTKEEQKEAFTKLKKDEWLEDNFLHRKMRKAFKHGKNSVFNQIIVRSDDYKVFELNDQCWLSIPSLIKNKRIKIPLNTTMEYKPSGTLRLIIKNNVVEVHSSYEKRTNRACGNGIIGIDKGYSEVFVTSNNEFLGNGLGKILTQYSDKLKAKYQRRNKLLALVKKYQKTNKSKKANRIEQNNLGKIKQNKENHRIKQRLKTLIYNACHQVIDRAKVVVCEDLRGNFSKKTGYGKNTNRRLNSWVKGLIEYALKSVAECRGSALHLVNPAYTSQCDSFCNNLLLGCRKGNDFYPYNGGKIQADYNAARNILARYFDKEIKRDTPFNAVKEILLKWTDSYRLTTVQARL

SEQ ID NO: 44023 - protein, 216 aa, Fusobacterium sp.
NLCTCVTNTGASFLIDGRKLKSINQYYNKINTKLQSIKDKQKIERTTLRQKRIARKRNNRIEDYLSKAARIIINYCLNNDIGKIVLGYNEDFQRNSNIGSINNQNFVNIPYGKLRDKLIYLCKLYGIEFKLQEESYTSKASFFDGDEIPIYDKENPQEYIFSGKRIKRGLYQTSVGKLINADCNGALNILRKSKVVDLSILYNRGELNPPKRIRVV

SEQ ID NO: 44024 - protein, 390 aa, unknown
  TnpB Polypeptide
MQKLKKAYKVEINLTKEQATKIRKTIGVCRYAYNFYIAHNQEVYKNEKKFISGMDFSKWLNNEFIPNNADKSSMKEVSSKAVKQSIMDAELAFKNFFKGKSSFPNFKKKNKQRVKAYFPKNNKTDWAINRHRIKIPTLGWVRLKEFGYIPINSKVTSGTVSQKADRYYVSVLVEEDIQINEAPSSKGIGIDLGLKEFAVISDVTVKKNINKTVKVKTLEKKLKREQRKLSRKYEALKIRNKKLKGGATRKNIQKQIVKVQKLHQKLTNIRTDYIYKIVSDIVKQKPSFVTIEDLNVSGMIKNRHLSKAISKQKFYEFKAKLVTKGNLNNIEIRVVDRFFPSSKTCSCCGSYKKDLKLSDRVYKCNNCNAIIDRDLNASINLENAVKYKIA

SEQ ID NO: 44025 - protein, 455 aa, unknown
  TnpB Polypeptide
LVSRPGDKQSYSGYIWFSPCADVAHPCYNCTMKSIRIYRLDNLSRSQFNRAKAAQMEAAQVWNCCMQAHKQARLDHTKWLGEQDLRDLVKSRFALHSQSIQAIVRMFVTTIEITRQLRKTHPHMQMKYPWRTKRFYPVSWPAQAVSKEKGRIILPMGKGRKSLVLPLDLPEKSGACTLVWNNGFELHVCVEVPQAEQAPGNVQATVDLGEIHLAAISTNTGKAIIVTGRGIRSLKRQRHQRLGKLAKKQARCTKYSRRWKKLQRAKNKACRRIERRVRDLRHKATRQVIDFGIEQQVGTLFIGNPHGVRNRHSGRHHNQRMALWEYGKDIDYLTHKAKQAHISCFTGSERGTSSRCPCCGHKQKPKGRNWACRVCGFQGHRDLVGSVNMHQVAYGTQVKFPRSFTYLRPGLSRSSSRADTPQCCLSKSATQPLLVEQVSPEIGYPVGVAQKPVSL

SEQ ID NO: 44026 - protein, 222 aa, unknown
  TnpB Polypeptide
LGKASLFYKKGKWYFAVTIKIEAKKTNNSNLMGIDIGLRQLAVASVKNSQGKEINRQFHNGKQAGFIRKKYRMLRRKLGQSKKVKAIKNINDKEQRWMTDLNHKISRQLVNLAVQEQVGTIIMENLENIRNTAKSLNRADRNIHNWTFYQLQQFIEYKAELAGIKVEYINPKYTSQSCSRCAKVKKSNRKANLYSCECGNHIHSDLNAGRNITNKYLEQQSA

SEQ ID NO: 44027 - protein, 379 aa, Desulfurobacterium sp.
MSRAKEESKFLLTYKFRAYPSALQEYKLENWLFALCWLYNHALEERKRVWKEERRTVKYSEQQNNLPKLKKKEPILKLVHSQVLQDTLRRVDKAFQKFFQDLERKKKGEKVKVGYPKKKPIAKYKSLTFSQVWMKQKGKLVPIIKLEKKNNRFAYLHLPKIGKLKIRLHREIDWTRAKTVTVKREPSGNWYVCISVEVDLDQILKEAEERVERKIKTVGIDLGVKHLAVTSKKDYIKHPKFIQKLEKRLKREQKKLSRKEKGSRNFEKQKKKVAKIHEKIKNARRDFLHKLSRKLVGRYHLISFEDLDIPGLVENNPLAKLILDAGWGTLITFTTYKAVMAGVKVVKVDAAYTTQECSYCGLKVPKTLADRMHKCPRSE

SEQ ID NO: 44028 - protein, 419 aa, Anabaena sp.
MKRQAVKVRLYPTNEQVQVLAQHFGCARWWWNYGLNQCIETYKATGKGLSQSGLNSLLPALKKAKETEWLGECYSQVLQSVSLNLSRAYQNFFEGRAKYPTFKSKHHRQSIQYPQKVKQVDDALKFPGKLGTVKAKIHRPLDGVIKTVTVSKCPSGKYYASVLMEYVRVASPTGEGDYPASTSEGKVIGIDLGIKDFAIAYDGEKVSKYSNPKHLAKYEQKLAKKQRIAARKVKGSNRRRKANKIVARVYEQVSNVRQDYLHKLSRKIVNNNQVVVVENLNVKGMVCNHKLAKAISDTGWGTFVNFLSYKLERSGGKLIEINRWFPSSKLCSNCHYQISELPLDVRTWTCPNCGVHHDRDGNASINIRAEGIRIMSSSGTGEANANGEDVRPIRGRKSKMRQSSVKLEAHTVPDQGQCG

SEQ ID NO: 44029 - protein, 321 aa, unknown
  TnpB Polypeptide
MFIKDWKKNPSKYLGMPKLPNYMKKDGHATFAIPGQTFRTLKNGLTIPKTKEKSSNIKTKVTKEKLKEVRIIPLSQKNKVKVEVIYSKEKQNLNLNKENAIGIDIGVNNLMAITSNQIDPLVCLINGRPLKSINQYFNKKSTKLKSALEKCQGRKTSRKLEKLNQKRQNKIDDYLHKASKKVIDLCKENNIGTIVIGHNKEWKQECNLGKVNNQNFIQLPFNKLIGMITYKADLISNDVKVSEESYTSKIDHLANEEMKKQETYKGKRIKRGLFLSSICKVLNADTNGSIGILRKKKAVSKEWLATVGNRGCVYQPFKISL

SEQ ID NO: 44030 - protein, 411 aa, unknown
  TnpB Polypeptide
MLLTFKIQLKLNNEQHSIIDSISNDGRLLYNHFLSKLKEHYEKNKTFISYYKQQKELKDYKSDYLTFDIKKEILRTLHNNYSIFFKLIKNNKDLNPNPPKFRGKDYFFTLSYTQDFIIKENILKISYSNYRKLEIKLDYTEQIKHLICLRSKTKESEIKQLKIYKKDDKYYASIIYEKKEDKLKDIDVNKVLSIDLGKKNLLAVYDVENNKGLVYSSKYLSKNQKFLDKRIDELKSKRDTKKKGSKKFKKINRKLKKVYSKKKTQTNLILQKVSKDLSKQNKTILIGELTNLKKNIKSDFKGLNRQMQNNWNLQTFIHLLEYKNKLKGNEVIKVNEAWTSKTCCKCGGINYDLDLSDRQYICDCGNDLNRDINSAINIYKQFMGDYSMPLDTDKIFVSERFYWCNINKMNK

SEQ ID NO: 44031 - protein, 440 aa, unknown
  TnpB Polypeptide
LKTIKLPYKTDEDLTSILKQYSNVVRYSYNRFLEGKNEKEIRLLTKELSNVDLLNSWLVQCAILDGKAMQKRFEDIKVVFGGKFNFINRLKDKISKEEFDLKRLSPLNIQGEVLKKGNRSFKLNIIENNKIIFKLNKVKHIELELPNLRNNIKKELFRLQQLNEVKYNEHGYTYSVRFDMKYVYISFEEFKNKEIKQLNENRYLGIDLNPDTIGISVLENNKVIHAQEFSLKLIFNKILSKKLSSDSVKMKYYQNKLNFETIEIAKSVSLIARQFGCKTVYIEDLKFKQKLTKEQKHNKIGNRKNRNLWKRDKFISNLAKRLNVLGIGLYEVNPAYSSFIGNMQYEYTDAVNASIEIARRGYEYRIKKSKVGFYPVFDVKHRWKEMVTSFKDWKGFYIEVVKNSRLKYRVSLDECLHEFDVFKQNSHKSMVLNYVFIDKI

SEQ ID NO: 44032 - protein, 401 aa, unknown
  TnpB Polypeptide
MIRTSKHVLSFSNKEKLNIIDQFYNDYKLMLQYYIDLILNKTLPFEKFISSKILPNYIFKHSQWKHIIYKQAIEIIKSTTEKSKNKVYKKYKYLYSKCIKNNIHQNFTSKRFSELNINYIKRIPKIQIKNVSLYIDNRLFDIKKGNIFDEFIRIKTPYFQDNKHLSVKINIPIKHYRQSNRFINENWNRKNTIILRKKDDKFFIDLIWEKKEPKKKEIIKSIGIDTGYKKLISSSSGEHYGKELFNIYYKIARKEQGSKSFKRALIERDELINVTVKEFIRNESPDQLIIEELKNVKYNSNKYINNKIMNKIQRWSYPKVYARLNLLAEEEGFFIKQVNPAYTSQTCSKCANIDKESRKGEVYLCSSCKIEIDADYNAAVNILHRGVCGPSNFKLNYIASK

SEQ ID NO: 44033 - protein, 289 aa, unknown
  TnpB Polypeptide
LIKPIQKESNSIRKGFLNIYNWLKIPYTHEIDGNIKQFTIKPINNGQFFYLYIVYEENKKEEVKINKNRYLSIDLGINNLMATFDSTGRSIIINGKPLKAYNSWFNIKKSSIQSELEIKNKKKWSKRLQNLNEDRKNFINNYFNQSVNRIVKHCIVNDIGTVIVGYNKKWKQDTKELGKKFNRKFQQIPHFILKEKLSNKCSDYGIDLVFHEESYTSKCDALAIEKLKKQDVYLGKRIKRGLFQSSVGKLINADVNGAMNIMRKVVSDSQFKGIVDNRLIVQPLMINIL

SEQ ID NO: 44034 - protein, 416 aa, unknown
  TnpB Polypeptide
MKTTYEYRIYPTKEQESLFNKTLGLCRLYYNLVVSGKNQNHAMKIEGYKPTFLKFKPEALEWIKEIDSIPLGQMWSDVRGSYTNFFASTKGVRKGKTIQPPKFKSKKNPKASFRYAIMNNTGKITKDGLFVSRRLGYIKISASCQFCNGKWKNITFKRSSSGKWYVKICVETKKDFVKTRNGKAIGIDWNCDSDSYLTMSNGTKIKCPRFLKRKEHQLAKYQQVLSNRFVKGKQEQSKRYLKVKTKVARLHEKVANQRKDWLHKVSRDLANKYEYVFVEDINMQKMASEKEHGKTVGDQGFGMLRTYLSYKTNLVKVPAPYTSKTCNVCGFVNNDVVLGIKELVCPVCNTKHDRDVNAAINILSIGVKKTLGREPSEVFKNAQVMLGMSETIKGESPCKLGNSIGLNPCVVQGSLI

SEQ ID NO: 44035 - protein, 492 aa, Bacillus sp.
MKTTIPACLVDLSAQDQFIIDTESYKYSFMIRYAYKRLQEGMAVGSLEKILSAKTNTNIRVAKDAVAEAVQLIKSRKALMIEYFELWKSRFEKTSTKLEKLLCIPDINPNSKRILGLQNKLEKQILKMDHYEQHVKHDTYDEVIFGGRENFEKRTKGLITKEQWQELRNGRFSSRGDKSKKGNPNLRVIEENGSFFLEMTTSNPFQKGKKTLYQKVRFSLYIASKKSKKTGQYNGRNYPALMRQALASGDAYAVEILKRNGKYRVHISITEQPAPLVTFPVNGYRGLDTNPDGLAICHVKKDGNPKSFEWLGEGGLQDYPSDKRENLIYELCHKLVRKCVEDGTGLIVEDLKFIQDKSISAKFRRMSHSFCYRKILSTLERLCERYGVEFIKVKPAFTSISGRLKYQQKYRISVHESAALTIGRRGMGMKERIPKKLQDILTKQQTKSWKKQNEWARWSTVRKRITNILKKRKAKFHQWFHHKQHVYQTIKK

SEQ ID NO: 44036 - protein, 375 aa, unknown
  TnpB Polypeptide
VRRSFKFRLHPNTSQECVLDGWRRQCCSLGNAALEQRIIAWKSQRKSITRFDQTAQLTELRGADPAWAAVPVEVQRSALRRVDLAFQAFFRRCRSGEVPGFPRFRSHRRYDSFALGTVKVKKDRVHIPKLGHVKMNLHRPITGTIKNAIVRRDACGKWWVTIQCDLGPAPPKVAITSSVGIDLGLEALATLSTGEKIENHRFLRRAEAELADRQRQLARAKKGSRNRERARILVAQSHAKIVNQRLDHARKEAKKIVDRFDLIAHEKLNVRGLARGMFAKSFCDASWGLLLRCLASKAEEAGKHLVPIDPRNTSKLCSRCDEIVDKTLADRTHDCPNCGLMIDRDHNAAINVLARGQRALELEQSNDEGKVSRVI

SEQ ID NO: 44037 - protein, 508 aa, Richelia sp.
MARKTTPSLITELPLKVDSKINKQLTARFQAGRQLYNACLNEALIRMELVRNSDPYKQAKKLNREKDKKQRKELFKTATEQARFSDYELQSFAVLTAKSSKWIAAQVDSNTQQKLATRAFKAVERILFGIAKQVRFKVTTRFKSVEGKSNKQGLRWLKNQVVWCGLKIKPIIDWNNPVIVHGLNLPVKYCRILWRNLNGKKRWFVQLINEGLPYQKPQNYVTQGIVGLDVNISNVAFVADNKAGLLPFADKVPTFEREIKALQRKMQRSQRMHNPDNFEPDFDKEVGNKTVRKKGKLKKGKKQWIKTRNYRRIAAKKVELERRKAAYAKSQNRRLVNDILRHGNQIKTEKVNIKGWQKRYGKAISAKSPGYFQSELKRKAENANGYFLTFSTQKTALSQTHLDGTRIKKSLSQRVHKDVTGFVMHRDLFSAFLSRCIYNDKLSLWDAQCEYPGMEPFLLDAWKQYQQSVNRVAERESRSGYSSSEQMSNEVLASNQITKKGEKLEGNA

SEQ ID NO: 44038 - protein, 442 aa, Escherichia sp.
  misc_feature (14)..(112): Xaa can be any naturally occurring amino acid
MRTTSEKKRSVIYXXXXXXXXXXXXXXXXXXXXXXXXXXXXXXXXXXXXXXXXXXXXXXXXXXXXXXXXXXXXXXXXXXXXXXXXXXXXXXXXXXXXXXXXXXXXXXXXXXXKIGYLQANARLTALKKEPEYIWLNDVSCVPLQQSLRHQQAAFANFFAGRAAYPAFKSKRHKQVAEFTASAFKHRDGELYIAKSKSPLDVRWSRELPSAPSTVTISRDSAGRYFVSCLCEFEPVSMPVTAKTVGIDVGLKDLFVTDTGFKTDNPRHTAKYAKRLTLLQRRLSRKQKGSRNRIKARLKVARLHAKIADCRMDNLHKLSRKLINENQVVCVESLKVKNMIRNPKLSKAIADAGWSELVRQLQYKGKWAGRSVVAIDQYLPSSKCCSCCGFTMQKMPLNVRKWHCPECGADHDRDINAARNIKAAGLAVLAHGEPVNPESQHAA

SEQ ID NO: 44039 - protein, 253 aa, Actinoplanes sp.
LGQVPLHSNRRSGAVPSTVTVSQDRAGRWFVSLRVVVPAVTAAATTAMVGVDAGLNRLLTLSDGTTVDNPRQEARERAALVRAQRKLARKGKGSRNREKARVKVARVHARIADRRRDALQKVTTRLVRENQVLVIEDLAVRNMLKSHTLARAISDASWGMFRTLLEYKAQEYGRTLIAVPRWYPSTRLCSVCGTQAQKMALSVREWTCTGCDTRHDRDVNAARNILAAGLAVTACGADVRPQRGTTSRTGDRR

SEQ ID NO: 44040 - protein, 330 aa, unknown
  TnpB Polypeptide
LLFGLPCGKNLERAFKDCFDKKQPLKHLPVFKRKGKGDSIRFPQGVKIDNRRIFLPTIGWIGFYKSRSISGKVKNITISKKGERWYASIQVEQIIEIGKHPSDSEIGIDAGIKCFAAFSDGTLVEGVHSFRKHEDALAREQRKLARKKKGSNNWKNQKREIAKLHHTISNVRSDFLHKLSTEISKNHATVYIEGLQIKNMSASAKGSIEEPGRMVKAKSGLNKSILDQGWYEFKRQLDYKLSWRGGMLVEVNPQHTSQRCTCCGQTAKENRQSQAVFKCLACGHEANADENAAINILTVGRTGVACVANHISGRQQEPVGTREEVLPLVC

SEQ ID NO: 44041 - protein, 420 aa, unknown
  TnpB Polypeptide
MQLCKKIKLEVSNEDAVTLEFMQSKCRGLYNWWVMRLRNGEKWNFKRCKRTLAESREHDPELDDVYGKLLAEVYYRLDTAMKAFFRRVKNGETPGFPRVRPRHCFFTLCYPAMYLEIEGNTLILPTGGRGKSKQFPNVVARLTEQAPEQYGEVAISRDARGNYYASFTYKEREEVAEHEQGQADYLAFDLGIKTLATGVNEQGRVYTVGGFKGHQWYNKQLDKIRSQRGKCKKKSRRYIHLSKVYKRVSEKKQKKRKDSLHKASHLIAHTLVERTVIVGDLSQRQMVTKQHVDRNKSLNRAVYNEWGLYTFTQMVQYKCDLYGKELVFLDERNTSKMCSGCSQLQAMPLWKRTYCCTNCGLVMDRDENSAHNILTRFLAGLPPHLQAIEDGVLQDVCLDVVDIGSTQASRVQQLSMFEHI

SEQ ID NO: 44042 - protein, 349 aa, Planktothrix sp.
MNQCAEIFNTHIDWSLANRTYNKNKAHKDLYRSLRGQFPCVPSALVQTVRDNALEAIKATKFKRTPRKKPTSGLRYDKRTITLRGKQLTLSCIGKRVSLILDVPPYFREVFEAWDFCGATVTYTKHTKQFWVRLVFETVDPVATDGKTQGIDRGLYHQAVTSDGQFFSSDKIREVQRRYLYNRRRLQQKGTRSAKRQLKAMSGREKRFMRNTNHCVSKKLANQPDVTVFVLEDLSSIRTQSRGKKVNKWLSSWPFYQQEQFLTYKSIALGKKVVHIDPSYTSQKCNICKHIKKTFRHKSKFHCKNCGHKTHADLNAARNIRDDYLLSSTEGTEEQGSVNNPDVSASFSG

SEQ ID NO: 44043 - protein, 391 aa, unknown
  TnpB Polypeptide
MLKAIKILLNPNKEQVNYINNLLGSYRFVYNKCLALKIDSYNTEQKTLSRYDLQHYFHNELTKNSEYNWLNEHNTKVLKHSLINLDNAYKKFFKENKGFPKYKSKRDNILSCTFPLEAISKRNIFLDKKITLTKQLQDIKFRTSKEYVDILNAHKSNIRSATLSKTKTGKYFLSILIDIPNTKILPKTKNIVGIDVGIKDFVVTSDGEVFKNIKIKRNNQKNLSRLHRNLSKKQKNSKNKNKSRIKLAKKYEKLNNIKENYLHNITNSLLNENQVIVMEDLNIKGMLKNHKLAKSIQELSLYRFKTILKYKANWYNRNIIEIDRYFPSSKLCNVCSHKNEDLSLKDRQWTCKSCNAHHNRDFNASLNIKNEGQRLLKIGIRSPKLTLLEIS

SEQ ID NO: 44044 - protein, 318 aa, Lactobacillus sp.
  misc_feature (191)..(191): Xaa can be any naturally occurring amino acid
MKSMAQMKCHYGLKVRIYPSDRQKKIIKINSDASRFIYNEMVAINKELMQLRRVKLPIDIVQDRIKQLTMRQNAKQMSNHYQFLEDKRIDSLTKANAIQNYRKAWNAFRKVHATGVPKFHRKSYHWRYQTNCQYPGQKNALLTNGTVCFLDNSHVKVPKIGLLRVAGSQARLLKRICETRIGTVTLTKDSXDRFFLSMQLASDTPFVNWPQNTGKQIGIDLNTENFLTTSNGDTVANPRYYRIIKGRLAKAQRILSRRARRAKQEHRPLRTSKNYQKQRLLVAKLHAQVFERRRDFLHNVSTTLIKNHDFVAAEELTE

SEQ ID NO: 44045 - protein, 543 aa, Streptomyces sp.
MGGLRELAAPFVTPGPTGVAVRARLKELAVQDAKVLALVGAHLGSLASRDLAVRCREGLEHSAETWAVRKQALTAESSSRWAGSITKATHDQWALARRGQLAHIQGLDAGVRALAHRLSLPLGETGSKRAPGGYRTRQEWHAKTRRLHLLEDRLDKARADREKGVVHVLRGGKKLARARHNLQATGLSEAAWRERWEAERWFLAAHGESGKRFGNETIRVNPDGEISIKLPAPLAQHANAPHCRYILTSRARFAYRGCEWADRVEANRAIAYRIHFDVTRGRWYLTASWQIPPTKTIPLTTALADGVIGVDTNDDHLAAWRLDTDGNPVGNPRRFFFDRSGTSQHRDAQVRHALTRLLNWAKTCGVKAIAVENLDFAAEKTREKHGRNKRFRKLISSMPTGRLRARLTSMADAIGIAVIAVDPAYTSRWGAQHWQKPLTTKNRKTTRHDAAAVAIGRRAQGHPIRRRTAPPPHDRSDRAGHRTGQARPGTPGREETRPRVPGPRTRSVPPGSGENAGDQNTQHRSGRSAEHDSWQQDSLPLSL

SEQ ID NO: 44046 - protein, 310 aa, Rhizobium sp.
MIHRAFRYKLAPTAEQEVLLRQFAGVVRLVYNLALEQRRDWWRHYRRQTGNRLNYIAQARELTALRAEFDWIAAVHVTPQQQALRDLDKAYANFFAGRAGYPAPRKKGVNGAFRFQGREIEVKRLNGKWSAARLPKIGWVKFRDTRRLRGKTMNVTVSLAANGWHIVFACEIDHAVPQNDLPAVGIDRGVANTLTLSTGEHWWMPAGLAEIEPRKRRAQRVLARRKRGSRRHAKARRRVAALQARAARIRQDWRHKASLDIARRFATVVLRPRHAQHDAQRQGNRGRARNQRLPEGGPEPGDPRTRLARL

SEQ ID NO: 44047 - protein, 336 aa, unknown
  TnpB Polypeptide
MIQKAGNALEMLFIKKLLPIAKKSRKYGWLADYDSIALQESVRNLHTAFSRFFKKEGGFPHFKSRRAEQSSYHCTGISVGDDFVKVPKIEPIKAVIHRKIDGKVKSITLSMDTCGDYLASILYDDDQTEVALETTVRESKMLGLDVGIETFCTCSNGKTIKSPKPLKRAMKKLKKAQRALSRKKMGGKNREKARKRLAKLHRRVARVRADFQHKTSRRLVDENQALIFETLRIKNMMKNHHLAGAIADVGWGEFMRQCEYKAKHEGRIFAKIGTFYPSSKTCSACGHKLKELSPATRSWTCPHCGAQHDRDLNASLNIKQEGIRMLKAAGLTVLRS

SEQ ID NO: 44048 - protein, 371 aa, unknown
  TnpB Polypeptide
VANYYVRQEFFYLGNWLRYYDLWYMLKDKEAYKKLPSQTAQQILRLVDKNWKSFFNSLKNWRVQPSKYQGRPRPPKYKKRNGEFVLLFTNQQCRIKENYLYFPEKVAISPIKTRIESQLHQVRLVPKGLYYVVEIIYEEDVKNLKLDKKRILGIDLGLANIVTMVNNAGLQPAIIKGGIAKSTNQFYNKQLARYKSVKDKRGLAFETRRIQKLTKKRNNKIKDQFHKISRRIINYCVDNNLGTIIIGYNSSWKQKVNMGCINNQKFVQLPYYKLISQIQYKSILVGIYVILEKESYTSKCSFLDNESIQKHKAYAGKRINRGLYRSSKGIVINADVNAGYNIIKKVVPNAVLVDGIEGIGLYPYSIAISQL

SEQ ID NO: 44049 - protein, 259 aa, Xylella sp.
LGTVKNVTVSQSCGKWYVSIQTSHEVPEPIHPSSSMVGMDAGVAQLATLSDGTIYLPVNSFKSSQKKLARLQRQSSRKVKFSHNWQKQRRKIQQLHSRIANIRKDYLHKVTTAISKNHAMIVIEDLKVSRMSRSARGTVSQPGRNVLAKSGMNRSILDQGWHEMRRQLEYKQHWRGGHVIAIRPAYTSQRCACCGHTVKENRRSQSEFECLGCGYTAHADMNAARNILAAGHAVLACGGRVQSGLPLKQEPTEAAPAPA

SEQ ID NO: 44050 - protein, 402 aa, Scytonema sp.
VLYNIAKEVIDLAVQTITVRNKLILQNSQQHDAINKTLKQFAFACNQMLAVAKAENCWNPAKLQKLTYYDIRAITQLKANHVCNAVRRVVNAKSSTGKVKEFRATSIALDVRTFIYKDGSVGITLVDKRHWFEWKLSYEQKKLLEGKHNRFATLSRTRSGQYFLNVAVEVDCDKRYVSKNKAIGVDLGRRAIAAISTGESWDGEQLNKTRDRYAKVRANVQSRRSRSGRRLLRRLSGRERRFQQWVNHNISKSIVGIAKKDSAIISMENLTNIRQSLNAKPRNRQERRRSNNWAFYQLRLFIQYKANIAGIPVVFVPPAYTSQVCSHCLRIHPDPAKSFRNEKRFVCGYCGADCDADYNAARNIAAYGVTINSPEAPKLSCGLVPQFVLGAKPHQEPSGRVG

SEQ ID NO: 44051 - protein, 369 aa, Actinocorallia sp.
MGRQVKRAFRYRFHPTEAQAAELSRTFGCVRLVYNRMLAERTRAYAGEGRRVSYAESSALLTRWKRTEELAFLGEVSSVPLQQALRHLQGAFVNFWNKRARHPAFKSKKKSRASAEYTRSAFKYRDGRLTLAKMKEPLNVVWSRPLPEGAEPTTVTVSRDAAGRWFVSLLCEDRIPHLDPVESSVGIDAGLTALVTLSTGEKVADPKHERRDRRRLTRAQREHSRKAKGGRNREKARLRLARVHARVTDRRRDFLHKLTTRLVRENQTVVIEDLAVRNMIKNRTLARAVSDAAWRELRSMLEYKADWYGRTLIVVNRWFPSSKPCSTCGHRAAAMPLHVRDWVCGSCGIVHDRDVNAAKNILAAGLAES

SEQ ID NO: 44052 - protein, 374 aa, unknown
  TnpB Polypeptide
VKLTAKVKLLTTPEQHASLMATLERANEACNYMSQVAWDTKTFRQFSLHGLVYYHAKDTFSLSSQMVIRCEAKVADAYKLDKKALRTFKPHGAIAYDARILKWKLDKFSVSIWTLSGRQEMLFSTGERQLELLKFQQGESDLVYVRGSFYLLATCSIPEPTPEDVEGYLGVDAGIVNLATDSLGNTHAGAHVNKVRRKRRRLRKSLQKCGSRSAKRKLKKLSGREARFAKDVNHCIGKNLVATSQCNRLGLAFEDLKHIHKRVQVRRGQQDDLHSWAFHQLQNFAAYKAQRVGVPTVWVDPRNTSRTCSRCGHCDKANRQTQAVFLCRSCGYAADADHNAAVNIAARAAINRPIVERVVSKSAPATSHLQAAPI

SEQ ID NO: 44053 - protein, 390 aa, unknown
  TnpB Polypeptide
MVLQGTKYRFYPNAGQVEMLAKEFGCCRFVYNRALAMRIDAYRNDEPIGFAATGKALTSWKRDDETAWLSEVSSVPLQQALRHLEKAYSGFFKGISKFPTFKKKTNSQSARYMPNAYTLGDDIQHPTVKLAKMNTPLNIRWSRPLPGKVVSLTVSKDAAGRYFVSFQCERHIEPLPQKTNAVGLDLGLIHLLITSDGDKFGNPRFFHKLEAKLAKAQRLLSRKVKGSQNWRKQRVEVARIHARIHARISDARRDFLHKLTTGLVLRYGVICTETLRVKNMLKNRSLSKAISDAGWSELVRQLEYKSEWYGRTMVKIDQWTPSSKLCSVCGHLMASMPLNVRTWDCPECGGKHDRDVNASVNIRTAGLVALNARGADVRPEMAIAITGNLR

SEQ ID NO: 44054 - protein, 422 aa, Streptomyces sp.
MQLRYNYRAYPDAAQCRALAKAFGCARVVWNDCLRDRKEAHAAGLPYVMSAELSRLRITQAKRTQERTWLADVSAVVLQQSLRDLDTAYKNFFDSLRGKRKGRRVGPPRFKSKKDTRQSIRLTTNAFSLRNDGTVYVAKVGNLKVRWSRRLPAAPTSLTVTRDGSGRYFLSFVVDSEPGILPEAEADTGVDLGLSAFAVLSDGRRIDSPRFLRRAEKKLRRLGRELSRKAKGSRNRAKARLKVARQHARVADRRRDWHHKASTQIIRDNQAVFVEDLAVSGLGRTRLAKSVHDAGWSAFVGMLEYKAVKHGRTFAKVDRAFPSSQICSACGFRDGPKPLNIRQWACGACGTVHDRDHNAARNVLFEGRRIVAAGRAETLNAGGAPVRRAHVPAQRGEAGSPRKGQPTRAGIPGLQAREHVNR

SEQ ID NO: 44055 - protein, 381 aa, unknown
  TnpB Polypeptide
MFASFCINVAIGGDIMVLSAKIRIYPTKSQEKILKYYCDCSRFMWNYMVEKFSNTDIIFGKYGPSSYSAKDLINDTLCNVPQRIALDVIKRYSCAIVEYRRGIKGKPKFHRRNRIKQSFRCASSKMYIKDGTVAVPSKNRGDPNKRDRILLNSEQVKKYNIGFIKNPIFKNIRNKWFLIGEYDYAQDAPYPKNWVGIDWGVKNFITTSDGNVYNYPKRSRTEYERIQRLVKILSTKKVGSKNFDKLSKKIAIAYERHNNIKKDFIEKVGTEIAKSNNVSVENLYGISVKGGRKFIRQNAIISPRYDFFRRLKMKCEKYNSTYVEIDPSNTSRTCSSCGKINESLSLHDRTFVCSCGLVLDRDINAAINIATKGYLLYSSKP

SEQ ID NO: 44056 - protein, 340 aa, unknown
  TnpB Polypeptide
MSEDIYKAYRYRFYPNREVQSIFNQWFGCCRKVFNVILDESVKQYEAGNKEFVNRKSMFSMITKLKADGEHDYLKQVPIHTLQASVDNLLTSYDRFFAKLSGFPKFKSKHESKQSFTVRCSPSIIRNCRFDNNRVWIPNLKKLIKFKQHRKIEGVVKSYTITRESTGKWYISFLCQTVAPQKIERDGVVGLDFGVIDFFTDSNGNKVRARKFLRSMESKLKKMQRALSKKVKGSNNYKKLKQKIARLYDYISNCRKDANQKLSSLLVNENQVISIEDLAISKMSRNHKLAKSLLDEGWYQFTSMLDYKMKWYGGSIIKIDRFFPSSKTCSAVDTKPPKCL

SEQ ID NO: 44057 - protein, 423 aa, unknown
  TnpB Polypeptide
MRRAQKVYKPKKKATEMTLVEQVHIKVSSPLFAECDRVCFLSKNLYNATLYAVNRYYEETGKHLSYKEVNRQFTHENQPDYRALPAKVSKHTQMLVEQAFQTYFALLKKKLKGAYEAKVNRPNYLKKKSGRQVVHYERGAISFEREGFIVLSGTSLSIPTVHGKEDIQFARVVPHGTHYVVEIGYKVALPKLSSSERVLAIDMGVNNLAACTTTEGEKFIISGRPLKSINQMWNKQMAQHRSRLEKNHGRKSSKLLRHRARKRNARVKDYIHKATKAIVRHAIFVGIGTIVLGYNAGWKQGTTLGKRNNQNFVQIPFNLFRETLAYKCALAGIRFVTTKESYTSKNSFVDGEYPRKREKYAGRRVKRGLFKTKEGLKINADINASFNIMRKFMEKEGTWNTCLQENLVGACSAPSVLRLDFSA

SEQ ID NO: 44058 - protein, 379 aa, Anaerolineae sp.
MVRTYRYRLYPAKQQQETLREILWLACWLYNHALAFRRLRWEASRKSVRYVEQAAMWRDWRNEEAQDNPLRLLNMSAGQQVLRRLDSAYRQFLKGERGIPKFRKASHFNSVNYKPGDGAQVRGKRLYVQNVGLIRIRWHRQLPDGKLKNIVVLRKPSGWYALLQIDVAEQQAEKSANPPVGVDMGISHALALSDGMIFDSPRHLHASLRRLRVLERTKSRKKRGGANRRKVVRQIARLHECIANQRRDWWHKVTRQMVDAYGAIVVEDLNLQFMLQNGHLSRTAHDIGLGMFRELLDYKAIEAGVEVVRVNPHNTSQMCSGCGEVVPKDLRVRVHVCPCCGLTLDRDVNAACNVLALGRRAWAPTWPVAASVAQEAPPL

SEQ ID NO: 44059 - protein, 413 aa, unknown
  TnpB Polypeptide
VLKAYKYRIYPTENQRQQIEQTFGCCRLVYNTALELKMYVWKAFGVSLSAYDLMKQLADAKQDYDYLRHVDSQSLNAVILQMDTAYKGFFAGGGYPKFRKKQGHASFSAPCNKREVDFEVSTLTIPKLPDIKCVFSSRFEGKIKTVTISRTPTRKYFASILVDDGLKVPKKQPISASKTLGIDLGLKDFLITSDGEKVANPRFYREAQTRLKVLQRRVSRKKKASANCKKALFRLAIHHEKTTNKRKDFLQKLSTKFVSENQATSFCVEDLGVKNMSKRAKKKLNESGVAQPNGQAAKSGLNKSIRDAGWSEFVRMLAYKCEWAGKNLIKIGRFEPSSKTCNACKTVNETLTLKDREWTCEACGTTHDRDINAAKNIRDIGIKNSRRGTSGGPVELRTKVRAKKQEYKKSALI

SEQ ID NO: 44060 - protein, 416 aa, unknown
  TnpB Polypeptide
MDYERGESQEYANFIRHMCYAASKLWNVCNYERQHYKEMGMEKYPDWYYQKKAHKEDLWYKQLPSQTAQEVCKLLDKSWKSFYALKRSGGIENPRPPRFKWESIPVTYMQMGIVHERNTDRIRLSLPKVLKRYMEETYQIHENFLYLENKIFRDMDQIKQLRIYPPEKGVCKVIVVYEISDQEELPQNGHYLSVDLGLHNLMTCYDSGNGKAFILGRKYLSLERYFHKEIARVQSQRYGQQSGKGLKHPVTSKHIRRLYKKKQDSVTDYLHKTTKYLVEYCREQGITCVIAGDIRNIRRENDLGHRTNQKFHSLPYNRVYMMLEYKLKRYGIRFVRQEESYTSQCSPLSLEVAKRYAEPSNRKQRGLYRDGSGAYNADAVGAYNILRKYLSVTGEKKELSVIGLKIPEIIKVAVWL

SEQ ID NO: 44061 - protein, 303 aa, unknown
  TnpB Polypeptide
MEQVLTIVCKIKPTSEQAQKLEMTLRAFSDACNYINATVNPQIKNKNRIQAEVYKNVREQFGLSANLAVRACTRVASNRKTAALKKRPVKAFKPTSADYDARIFSYRQKDQTVSLSTVEGRKRMSLILGNYQIGKLVGKTPTSATLSKHRDGQLYIHIQVKDEAPQPQHSEDIIGVDLGRTDIAVTSLGQSWSGENINSVRDRFSRVRASVQRKGTKGAKRLLKRLSGREKRYQTAPSASAMARAKAQRDTITLRLRYSTVSFQLHPNCGIAPSPLIPSLSLRLCVTDMGEPQHQQKYHFSRY

SEQ ID NO: 44062 - protein, 441 aa, Herbidospora sp.
MARHFDTPFLSVTFGKLPVMSRYRLAPTPVQEAALAEHCRHARYVWNLAVEQYSHWKPGRKSPPGFAEQCRQLTEARAEYAWLRAGSIVVQQQAIKDFAQAVTNFFGRTHKRPTWRRRGRHEGFRIVAVKADDLRRLSRHVGEVRVPKVGWVRFRWSRAVPENVKSFRITCDAVGRWFVAFAAVPEPISAPGSGEAVGVDRGVAVSVALSNGEMTNAPVFREAEKFRLLRLLRMLARAKHGSNRRGKVKKAVAKLKAREKDRRRDWVEKTSTDLARRYDMIAVEDLHVSAMTRSARGSIEAPGRNVRQKAGLNRGILASGWGYLLDRLEHKAPGRVVRVSPAFTSQTCNACKHVARESRESQALFRCVACGLECNADVNAARNIRDIAAGHAVNARGGDRVTGPVKREPQLVLLSARDEVESLPSGRGGCQVQLSTRLRHA

SEQ ID NO: 44063 - protein, 446 aa, unknown
  TnpB Polypeptide
MGDENQNENIVFAGADVLVSGSATRYDGFVLLRYNYRLDPWPRHRNALGRAFGCARVVFNDGLAARQEAHEAGQPYVTDAELSARLTAAKQTPERAWLSDVSAVVLQQSLADLNTSYRRFFGYRKALEEWRSQGRKSPKPRRVGPPRFKSRKDRHQSIRFTANARFKVLPNGRLRLPKIGDVPVRWSRPLPCEPSSVTVVRDAAGRYFVSFVIETDPAADAKRFSGADGEVGIDLGLTAFAVLSDGTKISAPRYLRRAQKKLRRAQRAHSRTQKGSKNREKLRVRLARLHARVANQRADFHHKVSTMIVRDNQAVYVEDLCVAGLGRTWLAKSVHDAGWSAFVNILQYKAARYGRGFGKVGRFEPTSQVCSACGVKDGPKHLAIRKWTCAACGTVHDRDLNAARNVLALGRRESLNACRGGLRPGTVLATAGETGSLRGAARRGTG

SEQ ID NO: 44064 - protein, 430 aa, unknown
  TnpB Polypeptide
VTAARQAYKFALNPTPVQEHALRSHAGAARFAWNWGLRKVKERYAAEREWYGAAELHKLWNAAKKADPALAWWAENSKCVYQEAFRNLDRALGDFVKSKKGQRKGKRLGFPKYKKKGKARDSFRLTGRLRCSGDSVTLPRLGTVRTHEPVGKLAAKLGDGTARILSATVSRTAQRWYVSFTVEVDRDAPGTHPRPGSAAGLDLGVKALLTGIDNQGRLIEVKGPRPLRAALRRLRRASRAHSRRQPGSTRRRKAAGRLARIHARVSSVRADALHKATTRLAARYETLVAEDLNVTGMISNKRLARAVADQGFATARRMLAYKTKRASGTLLVADRWYPSSKTCSRCGSVKAKLTLSDRVYACDVCGHAEDRDVNAARNLLSLAASGAESLNARRAAVRPGTAGHAVLKREPGTPHGDKTGTATPQGTATA

SEQ ID NO: 44065 - protein, 270 aa, Sutterellaceae sp.
GEQSSYHCTGVSAGDDFVKVPKMKKIKAVMHRKIEGKVKSITLSMDACGDYWASVLYEDGLTEAVPATCVRQTKTVGVDVGIETFGTCSDGEKIKSPKALKSAEKKLKKAQRAFSRKQKGSKNREKARKRLARLHRKVKRRRSDFLHKTSRRLVNDNQALIFETLKIQGMMKNHHLAKAIADAGWAEFMRQCEYKAKHEGRIFAKIGTFFPSSKTCSSCGHKLKELSLATRSWTCPHCGAHHDRDINASLNIKQEGIRMLKAAGLTVLRS

SEQ ID NO: 44066 - protein, 414 aa, Anaerobiospirillum sp.
MRTERIYVRPNNENYPAISKACCLAKSLYNAANFIIRQAFINENKLILSTEVDKEFKNASHKCYCNMPSAASAQRTIQILGKDWKSFFAANKAYKNSPSKFTGRPKLPKYAKHQKTFVVGRNGFKIQDGYVYITGADKLGLKPFKIICCQQQAFNEKADKAIVQDIRFVPLGNCYFIDVVYKNEDVAKDVALNKKNIMGIDLGIDNLATIVINQPGSCPVLINGKTIKTINNSYNKERARLSSIGKLDLIPARSAKRYNWINDYFHKVSRYIVELCIKTGTGTIVIGHNNGWKQSCNLGKVNNQKFVFIPHNSLIEKIKYKAQEYGINVVVVEESYTSKASSIDLDPIPTYGQVKNPVFSGKRVKRGLYKAKNGALLNADVNGSINIIRKAFGDDPVKGILKCGSIYQPKRITL

SEQ ID NO: 44067 - protein, 379 aa, Lactobacillus sp.
MIKKTYKLRIYPNANQRAQIERNFGSCRFVWNELLNMQIKRHDNGGKYVNEYGMNYLFKPLKAEYPWLKEADATSLLAVSHNLHLAFQKLFKEHAGYPKFKSRRYARHAYRSNAVNGNITILDEHHIRLPKLGAVSLRATKLPTGKIKTATVVRSHTGKYYAFVVAEVELAQWAKTGNSVGIDVGVVDLVITSNGKKYRTKRFDKTLAKKKHYWERRLARRRRLAEKEIAWDKHLKVAAPRQLSDFKNYVKAKMMVAKYSEKVANQRRDYLQKISTELIALYDVIKLEDLKTKGLLRNHNLARAIANQSWRELRLMLEYKAAWYGKEVTAVSPYKTSQRCSECGYDDGKHELNVREWTCPQCHTHHDRDINAAKNILAA

SEQ ID NO: 44068 - protein, 395 aa, unknown
  TnpB Polypeptide
MSLLEDFRLAVNKAIRAGLYAHVSSRNGLTMLLYRTFREEHPGMYSQHLASSFEVAAGILKNHRKRLRKERRCETPFVKRLVMKAENQAYKLDRVEGVIDLPIRAGCHVKLRLVVSRYHHLYLDDNSLSLGSLTVLPDKVIIAFRKKALKPLAACSVLSLDTNERSLDGIFVEGGKRGDGRCVQVEAVFPEVAKIQQRHHERRRRLQRKKAHDRRSTRVLCRREGAREHRRVDYRLHHVASAVIEFAEGHESAIVLEDLRGIRPNKNKDLNRRLSLWPRRKLHQIIEYKAAWKGIQVIKVDPRYSSRRCPICGRIPDSRMGAKTEFACECGWHLDRHINASMNLLQTAISKGLEVAGGLRFSPGAFQHDVMMTLCEPAMAVRSEPNGTSQMTGVT

SEQ ID NO: 44069 - protein, 486 aa, Mycolicibacterium sp.
VARFEIPHGWTAQAYRFALDPTPTQLGALASHAGAVRFAHNHMLALVKAVMDQRAAERSYGIAESELTPVLGWSLPALRKVWNQRKAWCAPWWAENSKEAYNTGLDGLARGLDAWSSSRQGRRAGKPVGFPRFKTSRAPRSVRFTTGAIRIEDDRRHVRLPRLGAVRTHESTRKLARRIEAGTARILSATVRQDSAGRWYCALQVIVAAKARPAHARRSAYPVVGVDVGVKADSLLVVATPDGIEVDRVAAPKSLTAAQGRLRALQRRAARQRGPYDSGTKTKQVASKRWRRTQARIGRTHAHAAAVRHDVLHKATTALAQQHQVVVVETLNAAGMRTQGGAYKRGLNRALADAALAEIRRMLGYKTRWYGSSLVEADRCFPSSKTCTACGRRKPNLTLADRVFECDECGMRIDRDLGAAINLARLGAPPQLGEQSPAGSGPVAGRGATRETEPAPAGDAAGQETSTPHHQPVDQTGTASPQGEAA

SEQ ID NO: 44070 - protein, 286 aa, Okeania sp.
MKSIRTKLKLNNKQKTLMAQHAGYSRWCYNWGLSLWNAAYIDGYEPNTRKLREVFTNHTKPLYPWMKDLSSKVYQYAFINLGEAFKRFFQGLGKYPRFKKKGKSDSFPTECYANTIDNCGKPIELNGWSHKLPFIGIVKTYEPIEATVKKITISRQAGDWYISFSFEFHPHTIPKKTDVIGVDLGVKTLATLSDGKVFPSIKPYGKAEKKLTKLQRQVSRKVKYSNNWYKAVIKLAKQHRRVANIRKDALHKLTTYLTKNHGCVVIEDLNVSGMLANHKLAKSISR

SEQ ID NO: 44071 - protein, 374 aa, Nocardiopsis sp.
MLSMSQTVRRAYKYRFYPTPEQAELLNRTFGCVRLVWNKALAERTRRYKDHGARTSYVDTARWLTEWKRTGELDFLTEVSNVPLQQTLRAQQVAFNSFFAKRTGYPKFKSKKNTRRSATFANNAFAFTGGELKLAKTREPLAIVWHRPLPEGADPSSVTVSCDGSDRWFVSILVQDTIAAVPLTGVAVGVDAGLAHLMTLSTGEKITNPRYERRDRAKLARTQRELSRKQKGSANRDKARKKVAKVHARIADRRRDHLHKVTTRLVRENQAIAIEDLTVRNMLKNHSLARAISDVAWTELRSMLEYKTAWYGRELLLVDRWFPSSRLCSTPGCTHQAPSLPLNVREWTCPDCGTVHDRDVNAATNILAAGLAES

SEQ ID NO: 44072 - protein, 333 aa, Nocardiopsis sp.
VPKNADLSRELIVQAKRTPQRQWLSEVSAVPLQQALRDLDQAWRAHQDSRAGKRQGAKVGAPRFKSRRDRTQSARFTANARWKITDQGKLSLPKIGEVKVKWSRSLPSSPSSVTVVKDAADRYFASFVVQTDDAPLPATENEVGIDLGLSHFAVLSDGTKVDNPRFLRRAERKLRKAQRALSRKSKGSNNRAKARLGVARAHARVADCRREFHHQLSTTIVRENQAVYVEDLCVKGLGRTKLAKSVHDAGWSAFVHMLEYKAARYGRAFARVDRFLASSQTCHVCWVVDGPKPLHVRQWACRACQTIHDRDVNASRIVLAAGRKLAPGREAES

SEQ ID NO: 44073 - protein, 430 aa, Nocardiopsis sp.
LGKGVGVEIQRGIKHRLYPTPEQVQVLDGQAHAARALWNLLHEWWTMASENRRVSLKDADAVIKQARKDIDFLSALPAQAAQQVLKQYHRSWVNRWEGRAETPRFKSRIRAKMGVDVPQGRDLNITALSRRWSTLKIPKVGTVRFRAHRTIPGTVTGARLVREANGWHIVLRTHWDQPDPVPHPGPTVGIDRGIAVALALSDGTHHTHARWERLKETERLRRLERKAARQRRARKPGERTSNRLTATYDKIASLRARFARRRSHWQHQTTRAIADAYSLIGLEDLNVAGMTRSARGTVDKPGRNVAQKAGLNRSIQGEAWHQLHAQLVYKTTERGGRVVVVPAPHTSQRCHRCGFSDVRNRKSQASFVCQNPICGWVGNADTNAAHNIDHAARQAALREPAQGRGVAGRGGRQRPAKRQPKRKGDPHGKP

SEQ ID NO: 44074 - protein, 546 aa, Nocardiopsis sp.
MAHAKEQGVRPIAAPYLIPGPTGVAVRTRLKHLTPGDEQVLRRVGAHLGSLAARDLKARCGDGVNHDGRTWAARKRALTPVSSARWAGSITRATHEQWALARRGQVAHLRSLEAGVRTITYRLSLPVGSKGTKRVPGGYRSAKEWHAKSRRLRVLQDRLAAVRADCEAGRVRVVRGGKRLARSRHHLNAAQLSEAQWRQRWEAGRWFLQADGESGKRFGNETIRIGPDGQVSIKLPAPLVEYANAAYGRYVLSGRVAFSHRGQEWADRVQADRAVAYRIHYDVGRGRWYLTASWQIPATQTAPLGAALAQGVIGVDTNADHLAAWQLDVHGNPTGSPRRFDYDLSGSATHRDAQVRHALTRLLHWARESGVKAIAIEDLDFSDSTTREKHGRKKRFRRVISGMPTAKLRARLVSMAQATGTAIVAVDAAYTSRWGAQHWQKPTTSKRKTSRHAAAAVAIGRRAQGYPIRRRTAPPRTHRSDGCGPRTVQADRGAPGREGTRHPAPERAHDARARAEGKRTRGTSASNTVRDARSTGRAPEATPAHY

SEQ ID NO: 44075 - protein, 398 aa, Kribbella sp.
MSRFRMYPTQTQQAALLGHCGHARYVWNLALEQWSMWTRDNGASPGYVKQAKQLTEARAVFGWLRAGSQTVQQQALRDFDQAVRNFYAGTHRRPRWRKAGLHEGFRIVGSQASRVLKLNRKWAAVNVPKVGWVRLRLSRAVPVAKSYRVTRDRVGRWHLAFAVVPEPIPAPGTGEVVGVDRGVTVSAALSTGELLTCPGLSDREQERLKHLQRRLARCRRGSNRRRRVKAAIAKLYARSGDRRKDWVEKTSTDLARRFDVIRVEDLRIAQMTRRPKPKPDPEQPGRYLPNRRRAKAGLNRGILANAWGDLVTRLEHKAAGRVEKVKAAYTSQTCSVCGHCTPDNRENQAVFRCVACGHRANADVNAAVNIAAGRAVSARRETPVRVSLKREPQLATST

SEQ ID NO: 44076 - protein, 209 aa, Kurthia sp.
PEFEPLPKTNQSVGIDLGITDFAILSDGRKVDNQRFTAKMEQQLKREQRKLSRRYEQAKKKGRDLRDCMNYQKQRRKVARLRERVAFQREDFLNKLSTELIHQYDVICLEDLNTKGMLKNRKLAKAISDVSWSSFVQKLTYKAKWYGREIVKISRFYPSSQLCHACGHRDGKKSLDIRIWTCPSCSAVLDRDVNASQNILAEGLSMLHQ

SEQ ID NO: 44077 - protein, 459 aa, unknown
  TnpB Polypeptide
MYTVCQKRLKNTSSWSYRYCEERATFAWHLYNAALFRIRQIFTGWDKSVRSENERKVFSEVAALETAYPNIHVRKVISYAHLEKLMRVTENPDFFAGLPMQTAQAVIKQAVQDFKNWLAAIRVYKKDPSSFTGKPGMPRYKKAPCTFTLTNQDAVLYGQELKLPGTKNRLAVDRLPEDCVLKEVKIVPFYGQYTVYMTVEYTGTPSVVDGGNFASIDFGTDNFAAIVATDGSSAIYKGGAVLSENQSFAKKRAKAVGIITKGHERMSAKSRYLDHLSAHHENFVKDQLHKISRSIIAFCQKHDVSVLVLGQNKLWKQHTAMQSANNQKFVQMPIARLVQMIEYKAVMAGIVTIHQEESYTSKASFVDSDHIPTYGTGDQSASFSGRRIKRGLYRCKNGMLLNADLNGAANILRKAFPSAWERRACMSVFSDFSFLKNPEVFGFHELNPKSIPVKRIMGA

SEQ ID NO: 44078 - protein, 369 aa, unknown
  TnpB Polypeptide
VKRVEKAYKYRIYPNKRQKEIIAKIFGCCRFVYNKYLAKRIELYEKEKESFSYVECANDMKNLKSELEWLKEVDSTALQSSLRDLDSAYQKFFKRHTGYPKFKSKKTHRFSYKSKCVNGNIQYYGKHIKLPKLEMVKTKNKLVPDGRILNATVSQEPSGKYYVSLCCTDVEIKPFEKTGNSIGLDLGIKEFCITSDGEMISNPKYLKKSLDKLVKLQRELSRKSKGGSNRNKARIKVARLHEKISNQRKDFLQKLSTELIRQNDVVCIEDLQIKNMIKNHKLARSISDVSWSEFVRQLQYKASWYGRDIVKVDKFFASSQTCSICGYVNKETKNLGIREWDCPQCRTHHDRDINAAMNILNEGLRILAA

SEQ ID NO: 44079 - protein, 471 aa, Asanoa sp.
VEVTRIACSARLNPGKFEALLEQARRLGRVRSLAWQLFGSINAAPCTGQDLRNLWMRDGTCQTFGVAANAWKETLRDALDDIAASRESAKAAVRRAVAKRPVVDQERCYRLLKANRWTEDRWLSRQMRQQWKRGKNHTHNQIIIRADKVSTFVLVEGGDVWLKVPGIEPRRPVAVPLNTKIAPQGTLRLILRHGRVEVHHQVDADTMRTSHRPCGTRTVGVDKGYTEVLTDSDGDHHGERLGMLLTSESDRITDRNRRRARLRSIANTASEAGRLAKAARVRVNNLGTMKRDRQAARYRAQVRTEIFTAVHRVVDKAEIVVAEDLTKTFSGRRSFGKKTNRRLAAWTKGVTAEALTNVSERRGSALVLVNAAYTSQVCPRCGGFGSRAGEQLYCTSCGVMWQADHAAAINVLRRHGDPDITLRTPHQRVKEILRERADRQRIRLPIQDSSRLGDGGERSIRLRPHLDRCVQ

SEQ ID NO: 44080 - protein, 532 aa, Chlamydiae sp.
MTQDVVRTYQTRLSLDPIAQEAFQACAELFARIAHCLLADISKGKKPSKLKSSYLVKYGITARQFNAIRVEVEGKIASIKELQKMQISDLKEQIKALETKISKLQKKPLLSFLVHQKKRRLHKLQQQLRQRLKDHKQGKISLCFGSKKLFHAQFNLGANNYKNLEEWLESWRHARASEIFFLGSKDETSGNQTCTATLEEDNRLTLRIRLPHALHDKFGKYLTIPHIAFSYGHQEILTSLEDCKQRHLLAQAKDPSYTNHGQALTYRFKHDKKGWRLFVSTSLPIPKWKTNKNSGVIGVDINTDHLAIVETDRFGNPLCKKTIPLNLYGKTKEQSLALIGDACAQVVSYAEQTLKPLILEDLNFQKKKQSLRETCSPSQSRKLSSFSYQAILTHLKSRAFSKQIEVKQVNPAFTSLIGRVKFAVRYGLSIHHAAALCIGRRFLNLSEKVPRHLDKIPDGKDSHVALSLPARNRNKHVWNLWRDLSKKVSAALAAHFRAKRSSSTLKAAPVTETIPDLVGGTPTCESLAALLG

SEQ ID NO: 44081 - protein, 394 aa, Thermofilum sp.
MINMENYRRRQLFFEEGRIDKSWRSAWERRRGEYADIYRLLGSRNFHEVCRVISEQWRSFAELLKAMKKGRLEPWQIVHPPGYRKQDGQRLPIIFVRFDDYKVDPERRVLRLKYWNVELRFTGKLRWHARPGAKQGRLVIVYDPVRRKWYAKVGVEVLLQRSSTPGLKAGVDLGREILAAVAIEDGMALLYRAAAVKSDYYYFERRISEVDRTLSDPRSEEMDRAVLWERRRWLYNRRRRDHIFANVAAHLAKTLRARGVGVVFVGYPRGIAQERAGKGNSNMWGYWKLIMRLAVTLENHGIAAFAVSEDGTSSTCARHGCKVARRPRGLVWCPHGHVAHADLNAALNILARGLSALGLTAEPPARVKVLSFLPTPSRVIEPRKKNHNPALKAG

SEQ ID NO: 44082 - protein, 414 aa, unknown
  TnpB Polypeptide
MQLVEQHIIGKRDLRFQGIDEMAFASKNLWNLANYSVRQSFIFEHIYLNNTAVYHLVKSSDAYQALPRKVSNQVLIQLDQAWTAFFEAVEAYREHPEQFTGRPKLPKYKHKTEGRNLLVFELGAIWKTHLAHREIAVSQLGWLVETKQNPKLIQQVRIVPKADHYVVEVIYQAEVKPAQVDPNLFVALDLGVSVLAALTSNKPGFSPRLVPGGPLKATNHLYNKQREHEQKQLAKGKGQRLTSHRLDRITTKRNRRIMHYLHTVSRRIIDLLVEEGIGTLVIGKNPFWKQGVELGRKHNQEFVQIPHAKFIELLTYKAELVGITVLLTEESYTSRASFLDRDVLPRYDPTQGPEQEDKPRFSGRRDGRWYRVKGRAPIHSDVNGSYNIGRKVFPTAFDGRGIEATAVRPRRLAV

SEQ ID NO: 44083 - protein, 317 aa, unknown
  TnpB Polypeptide
MFFGNNFQKKDLKKDITDVPESWLSARMRQCCAGEALGMVQGAVRIAAAKGIVPVKPVHTGRKMILSSQTVRIEKGRNSFDIWLVISSVGNKIKLQIPLKKHRHINLFSEWKKSGSVVIHRKYVMFSYEKETGGKKTEGKLIGIDCGINHLLATSEGGLYGSEVKPLINVIKRKKQASDAYKRAKKTLSYYLHKTVKELNFGEIRLAVTEKLKNLKQGKKKNRSKDFRKTPGNWKYRELLRIIEMRCEENRVSFRSVNPYKTSQTCPACSHAERGNRVGENFKCLKCGYSGQSDIVGSLNILTRFTTGQYGAGFKIG

SEQ ID NO: 44084 - protein, 508 aa, Ruminiclostridium sp.
MEECILGLRTIHLKLHNPSTVKRDIINAAFINYNNAFNYLLKNAYENIASIERDYQSPRGTYSSLTLSKWIDRGLSDDINKFDIQPFKDSLKLDIGMVLASYFVQKKTNPNMPFPSFKADDAAGQLKFRPIYFCRYDVKRCFCFLYDAANNKYFAKIFLMNSKNAKVRFNNTFNRELQYISKKQPEVKGLKKETFIIVPLSFGKWQEGMLRQAVDKPEILRTSRLIMKGNEYFISLSIDLPEDEKIKPATYLGISRGIKNALNYTVADMDGEIIDSGAIGLEELSLSKDLKTNNCILANKIAEIAINNKSVVVLQNLVEKGDKLSWNEDGINYKPIFGCKRYNDLVRILEYKIPQRGLPAPVKVSSVDIFSRCRLCGSNTKKNRFSKNMFICTTCGASYDIDGLGSSNLAVKLIKYQRTPLKIKARKTEKGMLLQNELIGLNLIVPFNENPFDKLMAEVKRISEGVCYDADKADSKDVSSINGLNSIYTANTMINKLVKHNFTNIEII

SEQ ID NO: 44085 - protein, 415 aa, Bacillus sp.
MSVGASQRKGLHLWNECSIIELDIAEEVMAVLVNQKYELFPTEKQKETFDRWLQYCRQTYNSALLDKERRYKQNKKNYNRYDMQKQLTVDKKNYPILKEMPSQPLQEVFVRLQKAFDNFFRKDARYPKQKKYKEYTSMTFPQFGFNKKGNRMAMSFSGNGKLYNTRLGEIDILLHRPLKAPIKQLMIKRQGNRWYAIFCVEGQALPTTLDIHNAIGIDVGINQYAVLSNGLAHENPRFLRKKERQLKKTRRRLSKKKKGSANDIKQVQRVRQLHEKVGNQRRDFLHKLSYNLSKDYSVIAVENLHIRNMIRNRKLAKSISDAGWGMFRNMLAYKCERNGGILIKVEPKFTSQDCSHCGNRVKKSLSIRTHICPKCGTILDRDHNASRNILQKGLDELLTINGITITVGQGCVRTV

SEQ ID NO: 44086 - protein, 403 aa, unknown
  TnpB Polypeptide
MDADSQMRTVQLKLDLIDNAKDLLAETIRQYRWAANYVVDSAWEDGEPETLTRTELHHDTYETVRDQTDLHANHVQLARNRAAEAMTAVVERRNQGHPAGKPQFTSDFLDYITKSFTVHDDYASLATVDGRVHADFVLPSNPDTPPHRYFLNADYDVGRSTLIPKQDAHYLHLTLDVPVSTESLETETPAVLGVDLGLSNIAVSSTGRFWNGDEITHWRNQYQRRRRSLQQRRTRWAHEALQRLSQRVHGRVRQRLHRVANEIVSEAVEGGCPVVAFEDLSNLYDRIQHFDNIRSWAYRLLVEYVRYKGECAGLKTVQVDPEDTSQRCSTCGYTDPSNRTTQERFECGDCGYRNHADYNAAKNIGLTYLRQHQTGTDGDAPVGVRVNSGVITDSGYQRIESDA

SEQ ID NO: 44087 - protein, 420 aa, Moorea sp.
MKSAYQYRLRLTRKQEIEIEKWLDMLRHQYNYLLAERFNWYEQNRCSINSCPLLCHLPELKNNPDYFSQQNSLPQLKKTRPWYKVVQSQVLQNCVKRVDLAFKRFLKGDSNGKRSGRPRFKGRNRYKSLTFPSLSKNPINGNILTLPKFGKVKMVYHRPIPKVFKIKTATITRKADGYYVALSIQDDTVPNTIPIDSVTSPIGIDMGLKSFLIKSDGSEVPIPQYYRKAQKRLKKIQKAVSRSKKGSNNRKKAVTKLGKAHKKVADTRKDFHFKTAKGLLDNHVRVASPSANLVAHEKLNIKGLAKTRLAKSILDAGWGEFLSILSNKAVRVAWPTALNAGLVTVAVNPHNTSQNCSNCGKKVPKKLKDRIHSCPHCGYVADRDVNAAMNVLKLAVGHPVRSKACRVTEGIPGVGKKPTL

SEQ ID NO: 44088 - protein, 505 aa, unknown
  TnpB Polypeptide
VKKQQALQGIASAYACEKSFWLDRIPFSQIKYPNSVRDASVEAKYKSPTGLQARMWKLALQDAADTLHRHYQAYAVYLRKLVHRNKNLSDVQKHYIHWALQNYAVLEQVLSDQCPRPKFEITPVDAKRAATYLHRIFRLHEPRHPRLKLVRSFMLDADCYKAFKHNGRDYIGVMTLVPRQRINLPLAGAGSITGTVRVVLDQQRVVVHTPKEVKIEKNTTGPVEAIDYGYTEVLTDTQKTHYGTDFGTIMSAYSDQQNAKDRRRNKLRALAKNAHSFAKSRRIRKNNLREAKTERRRQRQKTTVVRVINTALNTFLRTRKPSVVITEELSGAFKYNKGKTWNRRLSSWARGTVQDRTSFKVLACGACHEIVNPAYGSQNCPNCWFVDEKNRSGDRFKCLQCKYEGHADWISTINYLHRLQDSEIHLYTPYRQVKVILMDRYNRRLESPIETPLEYFRRISLPATVPGRTLDTVSTSPSTDVTPEVVACVSSGHSESETTKCVGYV

SEQ ID NO: 44089 - protein, 235 aa, unknown
  TnpB Polypeptide
MVKTRNKLIPQGRILNATVSQESSGKYYVSLCCTDVDIKPLEKTGNSIGIDLGIKEFCITSDGEMIENPKYLKKSLDKLAKLQRELSRKSKGGSNCNKARIKVARQHEKITNQRKDFLQKLSTKIIKYNDIICIEDLQVKNMIKNHKLARSIADVSWSEFVRQLEYKANWYGKQIVKVDKFFASSQTCSVCGYVNKETKNLGIREWDCPQCGTHHDRDINAAINILNEGLRVLAA

SEQ ID NO: 44090 - protein, 306 aa, unknown
  TnpB Polypeptide
VRAVSKVVNSYRTEREHLHLFNPHGAIIYDERIMGFKGLEKVSLSTLEGRVVVPLLVGGYAKLDQRRIWGQADLLYIKGDLYLCLVVEQPEEPPLTPEGILGVDFGIVYIATTSDGVTYKGGKVESVRAHYAGLKAELQRVGTESAKRHLKKLSGREARFKRQVNHRISKELVVVAKGTKRAIPLEDLKGIRSQATVRHEQRDRHGKWAFNQLRAFVDYKAKIAGVPVLMVDPRDTSRRCSACGHTEKLNRVSQSRFKCRVCGRMENADFNAAKNIRWRAAVNQPIVVCQPEGLEIELQAHLFRGG

SEQ ID NO: 44091 - protein, 381 aa, unknown
  TnpB Polypeptide
MKGFGKSRQVMIVNKACRYRLYPTTEQKMMFAKTFGCVRFIYNKMLSDRIDYYKETGQKLNNTPAQYKEEFPWLKEVDSLALANAQMNLNKAYSHFWNDSQHFGKPRFKSKKNRRASYSTNNQKGSVRIEGHKVKLPKVGWVKLCQHRPLPENSIIKTVTISKTPSGKYYISMLVEYENQILPVIPKTFLGLDFAMHGLYVASDEDEAKYPDFLRKAEKRLAKAQRKLSKKQKGSHNREKQRLRVAILHERVSNQRRDFLHKKARYLADRYDAIGIEDISVKAMAKRKKGGKFSFGKSVTDNGWNMFTNMLEYKLAWQGKQLIKIDKWYPSSQLCHVCGYQNHETKDLSVREWDCPKCGSHHNRDKNAAINIREEARRISA

SEQ ID NO: 44092 - protein, 447 aa, Acidimicrobiaceae sp.
VTRAEFEPTKTSPPTTLTQAYRYALDPTPDQANLLRSHIGATRFAYNALLGLVKVNWDENRTRKETGEDVAKEDYLGTSHFDLQRLWYERRAELAPWWGENNSSSYNYACLNLSKAFANWRRGQARFPTFKRRGSKATVSLMPGAVKLTDSHHVRISRVGVVKSYESTRKMHRHLERDTGRILSATVSEVGGKFFISFTLEVVRSIPATRAPEKVIGVDVGISTLYTGATPNGEQVLMVENPRHFVRAEKRLAHTQRVASRRQGPGPGQAPSKRWRKANSRVQKIHAEIANSRKNLINETTTRLAKNYDLIVIEDLNVTGILKNHSLAKHISDAAWGEFRRQLEYKTTWYGSALIIADRFYASSKTCSHCGAVKAKLSLDERMFHCEACGLTIDRDVNAAINLARLGLPGTSSGTGRGGEVRPEHQILNATAHPDEASTETLTLVSA

SEQ ID NO: 44093 - protein, 376 aa, unknown
  TnpB Polypeptide
MKTYKYKFGNQSNLIRLGNLLDDMWQVHKYFHEWQRQRYKDGWFPYANHAAMCEHLTDLKRTTHPHWKALPSQAMQEELKRIHLAYERFFKKLGGRPKIKKRHRFKSLTLKQAGWSLKDNRLTLNFRKWEKGKWRHDKVAYAFHKHREFHGNISRITIKRDACGDYWLYLITDFVETKPLPTTGQSVGADFGMKDAYLTLSTGEKIQHPQPLKQSLKKLRSLNKSLSRKVKGSNGWWQSVRDLARLYRKVANQRKDFHWQLASKLCEKFNTIILETLNLDGMKRLWGRKVSDLAFYQFVEILRYKCQKHKRQFVQIGQWTATTKPCADCGHRNENLSLSDRQWTCPECGSHHDRDINAAINILQAGIPVKVSARYA

SEQ ID NO: 44094 - protein, 195 aa, Okeania sp.
MVEKAYKFRVYPTPEQENLLRRTLGCVRLIYNKALAARTQAWHENKERVGYTQTSAMLTNWKKQEDLDFLSEVSSVPLQQGLRHLQTAFTNFFTGRAKYPNFKKKRNGGSAEFTKSAFKWKDGQVYLAKCAEPLPIRWSRQLPQNCVPTTITVKLDPSGRWSVSLRVNDPRDLKLNPVTKQVGIDARNYQFSYYQ

SEQ ID NO: 44095 - protein, 211 aa, Okeania sp.
LTRGITSLVTTSDGEKIANPKKLNKLHKKLRLAQKSLKRKTKGSNNYHKARIKVARIHAKIKDSRLDYTHKLTTQLIRENQTIVVEDLAVKNMVKNHKLARAISDANWGELLRQLEYKADWYGRELIKIDRYFPSSKRCSSCGHIVEKLPLNIREWDCPECAAHHDRDINASINILRMGTRVGDRRKGTPTLEGCGRSSVSLWSDCKTIWE

SEQ ID NO: 44096 - protein, 412 aa, unknown
  TnpB Polypeptide
MEKQVLTIVCKINPTPEQVAKIEVTLQAFANACNYINGAVDPKLTHNVTIQNQVYNNVREQFGLSSNLAIRAINRVSSNRKTAKRMNKPVRKFLPTSADYDARIFSFREKDWSVSLTLIGGRERFLVDVGSYQKGKLSGFTPTSATLVKHQNGTYSVNIQVKNNAPEPQKTTDVIGVDMGRRDIAITSDGESFSGKQITEIRDRYSKVRASLQKKASEGTRSGRRRCRRILKRLSGRERRFQSWVNHNVSKRIVDAAVAVQCSIAIEDLTGIRQRSNQQPRNKTERRRSNSWAFYQLRQFLFYKALGAGVEIVLVNPAYTSQTCHKCLRIHSVKGKSYRSGKTFDCGHCSWKGDADFNGANVIKRLGLSVNQPGGSYLSCELSRKVEYFSDSLIRLDAGLLKAYTIPVLRLV

SEQ ID NO: 44097 - protein, 428 aa, unknown
  TnpB Polypeptide
LRIVKSKDDAIACFKALKENGNKIDQCLFESLNDQGIYPTVGFLRNLKRSDEPPTIAKKATFVMDYSISAEQNCKRIAGNIFGSNYENGKYLTYEVVIPLSVRKNLTGRIAKPRFIKRKSDGCYVGHCSYHVDIPTVKNQNVLGVDLGKKKLFSSVVLYSDGNYSDEIINSRLSYRIDKKLKRKLKDLEHLLEKNKTLENLINGDINLFNSHLEEIRQDRVNQIMELRKNISNTKRYIAKLITSEIVSIAKENDCKEIHVENLSWLESKGGRWNHAEIQDFITEFAELEGIKVVKIYAKHTSSAHPITGEFGKKRNRNIQFQSGDVIDRDLLASINIAKRNKRNQKENKVNQLKKKHTSTPKKVKKPSNRKVSLAIRQKLLTNQRGTEIVVLYPRKTGNRTWEVLDAASKPHKLSLMSRLSHRCQFVT

SEQ ID NO: 44098 - protein, 447 aa, unknown
  TnpB Polypeptide
MKRKFTVVTELRRAQNMELITYLDLCFADYGKAKRETFHKIKNSNCFDKSEHNTFLQTKYNVLKRTANSVISDAQMTFNSVKELKKTEKKKWERKIPAMEKKIEKLEGKLEEKKVLLRQGKYVPLRSYHNMKKQLVRMKKDLNKWNQKVGYLGYQIKTNKFKVCFGTKALLKKDKRLFIAQRDSQLSFVGCKTESAGNLMLQLTYNNQINQFQIQLRKDWGGYKNSKDKYVYGKCHFSYYKNKITEILKNHTSPLSYKVIRKNGRYFLHCTFEIEVKDENLLTRKNHGVIGLDFNKGFVTLSETNEYGHLLRTDKFVYRFGQNQKTRSDLEQVASKVKNLALKTGKDVVIEGLDFQSTKAKTIAKQGKRRRKYNHMLHSLAYAKFVSIVDNCCYRNQVNLIKVNPAWTSWIASHKYCNLIKLNVHTGASYVIARRGQGFYDQVNTAA

SEQ ID NO: 44099 - protein, 153 aa, unknown
  TnpB Polypeptide
LLTLDNLLSNFSKKPSNQLKLRILKLRRKINNYQRELHNKVSNYLCENYKTIYIPKLTKNNDIINCKTRKINTKTVRQIAVLGHSKFIETLKTKADLYTNVQVHIITEEYTSQTCLKCQKRTKSTSEIFNCIYCDYKLDRDLVGSTNILLKNW

SEQ ID NO: 44100 - protein, 526 aa, Vibrio sp.
MTKKEKSSVHIVEFPLIATPSDIKETEVRFSFLRQLYNAALGELFKRNEKLNNDTEFQGLLNQYRESKKVGNEKLSKSLSKQLAEKNKEYGLTEASIQSFTTANKNACCFADHLDAHSTQTIATRVFKAFSEWKYKGKGKPRFKSWKRAIHSAEGKAKSCLMIVLGDDKKPTRFKWKGLEIPVKLSKKDNQGYELAALELIGKGEWKYCRVLSRTVRGKTKLYLQILLSGECYQKQSHLERIKVNAGKRTGVDMAPSGFAAVSEAGAILSPLGAEISQVKQEISRLQRQNARRLRLANPDNYTSHTRRKGRKTVTVWKVKKGARNWIKTNAYLKTQAEITELHRQMSARRKQGHDKLANDIVALGNVIMAEKLSYKAWQRMFGSSVGANSPSQFMSTLRRKAENAGGRMIDINTWKAKLSQYDHVLDEYHKKNLSERIHYLGGELPVQRDLYSAFLAMCVCEKEHIVSLTTAHAAWSGVRHSLDAAVIRVNETASSRSLPTSFGLRELIPYLQSERLAVKATESLL

SEQ ID NO: 44101 - protein, 341 aa, Enterococcus sp.
MIEEEIGVRGGEMSVLKGYKFRIYPDEKQKKFFIETFGCVRFTYNHLLMARHTGTARNTTLTPASLKKEYPFLKKTDSLALANAQRNLERAFRNYFSGRAGYPKLKTKKSTWQSYTTNNQQHTVYLEGEYLKVPKLKSLVPIHLHREVRGTIKSVTISAKRNREFYASILCVEEVEELPKTNDLVGISYCPENLIQISAKKELPQIDQSHLVKQLGKEQKKLQLRAKVAKKRKVRLIHAKNYQKQKERVLKLRATKLDQKRNFIDQLTINLVRDFDYLFIESKPKFKNETGEFSEADWQQFIQRIQYKGRWYGKEIRYIEVKELKNEKCKEIERLGRAQLT

SEQ ID NO: 44102 - protein, 721 aa, unknown
  TnpB Polypeptide
VTFVLVSFDFILKYLIFCKYFIKLIINTLFVSPPIKYNNKKQKLLKEILRLICMNKNIEMDNIKEHPPDDYFKCVKVSLKHIIKNYEINQPKINKTAIKAHKIVIHTLQFMKLYLLDYYDKNSNLPKIDKVFINCCMKILCNQKSSGRLPKKEIKELKEKLTTFYNIHYKSLCQGKKLDYTHMNTILDYLTIDILTMYENNIKQHYIEYVERYVNVIWKKKEMIEVIKKYNKKEQQKELINKLCCQLRRIKNDLLNIENNKYKSKSFYHKWIQEMNKLVVPNKKTFKKNNLYYDLQCNPQDYFSCMVYMMKQVEKNKCSINNVFPLRTDIIAKHIRIDTTTLVHLLMTKKQGNKTYYLTKGNLKRYEDKIWEFFFGTERQCFKKKWYSFHHMIETDGVGCSILMLRKDKVGKKIRICKTPKQEEYIDELKNYSKIKDKKIVSVDPNLADLLYCVDNDTKERNFFRYTQNQRRKETKEKKYKKIILDCKNEKINDKTIIQLETEVSKFNRKTLNVDEYKKYIKKKNEVNSLLFKFYEKRIFRKLKLNGYWNRLKSEQRMINRFKKIFGKPEDTIMCFGDFEQRKHRKYKEATKGKGFRTLFRRNGYKVYLVDEFRTSCKCSNCDGGDCVKFRKVRNPKPKKNNQILSHGALMCKTCNALWNRDENSSRNIYKIAYNAINKKERPNYLCRSKKVENDLIVSSDTSSVCRLQCNSLEFTQPKFT

SEQ ID NO: 44103 - protein, 224 aa, Clostridium sp.
MKKTEEYKWLNEVSNNVAKQAVKDCCNAYKNFFKGLADKPRFKSRKKSKEVKRLKKVLKRKQRKVSRKYDMNKMKKGGENRCQYKKTNNIIKLEKEIKLLHRRLSNIRSNHIHQATNKIVKTKPSRVIMEALNIKGMLKNKHLSKAISEQCLYDFKVKMQYKCKFYGIEFVEADKWYPSSKTCSCCGAIKKDLKLSDRIYKCSCGLTIDRDLNASINLSRYKLA

SEQ ID NO: 44104 - protein, 508 aa, Indioceanicola sp.
MRTDLLPSNMTASKEAAVLALLRAYRAGAVLLGREQWRLFFETGRFDRNHDLDKVTFAAVIGAANRVQMCRYQVVGQLQGWVSNRANEFRDTVNASSLPSDTKHMLHTINRAGAWFSRTDVVMKGTGEIISAAVRKLARNIMHHCMDRHRRPDLSCISMRLDHRAGSIAKPVKAMQGGRVGWWVSLSTMEKGRRISVPLLTYAYHDKRPGRATNGIQVNERDDRLTFGVITDMGEACAKGRAAYEGSGVIALDFGLSTLFATSEGQLLGQGWLKQLRRYDSLISMIAASQQRAGRKPRDSKRYRAFVEDVRGFLRTEIGRVLNKLVADGKPAELVLERLDFRHTDLSRRLNAILRNCGRSIIEAKLADLKDRFGIVSTEVNPAYSSQTCSCCGYVDKRNRPSQGVFKCLWCGNTMHADLNATANIEARRARPHGWLFQSKAAVLADLVRGFGERRVRALRSDRSGSRGAPADPRLTNPYFGGVKPVVVRSTGSRKVSKSPKTRALVAA

SEQ ID NO: 44105 - protein, 432 aa, Moorea sp.
MNRWLDMLRSQYNYLLKDRNDSYDQAKAPRLGNYCDLKSGGEACPLTCSVSKTHSVGYPWKNSKKNPRRSAYEAQSSNLPILKKERPWYKGIHSTVLQQTLRQLDTAFSKFFKGETGYPKPKRRSRFRSFKYAPGQVKLDKEKIYLPGIGWMGFYNSRPIPEGFTLKSVTVRRKSRGWFASLQIEDKSIPATLIKEKNDINPLRVKGCDLGINKLVSISNGRTIANPAKQKSFRRRERRLKLRQKAASRKIKGSKNRGKSYSKVASLHERITNKRSAYHWDVANKLVDETDALVFEDLNIKAMKSRCKPKPNKDGGYVRNGQSAKRGLNRSISNAAWGELVNKIEVVAAKSGIPVVKIDPKYTSQTCPKCDHVSKENRKKEKFVCTNCGHYNDADVNGAVNIKIRGLKKLGIDPTQLPPVRGKVTPMEITAT

SEQ ID NO: 44106 - protein, 378 aa, Kingella sp.
MLILKAFKFELIPNGEQIRKLKQFCGCSRFVFNRALAYQNEQYQLDKSFKFSYSKLTALLPEWKRELVWLKDCHSQVLQQSLKDLESAFKNFFAKRSDFPKFKRKGEKDSFRFPQGCKLEQGNNRIYLPKMGWVRYRNSRAISGSLKNVTVSQKCGKWYVSIQTEFETETPTPNGGEVGIDMGIVRFATLSNGEYFEPINAFKNLKGKLAKLQKRFKNKTKFSKNWQKLKAKIAKLHHKISNIRKNYLHQISSQISQNHAIVYVEDLQVANMSKSAKGDAEQHGKNVKQKSGLNRAILDQSWAEFRRQLAYKLAWNGGFVFAVPPQNTSRCCPNCGHTTKDNRQTQANFECVECGYQNNADVVGAINILKRGQAIQAA

SEQ ID NO: 44107 - protein, 365 aa, Kingella sp.
MLIAHKIALKPNNRQRTYFAKACGVARLAYNWALDNWQQQYQAHKENPDNPKPTEMSLRRQLNAIKREKFPFMLEVTKCAPQQAIKDLGKAFKNFWAGRAKYPQFRKKGHHDSFYLSNDQFKIIDNKIKIPNLGWVRMTENVRFSGKIMSATISRIADKWFVSITIETEIQPKQAENQSAIGVDLGVSTLATLSNGEIITGEKSHKALLNRLKRLSRSLSRKIKGSKNREKAKHKLARLHAKIKNIRQDCLHKLTTQLAKNHQVIAIEDLNVKGMMKNRHLARSVADMGFFEFKRQLQYKVAQFGGTLVVADRWFASSKLCSCCGYKMEKMPLSVRSWQCPRCQTQHDRDVNAAKNLRDYAFKQL

SEQ ID NO: 44108 - protein, 258 aa, Kingella sp.
MNMVITYLPKMGWVRYRNSRAISGSLKNVTVSQKCGKWYVSIQTEFETETPKPNGGEIGIDMGIVRFATLSNGEYFEPINAFKNLKGKLAKLQKRFKNKTKFSKNWQKLKAKIAKLHHKIANIRKNYLHQISSQISQNHAIVYVEDLQVANMSKSAKGDVEQHGKNIKQKSGLNRAILDQSWAEFRRQLAYKLAWNGGFLFAVLPQNTSRCCPSCGYTAKNNRQTQANFECVECGYQNNADVVGAINILKRGQAIQAA

SEQ ID NO: 44109 - protein, 431 aa, unknown
  TnpB Polypeptide
MFKVIKYKYIPTKKERRLLRLLCHISKNLYNSTLYILRQEYFKTKKVIKYYDLNKIMSDNDNYKILNSYISICIIKSVHTAFTNFSNKITKLPKYLKKNDYYQLYTEQILPKIINKKLVIKLPLSNLTRTSKTFNKMFEDELINKFIKESDIKRSFDIYFKIPEVIKDKDIRVFRIIPSFKGLSYDIHITYVDDTNIKINKNPNQIMAIDLGVNNLATCVLSNNESFIIDGKYLKSINHFYNKQKAYLQSKKPNQKEYTLMEHRITEKRNRRVNDAINKAARQLINIAIESQISEIIVGYNKGFKTDGIKSDLPNKEKARINQNFIQLPISKFKNKIKELCKRYNIKYIEINEAYTSICSFYDNEEIKYHKNYLGKRITRSLFKTKEGKIINADINGALNILKKGKPDRIDIISFLRNIGQTVPIRQKIKL

SEQ ID NO: 44110 - protein, 408 aa, Thermococcus sp.
ISFRVWNRANYLRRQEFFEGKPIDFNKTEKIVYEEFKSEIGSATVQQICRKNAEAWRSFFSLLRSKRNGELPDWFKPKPPNYIKEGGLIILRNDQYKIEGNKLLLKGLGKFKRLEVQFKGRIHLKGKQGRLEITYDPVRRKWYAHISISVEKKLQGGEWVEVPREPLGNFSAGIDLGVNNLMAVYVENGESFLVNGRPLKSIDFYWRKRIAEYQSLINKSGAKKSKKLSRMHQKAKLQAKHYINTAVRQTVERLYHLGVSRIVVGYPKGISRNSDKGRKQNYLLSHVWRFNTVIKRLKEVAEEYGIQVLVVNEAFTSKACPVCGKPHKGARFVRGLFKCPETGLIFNADLVGAFNILKKVVKTITPNLGGLYAQGRGNWGKTLPEGSKTQLKFGLNETPQTSPSMARG

SEQ ID NO: 44111 - protein, 402 aa, Thermococcus sp.
MRSYRFRIYPSKAQQEKMLQHMEVCRWLYNELLRTIRENPSLRRTDTQRLIVELKKENPELKEVYSKVLQMVNHQLWNNLTVLKALKKNGHKVGGLRYKTSPNSWKSLNYNQSGFKLDEEKKRLHLSKIGEVPIKLHRRIKGTVNGVIIKRTKTGKWYATFQVEEEPEPLPKTGRAVGIDLGVANFVVDSDGNAFENPLFLEKSLEKIKKIQRRLSRKQKGSKNWEKERVKLAKAYEKLANQRRDFLHKLALYYVRNYDVIVVEKLKAKNMVENGHKNLNRHLLDSSLGAFIRILSDKAERAGRRVVFVEPAYTSRTCSRCGFVVEKLPLSERIFRCPKCGLVMDRDLNASLNILRKGLDEGLGRPGLPVEGRPLPRVVSYEAVVTGQVFLMKQEAPPERTG

SEQ ID NO: 44112 - protein, 505 aa, Gammaproteobacteria sp.
MRTIKRHSIAINAGKNTHIEALAKAYAKEKNYWLLQFQQQIHIPFIKNSRHLRNQAVKEKYSSRYGLQARMWKLALQDAADMMDRFWRSIFDKIKRDIYRSSLDATQKHYAFWLLKDYARFSEMLALNPLNFKELNLSSRKKVINFLQKKIKKYRKNYPKIKKARSILLDENCYSIFTHDNRQYIKMMTTIPRKRITIPLSGNTPIKGNIRLIVKGQMIEVHYTADLKAIKKSFTQSVLGIDLGYSEIMTDSDGKSYETDFGDILTTASDGLKVKMQRRNKLHALQKKYSESTSIEKQKKAKNILKNNLGQIKLEENQYKLKATLDRKINTAFNQLSEKNPDVVVSEGLSHQFSYHCGRNWNRRLSSWIRGVLQERLAFKALAKGFSHQVVNPAYSSQMCVPCGFVDHRNRKGDKFKCLHCGYVNHADWVAALNLRSRYFDREITRYTPYREVKRILLQRFHRRLETNASGTVNGRIPDTTLHVSTMRGQSESEWKTQSNKDVDV

SEQ ID NO: 44113 - protein, 387 aa, unknown
  TnpB Polypeptide
MRVVKVVKQNYLPTEETLELLEDFRLMVNDCIRIGLKKNITSMRKLCLASYRALAEYQTATYYRLTATSRAAGILRNYRKSLDKNLRTKGPHAKKLMLTDCYGFRIQGDRLRLTLRAHEYVYIELNPHTLAALQGCTARSVTLTPMALSIAYAREVEEVALKGMIGIDRNLDNISIASSDAKIQRFDLSKATLIKKSYREIKSHLKRNDVRIRRRVFSKYGALQRSRVGWILNNCSSAIVRQAREKRFGIAMEDLRGLRKLYRKGNGQGRNYRARLSSWSYYELRRQIEYKARWEGIPVVYVPARGTSVTCSTCGSRTYPNEQRGVHCPKCRTTVDRDVNAARNISAKGALRFSANGPPGEAMVAEREKSNATQIRPVDGGKSVHAR

SEQ ID NO: 44114 - protein, 404 aa, Streptomyces sp.
MYCFTMLSGALYPSAGQRSASARAFGCARVVYNDALRARETARSEGMPLPKTGDLSKRLITEAKNTPQRAWLGEVSAVVLQQSLRDLDTAYKNFFDGLKGRRPRMGAPRYKSRKDTRQAVRFTANARWSITTGGKLRLPKIGDLKVKWSRSLPSTPSTVTVVKDSAGRYFASFAVATGPEEILPQAPAEVGIDLGLGHFAVLSDGTKIDSPRFLRRAAKRLKKAQHALSRKDKGSKNRDKARVRVARAHARVADARRDFHHQLSTLLIRDNQAVAVEDLAVRGLARTRLAKSVHDAGWSAFVSMLEYKAARYGRTLTRIGRFEPTSQVRSQCGVKDGPKPLHVRTWTCRACGAVLDRDINAAVNVAKAAGLAVSACGARVRRAPVPAPRSEAGTHSTPQPSTAR

SEQ ID NO: 44115 - protein, 379 aa, unknown
  TnpB Polypeptide
MKLIAQLQLKPTPEQKRALLATLERANEACDYISQVAWEKQTFGQFKLHHLTYNATKERFGLSAQVVVRCIAKVVDSYKLDKKTQRTFKSHGAISYDDRILTYKVEKSEVSIWLLGDKNRQNIPFVCGERQLELLQTRQGESDLALVKGKWFLLATCNVEELEPSDTSGGTLGVDFGIAEIAVTSDGKSYSGDKVKALRRKLRSHRARLQSCGTKSAKRRLKKASKRQERFVRNSNHCISKELVRDAKASKKALALEDLKGIKERSTRLNKEMRWQMGNWAFAQLRSFVEYKALAAGVVCVTVDPRNTSRTCSVCGHCEKANRKSQKHFSCLSCGHSDNADFNAALNISKRALVNAPIVVYSQNTVRVGTTSPAPCGRG

SEQ ID NO: 44116 - protein, 510 aa, Rhodococcus sp.
LDPALPGRYLRSVACHAGGDRAGSRHLAGAGLPRHRDHRTVGPVRPGHRPHRRTHHCGGVRPARIRPGRGAAAHSALTPRRRCGRRAAADHRRAGTAPDLGDGSAFRSGSTTRTACRHRSRAGVDGEAADLPRPGPAGRAQWRSVRLTATIPEHLHGRAVIDWHLPTLVLDRRGLLWRCAANEMVPAADLTAGRVAVGVDWSPSTLGAAAIAADSPDGLVSDYRGWTYDDRGLGIKLARLQAEGQLLHAKAARLTRLSAAAPPEVRARLEAKIAVLDAHRTAVGIKRGKINRELAFDFARQATDYATVAGAQVIAVEDLTTLETRGHGRANNNRAAQSARRQAVAALAHTAAGVGIAVVSVPARGSSAQCPGCDEPFSRPGGYHTAWCPRCRVGGNRDHVAGVNLAKRALLGRNKTTRRRGGLPAVRVTEHAPVRRSRDKHAPTPSRPRHRRVRRSLPTVTPRLGVTPNQHVPASQASVWDTVKPAPPTVMRVAVTHVHLPRPPRKWQIV

SEQ ID NO: 44117 - protein, 367 aa, unknown
  TnpB Polypeptide
LNIAYRFRIYPTEEQKILLGKTFGCCRFLYNQMLNDKIQEYKKTKKMLKNTPAMYKKEYPFLKEIDSLALANVQLHLEKAFKNFFRDPKVGFPRFKSKHHSKNSYTTNVVNGNILVEGSRIRLPKLKWISMKKHREPAENCRLKSVTVRMEPSGKYFASLLYEGYSCENQAADKDYSNAKILGIDYAMQGMAVFSEEIEMEEAGFFRKNEKRLAREQRKLSRCVKGSHNYVRQKKKVARCHEKIRNQRRDHLHKLSRRITDQYDIVAVEDIDMKAMGQCLHFGKSVQDNGYGMFRDMLDYKLAWKGNELVKVDRFFPSSKKCSKCGKIKKELKLSERVYRCTCGNEMDRDRNAAINIREEARRMLVA

SEQ ID NO: 44118 - protein, 193 aa, Halomonas sp.
  misc_feature (193)..(193): Xaa can be any naturally occurring amino acid
SSAFSYRDGQITLAKCREPLNIRWSRELPAKPSTVTVSKDAAGRYFISCLCQVEAQALDVTPKMIGIDLGLKDLFVTSDGQRVNNPRHTARYARKLARAQRQLSRKQKGSNNRAKARIKVARCHAKIADTRLDHLHKLTRQIVNENQVIAAESLQVRNMVKNRHLSKAISDVGWGELVRQLEYKAAWAGRQFX

SEQ ID NO: 44119 - protein, 560 aa, unknown
  TnpB Polypeptide
MIWGYGSDKFLVNGLGSIFISLLMLEQMHTLLAVPSQKDRENRYIAMGVAVIGITVFMQFFWINEYSVWWNIPAQWVMLSIYGIIGEKAKGYVAVSKATVVITFFSIAVILTNGIVSTILIKIYMVNLSVIYFFVALLSMWGIKKISGLSTKTFLERTYFLDGRIFCLQCRKCFRRDVEKIYRKSRVGRWRQWVLKAYKYRIYPNSEQRIQIAKTFGCCRFVYNQTLAYRKEIYEKEKKSVSKTDCNNYCNRELKKDYEWLKEIDKFALTNAIYNMDTAYQKFFKEHAGYPKFKSKHDNHKSYTTNFTNGNIAVDFETGKIKLPKLKAVKARLHREYSGQIKSATVSQVSSGKYYVSILVETEHKELAHTNHNIGIDLGIKDLCITSDGKVYENLKIIKKYEKQLVKLQRQLSHKGKRSKNYYKTKKKIALCHEKIRNIRKDYLHKVSHEIISENQVIVSENLQIKNMVKNHHLAKAISDVSWYELTRQLEYKAKWNGRKYIKIDTFYASSQLCSVCGYQNPDTKDLSVRTWICPKCGAEHDRDINAAKNILTEGLRQIA

SEQ ID NO: 44120 - protein, 379 aa, unknown
  TnpB Polypeptide
MIRSLKVRLYLTEEQEILTKKHIGYSRFIWNYMLAKQIRRRENGERHLSRFDMIKLLTPLKKQEEYKFLNEVSNATLQIICSDLNQAYQNFFKKVTKFPKFKSKHKSKSAFPVRVGSEKFYFTKDYVQIEKLGYVKYKTSKPIPLGKGVAKFTNPRMSLENGKWILSFGMECENQTVHTEHKGRIGIDLGIKELAVVSVDGEQMNFHNINKSKRVRTLKHKLKHLQRKVSRKYRTNGNYEKTKAILKTEVQIKEIYYHLANIRLNYIHQTTHKLTELYPEVITMEDLNVSGMMKNRHLARAIAEQNFYEFRRQIEYKCEAKGVKLQFTDKFYPSSKTCSCCGHIKKDLKLKDRTYICSECGLKIDRDFNAALNLERYVG

SEQ ID NO: 44121 - protein, 362 aa, Parageobacillus sp.
MWKNKRKGGEWMPTITLKLELYKPTKFKQDMYERMTQINTKFANWLLLHPDVNKATSKVFKEFSDEKFPSAIINQTIRDVKSQKKHQQSRAFRKMWCSFNNQNLKIEKNGDFYTVSFPTLEKRIGVPVVARSYQQQWLDRIIGGMAKQGTAKLYKKKRKWFIALPITFDVEASQGEKVMGIDLGLRYLAVASIGTKSLFFKGNQCAYIRRRYAAKRRKLGKAKKLNAIRKLKDKEARWMKDHNHKISRQIVNFAVSNGVGLIRMEDLTDIRNRAKSKKEAGRNLHSWAFYQLKEMIRYKAEMAGIRVEIVNPEYTSQTCRCGHREKANRNGIRFKCKQCGYTIHADLNGAINIAKAISGLVA

SEQ ID NO: 44122 - protein, 406 aa, unknown
  TnpB Polypeptide
LTRKKSKTLDTVISEYLRVLNATAGHLPAKSSTELHHKTYSGIRKTSFLPSDIVQEARKDVWKSRKKLRNGFKNCSIRLNKRWFKFTASKRNNPVFSITYSPKKKLLIPVALDRQFQRFKSFLDDGWLFDNVSLLKDGRISVVLEKEFEEPTVDSKRYVIGVDVGSSTLAAVSIFDIKTSKIVKQLYFGRDVAERQRKYLERKAKLRSLADNGSGRAKKSLRNLKHKQFNFVKTRSGQVAKEIVNLAKRYDAYISIEKLKNTRGRRGRFRKEANRKINRIPYGKFKEFLCSNAEMFGIPLREVNAYHTSKWCSACGAVNNGHYSGNYALYKCKVCGKVVNSDRKASLAIAIKSLLERENHELTIPDFAQISNRRVPVNGLLRPDAVGLSNVAVQHTNQPMESHPIY

SEQ ID NO: 44123 - protein, 367 aa, unknown
  TnpB Polypeptide
MMKTLQTVLEETPQQRVILDDTLARMSEAQNFVVASCYEHEETNTFRMHHFTYPVLRKKFGLPAQLAVVANKYACSAVKGAVRKKGRQPVFSGRAIHYDARSSSISLEKGLASLLTPRGRVKVRFTIPKYFQKFVMWKIKESNLVRCRDRKYRLMISIEKITIKSRKTGKVVGVDRGINNIIATSDGWLHDSIHVFEIKRHYVSLRGRLQSKGTPSARRHLKKLSGKEKRFMRDVNHCLSRRLIDSAEKDGVIVLENLKGVRNVRHRRKQNWLFSNWAFYQLEQFLAYKAEESGVAVEFIPARDTSKTCSICGIRGQRHGSIFRCKACGAVLNADLNAAKNILHRYTPLTGCCQPAYCNAEKAVTSH

SEQ ID NO: 44124 - protein, 371 aa, unknown
  TnpB Polypeptide
MVKKTIRAKLMFLTKSKEEKIKREFINFQKSLRGDDAELYSATKQEVERLKYRLKKKFKRKKEYPLMIRNDCIKLKETNNKLCRYWARIPVHKKSIYVAIAFPYKDKELLFSGNIRETKLKRHRNNWYLLITVEKEVKMDYNISSVISCDLGEKHLLSTVLVKDNSMRPKFYGDEVRGIRRHHSWLRKRLQEKKLLKKVKEIGRRERIAVNQICHEISKEVVEIARENDSVILLGDLKGIRNSTKGRRFNSIVSNMPFDKLSKFIEYKAEAEGVPLVKMKEWNASKTCHVCNNEGKRVSQGLFRCPTCGLEYNADLNGAINLFKRFDGYMLSNGVVFDTTQNLEMKQAAAMLNQESPDLFAESVNSRTSSP

SEQ ID NO: 44125 - protein, 363 aa, unknown
  TnpB Polypeptide
MFLTKSKEDRIRKEFINFQKALRGDEAELYSVNEQQAERFIGRLKKKFKRKKEYPLVIRNDSIKIKETNNKLCKYWAKIPIHKKSIYVAIAFPYKDKGLLLSGKLREAKLKRHKNHWYLLIRVEKEVKVDYDISSVLSCDLGEKHLLSTVLVKNGSMTPSFHGDEARGIRRHYSWLRKRLQEKKLLKKLKEIGRKERVAINQICHEISKEAVRIAKENKSAILLGDLKGIRNSAKGKRFNRIVSNMPFDKLSKFIEYKAEAEGVPVVKMEEWYASKTCHVCNNEGKRISQGLFKCPTCGLEYNADLNGAINLFKRFDGYMLSNRVVFDTAQNLVMKQADAVQNQESPNINGGECHIVSILGAR

SEQ ID NO: 44126 - protein, 380 aa, unknown
  TnpB Polypeptide
MRAYKFRIYPSKKQETEMHGHLWISKNLWNKLLEANKKKYEEEKKFIPKSEMQRMVKECGLYSQTAQVLSHRLYNSIKMKVKAKNEGKKTGFPRFKSFERMKSLHYPQFGFSLENKLKITPFGEIAIKKHREITGRIKTLTLKRESSGKWFAIFTVEQGKQQPKINGGEAVGIDLGLKNFVTFSNGKIIQNPRHLKRWEDKLVFIQRELSKKKKGGSNRKKAKVRVAKLHEKIADCRRDFLHKISTELVNDYSIIALEKLASKEMSEENYGKQIRDAGWNMFANMLAYKAEGAGCKVVFVDPRNTTKECSSCGALVDKTLRDRAHNCPFCGLSIDRDLNAARVILIRATEGHSGSNACNSLQKERDAAIATSVKQEALIL

SEQ ID NO: 44127 - protein, 383 aa, unknown
  TnpB Polypeptide
MRAYKFRIYPSKKQEEEMCRHLWISKELWNEMLAFTKEIYNNYEKFPTKRTLRELVKDSGLFSQVGQELVDRLVDALHRKISMKKKGEKGGFPRFKSLDRMKSLQYPQYETGFWLDKKLKVTPFGEIAIKRHRDIKGRIKTLTLKRESPGKWFAIFCVETPKEAPKENKGEAVGIDLGLKTFATLSNSLKIDNPRHLMQHEEELAFIQRKFSRKKKGSISRKKARLNVARLHEKIANTRADFLHKTSTQLVNDYSIIALEKLASQEMAEQRYGKQINDAGWNMFANMLAYKAEGAGCRVVFVDSENTTQECSNCHQIVQKDLTERMHNCPFCGLSMDRDLNAARNILMRATPGQGGSNACNSLQKERDVAEATSMKQEAHTYP

SEQ ID NO: 44128 - protein, 350 aa, unknown
  TnpB Polypeptide
MLISKTLRCKVFNPTEKKSQLLNHEYSNFQIYVRTGRDFGIYSASKATFDFRYKRKARRKKQPLPLNHHFSKFKITNHKLTPYWFRIPVHGKRGGIWLPIKPHEEIDFTWEIREAKLFKRKKDFWIYITIRKEVCLKTSYSSVLALDVGEKVIAAAVLSSVRKPIFLGREVRGIRRHHAWLRKRLQERGLFKKLKEMRGKEKRRVELVLHEVSKEIVELAERNNSVIVLGDLKGIRRDDRGKRFNRIVNSFPFNKLSFFIEYKAHLEGIAVVKMKEHYTSKTCSRCGEEGKRIKQGLFKCPNCKYQANADYNGAMNILKRSWKHIFQDGAVAFSPELPMTEQTRAEAHNI

SEQ ID NO: 44129 - protein, 375 aa, unknown
  TnpB Polypeptide
MRAYKFRIYPSKKQEEEMQRHLWISKELWNKLLEKTKKKYEKEKKFFTRSELQVMVKESGLYSQTAQGIAHRLDRALKAKIKAKKQGKNWGFPRFKSFDRMKALYYPQSGFSLEKKLKVTPFGELSIKKHREVKGSIKTLTLKKEPSGKWFAIFTAEEEKSLPKENKGETVGIDLGLKTFATLSNGQKIKNPRQFDRYQDRLAFIQREFSKKKKGSSNRKRAKVRVAKLHEKISDCRRDFLHKISTELVNDYSIIALEKLATKEMIEQNYGKQINDAGWNMFANMLAYKAEGAGCRVVFVNPVNTTKECSSCGIITEKTLWDRIHNCPFCGLNIDRDLNAARVILKRATPGQGGSNASGDVAVATSRKEEAHTYL

SEQ ID NO: 44130 - protein, 391 aa, unknown
  TnpB Polypeptide
MRAYRFRIYPSKKQEELLNKHLWLAKELWNELLEHCKQTYEDFGYFPTKNTLQLMVKNYGLYSQTQQETAHRVYNAVINVFKMRKKGVKRGFPRFKSFDRMKSLNYPQSGFWLEKKLKITPFGELTIKKHREVKGRIKTLTLKREASGKWFAIFCVETPKEIPKENKGEAVGIDLGLKTFATLSDGEVINNPRHFKRYEERLALVQRELSKKKKRSTNRKRAKIRVAKLYEKVADCRRDFLHKISTELVNDYSIIVLEKLASQEMSEENYGKQINDAGWNMFANMLAYKAEGAGCSVVFVNPKNTSKMCSRCRNVRNDLTLQDRTYACPECGLSTDRDLNAARNILTRATPGQGGSNACNSLLERDAAEAASMKQEAHILYGWEHVTKPTP

SEQ ID NO: 44131 - protein, 398 aa, unknown
  TnpB Polypeptide
MLTFKYRIYPTKKQALHLNRQMQLAKELYNLLLEKSKEHYKETGRTFSQFDMNRHILQLKKERPKLKELHSQVAQNISKRISDAYKAFFGRIKEKKNGRKINAGFPRPKKFVRSLTFPQSGYKFRNERRLYISGIGNVPIVLHRLLKGKVKNCTIKLYPSGKWYAGFSEEILKTEFESNHKGEVGIDVGLANFATLSDGEKVESPKFLRELEERLKFIHRRVSRKKKGSSRRRKARFRLAKKYEKVENQRSDFLHKLSKKHVDSYSRIAVEELNVKNMVRNHQLAKSIMDASWSAYRKMLHYKAWSAGCEVIDVAPADTTKICSKCGNRKDMPMSERTYRCSFCGHAEDRDINAAKNILTRAMDGLSKSHARGDMSSVSLETRTQGISLKRELYGVET

SEQ ID NO: 44132 - protein, 387 aa, unknown
  TnpB Polypeptide
MRAYKFRIYPSKKQEKEMQKHLWVSKELWNEMLSFTKEIYNNYRKFPTKRTLRELVKDSGLFSQVGQELVDRLVDALHRKIEMKKKGEKGGFPRFKSLDRMKSLHYPQYECGFWLDKKLKITPFGEIAIKKHREITGRIKTLTLKRESSGRWFAIFCVETPEEIPIENKGEAVGIDLGLKTFATLSNGMRINNPRHFKKYEDRLAFIQRKFSRKKKGSTSRKRAKVRVAKLHEKISDCRRDFLHKISTQVVNDYSIIALEELATKEMSEENYGKQINDAGWNMFANMLAYKAEGAGCRVVFVDPRDTSKMCSRCGNMRDGLTLWNRVYDCPNCGLSTDRDLNSALNILIRATPGQGGSNASGNVAVATSMKEEAHVFQGGSMSLYKQ

SEQ ID NO: 44133 - protein, 348 aa, unknown
  TnpB Polypeptide
MLISKTLKCKVFNPTRKKLGLLDREYLNFQIYIRSGRDFGIYSLTKSTFNFKYKIKSRKKKQPMPLANQSTKLKITNHKLTPYWFRIPVKGKRGGIWLPIKPHEEIDFTWEIREAKLFKRKKDFWIYITIRKEVQLKTSYSSVLALDVGEKVIAAAVLSSERKPIFLGREVRGIRRHHAWLRKRLQERKLFKKLKEIRGKEKRRVELVLHEVSKEIVELAEKNDSIIVLGDLKGIRKGGKGKRFNRIVNSFPFNRLSFFIEYKAHLKGIAVVKIREDYTSKTCSRCGEEGKRVKQGLFKCPNCKYQANADYNGAMNILKRFESYMLSDGAVAFSPEPPMTEQTRAEAH

SEQ ID NO: 44134 - protein, 385 aa, unknown
  TnpB Polypeptide
MKYKGVKLRIYPNKEQQKEIIKTFNLCRFLYNKMIEERRAVYEKLKNNRRELYEYNYKKDRDWKEEYPFLREVSSQALLQVRWNVSNAYQMFYNSFKKNGHYYGLPKFIRKGTRETYRIMQNNESIKINLENNKIRIPKLEWIKFRNSNLNNFPSLKTDKIKAITVSRSKTDKFFVSVLYYKDSEKVKISVHTKNKIIGLDMSFNNFFVDDNGNYPDYSKVSKKYINKVEIIKEKIKNVKSLRAKKKLYKRILKIIEHIQNKRKNFISKIAKDLIQSNNIIALETLSIRDMMKIEKYRGSLFDLCWSNFVKTLQYKAEENGVKIIMANKWFASSKLCNICGYKNKKLKLSDRKWICPECGTKHDRDINAAKNLKNYGIKIIQENK

SEQ ID NO: 44135 - protein, 366 aa, unknown
  TnpB Polypeptide
MILRTSSHTIKFANTGKKVLYKKIVSDYQWLLQKYIDLIYEKKLPLKTNLSSKELPILNDIVNANWRVDCYREAVQTYRSVLAKYKGKKCHKPFTKPIIKSHSVNINYHLWDIEKCEEGEFDYFIRIFSPYLKTKTRYLTFNIPIKFHYACNCLKDQGFEFNNRTMMLRDNGMLCLYWEKEEVAKHDGRPIGVDCGYKKLLACSDGKVYGKESEGIYEKISRKKQRSKAFKRALIERDQAINRTVKKFYNEHKDCGQIIVENLKNVKRGKKFSKKFNNKLQRWSYIKVMNKLGRFSEEEGFLLIKVPPAYTSQRCHVCNTVDKSSRQGEVYHCKTCGAEMDADINAAINILHLGVYSPQNLKAERQ

SEQ ID NO: 44136 - protein, 415 aa, Geobacillus sp.
VQALTIKIRFFPDNPELLRQLSREYIHTVNALTEQAEKEGSFPKVTTKDVDAHLPSAVLNQAIRDAKSVSKKMKKEGKRPILKKPVYFVNNQNYTIGEQMIAFPIMLDGKTRKTRFRAMVTERDKNLIQHAKLGLMRIVEKRGKWYAQVSLGIPVTEKKKEKVMGVDLGLKVPAVAVTSNGKTRFFGNGRQNKYIRRKYQQRRRKLGKLKKLSAIRKMNNKEQRIMKDINHKISRQIVNMAIKELVYSGWHLGAQLCDSIVCHREDKWGCVCRLTHIGGRVCTDFYFFFYWRYVRRPLAAKTNDDLVRPLKRYIDICNINGAPVWHMEVCFPRDICLRDPIAVLSTFGDEAVQSTCSGRTDAGGDVIIPDNDGYFYDHRSDFRHLRLSTIRHLHLYGGSRYSFSIICSCADLIAS

SEQ ID NO: 44137 - protein, 373 aa, Clostridium sp.
MILAKKVRIIPSIEQEQKLWQSVGTARFIYNWTLARQEENYKNGRKFISDNELRKEITQLKITEEFRWLNEVSNNVAKQSVKDACEAFKRFFKGLADRPRFKSKKKSKPSFYNDNIKLKIKSNMILIEKVGWIKTAEQIPMGVKYTNPRVSFDGKYWFIAVGIEKEKPVVELTDESIGIDVGVKDLATCSNGMTFKNINKTKRVKKLEKKLCRLQRKVSRKYELNKEGREFAKTSNIIKIEKQIKLLHRKLANIRSNHSHQATSKIVKTKPSRVVMETLNIKGMMKNRHLSKAIAKQCLHEFKRQLQYKCEFNGIEFVEADKWYPSSKTCSECGHVKPKISLSERTYICEECGCVVDRDYNASLNLSRYKLVV

SEQ ID NO: 44138 - protein, 452 aa, Haloplasma sp.
MELYLTTINNLKPNKKESNYLKSQFKVATELHDDMMIDLFRSIHSYEQKLMDGLTKHFTMAYRNPLSKSPMKYIISDVTKKFQTYFHNVKQEPSCKPPNLNVYELNTLISKNFRFDTNSDKQLTPEALTYVENLKDNAFIKPPLCLKPNKKSAQLVFNKSYFTIFKQTIYFSNEADVFHNPLPFKVPLPFHLTFRDIHQIRISLELNQFKVYFLYNINLEHKSSEVDNNNFLAIDIGLKNFCTMVNNVNNQAIIIDGKPIKAYYHNFNYKVRNYKKKLKRLHQDTSTKKLANLYNKRKAFTTNYLHQVSSYIIKYCKKNNIKKIIFGYNKGMKEQLYKTTSKKGIFFQIPYSKLVNYLSYKCKLNHIEFIIQEESYTSKCDSLALEPLNFKKDYKGERVTRGLYKSSTGKLINADVNAAINIARKAIGKSLDPWVKELASSGVMSMPLRISV

SEQ ID NO: 44139 - protein, 392 aa, unknown
  TnpB Polypeptide
MQKRTYKFRFYPSKQQEYELYKFLELARFTYNKQLELKINKYKEENINLTQFDLNNNLIKLKEDNPELKNIHSQILQEINKRIKFAFNNFYRKLKTKENPGFPRFKGRNRYDSITYSQSGFKLNKKLYLSKIGEVNIVKHREIKENSKIKTLTIKKTCTNKWFACFSVEEEIHKKQIKQESYIGIDLGLNHFYADSKGNTIDNPKFLRKLENKLVKSSRKHSRKIKGSKNRYKSRLKLAKIHEKLSNQRIDFLHKESRKLVNNYQNIAVENLQIRNMVKNHYLSKSINDASWNKFLQMLSYKVEETGGKIIEINPRNTSQYCICGNKVEKTLAIRIHKCNKCGIEIDRDVMSAILIKNIAFNNTITTVGTTGSNAWENVSVEASMNQEAQVR

SEQ ID NO: 44140 - protein, 329 aa, unknown
  TnpB Polypeptide
  misc_feature (302)..(305): Xaa can be any naturally occurring amino acid
MKTKAMYSQKIRHYSHVFDETVKAYRDAVTFFISVCIKEWDIISFQTSPQRRMNALEAMTHPTAKRTYVLHCFDDADRRFYKFPSYLRRAACMEAIGKVSSYKSSLENWRNDHTGKRPGDPKAGYVYPCLYHENMYKAAEGYTAKIKVYIRNTWDWITIKLRKSDVDYVRKHCSDMKQSSPTLRKRGKEWFLDFLYEKEVDLTDKPILEQTVLAVDLGINSACTCSALLSDGTVVGRRFLHLPTEEDCLSKSIGRIKKAQQHCSRKTPRLWAVTKGISDDIAVKTASFIMECAERFHADVIXXXXEKGKNAVPENSVSTYGELSMCSPW

SEQ ID NO: 44141 - protein, 139 aa, Clostridium sp.
  misc_feature (80)..(80): Xaa can be any naturally occurring amino acid
MEVFENTNNQTGLDLGIKEFCISSCGEFIENPKYLKKSLNKLAKLQRELSRKTIGSLNRNKARLKVARLQEHIANQRNDXLQKLSTKLIKENDIICIEDLQVKNMIKNHKLSRLISDVSWSEFIRQLEYKANWYGRQIV

SEQ ID NO: 44142 - protein, 177 aa, Clostridium sp.
  misc_feature (8)..(8): Xaa can be any naturally occurring amino acid
  misc_feature (22)..(22): Xaa can be any naturally occurring amino acid
  misc_feature (25)..(25): Xaa can be any naturally occurring amino acid
  misc_feature (37)..(37): Xaa can be any naturally occurring amino acid
VGDFIEIXKYLKKSLNKLAKLXSEXSRKTIGSLNRNXARLKVARLQEHIANQRKDFLQKLSTKLIKENDIICIEDLQVKNMIKNHKLSRSISDVSWSEFIRQLEYKANWYGRKIVKVGKFFASSQICNKCGYKNEEVKDLSIREWICPSCNETHDRDINASINILKEGLRLITIQNK

SEQ ID NO: 44143 - protein, 313 aa, unknown
  TnpB Polypeptide
MRTLLKSFKTEINPTEEQKVKIRKTIGTCRYIYNFYLAHNKELHDNGEKFKSGKSFSVWLNNEYLPQNPDKLWIKEVSSKSVKHSIENGCVAFTRFFKHQSAFPNFKKKGRSDVKMYFVKNNPKDCRCERHRINIPSLGWVRMKEKGYFPTTKDGYVIKSGHVSIKADRYYVSVLIEIPNNKIANNSNKGIGIDLGLKDFAIVSNGKTYKNINRSTRIKKLEKQLIREQRSLSRKYENLKKGESTQRANIQKQKFKVQKLHHKMDNIRTDYMNKTIAEIVKTKPSYIAIEELKCKRNDEKQVSFKSCCISEVL

SEQ ID NO: 44144 - protein, 431 aa, Desulfovirgula sp.
MRRTNVVRVLPGKEQKQVLETIGDRCAALWNAVQYRCRQAFFRGKPVPSYETLCAEFKERPVYRALPAHIGQEVIKKARKAWDSFFALLRLWGKGEMSERPGLPRYWKDRRTGRRTFCVIPVKAPTSYALDSRTLSLTLPRDLREKHGGRLVLHTKGVLRFHGTPKTLELRYDRVKRRWYAHQVVEVPEPVRRTRPEKCAALDLGARTLAALAVEGLNRQILFSGREVWKDFLYWTKRIAEEQSRLSRAGRKTSRRLRGLYSHRARRLRHAFVALAAEIARTLSRHRVTMLFIEDLTGIREDMDFGPQNLLAHNFWAFRMLKNLITAACVRAGIKVVPVEPCGTSSRCAVCGSPVKRFVRHKAACSKCGCVWHADANAALNILLSGSSKGHGAEATQLPPLALRWDRHRWASRFESAAGTLYAASGSRMAA

SEQ ID NO: 44145 - protein, 542 aa, unknown
  TnpB Polypeptide
MNKEFLKMPTEKKSESNFVTVECLLAFDKDEDKGRVLTLMRKFSSMVRFAYKRLMEGAERKELNKILSQKYEVNTRYSDGAILLAQQTLKSCIEREQNPKKLIFGSRELFEQLKKKHLTGKRRDELRQKWEERRCGILYSRGDKSKQGNVNIRLVNLNNQWHLRINLGNGEYVWAMVIRSAKRKTDKWLDFISSIGHAEKTGDWFPYTVRLKLRNGKVYAQFSREEKLPEVVITKDNGVIGIDINAYPFHLALVHAAKDGNMEKYERISLDQLLEEDSEKRTYLSWQTAHLVVEIAKRERKAIVVENLEKLPRGKRGDGLPKLRQKLQKWVYKALLQKIEIVARRNGIQVIKVNPAYTSIIGKLKYAPLYNIDKDTAGAYVIARRGLGFKERLPKNYRGLLKDADFLSYAIAKTEDKIAKIRQEIREEKNEYKRNRLKSTLWKTRKELDLLLKHFRESGESESAAQQTVNRKLERVRGSTQMEQKSWQVLSVALAFSCLESLRDFSPLKRVILLRDWAGVAKRASPSLPGQGTSVLNMYSFV

SEQ ID NO: 44146 - protein, 539 aa, Scytonema sp.
MDMIWLWVKFCDFTPPLEANGFKYFLQSFQYCLINNFSTVFRYKHQMNIKTVNRPVSSIVSHGTKCYHDYMLLTYQYKLNPTSEQVVTMETWGELLRRHYNYALSQRLDWLKRTRCQVDRCSLICEPIGEIPDKTDYYTQASDLKQTKELFPDYKNIYADCQQQNLMRLDKAWKRWLIPDKNGKRGGRPRFKKRGDICSFTFPRVNSQKAGAHLSGNVLKLSKIGEVEVILHRPIPDGFEIKQATIRSKADGWYVSFSLENKTVPTALPIDEIKTATGIDVGLEKFLTTADGQSVAVPQYYRKAQATLARQQRKLARKIKGSKNYQKQANKVARLHLHVARQRKEFHYQVAHWLVNSYDLIVFENLNIKGLARTRLAKSILDVAWGAFLQIMQAVAVKCGKHTRGVNPRGTSINCSGCGERVEKTLAVRVHSCSCGLVIDRDWNSALNLLNLGSVGLPIPGCGGYLDASPMKQQVSFVSLRCSRYTACGARGELSRLSTSCSVTYVTSVISRQPLAGLLTTLIAESPSAFRGGMNALRL

SEQ ID NO: 44147 - protein, 310 aa, unknown
  TnpB Polypeptide
MYQVVYPGQAIKIIDKNGTKFLEVPLGRPGKKYFEGIEAITLPYPKRLWGKPIKELRFIPTHESWYTEYVYEMGEVLQATGIHALGIDPGLNNWVSAVCTNGKSFLVCGKRLKSVNQWWNKTKAALSTAVSKQFGEDAFFTKRMARLTDKRNRQMRDATNKVARQVIDWCLNNAVVTVVFGCNLEQKQNINIGRKNNQNFVQIPTAKLRKRIEQLCELHGINYVETEESYTSKASFLDGDLIPKFGEKPEGYKPCGKRVKRGMYKTSSGECVNADLNGAANILAKVSTRLGINLSRVGRGCLTQPMRFYA

SEQ ID NO: 44148 - protein, 399 aa, unknown
  TnpB Polypeptide
MIRLSYKYRLKPSTEQVAALEKQLRLCRWAYNALLEHSFNERGAGRGTPTHKALTYFLPAMKAQKPELNTVFSQVLQNVAKRVRGGFEGYWNRKRAGLKAHLPRFRGEDRYDSLTYPQFGFRVKDGRLRLSKIGDVRIVQHRPVEGKVKTLTVTRSRAGKWYAVFATEVEAKPIRNRLPAVGVDLGLNSLVALSDGTLIEAPRSYRNAESRLRSVQRSLSRKRRGSKNREKARRRVASVCERVANRRRDYAYKTARMIVNRYERVYVEDLNVQSMMGNRGLSKSLGDAGWGMLRNALTYMAERSEGVIAFVSPRGTSQTCSGCGAYVEKDLSVRVHRCPECGLTIDRDVNAALNVLKRGLKIGLERAEYSPVGEVTATQLIEVGQVASVSQEAHLFRGG

SEQ ID NO: 44149 - protein, 299 aa, Chloroflexaceae sp.
MKKQIPALKTEYEWLKECYFQCLQPSVLNLSQAFQNFFEGRAKYPSFKSKHHRQSVQFSQNVKVLSESALKFPGLLGRVAARIHRPSEEQLKTVTVSKLPDGKYFASLLVEDGTEKPESSGEGKAIGIDLGLTDFAIASDGSKYANPRHLKKHERNLKRKQRKLSRKNQGSQNPDPRQKRHDRDINAASNVRNEGLRILALGSGASALGGSVRPKGGRRKFTLSEARPDEQRSPRSTPTRLESAGGTRMHPALRSNERRDFTGIRIDRPYPPRFHPKHGYPSALACLLPSSAIAEQAFR

SEQ ID NO: 44150 - protein, 506 aa, Limnothrix sp.
MDATQLDLPLFATAVSVQPSNEMISLDKSSSCAIATPMPKSSKTSDRDSISSGKDCNPYWSDSCVAISSKLWLPVETDSADSDSSCSSSWFNKTVANSWFSTNLFTAQNPNSQRICSPSFTYSLVECPDSEATGRRSRKIRIFLNPDQKALLKQWFGVSRYVYNTTIKHLQEPGTKANWMAVAPIILGALPEWAKSVPYQIKKIAVKDACTAVREAKKGFKTDGQIRKCRFRSRKDRQQTIYIPKSAISKNGVYHTILGKAALRESIPDGFSDGRLTLAYGEYYLITSTEVQPIQSENQGRVVALDPGVRTFMTFFAESSYGWIGNDSNLLIQKLCFKLDRLISKITKAKSAQKRRFKKAADRLRSKVQHLVKELHHKTARFLTENFDVILLPSFESSQMVSKSRRKIKSKTVRQMLTLSHYQFKKHLEWKAWELGKIALTNINEAYTSKTVSWTGEIVKIGGSRVIKSKVDGRSMNRDLNGARGIFLRALVDTPWLRDHLNLCIC

SEQ ID NO: 44151 - protein, 286 aa, unknown
  TnpB Polypeptide
MDTAYQKFFKEHTGFPKFKKKNNNRKSYKTDYCNNNIEVSFEKNKIKLPKLKWIKAKVHRQFIGKIKAAYVSQNPSGKYYVSILVETGHTPLYSTRSIVGIDLGIKDLLITSDGEKFENIQITKKYADKLAKEQRKLSHKIKGSNNYNKQRIKVAKIYEKIHNVRIDNLHKISHKLICENQVIVSENLAVSNMIKNKNLSKSIQDCSWYELTRQLEYKTKWNNRQYIKVDRYFPSSQLCHVCGYQNSDTKDLTVRDWICPECGTHHDRDINAAINILNEGLRILNA

SEQ ID NO: 44152 - protein, 367 aa, unknown
  TnpB Polypeptide
MIAYKYKLYRTKRTKHLDKMLREACFVWNHALALQKRYYRLYRSYIGISKMKAHFVNRISRNLLHSQTVQEVLERLDTAYLRFFKHLTARPPKFRKAKDFTSFLFKQGGFKLDGNSVRINKISKTYRFSLSREYVGKVKTVTFKRSPLGEYYIVITTDGQSCSYGKTHNGASVGIDFGLKTYMTMSDGTLVQSPRYLKCDLPAIQKRGRSLSMSATKSNNRERRCKELNRAYESIVNRRTDWQWKIAHDLCRRYDNIFIEDLHLTGMTKLWGRKMSDLAHAEFVTKLEYVAGKYGVTVHKIDRFYPSSKSCTCGYVNRELSLKDRSWTCPVCGTKHNRDLLAANNILRQGIAELESGRKTTSRRKSA

SEQ ID NO: 44153 - protein, 341 aa, Thermoplasmatales sp.
MMWAYRFRIYPSNRQIYMLNSTLNLCRELYNAMLKQRIYAYRSGKKVNYKSQQDELPELKNTFLEYRNIHSQVLQDVARRLDKAFDNFYRRIMEKRNGKTIKAGFPRFKSMDRYSSITYTQSGFRIMDNGHVWFSKIGKIRTFIHRSVTGHIMTVSVKHDSAGDWFITITVEMDIRTDKPVDETTQNSQFQPVKPVGIDMGLKSIITASDGSQLEPPQFLRKSEKKLKKAQRNLSRKQKGSGKRSKVKTGVQKIHRKIQRQRDDFAHKLSRNLVKNHDLIAFEDLNIKGMVKNHHLAKSITDAGWNQIIQYTMYKAESAGTVVVLIDPKYTSQECSHCGNI

SEQ ID NO: 44154 - protein, 393 aa, unknown
  TnpB Polypeptide
MAMQTLTLKLPFLRLNANKATEFARLEAINTTIANRILAMPRQERRNLTTASFTDVEIGSAWMNQTIRNANARTKVKRFTSLPLETNNQNWTLHKTGDTYSLGFGLLRGVKKRVPLSVHTANHATVLEAILAGTAKKGSIKLWRSKRGIWYALLSVSMEVPDAGSGERWVGIDRGQRHIAVGATPEGRAQFWTERRIRHTRRHYTRLRKKLQAAGKHRAVKKIEQHESRIVRHINHCVAKEIVRWAKKHECGIRLEDLTGIRHAPQRKKAKSDAGLNRDTWPFFDLETKIGYKAAMASIAVERVPPAYTSKTCYTCGAIGNRNKEMFSCPRCGYRGHADHNAARNIGSLTGAVCHLPFEMGGGGLHDTAPNLVRNRSGGQPSLGEQEQESHWL

SEQ ID NO: 44155 - protein, 222 aa, unknown
  TnpB Polypeptide
MQEMKPSEPMRDTTVGIDLGIKSLAVCSDGRTFANPKNLQRSLDRLKLLQKRLSRKQKGSANRNKARIRVARLQEHIANSRKDSLHKITHALTHDSQVRTICMEDLNVKGMQRNHHLAQAVGDASFGMFLTLLEYKCSWYGVNLIKIDRFAPSSKTCGKCGHVYKGLNLSERSWTCPECGTHHDRDFNAACNIKEFGLKALPRSVGKSSLWTVLLWMTDLVS

SEQ ID NO: 44156 - protein, 451 aa, unknown
  TnpB Polypeptide
MKRTNTFAVRPLSDDGEQVLRDLLDASAALWNEINYQRLMRYDDEDGFEGEDVWDADTGALEGKYKGVLGASTAQTVRRANTEAWRGFFENKKKFHDQSNTSVTEHPEPPGFRGNEDDGRVLKGVVRKDAYTVEWGDRSRLEIVVGDQLRDRHNSPKSRLRLEIVGDPNWPDYEDQSRLELWYDETDNTFRASQPVTVSDDARATPLADETAALDIGANNLVACTTTTGEQYLYESRALFQRFRDTTREIARLQSKLEDGRYSSERIRRLYRKRTRRRDHAQEALCRDLLERLYAEGVDTVYIGRLTDVLETHWSVETNAKTHNFWAFKQFTERLACTAEEYGISVEVRSEAWTSQECLQCGSTDRTTRHQDTLTCPCGFEGHADLIASETFLRRHTEQSVRPMARPVRFEWDDHEWSGTPHPHESPKEQRTDPSTVHHNGNVASGESEIG

SEQ ID NO: 44157 - protein, 429 aa, unknown
  TnpB Polypeptide
MAGNIKNTAASVHQRLLHKAKKSYRPFNELLQRFAIERFIYLRASETLAFRPGMRSPILFPLTGKSLMSILDIMKLIAQVKLIPAAEQHAALLETIKQANAACDAISNTAWDEKKFRQYDLHKLTYHQVKADSGLTAQVVVRCISKVSDAYKLDRKTQRTFRPLGSIAYDDRILRWYPNHVSIWTITGRQKIPFVCGERQAAMLLNRQGETDLVYRKDNFYLLAVCNVEEPDPKDIDGFLGIDMGVCNIATTSDGEILSGGTIKGIRYRHRSLRQKLQKKDTRAAKRRLKKLSGQERRFATDINHCLSKRIVAIAEGTGRGIALEDLKHIRTRITARSSQRATLHSWAFGQLRTFISYKAMLAGVPVVAVDPRNTSRECPGCGCIAKQNRPSQSQFRCTSCGLLGHADVIAAVNVSGRALVNVPHVACN

SEQ ID NO: 44158 - protein, 290 aa, Geobacillus sp.
VNQTIREVKSQKKNQKAKTFQKRWCCFHNQNLKIEKKGDFYTVAFPTLEKKIGVPVVVRPYQQTWLDRIIDGTAKQGTATLYKKKKKWYVAIPITFEVKRRKETKVMGIDLGLRYIAVASVGTKSLFFKGNPCAFIRRRYAALRRRLGKAKKLHMIRKIGDKESRWMKDMNHKISRQIVRFALANGVGVIRMEDLAGIWKRAASAKEAGRSLHSWAFHQLQTMIAYKAEMAGIRVEWVNPTYTSQTCRCGHREKANRNGTHFQCQKCGYTIHADLNGAINIAKAISGFAA

SEQ ID NO: 44159 - protein, 252 aa, Geobacillus sp.
MGQEYRHTKTTVSLIHDHFAFCPRYQRKVLVGQVESRFKELVSEICAQNDWLIIAMEVMPDHVHLFLNCLILSRRKPGGKNREKARLKVARLHEKICNARLDFLHKLSTRLIRENQVICLEDLRVQNMQQNHKLAKSIADASWSEFRRQLEYKAAWYGRQAVIVSPTFPSSQLCSRCRHRNPETKDLSVRQWTCPLCGDTHDRDVNAARNILREGLRILSAQADSTVGHTGIAWCRKAELPVAGVLPRIPRF

SEQ ID NO: 44160 - protein, 395 aa, Acidaminococcus sp.
MNPTLITDNKFSNQTLSSKQDDKKPFYRGYKYRIYPNKAQQKLIEQTINGCFAVYNYFLEVRERLWEKQRQRLTYTQMAGRLSALKKTSRFSFLKEADSMALQEVLRDLDTAFENFLRKRANYPRVKGKRGSKQKYRTRNQNHCIRIVDGKLRLPRLGLMRIKLHRSFEGRICFATIQKTATGKYFVSLCVEQERELLQRSNRGGEVGIDVGLEDFYTDSNGDSTANPHILKKYQKQIAREQSRLSRTTINSRNWKKRYQRLARIHEKITNARKDFLHKQSIQLVRENELIAVEYLKIKNMMTLHTLAKAIADVSWREFFWQLEYKGAMHGTKIIKIPTYFPSSQICHVCGYINYKVKNLSIRNWTCPHCHTENLDRDTNAAINILARAKKFLKN

SEQ ID NO: 44161 - protein, 278 aa, Vulcanisaeta sp.
VDALHERKGAFIHDGKLVLRLNKKVEVPIPKRALDWLNKRFAENPDKKTVRVFERGGKLVAQIILHKKNVVALPNNPLLVVVDLNSSHGIVVHYWDGGLIKTEKYKPPNRSAAWHNVKHLMKLRDVLYNQGCITQQQINKYSAIIRETLSGSMKSWIQQTVDKIVRRVRRIAKRHGKEPLVMIDVPDDESLRGTSLQRTLLSFAKYFENILSWYGIYFEEARLYSTVCPRCGEKLDLKMKTRNLRLMTCKKCGFEEERDKVPLYWALNKLLALKGEAF

SEQ ID NO: 44162 - protein, 329 aa, unknown
  TnpB Polypeptide
VIVQKSYKFRIEPTCEQEQSFVHFAGCRRWVWNWALSRKRDVYKATGRGIYAKALCQELTALRCHFSWLKDCQAQLLQQTLRDLDKAFEAFFEQRSRFPKFKSRKRSPHAFRFPQFARIEDGFVVLPKIGRVRARLHRPAEGTLKSATIKQESDGHWYVVFVSHVEIPNAAPAYDQPCGLDLGLETFLTLDNGTKINPPKFYRKGQRKLKRLQRQHSRCQKTSRNGVKAKARVSRQHHRTASRRNDFLHKLSRELVAQYGTLCVEDLNVSALVNAHRLRLPLCLAFMSRLLRRPSTLFRQTPNSCASSLEPSPCEYRRQIESLSLSLRI

SEQ ID NO: 44163 - protein, 454 aa, unknown
  TnpB Polypeptide
MLTGISQKCFPDPALANTLSQWIGCARFIYNAKCDEDRYLRAFAQKYLPIQTYAPIDKQYSQYKSELSPWLKECPSQLLRNSATIWHKAYIDFLKGKSARPHRKNKASGNYIWVTSELFRIHWESATCVVELGTIKNPAGSMRVKWNKSRIPKILPKSIWIKKNHAGWKLSFSYEDGNLIDQDNNDQHLKHLSSLSADELESLITPIDRGIARPIQTDKASFDLDVKAKNRLTYREKYLKRYQRKLARQIKGSNQRKNTLHAIARLKECDTNLKNDFWHKTTHAIATSAKVVVMEDLKLKNMTRRPKPKQDANGKWLKNGAKAKAGLNKALLNLGLYKFEVYLSYKMAKLNKPIFKVSPYQTSQECAHCGYIHPENRKTQSDFECLNCGHADNADHNAAIVIRKRAMDLMLNSGTELVGTQKNVLRLRANHNRSKTVKSQDFAANDGLLKKKVA

SEQ ID NO: 44164 - protein, 488 aa, unknown
  TnpB Polypeptide
MTESYVLTLKLNTSPEQDRWLEHAFWCGQQIYNVLVRHCRKQIRKLIQDPEYRELLAVHRKDDLSKKDKNRINQELADIRRGYGLSEYQLHAYVSLQQHRYQKYVDSLTAQKIASSVWRSVEKYLFDNGKCVHFRKYDEFESMEGKKNTSGMRFKDGRLHWRGQVIQPQIRTDYDRKALKSRVKYCRIQRKPVGTKYHYYLQLVLEGKPPVKHPVGHGTAGLDIGTSTAAIVTDDSCKLAVLGSDAKDHSAQIRRIQRAMDRSRRATNPDNYLLDGTVCKGAQKWIRSKHYKRLQFRKKSLERRHADAINTCHHRLANEITSKADIVYVEKMSFRGLARKAKSATKKADGRFRSRKRFGKSIKNHAPAAFLTILGNRLASGGGELIKVDTVSFRASQYNHVTDDYVRKKLSCRGNFVGGHYAQRDLYSAFLLKNSNDTGTAADRQKCIDTFPMFLITHNACMDALLAENKKYPSSFGLRSYECHKCNH

SEQ ID NO: 44165 - protein, 417 aa, unknown
  TnpB Polypeptide
VLDSTKLKIKESLQATREKRKLQICKVFELKIDESHLSKKEINQLKMYFIEAKWLYNFILSEGKPFDYDYKRNPIKKLDNNGNLIDVYLEYLPPRFKQTTLSGLKNNIIKLSKCKKSGRRVGELKFKSKYNSIDMNENLITHYISGNDRFKILGIKRHLKVKGLQQITSEMEIANAKLLQKPDGFYIKLITFQYQKIEIKQKEKKHSVGLDFGIQRNITTSDNEFMNVSVMESKRLKYLQRRFAKTKKGSNNRYKLQKLIQIEYQKITNQKKDRANKIVHYLLSNYNTIVMQDENLRGWQKGWFGKQVQHSAMGTIKAKLKLSNQVIIIDKWFPTTKLCLNCGCIKDNNILSERIFTCECGYSEDRDIKSAKTILKIGLIKDIGTEHIEFKPVEKIEDFKETYVDLKHFSSKQEALS

SEQ ID NO: 44166 - protein, 258 aa, Streptomyces sp.
VSIWTVAGRLKNVRFACSPDALKMLREHRKGESDLIERDGVFYLLSVCDVPEKPVNENPAGFVGVDLGIVNIATTSTGYRAAGRGLNRHRERQLALRKKLQSKGTKSAKRLLKKRSRKEARHATNVNHIISKHIVTTAERTGSGIALEDLTGIRSRVRLRKDQRTSLHSWSFQQLGQCIEYKARRAGVPLVYVDPAYTSRQCSECGHIDRGNRQSQATFACRSCGALMHADDNASHNIGRKGETVWTAGRESRVPATP

SEQ ID NO: 44167 - protein, 358 aa, Bifidobacterium sp.
MSDYEAVRIPLDPTPAQERMFRMYAGAARFAYNAALQHMKEQLEQRKAQVDAGVDRKDLVKVDNTVITLGYWWRANRDMLAPWWPEIASQVYNCAFDNLGKAAGNFLKSLSGKRQGGLVGFPRFKPRGAAKTFAYSTVTIPDAHGVKLPRIGRVHTLRNVERLVAGRTVKTTTVRCEAGRWYASILCETPRPSPAVNTSPEVWCVFGLDDYIALSDGTRIDNPRPYRQALDRLRKVSRDLSRKTHGSGRYMEQQRKVARIHARVKALRNTMLHEASKRLAEQYGTIHIQQVNLARGMKHHVLAQSLADAAFAEFTRQLEYKTVKTGASVHVHEPMIVERHVDGMVLARQLASGPSSDA

SEQ ID NO: 44168 - protein, 597 aa, unknown
  TnpB Polypeptide
MKWKNHAGFLDVTQPSSTVSHSLLSDDGLILAEFQSGERLAISDSIKLVPENLSMTADQITSMSEFLVTNKKTILKDKRLFFLNSSRSTKSSEMLGQASTIKDGDLSPFWNKSKKILSEKLWLPQKIDYVDLDLSSSNGSVQTMGPRSWFSSKMTLPPKKNSLQNCWTSSRFFAVDETENEDTVKTKKVRIYPTPRQKKILATWAHHNRYTYNMTIEKFNNGENMSKTALRDILVTAKNLPDSKKWLLSTPKVIRQQAVFRAKSNIQSAFTNLKNGTIKYFKFHKKKTSLWTMGIEKQINFNTKGEAELFKGEPYKFGKIKTRDKIFRHDKLYLPSSPVELNSKGVLVPKHDCYISKDRYNRYYLLLPIRVKAGLQCKTKKIVSIDPGLRKFMALYSPDGECGYLGINCRDKLWTLLQKLDHYNKLYDYHETTNKARKRLRKKRNAIYRKLGDLKRELHDKTINYLTAKYDHIVLGKLDVGDIVRKEKRVLRTKEVRSIYNLAHYQFRIKLAKKCKAIGKVLHVANESWTSKTCTGCGSIDRWLGGSECYNCKYCGTTIDRDLNGARNILIKTMGELTVRRHESSGSQFTFHSNNEI

SEQ ID NO: 44169 - protein, 393 aa, unknown
  TnpB Polypeptide
MRCRTYRFRLHPTSRQCVALERELRLQREIYNAALEERIGAWRKGRSVTYVDQCRELTQLRDDRPDVLACGVTLCRGTLKRLDRAYAAFFRRVKRGETPGFPRFQGAGRFTSLAWEDTSGWKVKYAGRRLRLLGIGEVKVNFHRPLRGTPKAITVKREGKKWWLSVRCGDVPAAPLPATGCNVGIDLGVANLVALSTGERVVGPRFAQRVQGRLTLAQQELARCQRNSVRRVRQREVVASLHRKVANQRSDAAHQLSRRLVNEYDLIVLEDLKVAQMSRRPKPKSDPMQPGAFLANGAAAKAGLNRSILDAGWGSLAALLSYKAEEAGRTVVLVSPHYTSQTCAECGHVDAGNRVSQAVFRCLLCGHGAHADVNAACNILRAGRAQRALVRAG

SEQ ID NO: 44170 - protein, 241 aa, Kurthia sp.
VKTNRVNYEESRKFMSGYDFSKWLNNIHTKENQQDLWIKSVSSKAVKQSIMNAERAYKNFFKGLSKHPCFKKKARQDVKAYFPKNNQTDFEVKRHQIKVPTLGWVTLKAYGYLPKDAVIKSGTVSQKADRFYISVLCEVPDCIKQTPESEGIGIDLGINDFAMMSNGKVYENINKTDKVRKLEKRLKQAQRKFSRSYEQNKDKKVGENCYFNNRQKQICRVQKLHQRLAKLHNMNYWCLFK

SEQ ID NO: 44171 - protein, 336 aa, unknown
  TnpB Polypeptide
MRDKQSSRNTNREKKVSQESFPTRQPYTVRPVLVSCYGFKVKNGGLEIPIARGKRLSLPLTKHTLDMISQPGVEVRSFTLTRSRLCLCITRDVARLECASTVGLDRNLRNLTVGNDEETQHYDLSETVRIAKTTVRIVASFKRNDARTRRTVASKYGERRTARTGHLLHTATKSIVERAVQRREAIVLEDIRGIRSLYRRGNGQGQRYRGRMNRWSFSEAQRQMEYKARWVGLPIIRLSRAETRGSSTTCPKCGERLQSDKRLARKLCCERCRIVMDRDMVAAINLSRRGRVRFARSRPPILPEAQGGAAEAMKGNPTPTVIPGVDAPKLTQPTKS

SEQ ID NO: 44172 - protein, 462 aa, Lachnospiraceae sp.
MSKQILDDIKQFSYEICQKHKVIIRYMETNKDHIHYMIETEPTMSISKIVNLMKSYTTYHIWKRYPDYLRKHFWKEHTFWTDGYFVCSVGRWRQWVLKAYKYRIYPNSEQRIQIAKTFGCCRFVYNQTLAYRKEIYEKEKRPVSKTDCNNYCNRELKKDYEWLKEIDKFALTNAIYNMDAAYQKFFKEHAGYPKFKSKHDNHKSYTTNFTNGNVAVDFETGKIKLPKLKAVKARLHREYSGKIKSATVSQVSSGKYYVSILVETEHKELAHTNHNIGIDLGIKDLCITSEGKVYENLKIIKKYEKQLVKLQRQLSHKGKRSKNYYKTKKKIALCHEKIRNIRKDYLHKVSHEIISENQVIVSENLQIKNMVKNHHLAKAISDVSWYELTRQLEYKAKWNGRKYIKIDTFYASSQLCSVCGYQNPDTKDLSVRTWICPKCGAEHDRDINAAKNILAEGLRQIA

SEQ ID NO: 44173 - protein, 391 aa, unknown
  TnpB Polypeptide
MLMTTFKVILHPNKVQESRFRQFAGASRFAYNWAIGRRKYLYEDFGQSISVYDLRKEFTQLKCEEEYFWLNTISNNVLKQAIKDADRAYQNFFRQTHKFPRFKSKKKSTPSFYIDPCVISFTDTHVIMEKISLSKKQKDRHLNYIKLAEKDRIPRSGVKYYNPRVKFDGINWYITVSCEALPEDKINNNEGIGIDLGIKKLAVCSDGVTYNNINKSAKVKKLEKKKTRIQRKVSRKYEMNKDGEKYHKTNNIKKEERRLLIINRKLKNLRTNYLHQTTFDIMKRNPSFVVLEDLAVSGMMKNKHLAKSIQDSMFREFRRQIEYKCLYYGSELIIANRRFPSSKKCCVCGNIKHNLSLSERTYVCSKCSNNIDRDFQASVNLRNYGKAILYT

SEQ ID NO: 44174 - protein, 418 aa, unknown
  TnpB Polypeptide
MLLSHRTSVNIRLEYSNIIGHMCYAASKLWNACNYERRRYKELGLEKYPDWYYQKKAHKGDLWYRQLPSQTAQETCKQLDKAWKSFYVLKKTDGIKDPNPPRFKQDNIPITYMQMGIRHEKGSDQLRLSLSKDLKSYIEEAYGIHEKFLYLENKIFRNMDHIKQLRIYPPEHGKCDLIVIYEIKEPEPLSLNGHYLSIDLGIHNLMTCYDSGNGRSFILGRKYLSLERYFHKEISRVQSIWYAQQVENGIKYPRSSKHIKRLYRKKQNAVKDYLHKVTRWLAEYCRKEEINCVIIGDIRNIRKGKDIGHKTNQKFHGLPYNKLYIMLEYKLKLYGISLTKQEESYTSQCSPFSPEISKRYAEASNRKERGMYITDGVRYNADAVGAFNILRKYLSVSGKQKELSVTGLKNPEIIKVAV

SEQ ID NO: 44175 - protein, 581 aa, unknown
  TnpB Polypeptide
MHERQIARRPREWGCDAVTVPLRPVAAPFVAAAPAGARVRARLRLSPEDEAVLRAVGRHLGSLAGQDLAVRCAEGRLDARGEAASRAARKKALTAESSSRWAGAITRTSEDQHRLAEQNLRAERASLQARIRRIEARLTVPAADRSGRVRGYAPPSERHAKAIRLRALKARLARAERRLEAGAVSVVRGGKALLRTRNNLAAAGLTEAGWRREWEAARLFLTADGEKDKAWGNETIRWHPGEGWLEIRLPAPLAHLANRPHGRYRLSCPVGFTYRGGEVAGQAASGAVRYDISWDPARGRWYLDASWKAAPAPAVPLEELRQHSVVAVDVNHGHLAAAVVAPDGNILGAPVTIPLDLAGRPAATRDGRLRAAITTLITIAEEHAARAIVIEDLDFAGARSTGRERAGTRPSRGKRGRAFRRAVLGIPTGKLRDRLVQMAANAGLYVIVTDPAYTSRWGAQHWLAPLREHHAEATGHHAAAAVIGRRGLGHRARRRANGNRTAPEDAARPARVRTRTTPARGPAPRKPGAPRDPRQPSGAKTGRPHRITAGNQAAHDRSGPPARRDYVLPNVSRNGEPVPPA

SEQ ID NO: 44176 - protein, 373 aa, unknown
  TnpB Polypeptide
LIKTYKVRLEPNKEQEQKMWQSAGTARWAYNWTLGVQQENRQNGGKFIQDGELRKSLTKLKKTEEFCWLKKYSNNITKQAVKDACKAYKSFFNGNSKFPKFKSKKKSRTSFYQDTSNIKINETHARLEKIGWVRLSETNRIPQGRYFNPRVTHDGIHWFISVGVEEFPVYPELTNESIGIDVGIKSLAVVSNGMIFKNINKSGKVKKIKKRLRRLQRKCSRKYYKNGKGVSYEKTSNIIKLEKSILKIHHKLKDIKTDYIHKTTSEIVKTKPSRVVMEDLNITGMMKNKYLSKAIQEQSLYEFHRQMQYKCEWNGIEFVVADRFFPSSKLCSECGYIHRELKLSDRTYICPACGNKIDRDYQASLNLSKYESA

SEQ ID NO: 44177 - protein, 376 aa, Desmospora sp.
MHKAFQFRLYPTKEQAILINKSIGCSRFTFNHFLAKWNESYESTGKGLTYASCSTQLTQLKKERDWLREVDSTSLQNALKHLADSFSRFFRKQNDRPRFKSKRNRVQSYTSQCNHPKKGKPTIEIVANRMKIPKLGWVKFAKSREVEGRILSATIRRNPTGKYFVSVLCEIHQCPYVPVAKEKAVGVDLGLKDFAILTDGTKVKPSRFFRRYEKKLAKAQRIMSRRIKGGSNWHRARIKVARLHEKIVNARHDFLHKLSSKLIRENQTICIEDLQVKHMVKNHKLAKSITDASWSEFVAMLTYKAAWHGRNVVKVGKQFPSSQLCSSCGYRNKNVKNLNLRAWTCPTCGSHHDRDINASKNILQEGLRVLAVGQTV

SEQ ID NO: 44178 - protein, 385 aa, Desmospora sp.
MLRAFKTELHPTPEQCSKIAQTIGVCRFLYNRFLAMNFERHQAGKPFMSGYDFDKYVNHELSKTLPWIKQTCGSKARKKAIMNAQNAFNRFFHGHSRRPRLKKKQRQETGAYFPKNNKGDLLVERHRIKIPTLGWTRLKEYGYIPTNAKVVSCTLTKKADRYYISVLVEVEETSIDVQPNGLGIGVDLGIKGFAFTSEGKTFRNINQSSTVKQCERRLKRAQRALSRKYEAKKRGEKPATEGGSNIRKNILRVQKLHQRLANKRKAYRAWVVSQLVKTKPASITIEHLNVRGMMRNRHLAKAIAAQGFYDFKQKLIQACQKRKIQLREVALFYPSSKLCSCCGAKKVTLSLSERIFHCDHCGYEGDRDVNAAMNLAQAREYAVLT

SEQ ID NO: 44179 - protein, 422 aa, unknown
  TnpB Polypeptide
MSEEKNLKIKGSLHATKERRSNMDCRVFSVKVQENRLSRAKEEKLNRCFLEAKWLRNAVVATENLSLEDTSSVQVKVKGEFETREISNLSSQMKQSVVDGIKTDVCNLSKAKKAGLKVGRLQYKHECNEINLKQFGNTYKIKGKNKISVQNIGVLVVNGLEQINLDEVEFANAKLIKKPSGYYIHLTVYTKKQSEVQTEKEVLGLDMGIKDQLIFSNGVKVNFYLEESEQLKGLARKLSRQVKGSNQYKQTLARIKRIYEHLNNKKKDVVNKLDSILSKNYIICFQDELLRQWKQKKSKRRFSFGRKVQHGILGRVKDKLKKNSTNVMLESSVPTTQTCPVCGCLTKHGLDKRVYRCEQCGFENSNRDVHSANMMVLLSGYGTYRSLNTDAVSTEKMISLLDNLSDLSVVVSSTNSMEANCL

SEQ ID NO: 44180 - protein, 292 aa, Microcystis sp.
FKSKHGRQSISYPANVKFEGDYLKLPGKVGLVYCVRHREFEGTIKTVTISKTPDGKYYASILVDDELELPETSKDGKGIGIDLGLTHFAITSNGSKYENPRHLAKHQRNLKRKQQKLSRKKKGSNNRQKARRKVAKVHSKISRCREDFLHKLSRKIVNENQVIAVENLNVKGMVRNHNLAKAISDCGWGMFCTMLKYKAEWEGKTYIEVDRFFPSSKTCNVCLNQVASLPLDVRTWTCEHCKTTHDRDINAAINIKNEALRILSLGTSDTAYRGDVRPKVGRKSVLRQSPVK

SEQ ID NO: 44181 - protein, 298 aa, unknown
  TnpB Polypeptide
MVFYLPFFHPFYFILAHLILQFFVNRTKSRIEFIRFSNGPIKYPRNTYSVDVPYFTREFIFNKLTYIKTVTIKRDGVGSIFLFVTTDVEEQFKNISATRKTAGFDFGLKTFLTGSDETEFQSPLFYKKSLSRRRVLSRELSRKRRGSSNHRRARIALAKTDIKIVDKRRDWMFKLARELCAQYSMISLETLSLREMISRWGRKVLDIAYAEFLKILKYVAVRFRTVIVFIDKWFPSTKLCSECGAVNDSLSLRDRTWKCTGCGALHNRDLNAAININREGASSLRKEGLRLRTEASPV

SEQ ID NO: 44182 - protein, 466 aa, Streptomyces sp.
MGDVAEKPEAVRGGTARTIKRETLGIGDRSKHHARKATPLKGHVKRADTHHRLYRFRFYPTEQQAEQLGRTFGACRWVYNEGLALRAGAWERHRVSVGFAETCRALTGWKRNAETAWLKDVSSTVLQQSLRHLDQAYSRFFKGSGGRPRRKRKGRSPDTAVYVRTGFRWMEDPDRPGTGTVTLAKQSRPLDIRWSRALPAGVVPVRLAVTRDRAGRYFLSALVDERMAPLPAAFVRGSRAPKATGVDVGLASLVTLDDGTRFDHPRLLRRYAEKLARLQRELHNKVRGSRNRGKAKQKIARVHGLLADKRKDMLDKLTTRLVRENQVLVVEDLSVMTLLRAARGRGRRRKARLNQAIADASWGELLRQLRYKCGWYGRTLVIVDRFFPSTRRCSACHAMGPRMDVSVREWTCPACGALLDRDVNAAANLRDEGMRLYWLMAASLPPGRKAPAVIKASEFEECPPAA

SEQ ID NO: 44183 - protein, 472 aa, Micromonospora sp.
VKVTRIAYSTGLNAGKYAALAEQARRLGRVRSEVWQRYGSVAGVGSGLTDRQVRDRWLADGTHTRFGVLANAWKETVRDAMADIAANLASAKVEVRRAITRRTTDPVERKRMFTALKADRWAVDPFLARQMRTHWKRGRNRTHDQIVVRADKYNTVVDRRGRLWLAVPGLERRQMVRIPLSSTVAPTGTLRLMLRGGRVEVHYQIDASQMRSSQRPCGDRTVGVDKGYTEAVTDSDGGRHGTRLGQLLSSESDQLKERNRRRAKLRSIANTAARRGDHAKAHRIRANNLGTVKRERQAARHRARVRTEIFTAVHRAVDKAATVVAEDLTKSFAGRTTLGRNVNRRLAAWTKGVTAEALTNVSERRGSVLVHVNAAYTSQACHRCGRLGRRSGDRLHCTSCGVVWQADVNAAINILQRAGDPDIALHTPHHAVRQILQDRTDRHRTRLPVQDSSPATAERRANHPNRSAMSNN

SEQ ID NO: 44184 - protein, 422 aa, unknown
  TnpB Polypeptide
LKLVEKHIIKPGHKDYQELDHLLFLSKNLYNKALYEVRQYYFQAKDDSSVKYKYLNYYALDKLLKERDDVDYRALLINASQEVLKIVNQNFCSFFKLLSMKRERISSYPNKVQIPKYLDKVKGRQTLTYNFQFLQSKLFKETGIIQFPKTNIKFKPLHPESLKQVRIVPKNGYIVIEEIYERKEKDILGNNNQYLSIDLGINNLATCSSNVIEPFIIDGRKVKSINQFYNKHKAELQNSLRGNKRTSKRIKHLTNKRNFKILNYLHKASKFIVNQAVSHSLNTIVIGYNKGWKQETNLGKKTNQNFVQIPFEKLVQLISYKAKLQGIQVFLQEESYTSQVSFLEGDYIPTFKKDDSKKNPSGKRIKRGLYSSPKGLLNADINGSLNILRKFLASNNKDFNSPVGKSHVDWPVRIKNPQRIKL

SEQ ID NO: 44185 - protein, 469 aa, unknown
  TnpB Polypeptide
VVAFAVELGQFGLEVRADVPHDLFEAFQVLRGEHRMPVFGHENQMRVQDEHAVPASAYVPVAVHETNYTEGVRLRYNYRLYPAPGQRSALARAFGCARVVFNDGLRARQDAYAAGLPYITDAELSARLTAAKATPERVWLGEVSAVVLQQAQADLNTAYRNFFASITGKRKGPEIAPPRFRSRKDRRQAIRFTRNARFTITAGGRLRLPKIGDVPVRWSRDLPSEPSSVTVIMDAAGRYFASFVVEAGDEPLSEVGAEVGIDLGLTHFAVLPDGRKVANPRFLRRAERKLRKAQQALSRKVKGSSNRAKARIKVARVHARVADTRRDWLHKESTRVIRDSQAVYVEDLCVSGLGRTRLARSVHDAGWSAFTSMLEYKARKHGRTFARIDRFEPTSQVCSACGVKDGPKPLGVRQWACAACGTVHDRDVNAARNILAAGRADRLNACGGDVRPGLALAVAGEAGSLRGAV

SEQ ID NO: 44186 - protein, 416 aa, Trichormus sp.
MIIYEFKVKGKDRQYRAIDEAIRTCQFIQNKCLRHWMDNQGVTKYDLNKYCAILASDFPFAGELNSMARQSAAERSWSAIARFYDNCKKKVKGKKGFPKFKKNCRSVEYKTSGWQLSLNRKAITFSDKKDIGTLKLKGTYDLNFYDIKQIKRVRLVRRADGYYAQFAIDEAARWAGSPTCSDCRVKVRIESKLTNQIVGLDVGLKYFIADSKGNVEPAPKFYRKSEKQLNRANRQKSKKFSQDKKKARQPQSKNYLKAKNRYARKHLRVSRQRKEYCKRLAYSVIQSNDLVAYEDLNIKGMVRNRHLAKSISDAGWSTFRQWLEYFGYKYGKVTVAVPAHNTSQNCSNCGQKVQKSLSTRTHVCNHCGFTEDRDINASINILKLGLSTVGHTGTYATGDLPSWAIGEAARSWGSPP

SEQ ID NO: 44187 - protein, 307 aa, unknown
  TnpB Polypeptide
MKEHLTKLKRTQRFAYIRQLGSQAVQDIAERIDRAYNLFWANLKRKVKTSPPKFKAIRKYRSYTLKQAGWKLDEQQGRIRLGKKWYGYFQSRGIEGKVKTVTVKRDAVGDIYVYLVCDIQCVPVATRTGKSVGFDFGLKKFLTGSDGNDIVSPDFFMQNAKRIKAKSSKVSRKQKVSHNRKRARLELARVYRKLENQRHDFHFKLARRLCEEYACICLETLNLKGMARLWGRKIHSLGFSEFVKILEYEATKFGTQIIFVPQFYPSSQVCHVCGYKNEAVKNLKVREWKCPSCQTHHDRDRNAAMIK

SEQ ID NO: 44188 - protein, 290 aa, unknown
  TnpB Polypeptide
MLLAHQIRLDPTNTQRTFFAQCVGVSRFAYNWALDEWTSQYAAGEKPHEVPLRQLLNGMKGEQFPWMLDVPKTVPQQAIKNLGTAFQRFFTKLGAYPKRKKKFQQDSARLDNGPVKKGANRRKAAKRRAKAHQRVANIRADFSHKLTTDLSQRFETIVIEDLHVKGMVKNHHLARAISDMGFYEFRRQLSYKVPREGGQLVIAPRFYPSSKTCSGCGHKLDELPLSVREWPCPSCGVVHDRDHNAALNLKSLAGSSPVSACGVESAGPRQVVRVKLSTSKQEANTFVPQG

SEQ ID NO: 44189 - protein, 370 aa, unknown
  TnpB Polypeptide
MRKSYKYKLQNQSNVIKIGNMLDDMHAIHVHFMLLQRRYYRMFGKNISYTRMSSHLTKLKRTTKPHWNELPSQVSQNVVKRIGDAYNSFLTNIKERKEGITTRKVGRPHIKPQHKYNSMTFTQAGYEIEDNRIKINCIETWYAFHKHREMKGEIKTITIKRDRCGDYWICFSCDNVDDSEPFAKTGKRAGFDFGLKTFLTSSDGNKINSPQFLKKSLNKLRSLNKAFSRKVRGSGNWYRVLRAVCRHYRDISNRRLDWHWKLATHLCREYDALVFENLNIDGMKRLWGRKVSDLSFAKFLLIMEQKCAKHGKTFKQVGKWTATTQPCSDCGYKNKDLSLLDRQWICSECKTHHDRDINAAMNIKQAGLAA

SEQ ID NO: 44190 - protein, 296 aa, Clostridioides sp.
  misc_feature (134)..(135): Xaa can be any naturally occurring amino acid
  misc_feature (239)..(295): Xaa can be any naturally occurring amino acid
MYPNKKQQELINKTFGCCRFVYNKYLAKRIEVYKNDKETFTYKQCSSDLTNLKKELKWLKEPDKFSLQNALKDLDNAYKKFFKEKAGFPKFKSKKTNRFSYKTNFTNGNIMYFSQHIKLPKLGMVKIRDKQVPXXFENTNNQIGLDLGIKEFCISSCGDFIENPKYLKKSLNKLAKLQSELSRKTIGSLNRNKARLKVARLQEHIANQRKDFLQKLSTKLIKENDIICIEDLQVKNMIXXXXXXXXXXXXXXXXXXXXXXXXXXXXXXXXXXXXXXXXXXXXXXXXXXXXXXXXXW

SEQ ID NO: 44191 - protein, 413 aa, Moorea sp.
MEFKAILKDSQKVAIGEAIRTAKFVRNKVLRYWMDNRGIGKKELYRYNTQLRDEFEFVKDLNSHACQASVENVERAIKRFFDNCKNKVPGNIGYPRFKKHSRSVEYKQSGWKLSPDKKSIKFTDKKGIGQVKLKGTWDLWRFESKLIKRVRIIQRADGFYVQFCVKTDNKEQLEATGFTVGLDVGLKEFYTDSDGYAEPNPRFYRKGEKRLKFYQRRVSRKKKGSTNRKKAINRLGRTHLKISRQREEHAKRLARCVIRSNDLVAYEDLRVKNLVKNHCLAKSINDAGWYQFRKWLEYFGQKFGRVTVAVNPAYTSQNCSDCGEVVKKSLSTRTHICKCGCQLDRDHNAARNILTRALGTVGHTGTFLNAWGDLSSTLPGSVRVRAASPTAKASPTANLVEQDGSTIQESPGL

SEQ ID NO: 44192 - protein, 379 aa, Acidilobales sp.
MSGGGNPRGVSVRDPDPLQSFRELVEKRKKSSKRAVRLRLLPEKHEEKILFDIGLTCVRLWNELNYEKRQLFFKDDLTPEKRAEINRKYYHKCKKILGVNAGQIINKNEEAWDSFFELLKLKRQDRLPPHIRKISPPGYWKDRLTGKKKIHILIRNDRYYLETVNKGEGRLVLKDFKLSIRYVGRIKWEGRQGRLEIIYEAGRWFAYIPIEVGVDPPKSNPKGYIKPSYKDKKNRISNPRSIKQKDPVGDKKAFIDIGLNNLFAVVISDGSALLVKGGSIKSEYYWWKREISTYQAVRDLLKNAGFLTWIKYHEKLLRALYKRSERLRHLYRTAIRFLAETLWSRGVKKIYVGYPIMLSQNNGNEYNTNIWWYRRIYYG

SEQ ID NO: 44193 - protein, 394 aa, unknown
  TnpB Polypeptide
MKRRWTFRAYPTPAQSEHLAQTFGCCRLVYNGMLAARTAAFQRGERLTYTGTSARLTQLKKDPELAFLNEVSYCPMQQSLRHLQTAFENFFAKRSAYPTFKKKGRVRDCAEYTRKALTFDITTQRLTLAKLGVLALRISRRVDVGPSTVTVSRHPSGRYYVSMVVDIKAPPARAKTGLSVGIDFGVSRLTTLSNGETIPNPTHLFRRTALLVRAQRRLARKTKGSNRRAEQARRVARLHEKIADARRDSLHKLSTMLARRFDTIYVEDLHLRGLVQNHNLARSLSDASIGTAIRMIEAKAETVVKIDRFFPSSKTCSSCGHLLDALPLSVRQWTCPQCGTEHDRDVNAARNILAVGQTVTARGGGVRASRTTVRKASRRRNVNHSRIKHAHVSS

SEQ ID NO: 44194 - protein, 441 aa, Acidianus sp.
VLKTLKRTVRVESDFLNEWKYRVLREVEEYQKKIVNEMIEIILSEALPTTRKKLHERFYNHYKEKYPFLPSRVIEGAYIVAGRIVKSFRERRKKGLTRKDKPEYKRVVITIPNMVNWRFNRISVSVVTHKGWVEIPLKFTKQFTRYVYEGWRVSQELKLRLIGRKVLVWLTFEKEVEVESKEGNYISIDVNENNVTLAVFEGFKLKELRRYETGLGRIVMNYSLRREEITKGHSTKDELVKKKLRKLREKERKIDVLRKTVKRITELARDLKAKVVVGKFSSRSKEKMESNKNDKLRHRIHQWSVVKFVDMLKTQPIEVAEVSESYTSSINPFNGEKLRKGKQVVEKVIKVFNPYLMTGSAHEGGGIRVFKVNARYLESGEVLLERDSIAPLNIVKKVDGRVLVFPSTSPKDLRVTVYDPLRGVPVAELEVIKSKEKLRHG

SEQ ID NO: 44195 - protein, 412 aa, Acidianus sp.
MERTVKLRVKVDYTTYSALKEVEEEYREVLEDALNYGLLNKTTSFTRIKAGIYKTEREKHKDLPSHYIYTACEDASERLDSFEKLRKRGRTYTEKPSVRRVTVHLDDHLLKFNLDRISISTKKGRVFISPIFPKIFWEYYNKGWLIASEARFKLLKGNVVEFFIVFKKDEPKPYEPKGFIPVDLNENSVSVLINSKPVLLETNTKRITLGYEYKRKSITTGRSTKDREVKRKLRNLRERDKKADVRRKLAKLIVKEAYESRSAIILEDLPKRVPEHMVKNMKDSQLRLRIYRSAFSSMKNTIIEKAREFGVPVILVNPSHTSTICPVHETKIVYQPDGGTAPRVGVCEKGRELWHRDVVSLYNLRRRAGDVSPVQLGSKESHDPPIIKPGRWLRAKSLRLIMNEHKMNEMKV

SEQ ID NO: 44196 - protein, 275 aa, Acidianus sp.
MKEELVQAKIIDYGKLKSIYNDIFFYKEYSEALRRNGGSLDTPPPSLKKLNFIPNTYRLGPLKVSCNNKILKIDFVNALVESEREGLPKYAIIDFSKGIKIYLAYENERPIIGIDVGIRHLFTVASVNSNGKICKVRYFGDKEIIQPFIRYLGEEQGVVHLTEIKEKVKGLVHQTIRFIESLDPKIVAIEDLRLYDAKVGKGLRVIQEMLEHEFYNKGIKFKRLDPYNTSRICSHCGYKRGEIMGSIFVCPSCGYKADRDFNAAYNLALKCYYTC

SEQ ID NO: 44197 - protein, 346 aa, Acidianus sp.
LRDELEKVNNLASHYVDKAINDAYSVLKSWKRRAEKGQASLRKPTLRKVYVRVKSTLRKVDGEDVRITVRPHEYVTFSWSHKWFSRRVEGLELCEPIIKEDRVHLPFRYRLPWFTPIDFLSIDSNLYTLDAYDGEKFVTFSLKELYSLKYGMELKRSKIQSFASKHGRKGKVLMNKYSHRERNRVLDYVHKFVNKLLEMYPLTLIAVEKLDKQSMFQDADDKLSKKVSRTVWRTIHRVLKYKAPLYGSFVKEVDPHLTSKSCPRCGWVSRKVGRTFRCERCGFTLDRQLNASLNIYLKMCGFPRIRDIPRVWVGVIPLKGRRGNGFPRDSGEAQGLRIDMKYYEIL

SEQ ID NO: 44198 - protein, 211 aa, Acidianus sp.
LYITFVVDQEYPQLPKTNKVVAVDVSVEKLLTTSDGEYVPNMRPYEKALNKTRRLHKALSRKKFLSRNWFKAKIRLARAYEHLKNLRKDMYMKLGKYFAEHYDVLVMEDIHVKQIVGKSLRRLRMRLQDVAFHELRSIMEYQLGKYGKEIRFVNPAFTSITCAKCGHVRRDLTLAERMFVCPNCGWSVDRDYNASLNILRRSGSERPSLWS

SEQ ID NO: 44199 - protein, 250 aa, Acidianus sp.
MKVKEIRTKSKKNKKKVITLQLSNLGIFNVIVHRDFPLEKVKRVVIKLTPSGRLYIIFVVDQEYPQLLKTNKVVAVDVGVEKLLTTSDGEYVPNQRPYEKALNKTRRLHKALSRKKFLSRNWFKAKIRLARAYEHLKNLRKDMYMKLGKYFAEHYDVLVMEDIHVKQIVGKSLRRLRMRLQDVAFHELRSIMEYQLGKYGKKLTLVNPDFTSMTYARCGHVRRDLTLADRVFVLIVVGLLIVTIMLPSTY

SEQ ID NO: 44200 - protein, 359 aa, Paenibacillus sp.
MSQTLTVKVKLLPTKEQIQLLQQSSHEYIRVVNTLVAEMVEEKKILKKTTKDVPANLPSAVKNQAIKDAKSVFSTKVKKSKYTIIPTLKKPICVWNNQNYSFDFTHISIPLMVEGKSNRVKIRTLIIDKDHRNVELLKHKRGTLRVTKSSGKWVAQIAVTMPITEKTGMRVLGVDLGLKVPAVAVTDDDQARFFGNGRENKYKKRKFRSVRKKLGKQKKVNAIRKLDHKEQRWMKDKDHKVSREIVNFAIENKISVIRLEQLTNIRQTTRTSRKNEKNLHTWSFYRLAQFIEYKANMTGIKVEYVNPAYTSQTCPDCSKKNKAQDRRYTCPCGFKKHRDIVGAMNIRYATVIGGNSQSA

SEQ ID NO: 44201 - protein, 373 aa, unknown
  TnpB Polypeptide
MRTVIKTYKFKLYKSKKNKHLNDGIDIAASIWNYCIAMHRRYYRLYGKHLSANKLKKHITKVKKTLNPEWQALGSQAIQDVVERVDRSYKAFFDHVKQKRHGKKSPPSFKRRSRYSSFTLKQAGYAFHGESNRVTIMGREYKYCKSRPIEGEIKTLTVKRNTLGDIYLVVVTKQECNNIYPRAGKAVGIDFGLKHFLTLDDGTVIDSPLWYKSSLNELRAAHRAVSRCQKGSRNRQRAIRNLERIYQRISNRRRDWFFKLANQLVGEYAIICIEDLNIDGMKRLWGRKISDLAFAEFVSILSWVASNAGTTVVKVDRWAPSSKACHVCGTINPKLTLKQRCWTCDCCHTTLDRDVNAAINIKRIGLALLGISA

SEQ ID NO: 44202 - protein, 325 aa, unknown
  TnpB Polypeptide
MQSKLPLKSYKYRVYPTDAQVVFFAKTFGCCRFVWNKMLEEKLNAYKKKERIPIPTPAKYKKEFPFLKEVDCFALVAVQNHIKNAFRNHFRNRKQFKLPKFKKKRDKQSYTTYNVHDSIRVDFEKNLLYLPKLREGVKIELHRRFDGKIKSVTVSKTTDGKYYASILVETENPRNKVIEPKSRACGIDLGLEHFVTVTNDFGSYKVEHPKYLRCGEERLRRLQKSFSRKQKGSKNSEKSRSRLARQHAYISNARNDFLHKLSKAIIDENQVVVVEDINVKGLLKSRLAKSISDSGWSKFLTYLVTQTIQNCTNLAQSSPDQVGRD

SEQ ID NO: 44203 - protein, 407 aa, Cyanobacteria sp.
MQLVEKHVINKHHKFWKECDYLALQSKHLYNAANYVQRQYFFETQKYYNSIDIYNQTKNLEAYRYLPTKVSKQIVRKVSEAWKGWLAALKDWSKHPEKYLGQPRMPGYKPKERGRNVVIYPIDAISKPALTQGIVKLSQANIQLPTQAKNINQVRIVPKLNHYVIEVVYTVDDPVKSKGKYVAGVDLGLNNLMAITSNHSGIKPLLVNGRPLKSINQFFNKRVAKAQSIEAWRQVKELNSKRDRRIDNYLHAVSRRVIDWCQLNDIGQVIIGNNSGWKQDINIGKKNNQEFTKIPHAKLIGLLTYKAQLAGIEVVLTEESYTSKASALDGDQLPVFNNKTDFKPVFSGQRVQRGLYKTSTGRTINADTNGSINIARKVIPNFMDGIEGLPFIPVVLGLWTKITNVDV

SEQ ID NO: 44204 - protein, 510 aa, unknown
  TnpB Polypeptide
VIEVALNKTYSFVTEIPLVVGSKCNAELLSRFQAGRQLYNACLNEAMTRMGLVRSSVAYNAAKKIPKDHMCKRSNAFSEARNAYRYSDYELQSYATLVSNKSKWIASKVDSNTQQTIATRAFKASERVMFGQALKVRYKVPTRFRSVEGKTNKQGLRWKDNQLVWVKLKLNAIIDPTNPVIQHGLNSPIKYVRLLWRELNGKRRWFVQIINQGIPYPQPQNYVADGVVGLDLNISNIAYVGDDHAGLLTFAEGVPTLEREISAIQRKMQRSQRANNPDNYHPNFEDTKGRKAVVKKGKVKQGKRQWKKSSNYRKLAAKKRELQRRKTAYAKSQNRKVVNEILRHGKHIKTENVSVLGWAKRYGKAIFNKSPGFVQSELKLKAERAGGSFTKFSTQKTALSQTHLDGERVKKSLSERVHHDQTGVIMHRDLFSAYLARYVDEDQLLLQDAVTQYPGAEPLLMDAWKRYEQSANRVSASESRQAHPPLERISMKLGTSSQISQKGLKAVLDS

SEQ ID NO: 44205 - protein, 480 aa, unknown
  TnpB Polypeptide
LQTISIPYQCSNEDHLYLRELRRIYSAAVRTAYANALAADGSKLKQKDLRDLVKSRFAGGIVDAWLLHCATLEGMDQRKLRSDGKMIFGSRAGLERRRKGLISNAEWREMRLRPLCSRGDKLFLGNRHFRLTPDARTCVLRIYGREIRLELPAMTGNTGEVLRQAAELAADKKINLTFKLDGKRLHMTMDYNDLPNHPQRRRPVAALPGRCLGIDLNPNWIGIAAAENRDDPTSLSATGLLEHALVKLDLGVDASPELVRETLAVVVDRAISMARKHRCGTIALEKGLGKLRSSGKNRSLNRLLNYWARTIFVAMLTRRARLAGIDVIEVWGGYSSTIGNLAFEAPDACASATEIARRGITRLANVKDVLPTFGEGWSASLRKDLSLPAEAGSWAEVHRKIKAAKIGYRRPHPDAPSGARASDAWGTLMSQGHAVVRLGRRHRPGLLFRVTSAKPDPVVRILVIQRGRVPSGNPSTPNSG

SEQ ID NO: 44206 - protein, 375 aa, unknown
  TnpB Polypeptide
MRLTAKVKLRPTPEQRGALLETLQTANRACNEISKLAWDNQQFKQFPLHRLAYRMIRSRFNLTAQMAVRCVAKVADAYKAGKHKQRTFNLRGSIPYDNRILSWMLDRQEVSIWTTGGREHIPFVCGEHHLRLLQSQRGESDLCLIGGEFYLFTTCDVETPPPAEVEWFLGVDLGIQNIATDSDGDRFAGGHVNGLRKRHAKLRSKLQSKGTESAHKVMKKRRCKEARFAKDVNHCIAKRVVEKAKDTGRGIALEQLKGIRERVTVRRSQRRQHHAWSFYDLQQKIVYKAQIAGIPVVFVDPKNTSRQCPACGHASKSNRQSQAAFLCVECGFSGHADHIAARNIAGRVAVNQPNVGIAIPHCDHLQTCPVHGAGR

SEQ ID NO: 44207 - protein, 378 aa, unknown
  TnpB Polypeptide
VKITIKCKLLETTSQHQQLLDVMENFNNACNWVAEKAFHSKIFNKMLLQKSVYYELKQKYNLSSQMAILVVRKVSSSYANKDQRNTLINYYKYGSIDYDTRNFTIKKDNNVSLMVLSGRIKIPYQSHKKLSDLNLCGQCELMYDKVKKQFYVNFVYDEIENKPIETDKFLGVDMGIVNIAVTSDGEIYSGDKIETHRKKITLLKSNLQSTGTKSAKKHLVKIGKKENRYKKDTNHCISKKIVVKAKALEMGIKLEDLHFYSKKTVKKFNKKLRDNNARLGKWSFGQLREFITYKAKIAGIPVLFINPSYTSQICSKCNHCEEDNRLTQKLFTCKKCGYSTNADYNASINISRAAINQPIVCKSSANREVLQTPAFRQG

SEQ ID NO: 44208 - protein, 427 aa, unknown
  TnpB Polypeptide
VKSTTVYQYRLRLPQASWDQATTARTEAARLGNRMVKLHAWFRKRQRKWPSCGDFEKHFKGRFALHSQTVQAIIQKFFAHIDGARTHRQNGNESARYPHRLRSHVNVVWKGQSIKVDGNRLVLPMGKGRKPLSIRLPSIPDGDIAQAELAFGRLLVTVNREISEPVPGEWTVAADLGLIHLAVVTDGKKSLGVVGRGLRSLKQGHAKSLASISMLQARCKKGSRRWKKLQACKRSRSRQVQDRSRNLLHHAANAVIGFCVKQGAGALIVGDITEINRGKKGKRSKQLNQELGQLELGKLVQYLSYKGTLRGIELKTESERYTSQTCPACGAQHKPSGRRYVCDCGYTGVRDEVGAVNLLNRHLNGKILPGKIVPQRNIKYLRPVRLKTQRSVVVPLTPATLLAWPGKRFIPSRDDSVAVASSRIPRL

SEQ ID NO: 44209 - protein, 403 aa, unknown
  TnpB Polypeptide
MKTNKAFKFRIYPNSPQKQYLAQSFGCARFIYNRFLRQRIDYYAENGKGLTYYDTQASLTQLKKETEFEWLNDINSQSLQGALRNLDTAYNNFFNKRAEFPKFKKKSHKQSFSVPQHFSIHDNLLDIPKCKGIKIKLHRDIKGTMKSITISRRPSGKYFASVLCELEIPEPIYSGGEIGIDYGIKAFITTSEGEIIESPEYLRKSEKRLQQLSKSFSKKQPNAKNRYLAQKKLARQQEKVSNQRQDFLNKTSKRLVSDNQAIYIESLAIRNMIQNHCLAKSISDSGWNTFVNMLKYKGSWYGCRIIEIDRWFPSSKRCHVCGYINDNLTLSDRSWLCPECNTDHDRDMNAAINILTFGRAGIARTLVSPSNEDGTKNACGEGSPSVSLSSPSLKQEALDFGRG

SEQ ID NO: 44210 - protein, 540 aa, unknown
  TnpB Polypeptide
MARPHAKKKKVSSDIHTRSVFLYGQPNVEKRRILEKLQEDYTDAVNSYISILHDRKDCLLQLLKNDKKDSLLRKLEKEYRVKTLTSAYSQNAFDEAVTLLHNRLDNIRKDVIAATEGSVFAVSVLLFHAVLTKQSREEMCDTLIRIRDSYKDKNKIQYYDSLCDTIRTMDKKKFHGKTAEVEMFYYIISDEYRIPAVEKAHVKMDTRLCCLERAEDVKTSHVLAVTIPGSKGKRLEIPVQASRDALRRMAQYKVSGSMRYTITAGGFLKLTCSFEKKTQTSAEHSKVIGVDVGITDAFHTSEGQAIGSFQSAIDFYQTEVEASFGKLSVLRNRKQQLRWFLKKHKDVLPKDVIRNLRKRMDHLEKDIRQSKAPYRKKRHYHQLIEQTIRSAVDTYIKSLHGDKTILTAMELLDIKEFNKSRKVNGMLSVFSRGELTEKLMEELSWHGFPFVQVEPAYTSQTCPVCGCLDKANRNGKVFHCTCCGHTDDADHVGSINIKARAEDKEIHAICKKYPYSKKKRQAAIQTLQAERNTEWKKVTA

SEQ ID NO: 44211 - protein, 250 aa, unknown
  TnpB Polypeptide
LAGARLYLQGIGQVKVKLHRTVEGTIKTVTLRRKAGKWYVCLSCEMVDVPLAPTGQSVGIDVGLTHFLTTDTGETVANPRPLKRAQRRLRVLQRALARCKRGSARRAKVKKQVVALHEKVANVRKDFHHKTARTLVQSNDVIVHEDLAVKNMVKNHSLARAIHDAAWSQFLTILTRKAEEAGRQAIAVDPRGTSQTCPCGASVPKTLADRWHDCPVCGLSLPRDQVSAMLIKRLGHSRQALTWRVTASVA

SEQ ID NO: 44212 - protein, 511 aa, unknown
  TnpB Polypeptide
MFVSLQFKLELKREDKEKLTQLMRKQSSAIRVAYNMLRELEKEKTKNPHSQIYQRLRQLFPELPTKYIDSAIYKAKQYPTDKPVVFGGKRLFEKLCKNHLTGKVREGLKKQWKEQRQGTLISIGSKADKGNRLTRFEDLNGQLHLRITTGNREFMDAKVLREPSNSKDKWITFMAMLLESWQAQSYFPYTAELKLRNGEVYGSVSFELPTPEVKYTKENGVIAIDTNASPIHLAIVEVSKTGELLSYQTISLHHLIGLSKNTKDHQEWVLAHQLLDLAIEKGKAIAIENLKKLKRGVRGDGKAELRKRLHQWNAKKFLQKLKRAAMLKGVEIVEINPAYTSVIGMLKYAPQLSIDKDIAGAYVIGRRAPGFKEDTPENYERLLKDKTYLEFALKRYEEREKELRELIEKETNEYKRNALKSELRNVQNGKKLLVHLVQSLQSEPSGCEGAYGRNSEQGRVAKTTLQSAWQVLKVALLFPVLERRILLSSREGAWDRVRKRLVPLEAGGTSR

SEQ ID NO: 44213 - protein, 423 aa, unknown
  TnpB Polypeptide
MLTKNERIKATLKDTKERRKHMLCRVYIVKLDRSHVNQDSLTRLRLLFLEAKWLYNYCVGHPNVFSIDDTITAVPVKVKDWFELRQLRQLSSHMRQSIITRTQQNIRSLARLKAKGHTVGRLKFKSYVKSIPLKQYGNTYKLINGKYLQIQMIPQRLRVNGLEQLPPDCECANATLLHQHGDYYVAITTYTSREHRPAMVAPAQSIGIDFGVKHQLTLSNGVRIQYKVPVTRRIKQLCKQLSRHQHRSRNWWKTLYKLLKAYVKTTNIKRDIRNKLVHFLATNFEMVCYQNENLGAWQRLWGSRMLSTSLGGIIRMLEIKVQTPMEIDRFFPSTKICSRCGHQRAISLAERTYVCYHCGLVIDRDVNSSCVLEHEGHRILGRGPTKVTPAETNTSTLALEYLNQIAYVKASMVAETGSLTALA

SEQ ID NO: 44214 - protein, 508 aa, unknown
  TnpB Polypeptide
MESQQRTYQTRLFLTEAQGAIFSGYASLYGKVERSLFARLQAGDEINHLKRVFQKHFGITARQFNAVHAGLAGKISSIRELHPELIEDLKRRIKKARQVLKRITKPEVRHQKKRRLAILEQKLQHQQQDRQDARVRLCFGSKKLFRAQFSLEDNGYSCHEEWQSDWQSERNSQFFVLGSKDETTGCQGCVATVTEDGSISLRLRLPNVLKEKYTIISGLRFEHGHEAIVASIGSNLSEDKKEWQAISYRFVKDEKGWRVFVTISVLGIRWISDLRSGVIGVDINENHLAVTETDRFGNPIEFFWVSCVTYGKTAEQRRAIIGDAVKEVMAFIIDRKKPLVIEKLDFRKKKSVIEKQSPKYARLLSSLAYTQIQTIIRARAFDAGIEVMEVNPAYTSVIGRYKFKDRYGMSGHNAAALVIGRRSLGFRESVPSQLHGTLPLPVRNRGRHVWSKWASVSRKASAAYAAHRRSRILSGSSPSPAFGQGTACDQSAWTGEIPVCQSLLELFE

SEQ ID NO: 44215 - protein, 394 aa, unknown
  TnpB Polypeptide
MNITLKLKIDNDQDALLTMKQYTSALNFVSKQAFLSKDKFKNPLKLQKLYYTEVRTKFSLPSQMTCKVFRDVASKYKANKKKLNKAICFKEKHINYTFNRDFSFKDSILSLTTINGRKKFKVNICDYYKTVLAKSIRFADSILIKTRQNQLFFCLVVEIPELEAINKGNTMGIDLGLSKLATVSTNLGKTLIIKGGKVKDKRFKFLDLRAKLQRKGTRSAKRLLRKISGRESRFMRDVNFCTVKKILNFANSNNVSHIGIEDLSGIRSSKLRKEQKRQLNSWAFFQFRNILEYKSQIQGINICVLNPRYTSQACSKCGHTERANRKTQKLFVCKSCGFSQNADINASANIEFLTRLLRSNLIDGASVNKPDVSSVDAKGLFSQLRRSLDTSSRL

SEQ ID NO: 44216 - protein, 207 aa, Pseudomonas sp.
MNDVRGRWYFNVVVDARVQSSPGQGAVGIDLGLEDVATCSDGETLENSRFYHDPEPTLAIAQRSRNKARTRAIHAKIANRRKDALHQFSRKLVNSYGTIIVGDVRPTKLVKTRMAKSVLDAGWGMLKTMLEYKCDHAGIVFKDVREAYTTRACSACGSLTGPKGVNGLRIREWTCCECGVTHERDINAASNILALGHERPFMEIPVL

SEQ ID NO: 44217 - protein, 403 aa, Nonomuraea sp.
VRTAYKVRAYPPPGQAAVLNRTFGCVRVVWNRTLAWRHARWHTQRVKTGFTQANAHLTAMKADPETAWLNQVSSVPLQQAVRHQQVAFANFFAGRARYPRYKSRTGRQSAEYTRSGFRYRDGHLFLAKMDTPLAFVWSWPEVDPASINPTTVTVSRDPCGRWYLSFAVDVADPAQAPPAGAMVGVDLGVTDFAVTSEGEKIANPRHLERKARRLARYQRRMARKQRGSNNRAKAKAKVARAHRKVRASRTDFLHKTSARLVRDHDVIVIEDLAVTNMVRNRNLAKAISDCGWGEFRRQLQYKTATYGRHLIVIDRWYPSSKTCSTCGHLLAELSLSARTWRCPSCGTLHDRDVNAAKNILAAGLAVSACGADIRPQGPSLRQSALKQEPQPARAGISALRGVD

SEQ ID NO: 44218 - protein, 247 aa, Lactobacillus sp.
MGKIKNVTVRLNVAGQYYITILVESENQTLPKTSKYIGGDLGLKSLLNLSDGCKEPINHFEDKYREKLYRWEKLRSRRFLKAQQEIAWDHHNKVLVPRQLDDFKNYQKARIMVAKYRQKIANQRLDQLQKFTTKLVKKYDIIVLEKLNTKGMMKNHHLARAIANASWSKLVDILQYKCDWYGKKLIQVNPAYTSQICANCGKNNHRLGLNKSEWLAVREWDCPNCGKHLDRDINAAQVILQKGLAIR

SEQ ID NO: 44219 - protein, 594 aa, Nonomuraea sp.
MDERTASGLRAIDAPFVAPGPSGVAIRTRIKGMSQRDEEILWEAGTLLGRLAAADLKARCRYGTGHDKHAWAERKRALTVLSSARWAGSITKASNDQWALSRRNQAAFIAERRAAVATISHRLSLPVGEPGTKDKPGGYRSKHEYFVKSRRLGMLEGQLAQAQADDDAGRVHVCRGGRRLLNNRHHLLDDLTGPDTPGLSPEELTAEAGHRVGQWRTRWNAKRLFLHADGETGKRWGNLTIRLTPEGEVSLKLPAALAHRANAPHGWYVLDGRATFTYRGAEWADRVHADRAVAYTINYDADRDRWYITAAWQPAPAPILPLQAALVAGCVGVDTNDDHLAAWRLDVHGNPVGDPKRFCYDLSGSSAHRDAQIRHALTRLLHWARREGVKAIAIEDLDFADEKTREKHGRRKRFRNLISRFPTARLRARLTSMAAEAGIQVVAVDAAYTSKWGAQHWRKPLTTKERQVTRHDAASIAIGRRALGHKIRRRTAPPPRHQSDAAGHRTVQARAHAQACGDGVPGREGTRPPEPGPRTRCVKPKPMPPIGPPAGPTTGPPGASGGVAGRKAGDQRAQDRSGHAGEHGSWVQDPLPLT

SEQ ID NO: 44220 - protein, 394 aa, Nonomuraea sp.
VRRSFKFLLRPTSKQATALTQCLEDHRQLYNAALEHRRTAYRKAGVTIRYADQSAELKHIRADDPGGQGRWSFSSQQATLRRLDKAFTAFFTRIRSGRAAGFPRFKGRGWFDTVQWPKDGDGCRWNSQPEHPSATFMRLQGIGHVRVHQHRPVRGRIKTISIKREGSRWYVVLSCQDVAAEPLAASGAVAGIDLGIASLVTTSDGGQVANPRHLAAIADRLAAAQHDLARKKRGSKRRRKAVVRVAALHAKVRRQRLDGAHKAALALVRAYDVIVHEDLRIVNMTRSASGTIDAPGRNVAAKAGLNRSILDAGWGVFLQILSHKAESAGRELIAVNPANTSRTCAQCGHCAKENRLTQAEFRCMACGHVAHADVNAAINILRAGLALRQAAEAA

SEQ ID NO: 44221 - protein, 494 aa, Bacillus sp.
MTRKNTPTYTIELPLNIPVWQQHRLEKKLKIARYVYNSCLGEALKRHKRVKADQEYRTLLREPKSKERDKQLSKIRLSYGFCEYGLHYFVKPVQHKFKENIGSFEAQKLATRAFQAVEKLHFNKARKVHFKAFDDDISIENKSNHTGLRYANGNILWGDKPTKKRSTPKNWLCMPIAPNANDEYAHLALMDKTKYVRILKRVIRGKVRYFVQLIQEGYPPAKRNRNVANDENKRVGIDIGPSTIAISSEKTVQLRELAPECNADDKKLRRIQRTMDRSKRAANPQNYQENGTTKKGKKIWMYSNRYIKLRRERKEMFRKIAVQRKQSHEKLANEILELGSDVRVETMRFQSLQKRAKKTTRNKKNGKIHRKKRFGKSIANHAPAMLLAIIDRKLGYQGLSIKKIDTYATKASQFNHLTGEYTKKQLSERWNDLGDFRIQRDLYSAFLIGNTTEMFDSVDIELCNTQWDNFVKLHNRELEHLKQSSSQTLRWFVA

SEQ ID NO: 44222 - protein, 650 aa, unknown
  TnpB Polypeptide
MKDTPTLPSYFFSEDVSSGSFGVVQNFSEKEIKKRSDLNKPKQTILTLQFKIKSLKPSLIAKLRLGAMEVNTAWNYCNEVSHKAIADRHIWLTHFDLNRLMTGNMRFSDDNPFGFKVINNATTDCVAAEYVTRREQFNKALLRWRKSTGSLSSGRSTSWIPFKEEHISITYPYSFVQTTTTEKIKTNKKTGEQTVVRVVKETEKHKTVRVAGKNTPAENLYALHSMHNDSGSEYGLPSCLGTPTIKVLGTHLKVFNEEYLGYYLYHLGAIVKSGSITENTIGEWFVNLAVAIDPDLYREKHCFGKLKIHPVAQREKLGLDPGAKTMVVASDGTEYYSNGQVATDCLSSPQNSLSESPPLSPYLALEEQIKHAQRNNDWDHVRRLYLKGKNQLKDATSKAALDIIRKTQWINMGNLKVTAVVKNKTVCLSEKDLKKRKSQAKRQSGLEKQKAKEEQQLFKQKYNSIQHSSNGVSLQDTNKNKNDTKNNKKTKKRKGLGKSLLSQGIGQLKSRLGMYSQRTGRGYKEVNEAFTSQECCNCGRRTGPRGLRQLGVRKWVCGSVHQIGLFDPMKVKITYEGCGTTHLRDHCAARNLERKEIPIVKAQGLTQHPHRNGQAFEKSKKNNSSKTHQRNSQNTSGLSGSSLAGKNRNG

SEQ ID NO: 44223 - protein, 388 aa, Aneurinibacillus sp.
MARKKRSKQENKQTFGMLLQLYPNAEQETKMMKTFGCRRFIYNLFLDQRSKGWKRRKESISFKQQKDMLPELKKRIPFLAEVDAMGLQETVKDLDDAYQNFFEGKAKYPRFKRKRDEQSYTTNQTNNNIRFTNDRFTLIQLPKLGEVKCEGSFVRLRRLLKNKGAVIKAATIRRKGGKYFVSLRVQKEAKPAKVPVAKRRAIGIDVGIKTFAVLSDGNPVPNPHYFSEAQQQLRKQQKRLSRMIKGSNNYIKQKKKVAKIHAKIANQRKDFQHKKSKKLTDENQILCIEDLNVRGMVKNRKLAKHIADAAWYQFRNFLTYKAERKGRTLVIVDRFYASSKICSHCDKKKEGLTLDERTWVCLSCGKKHGRDENAALNLEKEGLRILGA

SEQ ID NO: 44224 - protein, 246 aa, unknown
  TnpB Polypeptide
MSKYFDHTIYKFGTAKLVNKHGKYFLHIPVTYDVEEASLSDVCNVVGIDRGINFVVATYNSKHKSGFISGKAMKQKRAAYSQLRKKLQMRHTSSSRRRMKAIGQRENRWMQDINHQISKALVESNPKHTLFVLEDLSGVRNATERVRTKDRYVSVSWSFYDLEQKLIYKAKQNQSIVIKVNPRYTSQCCPVCGHIEKANRNKKLHLFTCKNCGYKSNDDRIGAMNLYRKGINYLEDSVVPNTVTAE

SEQ ID NO: 44225 - protein, 497 aa, unknown
  TnpB Polypeptide
MSQKVRIDGVKHNGASVFLGVDHCGNPCWTRNPERIMVWLCDGWRSRFNQRREQRPRSTPVKDNATGEITDWTEEPLGGPNILPLMSDSQARTSCLWMAGIPSAILASTNRIENTEWFAGLKRKKTSGGRTPGFKSRHRGLGFVCWRNASKTGNAIFRKTGRKSGVVVITGMNPTGWVKPGEKAHWRVVIHVRVSQPIRPYTSVHVDWTHRSLVFVNMPLPLPRIGDGVIGIDRGCVHTLALSDGTFMDVPKPSKAELKRLKHLQRKMARQDRVNEARGGKTAKFESKRRRKTLSEFNALNSRIIRRRNDWIEKTTTSLAKANVLVALEDLDVKAMTKRPKPKPDPDKPGQYLHNGARAKAGLNRSILSNNWSRLMKWLKDKMDANGGKLVIVPAAYTSQTCHQCGHVAKENRDSQAVFHCVECGYKANADVNAAMNILGRALNQTGGDTASDVEDPHWRPDEASTPSFPQTGSPLGVQSVKGIPPALAVGRMSRRI

SEQ ID NO: 44226 - protein, 395 aa, Bifidobacterium sp.
MTRRKSATARRREGMADNMPTRALVLPLALSPDQHAMYARLADLYNRVWGSAVSWYDANRTVNAVGAHKALYAGLRDRFPQLPSQFVCNALRDAAGAVRSWNSNHPKRGWSLRASRRKPTVRFDLRTMGLRGNLLTLSSMHGLKRQRFLLPSIPAWFDERYPERRLQAVTLVLDPNGLMARLTLTFRIPKAEPVEGRVLGVDLGMHVLYRDSEGGEYRYPRVQRVRRRYAYDRRTLQEKGTRSARRRLKAMSGREERFIRDVDHRAAKRLADTPGIGVIAFEDLTRIRRLARKGTKTSRRRRSMLNQWPFSQLQEFTAYKAAAKGIQVVMVDPAYTSQQCNRCGYVDKRNRDRARFDCLRCGHSDDADHNAALNIRDRAIQTLGQTQGQGAVNHP

SEQ ID NO: 44227 - protein, 364 aa, unknown
  TnpB Polypeptide
MLRLETTDEDKSRLLKTMKMYNEACNFVTEKAYSLKLANKYKLHKEVYQETRRRFGLSSQLVVRIIGKVVEAYRRDKTIQPSFKQFGAIQYDQRNSRVMIDKVSIMTLQGRLRLATRIGEYQKARFDRVQGQCDLIYRNGVFYLIVVVDAPDKSEYIPIGVLGIDLGIENIAVDSDRQIFESKKVENTRQRYSRLRSTLQHVATKSAKRKLKKLSGKERRFKKDINHVISKAIISKAKGTARAIGIENLKHIRSRVTVRRSQRDRHSKWAFGELRNFVTYKAKREGVPLMVVNSKNTSRECPECQYIDKRNRKTQNQFECLQCGYKEMADYVAAVNIAARAAVKQPIVGETLISTYKPTEFIRW

SEQ ID NO: 44228 - protein, 456 aa, unknown
  TnpB Polypeptide
MLAQVLFHQGFRYRIDPKNPEQVFKHILSNGGCVRKVHNLYVDYLYNELESMGYQGGPVPKIRYPELTVFKKQFPFLKEADSLGLCNAKIDFENSVKHFNETPSMVYTKRSRRRQRNNGTVPTFRDLKGIPKFHCKKDNCYSYTTNNQDTKNGSCTVRLSGEMLHVPKLRTDIKLILHRPLPEGAAIKNVTLSMEPDGAFYASICVEYAREVDMTVRQYGLDHDMEAISRLKGIGLDYSQGHFYADSEGRTANCPHAYLKALDKLARLQRDLSRMEKGSKNYEKQLGRIRKLHMKVKNQRKDFCHTESTRLAREYDFVAVEDIDLRAMSQGLHLGKKLMDNGFGMFREYLAYKLERKGSILVKVDRIFASSQTCSRCGYKNPEVKDLKVREWVCPCCGARLDRDNNAADNVLAEAYRIFAEYCTVWQKEKDEAAKTAAKLKAGRKKPKNTKKEAAA

SEQ ID NO: 44229 - protein, 376 aa, unknown
  TnpB Polypeptide
VTLQAYRFALDPTPAQARELRSNAGAARVAFNWGLAHVKAVMDQRAAEATYGISEEDRTPSVSWSFYSLRKEWNAAKDGVAPWWPECSKEAFSTGLDRLARALKSWGESRSGKRKGALVGFPRFRSKRRSKLSVRFTTGVIRAEAKHAILPRLGRIKLHEDASGLVRKAAAGAVRVIAATARFERGRWFVSFTVDVDRPAAPPARPGKIVGIDLGIKTLAILSTGREVPNPRHLNGALRKLARLNREMARRSGPYDPATKQRRAPSNRWRVAAAALGKAHGRVADQRRDALHKLTTELAREYGVIVLEDLNVAGMMKNRRLARHIGDASFGEIRRQLEYKTAWNGGRVVLTGLRPSPTSRAVVSSGVGAPVGQGDP

SEQ ID NO: 44230 - protein, 386 aa, unknown
  TnpB Polypeptide
MKTVVKSYKIRIYPNKSLQDKLYENFGYNRFVFNQLLNYNRLIFSLVVNNPNINPYNYKLKLNRSTLNNWLNVLKSDYSFLKNSESTSLQSTCDIFKDSMIRFFKHQNQFPRFKSRKNPVQSIRLKNNNNSIRFEHNKLRLPRFGLVKYRDNRKILGDILSVTIKYENNRWFAVLNCKNVPINPLPKTGNNVGIDLGLKDLMIFSNGEKRKPITRLTKIEHQIVRLNRNLSRKVKGSKNFIKNVKKLHKLYNKVFDIRNDEYQKLSTKIIENFDLIGLENLSVQNMIKNKRLSHSISQISWSKLIDMIKYKAQWHGKKSIQISKFFPSSKLCSECGYKKEDLTLTIREWTCPECMTKHDRDINASINILNEAIRMNNECTTGHVGI

SEQ ID NO: 44231 - protein, 434 aa, Bacterium sp.
MTSFPLSKFIAASGTDAEDTVLRTKKIKLRLTSNQKQMLQKWNSHARYTYNLAVWRLNVDIDTQTKLNLRNQITPANCNNGKEWILQTPKEIRARAVFEAHTRFCTGVKQIKNKTIKFFRLRYKDKKYQHANGWSIDIPKQAILQIDTKTLFIYKRITKEEKFKLGERLDVPIEHDCKIHFDGDAYYLIVPFNKKKKTREQDGIVSLDPGVRTFLTGVDGDKTIELGKDSGTILFRKLRHLDHLISKKDKTRDKTVKKILKKRIKKVRIYIRNLQDELHKKTSTWLCKKYSNVVIPQFGSKDMVKKQDRKLKTKTVRAMSILAHSRFLERLKNKAREWRTDVVIVDEKYTSKTCSVCGHVKTKRFRNVYNCESCLMTMDRDRNGAINILKKLFLPKGENRADRANETDTLVRLGIDRGLFEPKPSSHLVVSVCQ

SEQ ID NO: 44232 - protein, 367 aa, Halomonas sp.
MAIIRSDTLTLQDINADQQQALADTLRLYRRLVRDLMTVAYTHWPVVGAGKGNDVVKVIEGLIHPTRQRPPVRYPYFAKRYYKFPSYLRRVAIMDAVGQVRSFGTRFDQWRCGKRKHFHAKPPRLTTRTHTFPSLYGSQCAKVNAEATHAFIKVRWQNDWIWRGFQLKGQCRFRGKGQAKSPLLTYNGRHWQLSLPEQFNPPTPTKGTPNRVLAVDVGINTAATLAVVDAQDTVHAREFISHTDKDRESRLMQRIRRAARKHARHGCRLPVGFCRQDHQRLTHLADNQAHQVSRQLVNLALNHDCQAMPVEDLKGWRPKAGKKRTPMKARFHRWFHRQRVNPYRQQGRRSRLKACARVCAWLVAASV

SEQ ID NO: 44233 - protein, 417 aa, Thaumarchaeota sp.
MRRSNTVRIIAGKETKAKLTVLGKAFVNCWNEVNKLRLEQYKNHEPVDFNKTEKVVYEKFKAILHGANVQQVTRKNMGAWKSFFELSKKKKEGELPKWMKPKPPHKKKDNLFLLIRHDRYKIEGNEIFLMDFNLRLKFIGKLKWVGKQGTLEIFFDNARKKWYARIPMVVKVNNKPKGKMKAGIDLGVVNLATVAVEDGSWMIFKGGSVLSEFKKITKRILIEEKRLSRHGLKTSRKLEMLYKKRSLLLKNAREGLAREIVESLYDKGVGEIYVGYPKGIAQDKGNERNTNFWSYSAIIKRIKEVAEEYGIKVKLVDEENTSKTCSLCGEIHENGRIKRGLFKCPRTGKVINADLNGAINILHIPESVEDRGKWLKEQPLVYRWTNGAGWVTTSYEAMKMKAVNHEPVIRLEGTIAF

SEQ ID NO: 44234 - protein, 391 aa, Okeania sp.
MPIPQLRDHPNYYSQKKDLVNTKDKFPEYKLIHSQVLQDCIKRVKLAFDRWLKTDKKGHKLGKPRFNGIGRYRSFTYPQIKLDSIEENQINLPKIGKVKLIKHRSLPDGFQIKTVTISRKADGYYVTLSLEDKSVPALTTEVEPTLKNTLGIDMGLKEFLVTSVGEFVPIPQYYRKSQQRLKTLQKRLSRKKKGSKRWLKAVKAVAKQHKKADATPRRRQSQGNAHQAVADKRKDFHLKTANELLSKAEVIAHENLNIKGLAKTRLSKSINDAGWGQFLSILTVKAENAGQKTIAVNPKNTSQDCSNCGEKVDKELNIRTHSCPHCGIVIDRDLFAQHDLGNAAINIKNRAVGHSVLKARACPTGYRDWETRSPHYTARLVWEYVTHHKTK

SEQ ID NO: 44235 - protein, 403 aa, Streptomyces sp.
VIRAYKFLLRPTARQAVALGEMMRDHCSLYNGALQERRGAYQHDSKTNVRYGMQSAQLSGIRAFDPERQGRWSFSSQQATLRRLDKAFQAFFRRVKAGQTPGYPRFKGVGHFDTVVFPKDGDGCRWDSTPHDPQTRVRLQGVGHVRVHQHRPVRGRVKTISVKREGGRWFVVLACDEMDAEPLPATGAVVGVDMGVAHFLTTSDGQHVANPRFLTAAAEDLASAQRHLSTFPTRKRARDRSKAHQAALRKVATLHAKVRRQRLDHAHKTALALVRDHDVIVHERLNTVGLTKAPAPKPNPAALGDFLPNGASAKASTNRNILDVGWGVFLAILANKAESAGRTVVAVDPRNTSRTCPECGHVAKENRVSQAEFKCVACRHGANADVVGALNVLRTGLVLCNAV

SEQ ID NO: 44236 - protein, 411 aa, unknown
  TnpB Polypeptide
MLLAHKVELRPTAAQAGYLARACGSRRHCYNQLLDHFQRPGVKWSKAAGYQHFIAVVRPAFPWYNEVSSRVTRNAIDDLDNAFKHFWLRVKANKPANPKAKTFRERFGFPTFKKKGKGESFALRESTKFDVDGRALRLERLPGRVDMRQPLRFTGKTRQVTISQQAGKFYASVLVETDDYNPHAPAGEAVGVDFGVKSLAVLSDGRVFPANQKLKANLKRLKRRQRRLSRKRKGSNRSAKARRSLAKLHRRIADQRRAVLHEVSDHLTRHYRVVCIEDLNVKGMAKNHRLARAVNDAGFGTLRQFIEYKAELRGGTVVVIDRFAPSSKMCCRCGQIHDMPLSARTMACDCGNAMDRDHNAAVNILNFGLDTLTPDLKRAQESGKTTVRRGADVDGAKMPALPDSHRSARLA

SEQ ID NO: 44237 - protein, 378 aa, unknown
  TnpB Polypeptide
MRKAFEYRLYPTRAQEKRLDAALRTCREVYNWALDDRKATYTTTGKGENYYTQRPKLKALAVRWPWNRQVYAHLLQNTLVRVDLAFKAFFRRVKAGEKPGYPRHKSADNYDSITFQEAGVAGALMDGKRLKLTKIGRVRIRLHRPIEGKMKTCTIKKRADGWYALFSCEVDHTAVPRSPDRVVGIDLGLKTYAMLSTGEAIENPRHLKAAEADLKRAQRVVSRRKKGSRRRRKAKAVLARKHLHVARVRLDWQRKLACDLVRRFDVIVVEDLNVKGLMEKRTNNRRKDRGLHRSESDTAWAQFLGVLGRKAEWAGVLVLRIPPRGTTTRCSRCGAMVPKTLRDRVHSCPACGLVLDRDLNAAYNIEQAGRAALSGRVA

SEQ ID NO: 44238 - protein, 410 aa, unknown
  TnpB Polypeptide
LEEKLNSNDNKIYRSVKIRLLPTKEQEVLFWKSVGVARWSYNYFLSESYRVYQEWLEDNSKPKYISEKDVRKYINNHLKKTTHTWLKEVGSNVMKQGVKDANIALQNFFKHNKGYPKFKSKKKSKPSFYVNYESLKRTPNGFHGEKIGVVKTRESLPKIGKNQKYRKSRITYDGKFWYLSISFEVSRVDTKLLDNRLGIDLGIKELAVVSNQDGTVVKKYHNINKTYEVKRLERKLKREQRKFSRKILINTSYCDNKNRPKYKKDLDLCKNIQKQKHIIQGLYRRLLNIRTNYLHQTTTEIVKTKPSRIVLEDLNVSGMMKNKHLSKSVSDSKLYEFRRQIEYKAELYRIEVVIADRFYPSSKTCSCCGNVKRDLTLSDRVYSCDECGNVIDRDINASINLAKYNIDGIK

SEQ ID NO: 44239 - protein, 376 aa, unknown
  TnpB Polypeptide
MVGVYLMNTNFNKSFKVRIYPNKEQQFLIDKTFGCVRYVYNYMLNLKQKLYKYHNISLSYFNMCKVLTELKKHKLWLKMIDSKSLQQCLKDLDFAYKMFFKGNGFPKFKSKKYDKDSYRTYQNVHLNQDTRMIKIPKVGWIKFRDKSSFSGLKRINNITISKSSSGKYFVSISAEVDIATFEKTNQNCGIDLGIKDFCILNGGTRFSNPKFLVSNEKRLKLLQKSLSRKIYGSKNYEKAKVKLARFHEYIDNSRKDYLHKISIFLVKNYDILCAETLRVKNMIRNHKLAKSISDVSWYEFCRQLEYKCLWYGKKFVQIDTYFASSQICSNCGYKNSDVKNLNIRKWICPKCNTHHDRDINASTNILNEGLRMLELI

SEQ ID NO: 44240 - protein, 500 aa, Moorea sp.
LTFLFTINYTKNIASKERRIQGGDSTYGDSQANVPFISQQNSYVKNVLRKETAPVALQRRDSRSPLAAPSEHRRYEWKANKKSIGYLDQQNCLPDFKKCWPEYRELYSTSLQATLKRVDLAYNRFFQGLGGIPKYKPIRKYSGWTYPSKAGWKANTDGKNGTLTLNDLGLTIKMRGQAKFWGTPTTLTITYKPNINAWYASITVKTETPDPKYGSESNLAYEKIVAYDLGTETAITAFNGSEFEEIANQRFSKTLEPKAKAAGKEKRRKQAPNFKKGIKASKRWKKANKKESQLKRKVGLARRDWQHVLMQSLMGETPKTALHRKVTSDLSSRYDIGVTEKLNTKGMTRKAKKGSKRKKQKAGLNKAILDVGFGTINKMLTYKIELKGGIVLQLPTRQLKPSQRCPECGKVHKNWAELSNRYHVCDACGFEFDRDKTSTMVMFNAANGKQPGYGTDLDKRGFSSSTSKASKHTGSMKQLGKMKRQKSRSKDGSADTPSWP

SEQ ID NO: 44241 - protein, 369 aa, unknown
  TnpB Polypeptide
VECAYKFRIYPSQQQETLILRTFGCVRYVYNYYLNQRIQAYKSTGKSPTRFDQDKDLTNLKRQEETAWLSEVDKCALQNSLKHLDTAYRNFFCGVARGSHVGFPRFKSKRNRHQSYQTNSNIKVFNASVQLPKLGKVKCRISKDVKGRILSATVSRNPSGKYFVALCCTDVEIAPLPLTGVAVGLDMGIKSFAVTSDGVEYPNHKYLLQSEKKLAKLQRQLSRKTKGSNRWERARLQVARLHEHIANQRHDMLHKLSTDFVRQNDVICIEDLAPRNMVKNHKLAKSITDASWGEFRQQLSYKAGWYGKQVVTVDRFYPSSQLCSVCCAQWSGTKDLAVREWVCPVCGVIHNRDVNAAKNVLYEGLRLLA

SEQ ID NO: 44242 - protein, 426 aa, unknown
  TnpB Polypeptide
MKKGKQAVRDKIYGTQTQQLKNLTSKEYEALKTLCFIAKNLYNVGCYNVRQHYFIEGEYLSYQANYPLCKENYNYKLLNSNVAQQILKEADKSFKAFFGLMNLVKKGKYDFRSLKLPNYLPKNSYFSIVIGQIRIKKDGTLDIPLSPTFKQTYGKITIKVPKNILDKKIKSIRIIPKNNARFFVVHYTYEIEKYEGKLNKNNVLAIDLGVNNLCSCVTNSGDTFLVDGKKLKSYNRWVIKQHTKINRIKEKQNIKTTTKQQKKILDKRNRQINDYYNKAVKILMDYCTLNDIGKVVVGFNKTIRKNNLQEKKYYDKFGNLPMRNLKNKLEHKCKIYDIDFIKQEESYTSKSDFLADDILPNINVENLKNYEFKGERISRGQYKSSTNVILNADINAALNILKKANITDINHLMTSQIKQPKRIKVS

SEQ ID NO: 44243 - protein, 657 aa, unknown
  TnpB Polypeptide
MEKEVNPPTDFFKGIKISLKSVLKHPDVNLPKITNAVIKCNKIVIQTLMFMKLFLLDHYDKHNKLPTINDEFINSCMKILCNEKATGRPPKKEIKELKDTLSAFYKTDFQPLIQNENLDYTHMNTILDYLTIDILTMYENNIKFHYVEYVERYVNVVWKKKFIVNKIRKMNITQKEKEQRVNNLCNQLRKIKTDLLNVTEGSKNYKSYTMYHIWINQQKQFITPNKSTYKKNNIVYDLMCSPFDYFPCMINMMKQVEKEEQTISNVFPMRSEIIPKHIRLDTTTLVHLLMTKKQGIKSEYLTKGNLKRNENKIWKFFFRTERKMFHKKYYEFHHMIETDGISCTLLLLRKDLIGKKLPMMKKGLSCETYIDELTDYTQLQNKKIVGIDPGLCDLIYCVDADNTDANKFRYSQDQRRKETKKKKYSKIQLELKREKINGKTIIEWETELSKLNRKSINIIKFKEYIQKKSEINGLLFAFYEKYIFRKLRIQSYRNTKKSEQKMLNNFKRIFGNEKEVIVCFGDYEQKQHMKFKEATKGKGMRTLFRKAGFQTYLVDEFRTSCRCSKCEIGICKKTMVRENPKPFRSGNVLVHGLICCKNGCGYWNRDVNGATNIYKIAYNAINKKERPIYLSRSKNTSTGLDEPVNPKFTCLEIGKPC

SEQ ID NO: 44244 - protein, 434 aa, Halorussus sp.
VEYRRTAVIKLNTSSDDDSALRETVEQFKHCANRASNWCWHGRRQTPQESGCQPETRNVSGDDDVYHVTSKANAERALYDPLRDETDLTANLVQKGIRRAVEAVKSGVERLKRGESTSKPYFSADSAVYDKRSATFHRDHVSLSTVDGRVECDYILPDDPEKPPTKYVSDDDFEFRMASLQYRDGDWYLHASMRKVEADEESSEPDTKHRTVLGVDLGVNNLAVASTGQFWSADEFNHWRREYEKRRGLLQQCGSRHAHDNIESVGRKETGRFEMHLHTVANELLEEAVENDCSTIVFENLTHIRENVPESTWQHVWAFRRLYEYVEYKAEEYGLNVEQVPPENTSKRCSTCGFTHGNNRSGESFECQKCGYENHADYNASKNIGFRYLRRRQNADDGGAPVGVALNRGTLNVSGEYSPASDGQNGSPRESPRL

SEQ ID NO: 44245 - protein, 372 aa, Psychrobacter sp.
MKTLKLRLKDKHALPLNQLSGTVNFVWNYVNELSFKHLQRAGKFFSAYDLAEYTKGSGEYLGLHSQTIQAISETHAKSRKQFKKAKLRWRTNNPKSSKKSLGWIPFKKSAIKHLATRQSGKKSLKSTIQLSLAKGQKLIVELFDSYNLSLYQINTLELVQDARGRWYACITVKAKAQADAKVQSGKGQVGIDLGIKEAATTSDGQTLTIKQTQKWAARLATAQRANHKKRVTAIHAKIKNTRKDLIHKFTTKLVRNNALIVVGDVKSKSFTNKKTNLAKSTYDAGWFELKRQLDYKCKHAGCHLEIVNEAYTTQTCSSCRQISDSSPKGRTGLRIREWTCAECGTQNDRDINAAKNILAAGLCRLAVGIPSL

SEQ ID NO: 44246 - protein, 387 aa, Blautia sp.
MVKAIKVMLIPNNVQKTKMFQYAGASRFAYNWALARGKENYEKGGKFISDAELRKEFTKLRHSDEYAWLLSISNNVTKQAIKDACTAYKNFFKGLQKFPRFKSRKRSMPKFYQDNVKIRFSNTHVKFEGFSSGRKANKQKMNWVRLAEHGRIPTDAKYMNPRISFDGLNWWISVCVEFPDCRETLNDDGVGIDLGIKDLAVCSDAVKYKNINKSQKVKKLEKQKRRLQRSISRSYEKNKRGESYCKTNNVIKKEKLLLKRNHRLTNIRKNYLNQTISEIVNRKPRFICIEDLNVSGMMKNRHLSKAVQEQGFFRFRKQLEYKCSDKGIQLIVADRFYPSSKLCSCCGNIKKDLKLSDRIYRCECGNRIDRDFQASINLKAYGERFAS

SEQ ID NO: 44247 - protein, 427 aa, Helicobacter sp.
MFALTHKIELQPNNKAQTHFKKAFGCARLAYNWGLAKWRENYKNGIKSNHFALKKEFNACKKEKFPFVYEVTKYATAQPFNHLNLAFQKFFKDLKQGKVSYPKFKKKREYQGSFYIGGDQIKVIQGGTKDYLKIPNLPKIKMTEKLRLRGKINGATITQRGSKFFVSIQMDTTQEEFNYTHKPIVNNHTLGIDTGIKAFASLSNGLQIQAPKPLNRLTRRLKRLSRQVSRKSKHSACLPKTKGREQNAPHTRKSANYLKAVLRLNRLHTRIANTRNDFLHKLSTALIRHAKTLCLESLKVKNMLKNSRLSKALSDVSICAFNTLLEYKAKYYGREIKRVDTFYPSSKTCSSCGNVKSDLSLSDRVYQCGACGVVVDRDFNASINLVKHLVSGVPTEFTPADMTALLDDLATNRLATSMVETGTQHDP

SEQ ID NO: 44248 - protein, 370 aa, unknown
  TnpB Polypeptide
MKIRQTIGVCRYVYNLYLAYNQTNYQSGGRFVTANEFAKWLNHEYLPNNPDKAWIKDVSSKSVKQAIVNAQTAYKRFFNKQSGFPKWKKRRDQDMKMYFVKTNAKTVIRCERHRINIPTLGYVRLKEYGYLPQNGCIRSGTISEKAGRFYVTVLLDEGITVNSNSNKTQGIGVDLGVNTFATVSNGITFEKINQKQRIRQLEKKLRRAQRRLSRQYEHKKLRRERLTEHSANIERNVLRVQKLYQALQRKRMEYVRYVVIVLAKTKPEFITIEDLNISGMMKNRHISKAIAKQNFYYFRTWLLYVCRKWDIEIRIADRFYPSSKLCWQCGSIRKDLTLRDRVYKCTCGNVIDRDLQAAINLERCSDYKIA

SEQ ID NO: 44249 - protein, 367 aa, Fusobacterium sp.
MEKAYKFRFYPTKTQIKILNSTFGCVRYVYNHFLGLKQKLYSTEKKSMSYNQCSKELTVLKKEKEWLKDVDKFSLQNSLKDLDKAYKNFFSGKDYPKFKSKKDNRKSYRTNFTNNNIEFLDKWIKVPKLGKLKIRDKIKPQGRIISATITQAPSGKYYISLCCADIEVKKLKSTNKNVGIDLGIKDFVLTSDETLIENPKYLQKSLNKLAILQRKLSRKPKGSSNRNKARIKVARLFEKISNQREDFLQKLSTTLIKEYNIICMEDLQVKNMVRNHKLARSIVDVSWSEFNRILSYKAKWYGRTIVRVDKFFASSQICNCCGYRNEEVKDLSIREWTCPVCEAVHNRDINAAKNILKEGLRILGISA

SEQ ID NO: 44250 - protein, 390 aa, unknown
  TnpB Polypeptide
MKNRAYKYRFYPTEEQKQLLAKTFGCVRFVYNWALRLKTDAYYKESRRLYYNDLSAQLTILKRQPETVWLNGVSSVSLQQSLRHLDRAFLNFFESRGAYPKFHKKSGKQRATFASSAFRWKDGELTLAKMSEPLNIRWSRTLVSEPSTVTISRDAARRYFVSFLVEEEIPQAPENDNCIGVDLGINDFVVLSNGQKFGNQQFFRKEEKRLAKAQRALSKKQKGSKNREKAKVKVARIHAKIKDQRLDFLHKLSTRLIDENQVIAVESLQVKNMMRNHCLAKSIADAGWGEFLRQLEYKADWYGRTLVKIDKFYPSSKRCFDCGYTVTQLPLSIREGICQGCGERHDRDTNAAKNILAAGQAVLACGESVRPARKLKSLSAGKLQRSRKAG

SEQ ID NO: 44251 - protein, 296 aa, unknown
  TnpB Polypeptide
MNVLTPYWLTLSLFKRKRISLPIVLGEKQRQRIEEAFRGEWSFTTVEMVKRNGEWYAHFVLKKTVKLHDKPETVIAIDRGEVNLAVAVAVSKKNPEKPMKGQFWRGEKIKRIRGLYSHIRRKLQEKNRVGKVKKLKGKERRRVNQQLHIIANQIIEYAKQFPKPVIVMENLNGIRRNFKKSKRLNRRFHSLPFRKLQTIIEYKALLEGIEVKYLTKKETRNTSKECHRCGYVTQVKGRIFECPKCRMKYERDLNACINIAHRVTSSVRWERREPTEPVNVTEGVKPQSNAGSPLLQ

SEQ ID NO: 44252 - protein, 416 aa, Campylobacter sp.
MKQNKVQLVERHIIRPNDKRFAKIKDFCHLSKNLYNYANFILRQEFIANKSIPKEYDLSKTLANDNQIDYRALPAQTAQQTIKLLYKNYKSFFSALKSYKKDKRNFTSNPKLPKYKSKNGVSIAVLTNQQISIKKGAKNNKIKFPSKINLKSLITKIDLSVSTIKQVRFIPKTTCFIVEVVYEKELLTQNSFDKNSFISLDLGLNNFVTAIDTKSNKPFIINGKGIKSVNQFYNKLKANYQAKAKSSNNRYFTKRLNNLAFKRECKINDFMHKASDLIIKHCLEYKIANIIIGKNKEWKQEINLGKKTNLNFTSIPYQSFIDKLSYKSALNNINFTLTEESYTSKCDHLADEEMKHQENYLGKRVRRGLFKSSINKTLNADINGAIGIARKVFPNAVQTLRDSGTAFVPVKISINF

SEQ ID NO: 44253 - protein, 401 aa, Streptomyces sp.
LSGRRYRLELTSEQAALCQEIGDICRAVWNTALEQRREYRRRGAWMNYVPQAAEMAEAKREHPWLTAAPSQVLQQTLMDLDRTCREHGTFNVRWRSKVRWSPAFRFPAGNRIQVERLGRKWGRVKLPKLGWVRFRWSRPLGGEVRSATVRHRAGQWFISFLVNDGCTTPDRHGMPGTAVGIDRGVTVAAVTSDGTFHDRSFITSGEVARYRRLQQKLARQSKGSANRAKTVTAMRRIMRRVTDRRADFCSYTACRITTRNALVVLEDLRIQAMTATASGTADRPGRNVRQKTGLNRAILDKCWFKLEMALLNAARRTGSRIVLVNPAYTSQTCNRCGHVDAKSRKSQAVFECTACGHRDHADVNAAKDQRDAGLAFSACGDFGIGRSVKQEPVGRVTGRTP

SEQ ID NO: 44254 - protein, 378 aa, Acinetobacter sp.
MKTLKLRIKDKHCKVLDQLASEVNFVWNYVNDLCFKHLKKTGQFFSAYDIAKYTKGASKECHLHSQTIQAVTEELITRRKQFKKAKLKWRVSSKKSAKYSLGWIPFKKVAIKYVDGYVQYGKYQFKLWDSYGLSQYCIKIGSFVEDARGRWYVCLVVDSPRLEKTNATKAIGIDLGLKDIATCSDGTIISNPKFYRQYEQKLGIAQRAKNKKRARTLHAKIANCRKDYLHKASSQLVRENALIIVGDLSAKKLVKTKMAKSVLDTGFSALKTMLKYKCENAGVLFEEVNEAYTTQICSCCKKISSSSPKGRTDLGIREWQCVECGTFHDRDINSALNILALGHERLEVGILSLELLNCSSRLGRMSKHTVNNSEKEPV

SEQ ID NO: 44255 - protein, 392 aa, unknown
  TnpB Polypeptide
MLCEYTHLVKNLYNHANYLVRKEFIETGKWLRAYDLDPLLRQDKDYPDYRNMPAAKSAQQTLLLLDANWKSFFRAIKDWSKNKDKYSGKPKLPKYKPKDGRMVFVLTNQQVKLKGDVLRFPKSFNDFTVRPRCVNLSNFEKINQIRIVPKNQIFCVEIIYSVSINDTLLPDNGRYMSIDLGLDNLATIVTNTELNPTIVNGKGLKSNNQYYNKKLSHYQSIAKHMNNKFYTNRLYRLTQKRNFKIEDALHKISKFIVTSALDNDIHTIVIGNNKNWKQSISLGKRTNQSFVSIPHQKLIEKIIYKARNVGINVILTEESYTSGTSCLDGELPTKAFYNKDRRIHRGLFISNQGIRVNADVNAAYQIMKKVFPNAFADGIEGVVLHPVRVDII

SEQ ID NO: 44256 - protein, 433 aa, Auritidibacter sp.
MATTPNIRFIDHDTNYNIWYNISMLKRYRYRAYPTGEQTQAAMRTFGCVRTVYNDFIAERSRLYADGRHTAVSFDETAKNTTTLAKLRPERAWLADVSSTPLQQATRDARQAYSHFFSSVTGKRAGKRVGLPRFKSRRDHQQKARFTRNCGFSVRETTHGVGFVRLPKIGHVRFTLSRPLPSDPSSVTLIREGDSRYYVSFVVDVPSQTADTTNTVAGVDVGLFDLATIALSDGRRYKVANPRHLKTRARKLARCQRALSRTKKGSKNRDKARRRLATEYRKIRETHRDFLHKTALSLVRENQAIAVEDIFVTGLMQTRMARSIADASWGTFLRLIREKATAYGRDVFVIDRWTPTTRTCSVCGTVGEKKSLAVREWTCARCDTRLDRDYNAAVNIMVAAGLAETLNACGGSVRQRLAVADPVKQEPTEQLRC

SEQ ID NO: 44257 - protein, 450 aa, Calothrix sp.
MGNWVDMLRSHYNWCLNDRLTQYAQQFIVGEYCDIRTASETCPLTCFVSKNGATGEPWKKSGDNKRRSAGMIQDAALPELKKARPWYASIDSTVLQQNVKRLDIAYKNFFEGRGFPKFKNRSNFTSFTYQMGIKVQKNKIYLPKLGWMRFHNSRSIPDGFTIKAVTIRKRQDGWYASIRIEDKAVPDHITRPITEVSKIIGCDLGITKLVHLSDGYQIENPKFATNKKTKRNLKIRQRKINRKVQGSNNRQKAAKKVGKIHKKIADKRQAYQWYVANKIVSRNVDAIAVENLNVSAMKKRCQPKIDEQTGRFLNNGQSRKKGLNRAISDASWNDLVLKIEYLAAKHGKVVIKINPKHTSQKCQNCGHIDSFNRDSEKFICTNCGFFAHADINAAKNIRDRALSIVLKDFEELEPKGSKRPKNRKETSQCLAGVPPVEATGVSTRSSEQTC

SEQ ID NO: 44258 - protein, 351 aa, unknown
  TnpB Polypeptide
MEAFNAACDDISKNAYESKTFNQYKLHHRLYYRIREQYKLPAQLTVRAVSKVVDSYKLERRHLHLFNLHGAIVYDERIMGFKGLERVSLSTLEGRVVVSMLVGGYAKLGQRRIRGQADLLYIKDEFYLCLVVEQPEEPPLIPVGYLGVDLGIVNLATTSDGVSYSGERVESVRAHYTGLKAELQRVGTESAKRHLKRLSGREARFKRHVNHKISRELVVVAKGTMRAIALEDLRGIRSQVTVRHGQREKHGKWAFDQLRAFVDYKAKVAGVPVLMVNPRNTSRRCSECGCTEKRNRISQSEFKCRACGYAENADLNAAKNIRWGAEVNQPIVVCQPEGLEIELQAHLFRGG

SEQ ID NO: 44259 - protein, 409 aa, Thaumarchaeota sp.
MKLVRAYKTELAPDDAQLASLYRHAGAARFAYNWGLEWKSNVHLFNLLPHPKLKTPTAVDLHRELNRLKKTKLSWLYEVSKCAPQEALRDLDTAFSNFFGRRAGPPNFKSRKRGAGSFTLTGGIKVRPGEVRLPRIGWVRLKERGYIPSRAHVNCVTVSERAKRWYVAVNVVVEERRKELTTPPGPVVGVDRGLNSLAVVSDGTVLENPRVLRRYERKLKHLQRNLSRKRKGSSNRRKANGALARLNMRVVNTRLDAIQKFTTMLAKTKSVVVVEDLDVKNMMGNHHLARAISDAAWGETLRQLRYKARWYGSSLHKADRWYPSTKRCSRCGQVKEEMPLEERVFHCEGCGLVADRDLNAARNLAEWPGVARTLETPVEGGVQSTAKPLIQPPSESGTISLGRGPWRRM

SEQ ID NO: 44260 - protein, 375 aa, unknown
  TnpB Polypeptide
VTDSITKTLKFKLTPLSRLDRGRAFKLLRIYNAIVSKAQAIVNANDVKSLKRAHKLCYEPLRREFQDLHNKYVQEAYKRALQNYKSYIKKLKEWRKDPSKRKPSPPNPKKNNIIDLHIDVFKITDLDGFRKLRIALGENEYMEFLVIGYEYAEKELNGATIGNSKLMIKGDEIYLLLTIRKHVEVEEHRSKLVIDINENNVSCLLVDLDRKQAILFRMDHDIKDIRVRYRLIRMGIQKKLKNEAEKLLNKYGSRERHRVDDRLKKIAKRLADIAEKVGADIVVEDLEIKRRKGGRKSLKARELNYRLNSFPYRKLLNHIEIEFSERGLKTHKISPEWSSLECPACHNRDRENRINTEIFRCTNADSHLMLTMWLP

SEQ ID NO: 44261 - protein, 568 aa, Bacillus sp.
MGIKAYFSNRVYKNTLPKEYVEATSHALLVFNRAKHFAFSTTIKEKRSGQNRRPKSMHLTVKERFNLDDYYANSAVQEASAMQKSLIELNKLYVSNKETQIVSIKNKMKKEKTRLTTLKKIKTSFIKGKPSFPKNSKINKMGSFFVVQFKMKTDIYYHAYQFEHIYLDNEIRKLQTKIGFLTFRLNKYEQELKKLKTGITSVVFGSKKLFKSQHTVEKYKNNQQLWLKEWEHSRYNQMTISGRKDSGSGNFVFRYDISERTLNFKTPSGVNVEINNVHFPYGQGEVEKAIFSQMNCKDKKKYGKPIAWSVEEHGDYYIFKCIVSTERKENINYSKSDGMIGIDCNVDHFAVSNVNSKGQLISSWSLKFNILGKTSGQISKMIEAEAIELVNIAHRANKPLAIEKLDTTKSKVSPPYGNKKANFKFNMFAYNKMVSAIKSRAEKMGVAVFEVNPAYTSQIGKMKYMKRFGISIHEAASFVIARRAMGFKEKLPPVLGTLLPEKIIGAHHWVQWGYVSKMLKEIRTCAYYRSELFDVDRFRSTNELFFPGALTGLEAKGLSKLKSEKTAS

SEQ ID NO: 44262 - protein, 396 aa, Streptomyces sp.
VTANQVKRAFKYRFYPTDAQAAELSRTFGCVRKVYNLALAARTEAWTRQERVNYNATSAMLTAWKKTDELAYLNDVSSVPLQQCLRHLQAAFAGFYGKRARYPRFKSKKRSRKSAEYTTSGFRFRDGRLTLAKMTDPLDIVWSRPLPEGAIPSTVTVSQDAAGRWFASMLCDDKPAMPAPANATVGIDAGLTTLLTLSTGEKIANSRHERRDRVRLARAQRNLAKKQKGSANRAKARRRAAKVYARIADRRRDHLHKLTTRLVRENQTLVIEDLSVRNMVKNHKLARAISDAAWSEFRSMLEYKAQWYGREVIAVDRFFPSSKLCSACGTLQSKMPLNIRTWTCDCGTVHDRDVNAAKNILAVGLTATACGDGVRPQRSTPGGQSSVKQETPRRKP

SEQ ID NO: 44263 - protein, 310 aa, unknown
  TnpB Polypeptide
MQPVEQHIIHKGDARYEAIDQAAFASKNLYNLANYHMRQSFIHTGKYMEYAEVYHLVKQNVKQVRLVPRHGHYVVEVVYEQEGKQAQVNPDLIAGIDIGLNNLAMLTSNKPGFTPLLVNGRPLKSINQYYNKRKADLQAKLGTTGTTNRMERLTNKRTRKINHYLHTHSHRIIEHLVEEGIGTLVIGKNANWKQEAHMGKRTNQQFVQIPHARFIDMLTYKAELVGIRAILQEESHTSKCSFLDNEPICHQEQYMGKRVKRGLFRSALGRRINADVNGSYNIIRKAIPHSFSGRQGIEGVAVRPVGTPTY

SEQ ID NO: 44264 - protein, 386 aa, unknown
  TnpB Polypeptide
MKELKTISVKVNKLNHEEYLLLLSISAELFNYYTKWGYENKTYNKNICHSKTYQDVTKLFPTIKTALIQSIRDNALECVKARRFKGNIPVKKVISGIRLDRRSIAIRGYRITIINLTKRHKEIIRVPEIHKNIFENWKFKMATLCYSKKNKQFRLNLVFENPKEITTQDIKSSQEIVGIDRGLYHLAVTSDKQFFSAQKVRETRRKYLYIKKTLQQKGTQSAKRKLKKISGKEKRFMKDVNHCTTKQIVSNPQYKMFVLEKLTNIRNKRKGNVLNKLLSNWSFYQFEQFLKYKAEALGKQVVYIDPHYTSQKCSKCGNTNEKSRNKSQYKCLNCGYTNHADINAAINIKNSYNIPIAQIERFESIGQAKSQLAECKEETHLQAFTK

SEQ ID NO: 44265 - protein, 395 aa, Microcoleus sp.
MYAIKLELKLNNQERTLMAKHAGFSRFVYNYGLGLYKQVMDIKGGLTKKLSAIRKVLTNLTKKKPDFAWMNQLSSRVYQNALIALKNGLNRFFKGLGKFPTFKRKKDRDSFTVDSSNGLVTVSALHKIKIPTLGTFRLYEPVPFTCASQTFTVSRQADKWYVSFAIHAEKVPPLLHEVEKVGIDLGVKTFATFSDGTTREAPASIKQAKIKLAKLQWRNRNKQLGNKKQGIPASNSAKKYYKQVAKLHARIANIRRDFLQNLTTEISQKYHRIRVEDLNVRGMMANSKLADAISNLGLYEFRRQLTYKQSMFGTVVELVDRWFPSSKTCSECGHVQPMKLSDRVFHCQGCGSVKCRDFNASLNLEYAPPEKVRRASPELNDCGQEAADSPGRSSK

SEQ ID NO: 44266 - protein, 478 aa, Microcoleus sp.
LPLPENLVILHEEEAIYGSLLRLLPINQDAIAYSSSSFTSPPQEGSRHNLRFGGEMNCGQDIWYDYANYTSVIMLVFEAKLEGQKGQYERLDEAIRTARFVRNSCIRYWMDNKGTGKYELSAYCAVLGKEFPWASKLNSQARQASAERAWSAISRFYDNCKRGKPGKKGFPRFKKHQTHGSVEYKTTGWKLSEDRRTITFSDGFEAGSFKMWGTRDLHFYQLKQIKRVRVVRRADGYYVQFCLDVERVEKREPTGKTIGLDVGLTHFYTDSDGQTIDNPRHLRKSEKALKRLSRQMSRTQKGSNNRAKKRNRLSRKHLKVSRQRKDFAVKLARCVIQSNDLVAYEDLMVRNMVRNRKLAKSISDAAWSNFRNWLEYFGKVFGVATVAVPPYNTSQDCSSCGEEVKKSLSTRTHQCQHCGFVLDRDWNAAINILEIALRTVGHTGTNASGDIDLYLGEEILTKAPALSKPSRRKRKAKK

SEQ ID NO: 44267 - protein, 404 aa, Desertifilum sp.
MLNLTYEYKLIPTDAQRQTFDRWLEICCKVYNYALRERKDWANSRKCNLNSCSIKQEYIIPVDTPRPTFYTQCKSLAEAKKSIPELKEPHTHVLQQVLRQLESACVAMWERGYGFPRFKKRMRSFVFPQLNLETVRKFEGNWEVNLPKLGWVKMRLSRLIPEGFEVKQIRIVKRASGYYAMLSVAMDVEVPQAVPSGHGIGIDLGLEHFLATSDGQLIGRPRFLMEGQCKLKSLQRQLSHKKKGSRKFRQLSHRIARHHEYISNSRKDFHFKIAHQLCDSRSDPLKRNRAGMIFAEELNLKAMSAGMLCKHTLDAGFGQFLSILGHVCFKRGVYFTKVNANGTSQTCPRCQTHTGKKLLSERVHKCSECGYETNRDIAAAQVVLQRGYTAVGHNKSEFWGGQVA

SEQ ID NO: 44268 - protein, 418 aa, unknown
  TnpB Polypeptide
MATVTRTLQATLVHPTSHKQTSLEKTVDSYRDALQDAFHAGCDTQNAVNEVVTPYELSSYAKDALKNYVPDLVDDADELDDAHPVRYTERGLTLDHDAEREHSFCWRVPKARAATGSPFWIPLRISPAQRSLWHGVLDGEVGSNQFQLQRDGATWSLHVGVDIDVPEPAYDSLSEETTAVGFDIGEAHLLAGCACTDGSPTDPLLINGGRARHLRKEMFTTLSRFQERDASQWRIDERFARYQNALTDIVEKASRRAVEYAQRFEKPVIVLEQLESIREGLDYGKWMNRRLHNWAFRRVQNGIERKATELSIPVEYVHPHHTSQTCHACNEIGYRNGDEFRCTTDDCWVSEYHADINAAVNIAERLNPWGESLPLKPAGDDIPRNGRTCDSATTPAEKSPPGQMTLSEYRESEPTTSD

SEQ ID NO: 44269 - protein, 490 aa, Desulfurococcales sp.
MSSGGNPRGVSAREPDPLQFFRELIEKRKKSSKRTVRLRLFPEKHEEEILFDIGLTAVRLWNELNYEKRKLFFKNDLTPEKRIEINRRYYHKYKNFLDVNAGQIINKNEEAWDSFFKLLKLKRQDRLPPHIRKISPPGYWKDRLTGKKKIYMLIRNDRYYLEPTNKGEGRLVLKDFKLSIRYAGRIKWEGKQGRLEIIYEANRWFAYIPIEVGVDPPKSNPKGYIKPNYKDKKNRIFNPRSIKQRDPIGDKKAFIDIGLNNLFAVVVSDGSALLIKGGIIKSEYYWWKREISTYQSIRDLLKNAGISTWIEYHEKYLKALYKRDERLRHLYRTAIRFLAEMLWSRGVRKIYIGYPIMLSQYNGNEYNTNIWWYRKIILWMIDIFIEYGIDVEIVPEDYTSMKCSICEEIHRDGRIYRGLYICRKTNKKINADINASLNIAKRAGYRIIITRKIESYLVSHNGVKSLIPHQRANTRDPEVRNLALKGGEGS

SEQ ID NO: 44270 - protein, 572 aa, Cyanosarcina sp.
MKTVEFKLNLNQTQQAKVDGWLSVLRWVWNRGLHLLEEFDNNTRWDKSSKSWVPCCPLPWQYYKDDDGRLIPFTRLAQTKPYRMSCPIPQTYRQPEIESPNHFGILYYFAQKNHLDKPWFCAVPSKSVSGTLKALTDAWWEYKSGKRSSPRYKRYKDKIKSLVNNNSKSIKISGRQITLPKLGKVTVKTLDKRWDASVAIATLKIIKQPSGYYLQLIGELPTKKFKPSNKAVGISLGYKDLFTTDGGKVVKSPLYYQKMEKKLQRLQRKLCRQQNLCPIDTYNPSLREHFLSCPINPYKGANKAKTTQKISGLHEKIRRARRAFNHKLSTLLVQEYGGIATAKSDMRRITRRPKPIVNKEGTGYDRNGAERKSQFNKLILANGLGQLATLIEQKAVANGREYIEVVPKDIPDEPRQRTEHESKRLRLPRAVHLSSFQSGRYRAWSWKSKPGESQWTQNQEAAQVATLRDTETTILTSSNLALEREGMDVPPTSSPKNNANQHSCRLVTTSGEKSTRATSTGQSVTEPAKTRLDEKEMPDQPEKAQRQSEVLLTAKTQVRRRKRRTAGENDSS

SEQ ID NO: 44271 - protein, 483 aa, unknown
  TnpB Polypeptide
VKKFTARDGWTVQAYRFALDPSPAQERALLSHCGAARVAYNWGLAAVKANLGQREAEKSYGIAPEDLTPLAPWNLPGLRRAWNQVKDQVAPWWAENSKEAYNTGLDALARALGNWNDSRTGKRKGPTIGFPRFKSRHKSTPSARFTTGTIRTGPGRRHVTLPRLGTIRTHENTRKLQRRLAGGTARVLSATVRRDRAGRWHVAFQAEVQRTAAVPARPDAAAGVDLGIKHLAVIGTATGRHHVVDNPRHLEDALGGLRRAGRVLSRRAGPVVCDPATGTKTFRRPSKGWLEARTALARAHARVCDLRADALGKLTTTLARTYGTVVVEDLNVAGMLGNRTLARHLAGASFGEIRRRLDYKTRWHGGTLVVAGRWYPSSKTCSRCQAVKTKLPLSTRVFTCEHCGLVIDRDRNAARNLASLAETRTPGPGAAGPTPPGGNARGADQKTRPRLAGGDQAGTVHAPHPRDGKTRTVARKGRLTEVH

SEQ ID NO: 44272 - protein, 483 aa, unknown; identical to SEQ ID NO: 44271
  TnpB Polypeptide

SEQ ID NO: 44273 - protein, 287 aa, Gammaproteobacteria sp.
MKIIRSSKTSLKFLTEKKRQTLYGVMDEYSCLVNLFIEMFWGNEFAKKNLTKDITNIPHSWLTARMRQCAAREALGMVDGEKTSAQEMDRESVKPHHSGRKMILSAQVVKIENSQSNQFNYWLVLTSIGHKIKINMPIKSHRQMNQFYNWKRSTTVTIHREYVQFSFEKETDKKLTTGKNVGIDVGINHLLATSDQELIGSEVKQQINKIKAKKQGSKKYKTAKKALSYYLHKMVKDYFSQHKNLRLVVVEKLKHLKRGKSKNRGKAFRKTLSNWNYNPENGNAPVE

SEQ ID NO: 44274 - protein, 448 aa, Moorea sp.
VKTPNKIIRTDKWQLKPTPEQKLLFGETVKVYRRACRYLVGIIYTHWSDLGSLTADLLTPAVERLMHQTAKRPDIKYPQFNKAFYKFPSYYRRAAIAFAAGLVSSYVTRYSEWRSGTRKRRNASPPRLNANTGCYPALYKGQCYKLHGFDQVEIKVFNGSDWIWTGVQITGLRERHQVASNKMMSPSLIFNERYCHLSVPFNCKPEKRKPEANVTAVDLGINTTATIAVVTHSGTVIHREFIHPGRDIDRRDKRLKSVSVRASKTMGKGGKLHKGFCSKTYQKAARINNQIGHIVSKRIVQIADQFNSEAIVFENLKGWKPKGGRKRSNLRQRFHGWLKAKIRDFTLEKWAELGGKVIEVVAAYTSKLAFDGSGKVKRDSKNYAHATFSSGKRFNADLNGAYNIGARGVLKLTHRNGSEGRSSKSFGRPPRSWASLCDLWATASPRLA

SEQ ID NO: 44275 - protein, 443 aa, Moorea sp.
MLEDLMAIIHCFCCRLYGLRRYLQAIQEKINKNLDSPEDCAKVEMEVQVMVETPMFGIKRELKVNNKEANWLSQCAGFSRFVYNYGLGIMKSSWEFEDIKASDSKRLNTIKKVFNNVTKKNPDFAWCNKYPARIYQNAFRNLAKAFSWWRNPKIKAQMPKFKKKRHQCSFTVDDSNGKRLVKAGKTINIPTMGTFRLKEAIPYDCISQTFTISREADNWFVSFKVDACPMPAMKHTQQKVGIDLGVKCFATLSDRTKIEMPKSIKKAKIKQSLLQWRNRKKVLGNGQTKTQPSQNAQKYYQRLRKQHKHIGNIREDFLQKQTTRLAQTYQEIKIEDLNLSGMLANHKLAEAIALLGFYRFSELLTYKQEFHGFKLTLVDRWFPSSKTCHKCDHIQDMPLRERVYVCGSCGNIEDRDLNAAINIERWEPGNRTLSMAIDQTPVD

SEQ ID NO: 44276 - protein, 271 aa, unknown
  TnpB Polypeptide
MYFVKNNPKDCRCERHRLNIPTLGWIRMKEKGYIPTTKDGWKIKSGTVSIKADRYYVSVLVEIPDAKIANNSNDGIGIDLGLKDLAIVSNGKTYKNINKSARVKKLEKKLRREQRCLSRKYENLKKGESTQKNIQKQKLKVQRLHHKIDNIRTDYINKSIAEIVKTKPSYITIEDLNVSGMMKNRHLSKAVASQKFYEFRTKLKEKCDENGIELRVADRWYPSSKICHCCGAIKKDLKLSDRIYRCDCGYVEDRDFNAALNLRDALTYEVA

SEQ ID NO: 44277 - protein, 552 aa, Nocardiopsis sp.
VSEPVVQTKKQAPRPIADPYVAPGPSGVAVRTRLKGLTRRDEEVLRLVGAHLGSLASTDLKARCADGSDHGRHTWSARKRQLTPESSSRWAGAITKATHDQWALARRSQVAHLHTLETGITTLRHRLSLPLGEKGTKRSPGGYRSRREWHAKSRRLAALEERLAAVRSDFEAGRLRVVRGGKHLARNRHHLDAAGLTEAQWRQRWEAQRSFLQADGESGKRCGNETIRVTPQGEVSIRLPAPLAGWANAPHSRYVLAGTAVFAHWGQEWADRVEADRAVAYRVHWDVERGRWYVTASWQIPAAPAIPLQAALAEGVVGVDMNADHLAAWHLDAHGNPIGDPRRFSYDLSGTATHRDAQIRHALSQLLCWAQACEAKAIAVEDLDFSDAKSRERHGRKKRFRQLISGMPTAKLRARLVSMADATGIAIIAVDPAYTSTWGAQHWQRPTTSKKRKTSRHDAASIAIGRRAQGYPIRRRTAPPRTHRSDGCGPRTVQTEPATRGREGPRHPDSERAPDARARAKGTRKRGTSAPKTVRGARGIGEWQQLSLLDTA

SEQ ID NO: 44278 - protein, 659 aa, Nocardiopsis sp.
VNHKIPLAEGQASRTACVRTLAHSGVDEKTGELLTASTLAERVGWCTDLVAQMTGALLTAHWNSTDVDTLAAGADAQGRRLPSNAWMALRRLGWTTAPPEGVRVNDRIVRMAQETAGRVLRSVKWRTGVVAGVLATWPADPGKRTRAEWDAVRVAIPGGEHLPSSVIKSRTRQVTAFARENGRLPTDVFELEGVPPAAPMLLLAACDAQQATLERSVTEPTKVLLRLQLPTCPDPASYRDWTWVACPITLAPTIPANAVVHLPTLRTVGKQVRADLAYTHPVPKASRSGHTVALGVDWGLNTLLSAGAARLGEDGRITALGSGAQFRAGGVLAKQDRLRRQGEFLHAKTDQYARLADPALEGKALVLAEEIQRVCDRRSNLNQALAASAARWAVDQAITAGATVIYLEDLRSMEAGGMGRTHNPRLSQTVRGRIAERMRHLAAEVGIAVVSVPAENTSKHCPHCLTRLRHRKAPDRPTTPGWKWAICPNTGCGWQGDRDHGAWRRIAARGLTHQAKTVMDTTSTTMVIRTVIDKLEAKAVITATPKASRKDRSKTGPTRPRTHPPAPRRRGIPSPARPQSPAGKRPEGHAPTDRPGLPRAAHRHQGVATHMATISTPTTSRHRPRGAALGAGFHLHAHATPPRWAEPAPDLTVRMGSLN

SEQ ID NO: 44279 - protein, 414 aa, unknown
  TnpB Polypeptide
MQRLQAFKFELMPTGEQQRDIRGFCGSCRFVFNKGLALQKARHASGDKKLGYAGLCKLLVAWKAIPQTGWLSDTPSQALQQTLKDLERAYSNFFAKRAEFPRFKKKGMGDSFRYPQGMKLDQANSRLFLPKLGWLRYRNSRQVLGTVKNVTVSLSAGRWFASIQTEREVEVPVHASPLAVGIDLGIVRFATLWDGARETVLQPLNSFKRHQQRLAKAQRKMSHKTKFSSNWKWAKTRVQRIQRQIANTRNDYLHKASHSISKSHALLCVEDLQVSNMSRSAKGDAAQPGKNVRAKSGLNRSILDQGWGEFRRQLDYKSAWAGGWLVAVAPQNTSRQCPICGHVHADNRQTQSLFLCTACGHSENADRVAAKNIRERGLNLLKGPDMARIACAVNGETRPSAAGTHRSDDAAQAA

SEQ ID NO: 44280 - protein, 404 aa, unknown
  TnpB Polypeptide
MQLRYNYRLYPTPGQRAALARAFGCTRVVFNDGLRIRQQAHAAGLPYVTDAELSARLTAAKKTPQRAWLADVSAVILQQSLADLNTAYRNFFASLKGERKGPKAGPPRFKSRKDRRQAVRFTANARFTILPSGRLRLPKIGDVPVRWSRDLPSAPASVTVIKDPAGRYFASFVVQAGPAADAARFPAPDPGAEVGIDLGLTWFAVLSDGTVIRSPRFLRRAERKLRRLHKSLSRTAAGSRNRDKARVRVARAHAKVADSRRDFHHQTSTAIIRDNQAVYAEDLCVAGLARTRLAKSVHDAGWSAFVAMLEYKAKRYGRHFGKIGRFVPSTGPCSACGVNSGSKPLHVRQWTCPACGAVHDRDLNAARNILALGRRERLNACGDGVRPPLAGAAVSETGTLPGAA

SEQ ID NO: 44281 - protein, 390 aa, unknown
  TnpB Polypeptide
MKAHKFRLYPSRAIEQKMLSTLEVCRQAYNVFLGELNEQDVIDKALIQGIIPDMKICDARFKTIHSKTLQYEVYKLFSNLSGLAKTKGKRKVGALRFKGKGWFKTFTYNQSGFALTDTGKRCQSLWLSKIGDIPIRCHREVKGNVKQITVKHEQSGRWYAHIITDEKREIPQRKIVKVVGIDVGLTDIVYDSDGNSVSNPRHLRRYSEMLTLRQRNLSSSKKGSKNRMRRRIKVARLHEKITDTRNDFLHKLSHYYVTNYDAIGMEDMPMSLEDDCYAKSKSDVSWGRLRQFIAYKAANAGKLFVPVNYKGTTQRCSQCGTYVWKDITMRQHSCPQCGFVAPRDYNSALEIKRLTLRKIGLERPKSTPVEMAEVVPSWKQEASSSTLGIA

SEQ ID NO: 44282 - protein, 390 aa, unknown; identical to SEQ ID NO: 44281
  TnpB Polypeptide

SEQ ID NO: 44283 - protein, 517 aa, unknown
  TnpB Polypeptide
MFIRLQFKLELKKEDREKLIKLMRMQSSAIRTAYNMLKELEKEKTKNPHAQIYQRLRQLFPELPTKYIDSAIYKAKQYPTDKPVVFGGKRLFEKLCKNHLTGKVREKLKKQWKEQRQGTLVSIGSKADKGNRLTRFEDLNRQLRLRITTGNREFIYARVLREPSNSKDKWLTFMAMLLESWQTQSYFPYTVELKLRDGEVYGSVSFELPTPEVRYRKENGVMAIDTNASPIHLAIAEVSKTGELLSHQTISLHHLLGLSQNSKDHQEWILAHKIVDTAIQKGKAIAIENLKKLKRGIRGDGKATLRKILHNWSAKKFLQKLKRVAMLKGVEVIEVNPAYTSVIGMLKYAPQLSIDKDIAGAYVIGRRALGFREDMPENYERLLKDKAYLEFAVKRYEEREKELGELVEKEKNQYKRKALESELRNVEYARKLLANLIQSLQSEPSSCKGANGRNPEQERGSKASSVAWQVLKVALLFPILGRVLPRDLSPLKPVLVEGVWDRVRSRSAPLEVGGASQ

SEQ ID NO: 44284 - protein, 412 aa, unknown
  TnpB Polypeptide
MPVVVKYWMLVKGVVFYLESGLPSEVKSLLEDFRLAINNSIRAGLQARVTSRNALTKLAYKDFRQEHPRMYSQHLVSAFEVAGSILKNHRKRFRKGVTDRTPFVKRLMMKAENQAYKLDRKSGVVDLPIRAGCHVELRLVVSQYHRKYLDDMALSLGSLTVLPNRVIVAFRKDAPKPFVPESALSLDTNERSLDGVFVEDDVAKAVKADFPEVAIIQQRHHDRRKRLQKKKAHDRRKSRELCRREGTREHHRIDYRLHQVANSVLKFAEERKSAIVLENLTGMRPKRSKELNRRLSLWPRRKLHQIIEYKAQWKGIPVVKVDPRNSSRTCPTCGRIQYSRMGPEFKCECGWRLDRHINASLNLLQTAISKGMAGGLWFNPGAFQHDVMMILYEPAMAARSEPNGTSGIAVVT

SEQ ID NO: 44285 - protein, 381 aa, unknown
  TnpB Polypeptide
MATVQKSIRTRLYPTEEQEVLINKTIGCGRFVYNQTLENCIQSYEQTHHFPSMKERSANLVPLKEEYDFLKEVSAVALQQSLRDLDSALSNFFKNKSHFGFPKFKSKHCQKQSYRTPYNGGNADVLDNKHIKLPKLGKVKAKRFDMPEVYKIFNITVERTNTGKYYASICIETEVQPLHKAGKQVGFDLGLKDLLIGSDGARFESPKYDYDFKDKLAQEQRKLLKMRTKLERANLDLDECKNYQKQKHRVVKLYEHIANCAKDFNHKLSRRIVEEYDLIAMENLNVSDMLKNHYMAYAIADVRWSQLVNFIQYKCQWYGKVFRQIDRFYASSKICSECGTYHKDIVNSLRVREWICPDCGTHHDRDVNAARNILNQALSVA

SEQ ID NO: 44286 - protein, 380 aa, Paenibacillus sp.
MERLKAYKFRIYPTEEQIIFFAKSFGCVRKVYNLMLDERIKNYDENKKDSSKKMRFPTPAQYKKDFPFLKEVDSLALANAQLHLDKAYKNFFRDPSIGFPKFKSKKNSIQRYTTNNQHGTVGLFDNKFIKVPKLKSLIRIKLHRQLKGIIKSATIGRHSSGKYYISLLCKEEIVELPKSNSAVGLDLGITDFAILSDSQKIDNHKFTSKMATKLKREQQRLSRRGLLASKKGIPLFEAKNYQKQKIKVARLYEKVMNQRNDFLNKLSTEMIKNHDIICIEDLNIKGMLRNHKLAKSISDVSWSSFVTKLRYKADWYGREIIKVDKWFPSSQICSECGYKDGKKSLDIREWTCSICHTIHDRDINASINILTEGLRIKQLT

SEQ ID NO: 44287 - protein, 368 aa, Haloferax sp.
VKSRRPTTCRIRPKPRSATTSRNSARRTARRSWTTATRYGSRTKPRSSTTPPNATTSSRGVFPVPVGERTSGYRSVSTPNRKASGTTSYRRTRRRVRYGFRSIGRTGYCTSPSSTRSKNQRRGDATHIGLDIGETALITGCALKDGSPTDPFVCSGSRAKHLRKEMHTTLKRLQERDASEWRIEDRFSHYQNALTDIVEKVSRQAVEYAQQFENPVLVMEDLTYIRERLYGKYMNRRLHSWAFARLQGRIEDKATEAGIPVEYVNPAYTSQTCHSCHRIGRRDSQAEFRCPNDDCHVSTFQADINASANIARRVDPWGESVPLDKAERDDSPRDGSSCDTATTHRETSVPAQMTLTAYEESKPSASDY

SEQ ID NO: 44288 - protein, 392 aa, Citrobacter sp.
MLYAIKIRLYPNRVQENYFAQTFGCCRWAFNNALAFCQQQYDAGEKRPSAYDLMKRLVSLKIEYPWLADADSQALKQACTDVDSAYKNFFRRVKNGETPGFPRFKSKHRGDATYTATAAASIKLEPRQLKLPKAGWVRCRGFREFDGRIKRATVRRTPTGKFYATVLIDDGRDFPAQSTVGLSPVGIDVGCKTEGFTHQFAALSTGEVIYSPAAFKRIQNRLRRAQRCLARKKKGSANRVKQKRVVARLHEKAAAVRNNFLHQFTNRLTRENQALAVEELNVKGMMARPKPKADPDQPGKFLPNGASRKRGLSRSLADVSLGEFFRQLEYKSAWRGVALLKVDRWEPSSKRCSSCGTINENLVLAMRQWTCICGALHHRDVNAAINIAARAA

SEQ ID NO: 44289 - protein, 393 aa, Acidilobus sp.
MSAGGEGELTVTVRMRVSPEPESQQAVLDLMRRYRDALNYSVRAIIASKALSLTKAHRLLYSTLRERYGLPSRIAQDCYREAIAIAKSWLKNPRRGAVPTAKRLSVWLTHELGYRVKGDHVELAGSYRLRVIGWDRRYDDFPNREARLVFRDGEFTLYVFKRAPRPAKYAPKGVLAVDVNERQIIVGNSRVEVRIETPVERALHYRRLAERLQGKYSSSRYRAWLRRSGVRRRVRHFHRKARNIIEDWARRTAHIIVSLAKQGQLAVAREDLTGLVESLRRLPKGHRTALIMLGYRRLAFWIDWQAEKNGVPLFVVDPADTSSTCPRCGAELVEAGHRRLRCPNCGLEADRDTIAILNIEGRALGKMGGTLASPTAPQMTDVSPNRWGEPSAL

SEQ ID NO: 44290 - protein, 407 aa, Exiguobacterium sp.
MGINTYKEVMYAMPLKGFKFRVYPTAEQETLINKTIGCSRFVFNYFLTKWEEAYQTTNKGLSYGLCSQSLTNMKEELVWLKEVDSTALQWSLKHLADGYDRFFKKQNGRPHFKSKRNPVQSYTTNIQGKSQNPEVSIVGNQLKLPKLKWIRFSNSKQIEGRIISATIRRNATGKYFVSLKVEQDIEPISKTGLSIGIDVGLKSFAVLSDGTVYQNDRYFKSLEEKLAREQRKLSRRRLAALNRKVKLSEAKNYLKQKLKVARIHEKIANKRNDFLQKVSTEIVKNHDIIGIENLQVKNMQKNRKLSKAIADVSWSEFHRMLEYKAKWYGKQVVKVGKTFASSQICSSCGHRNKDVKHLALREWTCPCCGIHHDRDVNAGMNLRQEAERILASSTDGTTGLAWSSSGR

SEQ ID NO: 44291 - protein, 305 aa, unknown
  TnpB Polypeptide
MQILKAFKFELMPNGEQIRKMKQFCGCSRFVFNRALNYQNEQYKADKAFTFSYRKIADLLPEWKYEFTWLKNCHSQVLQQSIKDLDKAFENFFAKRSNFPNFKCKGEKDSFRFPQGFKLEQQNNRIYLPKIGWVRYRNNRNVLGIIKNVTISQKCGKWYVSIQTEFEQETPQPKGGEIGIDMGIVRFATLSNGEYFEPINAFKNLKGKLAKLQKQFKHKTKFSRNWQKLKAKIAKLHHKISNIRKNYLHQISSKISKNHAIVYVEDLQVANMSKSASRAGNVEQHGKNVKQKSGLNRAILDQSWA

SEQ ID NO: 44292 - protein, 259 aa, unknown
  TnpB Polypeptide
MTVSVECGHWFVSVVTEMDFANDGPRRPGEVGIDLGIAQTVTLSDGTVFQLDVESIKKHEKQIAVLQRQLCRNKEARQKLAKLGKANPFDKREPCRKRRRLKAKIQNHHRCIRNIRRDFMLKTAHTIAQNYGWVAMEDLKLKNMTKSAKGTVEVPGKTVSQKTGLNRSLARVAPYAMRGGMRHFSPFQSIWLSPMKGVCLSPPCAKVLHEHEILHHQSTDHHRRSRPSSATQEFQLRLQPSEHRHGRWMGSCSAAACHP

SEQ ID NO: 44293 - protein, 352 aa, unknown
  TnpB Polypeptide
VLNQNLKNIHSQVLQNVSDRLHKSFKSFFTRVKNKEKAGFPRFKSKDKYNSFTYPQHGFKLDKNKLNLSKIGEINIKLHREIKGKIKILTIKRTLTNKWFAYFSVEEEKEIKFNKPKNYIGIDVGLNSFYTDSNGNKIENPKYLRESELKLIKTQRKLSKKNKNSRNKNKSILKLAKLHEKISNQRLDFLHKQAKILAHNYSNIAIEKLQIKNMIKNKHLSKSINDASWNKFLQILSYKVEETGGQVIKINPKGTSTSQYCICGNKVKKSLATRIHKCNKCGIKIDRDIMSAKLIKVIAFENYKINRKNNIQQIEIKNTVGHTEFQACEVFPLGETMKQEPLASNNTGSSVF

SEQ ID NO: 44294 - protein, 361 aa, unknown
  TnpB Polypeptide
MLKAYKYRAYPNVEQKIFFAKCFGCVRLVYNKMLADRISSYQESQVKPDTSINYPTPAKYKKELEFLKEVDSLALANAQMNLDKAYKNFFRDKSVGFPKFKSKKDNYRSYTTNNQKGSVAVNDDYIKLPKIGLVKIKNHREFVGIIKSVTISQNPSGKYFVSVLVDTENFQSAPNENKVGIDVGLKDFAIMSNGEKVANPKYLRTSEKKLAKLQRSLSRKVKGSNNRNKARIKVARLHEKIANQRKDFLHKLSHKVTNENQVIVIEDLRVKNMVKNRKLSKAISEASWSEFRSMLEYKSEWKGRRLLIAPKNYASSQLCNCCGYKNPLVKDLGLREWDCPSCGEHHDRDINASLNLLKLAQ

SEQ ID NO: 44295 - protein, 334 aa, unknown
  TnpB Polypeptide
MKDLSRAYCNFFSGRTAFPVFHRKYGANDAFRYPQGFKIDETGKQIYLPGIGFVKYRRSRYIEGKAKNITVIRKADGWYVSIQTEYEKEVPVHQGDEVGMDMGVAWFCTLSDGIQIAPCNTLKKHLKKLAQLQRSLSRKEKFSSNWRKAQREVAKLHQRIGNKRQDFINKVALDLSKKHAVIYREDLRIKNMTASAAGTVEEPGHNVGQKSGLNRAILDQAWGKFFQRLEWKCEQRGAQMIKVSPQYTSRICPICGYESKENRRSQASFKCMACGYRENADVVGARNIKVRGQRMSACGELGEVGRAQVNRRMETVHGAGQQQEPIEVISGVSH

SEQ ID NO: 44296 - protein, 406 aa, Cyanobacterium sp.
MKQRYNYRIYPTSQQEQLLAQLFGCCRVVYNDGVALCQQIYKEGGKKPSNSELQKLLITQAKKTEKREWLSKVSAIPLQQSLNDFNIAYQNFFNSCQGKRKGKKVKPPKFKSRKSNQSARFTRGGFKVGQHKIKLAKIGKVKIIWSRKLPNPPSSATVIKDSASRYFISFVVETIPEKLPDNGQSVGIDLGIETFATLSNGQKIKSSKPLKKYQRKLRRCQRNLSRKKKGSKRDEKARKRVAKVHSKIKDTRTDFLHKLSTDIIRENQTIVLEDLNVSAMVKNRKLSKAISDLGWGTFRTLLEAKSVMYGREFIVIDRWIPTSQVCSNCGFNGGKKELNIREWTCINCGVVHDRDINASKNILVAGGHSETLNGRGAGRKTSIKLAVGDEASTHREIRFKHLSLFQ

SEQ ID NO: 44297 - protein, 390 aa, Cyanobacterium sp.
MFKVVKIRLYPNTEQKQSLEQSFGNCRWLWNHCLNWMNQTYIETGKGLSGYEVKKLIPQLKKEYEWLSLAYSACLQQVCLNLGVAFNNFFERRAKYPRFKSKHGKQSIQYPQNVKLFDNYLKIPKIGDVKAVIHRPIEGKIKTVTISKNGCGQYFASVLFDDGKKRTEPSTEGKAVGIDVGLTHFAITSDGSKFDNPKFLNKHEKNLKRKQQQLSRRQKGSNNRNKARKKVARIHRKITNSREDFLHKLSRRIVNENQVIVTENLNVKGMMKNHCLAKAIGQVGWGMFMTMLKYKAENDGKTYVEVDRFFPTSKTCHVCLNQVRSLPLDVRHWTCKNCQTTHDRDVNAAINLRNEGLRILTCGTRDKAYCPDVRRGRGGRKKSTTPLSVG

SEQ ID NO: 44298 - protein, 370 aa, unknown
  TnpB Polypeptide
  misc_feature (113)..(225): Xaa can be any naturally occurring amino acid
MEKAYSFRFYPTPEQESLLRRTLGCVRLVYNKALHERTQAWYEKQERVGYAQTSSMLTDWKKQEELNFLNEVSCVPLQQGLRHLQTAFTNFFAGRTKYPNFQKKHQGGSAEFXXXXXXXXXXXXXXXXXXXXXXXXXXXXXXXXXXXXXXXXXXXXXXXXXXXXXXXXXXXXXXXXXXXXXXXXXXXXXXXXXXXXXXXXXXXXXXXXXXXXXXXXXXXXXXXXXSKNREKARIKVARIHAQITDSRKDHLHKLTTQLVRENQTIVVENLAVKNMVKNPKLSQAISDVSWGEITRQLAYKCRWYGRNYIEIDRWFPSSKRCSNCGYIAEKMPLNVREWDCPDCGTHHDRDINASKNILAAGLAVSVCRAT

SEQ ID NO: 44299 - protein, 410 aa, unknown
  TnpB Polypeptide
MTITRAYKTELDLNNEQVTACKRHAGAARWAYNWGLKRKQEAYQATGKSPYAVELHRELNALKKTELPWMYDTSKCAPQEALRNLDSAFAHFFRRCQLKQAGQLRGKVGYPRFKSKKQGLGSFRLTGSIGVFADAIQLPRLGRLRLKERGYLPTTGVKVLSATVSEQAGHWYVSVQVEQEQAIPENTGPVVGVDLGVKALATFSDGTVIPNPRHLKQRLKKIKRLHRAVSRKQKGGKNRRKAASRLAKLYRKVSNQRQNTLHQVTTSLAKTKSVIVIEDLNVAGMLQNHHLAQAIADVGFSEFRRQLVYKAQWYGATVLLASRWEPSSKTCSGCGWVKEDLTLADRTFHCQACGLIFDRDLNAAMNLAKLAASSADTRNACGGESAGTPRKKRVKLSSAKQEPNALDASA

SEQ ID NO: 44300 - protein, 514 aa, Ruminococcus sp.
MAKNTTPSFVVTRRIITDGRGYDKLNKIMRVTERMYNAGVKHCIKQLNELKKDVWYKYCLGQFFACKDEKESKRWSKEIFICAAAYQLTEYDLHTYFGRGKVSGYEGGIGINIVQKTATALYSAVKKAIFGKRIHFRKFEETFSFEDKKAASGIIYKAEADTVTVCGTVFKLKPVRKSDIWLQEVMKYKVKYCRIIREPFGIHYRFFLQIVMEGISPQKHAIGVGTMAIDPGVSTMTSYNGNRLSFKELAPDVNKYQEKVIKEQNRFSKLTRINNPECYDDKSVHIKGMRIQYSESMKRSKMRLRTAYRKQRVYVKQSNNNLANEWLEASGSVVKIETMSYKGLQKKSSKTERQDKESVVTDKNGRKRSIRKFKRRKRFGGSILKHAPSGFLYTIKRKVTATCGIVIDVSASKLKASQYDHASDTYEKVSLSDREKIIDGHTVQRDCYSSFIIFYATDENEPDREVCLNGFKKFLMCQDELIKEMIHDNFNNTNFGTKLINIKKQQLREEPAAA

SEQ ID NO: 44301 - protein, 573 aa, unknown
  TnpB Polypeptide
MKFRGVKECKGIYGLSSMALVNYEKEEPIKPLTEKKSKGNFITVECLLAFDKDEDKERVLSTMRKFSSMVRFAYKRLMEGAGRKELKKLLARKYGINTRYSDDAILLAKQTLESCIEREQNPKKLVFGSRGLFEQLKKKHLTGKRRYTLRQKWEERRYGILQSRGDKSKEGNLNIRLVNLNNQWNLRINLGNGEYVWAKVTRSVKRKTDKWIGFISSIEHAEKTGDWFPYTVRIKLKNGKIYAQFSKEENFPEVTITKDNGVMGIDINAYPFHLALVHTAKDGNLKKYERISLDKLLEGSSEKREYLSWQTAHQVVGIAKRERQAIVVENLEKLPKGKRGDGLPKLRQKLQKWIYKALLQKIEIAAKRNGIQVIKVNPAYTSIIGKLKYAPLYNIDKDTAGAYVIARRGLGFKERLPKNYRKLLKDKEFLFYSVAKVEDRITKLRKEIEAEKNEYKKNKLRSDLRRLKGELKLLIQSLLDSGESESAAQQTVNRKMERVRGRVQALQKSWQVLSVALALSCLESLRDLSPLKRVILVRDWVGAAKRASPSLPGQGTSVLNMYSFVQFVRPGST

SEQ ID NO: 44302 - protein, 372 aa, unknown
  TnpB Polypeptide
MFKSYKYRIYPNAQQEDLIQKTFGSCRFVYNQTLSYRKKLYEVEGKSLSKLDCKAYMSRTLKKEHTWLSEVDKFSLENSIFDLDFAYKMFFKSHAGYPKYKSKHNNRNSYKTNCNYCGKPTIEVSFEESEIKLPKLRWVKAKIHREFIGKIKSATISQVPSGKYFVSILIETEHIPLESTGHMIGIDLGIKDLLITSDREKFDNVRPTKKYEYKLAKEQRKLSCKQKGSKNWNKQRIKVAKVYEKIHNTRIDNLHKITHKLISDNQVIVSENLAVSNMVKNHNLAKAITDCGWYELTRQLQYKADWNNRDYIKIGRFVPSSQLCSNCGYQNPDTKNLSVREWTCPICVTIHDRDVNAAKNILNEGLRLLSVS

SEQ ID NO: 44303 - protein, 420 aa, Nonomuraea sp.
LISLVRVEEVGVRRSFKFLLRPTAGQVAALTACLDDHRDLYNAALEHRRTAYRKAGVTVRYGEQSGELKHIRADDPGGQGRWSFSSQQATLRRLDKAFRAFFDRVKAGRPPGFPRFKGRGWFDTVEWPMDGDGCRWDCRPEHPAATFVRLQGIGHVRVHRHRPVKGRVKTISVKREGSRWFVVLSCDDVPAEQLAATGAAVGIDMGVASLVTTSDGAHVANPRHLAATADRLAAAQRDLARKRRGSLAAAQRDLARKRRGSRRRRTAVARVAALHAKVRRGRLDAAHKAALALVRDYDVIVHENLQIANMTRSASGTIDAPGRNVAQKSGLNRSILDAGWGVFLQILAHKAESAGRELIAVDPRNTSRTCAECGHRARENRVTQAEFACTACGHTAHADINAATNILRAGLALRRAAEAA

SEQ ID NO: 44304 - protein, 452 aa, unknown
  TnpB Polypeptide
MTQLVTFETELKPKYNQDIIDYYLAFKGDYSKIVRYLWKLYNNQDILSMPANKSKLNTKLQQDFNIMKRTANSVISYVSGRYNSLLELKKFEASKLNSEISELEKDITEFQIVVNNLARKAATNSLTDKQLKRYRNNKSKLVAMKRALDRKRNSIGKVQRELDSKHLSLCFGFKKLFNQQYLTDNHNKWYDKFVKYRDNVISYVGSKEETACNQQLQLIYDKKHNQFLIQLRKEKDYQANENNKYLYGQVFFSYGNKELQEALKTKLTPISYKIFMRDDRCFLQATITKRDDNIAKSNNVVGIDFNKGFIAVSEVKSDGNLINHYQERYRFSQGNATTNDLRTLASRLAKDCKSNNQSLVIEGLNFVKKKTKSSKNKRNKKFNNMIHSFAYKQFSECCERACFKHGVFLTKVNPAYTSYIGKTKYANSMKLNSHTAASFVIARRGLGFKDVA

SEQ ID NO: 44305 - protein, 283 aa, unknown
  TnpB Polypeptide
LEGSKLALSKIGSIRVFKHREVEGRIKTCTIKKDKLGHWYAILVSEIEDVPQIELKTAIGIDVGLKNQVTTSTGETIQYPRYYVKAETLLAVAQRNLSRKKKGSNNRQKAKTKVAKLHQKIQNHRDEFLHQVSRKLVDCADLIVFETFQIAIWNSSSVSWKNLNIQGMLKNHHLAKHIQDHAWGKLIQFTQSKAAKAGKVVELVDAKYTSQKCSQCGTMVPKTLADRTHLCPNCGLEMDRDINASLNIVTLGLRGLVNSAELTGVPDSVLEHRACGDIRALNL

SEQ ID NO: 44306 - protein, 363 aa, unknown
  TnpB Polypeptide
MPSYAAQCKSLKTTEAFKRLGTCKAQALLSKLREAWSSFYALKRLEEQGRLPPHVLRVNPPHYWKENGRRTAKAFYVRSDGWHRTDEDELVIGRERVPFQHGRLLVGKHGRLEVLHDKLLDKWVAHLPVSLKSGTSRTVGRMASLDLGICNLAALCIGNERPIIYSGRAVLSDWVYRTKEIANLQSRLPEKRHKSRRISLMFRRRQRRLGHAVGAMVKSIFGELEKHDANVLAVGDLNGIRAGASHGHRTNQKLHNFWAFSTIKKRIMEVAEERGAAVREVSERDTSRTCCLCGRMHNGRKHRGLMVCPAVHQSVNADVNGAVNILNVAVKRFPRPLAETWGASGSGLLAEPLLLRWNYNEWR

SEQ ID NO: 44307 - protein, 425 aa, Actinoplanes sp.
MPGILTMRDYGTLWILQLRYNFRITPDPAQRAALAQAFGCARVVFNDGLRLRRQAHDAGEKYVSDGDLSKLVITRAKATDDRAWLSEVSAVVLQQALADLNTAYRNFFNSLTGKRQGRKIAAPRFCSRKDNRQAIRFTKNARFKVLDSGCLRLPKIGDVPVRWSRDMPSEPISVTVVKDAAGRYFASFVVTIGQDETLPPVDAEIGIDLGLTHFAVMSDGTKVTAPKFLHRAARKLKRLQQALARKTKSSNRRKKAVVKVARAHARVADTRRDWQHKLSTAIIRDNQAVYVEDLCVAGLARTRLAKSVHDAGWAGFTAMLEYKAARYGRVFARVDRFFPSTRMCSDCGRINDKMPLDVREWDCPCGSHHDRDVNAAINIKAAGQADFNDRGAHVRPGLVPAARSEAVTHPDAACSTRSVEGISVP

SEQ ID NO: 44308 - protein, 412 aa, Actinoplanes sp.
VTSSVKRAFKFRFYPDPEQADLLNRTFGCVRKVYNLALQARTEGWYQRQERVNYNATSAMLTAWKKSEELAFLNEVSSVPLQQCLRHLQGAFSAFWEKRTRYPRFKSKRKSRASAEFTPSAFRFKDGKLTLAKMSAPLDIVWSRPLPEGQTPSTVTVSRDSAGRWFVSLLCEDIPAPMPATTAAVGIDAGLTHLVTLSTGEKVANPRHERTDRKRLARAQRELARKDKGSKNRAEARLKVARVHARITDRRRDILHKLTTRLVRENQTIVIEDLAVRNMVKNHSLARAISDAAWHDFRSLLTYKAEWYGRDLVVIDRWYPSSKVCSACGAIADKMPLNVREWTCRCGTTHDRDVNAARNILAAGLAVSACGAGVRPQRGNLRSGRQAVKQEPGGRPPESPSFRTPLGNGQTI

SEQ ID NO: 44309 - protein, 403 aa, Actinoplanes sp.
MSTPVKRAFRFRFYPTSEQVGLLVRTFGCVRKVYNLALQARTAAWQERHERVNYAATSAMLTMWKKSEELAFLNEVSCVPLQQCLRHLQGGFTAFFGKRAGFPRFKSKRRSKASAEFTASAFRWRDGEPTLAKMTQPLPIVWSRPVPQDGVPSTVTVTRDSAGRWFVSMLFDDTITTLPATDTAVGLDAGLNHLITLSTGEKIDNPRHEHADRKRLARAQRAPARKEKGSRNRDKARLKVARIHARTADRRRDHLHQLTTRLVRETQTLVIEDLAVRNMVKNHRLARGISDAAWSQLRQLLTYKCAWYGRNLIVIDRWHPSTKLCSHCGHLLDTLPLGVRTWVCPGCGTLHDRDVNAARNILAAGPAVSACGTGVRPQRGNLRPGRQAVKQETRRATTGTPVP

SEQ ID NO: 44310 - protein, 421 aa, Actinoplanes sp.
MPELYSCRLSGKFSYMRTAYKCRVYPDPEQAAVFNRSLFGYVRLVWNKALADRHAAFFQRGERTSYKQADAALTAWKRTGELAFLSEVSSVPLQQTLRHQHTAFGNFFAKRARYPRFKSRDGKQLAHYTRSAFRIKDGQVFMAKTAGPLRLAWSWPGVDLATLDPTMVIISRDTDGRWYATLAVDTDQPAPFNPAGHEIGIDLGIKDFAVTSDGDRIANPRHLERKTCNLARYQRRLARAKKGSANRRKAKTKVAVAHRKVRDARRDFLHKTSTALIRSADTIVIEDLAVANMVRNRKLSRVISDAGWAEFRFQLAYKSARYGRHLIVIDRWYPSSKTCSTCGHLLPKLDLSTRAWTCPACRTRHDRDINAAKNILAAGRAVAGEQPGDACGADVRQQGFALLQSAVKQEASGATQRIPVL

SEQ ID NO: 44311 - protein, 180 aa, Actinoplanes sp.
LARKEKGSKNRDKARRKVARVHARIADRRRDTLHQLTTRLVRENQTIVIEDLAVRNMVKNHTLARAVSDAAWTTFREFLTYKCEWYGRTLVVIDRWYPSSKLCSQCGAIADTMPLSVRFWTCPCGAVHDRDVNAARNILAAGLAVSACGACVRPQRGNLRSGRRAVKQETRRATAGIPVP

SEQ ID NO: 44312 - protein, 683 aa, Actinoplanes sp.
VRHVGGERAAAGPGVGDHRAPGEDVGGRGQGTGGVLVEAFRGHVGHRADHLTGAGELGGLLDRAGDPEVDHFRAARGEQDVAGFEVAVDDPGAVDRGEGRRHTDGQTVQVGCAQRPLLGDDRGEAGAVDVLHDQVRLLMLGVGVEDLGGAERRHGLRPLDLAAEPLPELRIVGQPRLDDLHRDTAALRVHGQIDRAHAALTEPPDQLVTSHVPWVARLQRTAVHRPGGIGHQIPFVDNPAFGPGRKRSALRCKSGIVEAGRRVRRIPRRTTIGQACYLMWMSTLVKRAYKFRFYPTSEQADLLVRTFGCVRKVYNLALEARTAAWSERHERVNYAATSAMLTVWKKSEESAFLNEVSCVPLQQCLRHLQGGFVAFWEKRARYPRFKSKRRSKASAEFTASAFRWRDGELTLAKMTTPLKIVWSRPVPQACTPSTVTVSRDSAGRWFVSLLFDDTIATLPATDTAVAIDVGLNHLITLSTGEKIDNPRHERADRKRLARAQRVLARKEKGSRNRDKARLKVARIHARTADRRRDHLHQLTTRLVRETQTLVIEDLPVRNMVKNHRLARSISDAAWSLFRELLTYKCSWYGRDLVVIDRWYPSTKLCSHCGHLMDKLPLDVRTWACPGCGVSHDRDVNAARNILAAGLAVAACGAGVRPQRGNLRAGRQAVNQETRRATAGIPAP

SEQ ID NO: 44313 - protein, 389 aa, Actinoplanes sp.
VRKSFKFLLRPTTGQQQMLTACLDAHRNLYNAALEERREAYRKAKVSIRYGEQSAQLKDIRRADPLGQARWSFSSQQATLRRLDKTFQAFLRRLRTGQVPGFPRFKGAGWFDTVEWPKDRDGCRWDSTPDSGQTRVYLQGIGHVRVHAHRKTEGVIKTISIKREGRRWYLILSCDDVPEPAFAHTGRSIGVDMGIASFLTTSDGVHVTNPRYGRRTAARLAAAQQALARRKTRSRRRGKARDRVAALHAKVRRRRLDHAHKTARWLVENYDVIAVEALSITNMTRSASGTADQPGTNVAQKTGLNRSILDAGWGVFLTVLRAKAESARRVVVEVNPANTSRTCPLCGHCARENRLTQADFRCMSCDYTDHADVVGAINVLRAGLALLTA

SEQ ID NO: 44314 - protein, 363 aa, Actinomadura sp.
MKVSVQIRLLPTRSQEEALAAALVACDEAADLVSDLAWERRVFRRIDLQKAMYAEVKALGLSAQPAIHVIRKVADAYATGRKKKRRLRAGAAQPYDDRCLSWQYEARTVSIWTVKGRVKRLAYTGSAEQLAQVAAYRLGESDLVCREGMWFLHVTCEVPEAPLNREPDGFIGVDLGIVNIATTGNGSRYAGKRLNRYRERQRRLRIRLQSKGTRSAKRLMRKRRCKERRTSTHENHRIAKCIVAEAERTGRGIALEDLQDLRERVRLRKPQRVTLHSWSFHQLREFITYKARRAGVVVVCVDPACTSRMCSWCGHCDKRNRLDQAAFECRSCGVVAHADRNAARNIAERGVSCWAAVGQPYAA

SEQ ID NO: 44315 - protein, 545 aa, unknown
  TnpB Polypeptide
MIIQSKYTKMFHSKDITRQKYDELYDFAVLIQNHKNIVSRYVNENLLHYLDYDKFHFMKEMRERFKNVIPSSFDAQLYTQVFTCYQNKFDSIQRNLAFDVSIFKGFELYKRDTKKYKKGDLKRVLIEKKQTKLSSCLTYLARYGNEGTIAYIKSNIDKCDTNKRDFYNNILRCCEKFGFERLCALALSKRKRIINKYANNPIEFRSLTFSGRCRKKKIIDYNHRFGSVINSFISLSGFSRKSFDIPVTFNKGWHGNMNEYRKNNKDYEYILTFDEKKHQVYINLCKDGERYIPEPNGKTIGIDVNCKHNLFSLSDETTYDYDRKLVNDFCKLSLEIDRLKEDRSYVIGKRKQRKLDKLKEKVIKNEQQTIAIMCKNEKAKGTGHIVMEDLNNGFGKCYVKDSDNEDINYNRKVKFLGLSSLKQEVEHIARKYDIAVSTVQASYTSKMCPICGCIEDGNRPTQESFECVDCGHKDNADFNASKNIRDRVLVTVLRDKLLKQLDNGAFEPRSLSREKVKEVLLSFRRSLQNVGSECIGSHMITFEYV

SEQ ID NO: 44316 - protein, 297 aa, Okeania sp.
VCNSEISLSSEKEGISKCPKLKRKKDRQSFTVYDGNGKVTINPGKKIKIPTLGTFRLWESIPYTTASQTFSISRTGEKWFVSFGIEAEELPVHPLLDERQYETFGIDVGVKQFASIANQKKGENEILSLPDSIKLEQLNQAKFQWRNRNKQLGGKGKPPSKNAIKYYKKLAKYHGRVTNVRRDFIEKTTTLLVGKVKHVCLESLNVKGMMKNGKLAASIARQGFYQFRQRLTTKIVSSGGTVVLADQWFPSSKTCHSCGYIHQELKLKDRTGELSSLWNENRPGLECGIGVISVWGS

SEQ ID NO: 44317 - protein, 415 aa, unknown
  TnpB Polypeptide
MKVHRTVRYRLHPGSKRKHQQLHGTAGACRFVWNHMVGKLEDEYAFGIRPEWRYYSMGKVFTILRRHSYKWLQGYSANIVKNSLQPIETAYKAFFADLKTGGKLNRKPPRFHGKYTTPLSFPINYVTAKISGDSLFVQKVGWMKMVGNNPYPDGEFKSGRIRHECGNWYAYLVYEVETQASLSHTIREVGVDRNVSDGRWAVLSDGSKHPIPDLGRKVARRKRYQRKLARQAKGSNRRKVTQVRLQKAFQAERFARLNWAHHVSKAIASQYDLTYIEDLNIRSMTKSAKGTVEVPGKNVKAKSELNRRILASAWGMLELRLSYKTKVRKVKPAYSSQTCHQCGHVAKENRPSQSDFKCTACGHTDDADVNAALNILAFGNGATGRGGGDTGGASRHSRPGKRQEMSRNRHADFAT

SEQ ID NO: 44318 - protein, 471 aa, unknown
  TnpB Polypeptide
VKTTVNAVLINLTSEQEKTINHLQTLFSSATRFAYQRLLQGGRKKDIQKLIQNQYGLNSRYASDAIEQARQLKQSQEKILNLQIENWQTKVKIVEQQIAKNNQPEKEPGLQAKLNKRKRKLAYWQTFKGQNTLPKVIFGGRKQFIKRCKNQISKDEYRASRDNRLLSRGDISKKGNPNTRLVTEGEKVYLIINTDQYETRGKVKRYIQLKTEVYLPWKPSKKTGAINGHNYRQMVLDYLITGQPYQIELIRKNAHYFCRITLEETEPIKTVTLGQGVIGIDTNPDGLALTLITSDGNFKKSWWLGNGELTNSRSKRRRNLIGETVKAAIKIAQNENVAIVIENLKFKDNRDLKPKVSRKIHQFTYTRLLQGIEREAKRQGIEVIKVNPAYTSIIGRCKYQKQYGLSTHQAAALVIGRRGYNYPEKLPKAVREILPQEIREKNKHHWSQWHVANITINKLRKAGVKPAFLVA

SEQ ID NO: 44319 - protein, 399 aa, Actinomadura sp.
VSRYRLCPTPAQEAGLLEHCSHARFVWNLAVEQHGWWTPRRGPAPGYVAQARQLTEARAANRWLAAGSVTVQQQALRDFAQAMANFFGGTHRRPTWRKAGLHEGFRIVGARGPAWEVRRLNRRTGQVRIPKVGWVRFRLSRPVPGGVKSFRVTRDRVGRWHVAFAHVPDPVPAPGNGAAVGVDRGVAVSAALSTGETLNVPGLRAGEAERLNRLLRRLARAKPGSNRRARVKAAIARLRAREADRRTDWVEKTSTGLARRFDVIAVEDLDVAAMTRSARGTVESPGVNVAAKAALNRGILANGWGRLVTRLEHKTSGRVVKVGPAYTSQTCNPCGHRAPDNRESQAVFRCTACGHRANADVNAARNIKDTAVGRTVAARGGTPLGGPVNREPQPALLPA

SEQ ID NO: 44320 - protein, 421 aa, Helicobacter sp.
LLKAIKFRIYPTIEQKTLIHKHFGCARVVYNYFLAYRQKQYAQGIRENYFSMQKALTTLKKQEAYAYLSECNSQSLQMALRQLTTAFDRFFSKLADYPRFKSKKHSKQSFCVPQHLEMDLGNNQVKLPKFKEAIKAKFHRHLPTNSIVKQGFISCVADKYYLSISYEDNEPEPKPTTIRKAVGLDMGLESLVIASNGVFYPYKKFFQNLQTKLTKAQRRLSKKLKGSNNRKKQAKKVAQIHASIRNSREDYLHKISNEITNQYDLIAVETLKVRNLVKNHKLAKSIANASWSRLISLLEYKAGWKGKTLIKIDQYFPSSQICSTCGSNTGKKPLPIRNFIYPCCQTYHHRDLNASINIRNYALGMLDERHAIKVDKTRVGITRSYACGDSANGAVTKYGYILDTASYGSLKQEAHPSLAGG

SEQ ID NO: 44321 - protein, 248 aa, Helicobacter sp.
MLIAYKQKLYNSSKNKQIDRLLRLYGICYNHCIALHKRYYRLYKKHLNFYTLKKHITKLKRTARFAFLKTLGSQTLQELVGRIDKAYKKFFKKQGRPPRFKKVANYQSFTFSQCGYKIQDNIISFNGYRFKFVKTYDLAGKPKTLTIKRDNLGDYFLCLVCETEDNLKPAGGNSVGLDFGLKTFLTCSNGTQIPSPLFFSKFLPLIRACSRSLSKKKRGSHNRLKARLKLARLHRKVQNLRKDFLQDC

SEQ ID NO: 44322 - protein, 409 aa, Anabaena sp.
MGGKKMLVFEFKAYGKSAQIKAVGDAIRTAQFIRNSCIRLWIDVKNTGKNDLNKYCAVLAAKFPFANELNSMARQASAERAWFSISRFYDNCKKGVSGKKGFPQFQKDCRSVEYKTSGWKLTDDRKFITFTDKKGIGRLKLKGTRDLHFYQINQIKRVRLVKRADGIYVQFCINVNRQEDIALSGNTIGLDVGLKEYYTDSEGVMIENPKFLRIGEKVLKRSQRRVSRKVKGSKNRGKARQILGKRHLKISRQRKDHAVKLARYVVQSNDLIAYEDLKIKNLVKNHCLAKSINDASWYQFRVWLEYFGQVFKKLTVAVNPQYTSQECSSCCEIVKKTLSTRTHVCRCGCVMDRDENAARNILRRGLGTVGHTETFMLDMSNALGDESSTQVGVILSEQVMSLIKESQRL

SEQ ID NO: 44323 - protein, 411 aa, unknown
  TnpB Polypeptide
LESAKRKAKNSIEKRYFDAFRKPDAKEGKEVVLPNEVKAQMEKEIADATAKIEPYIGDGNLRIIYEKHEFLVKVRNPDTQTGKYQQEALKCGIKYCRIVRSWVGTKWKYYAQLILEGYPPIKCDSNGVAKHPVKEGRIGIDIGTQTIAFCGKDVCDLRILAPSAIAEARNGLTKEIARVTRQMDRSRRAMNPQYFNENGTIKRLKRKNGHKQIRHWNYSKNYYRLLHRLRDLNRKLAAVRKTEHYILANELLSYGNEFVVEDMNYKALQKRSKKTKINPKTGRAHTKKRFGKSIGRCAPALFITILGQKASRYGGSVIKVSTFETKASQFDHTDDSYTKKKLSQRFAKLSDGTIVQRDLYSAFLLLHLRKNLQSYSKKTIKKDFPQFKRLHDETKERLKNSHDWLPSSVGF

SEQ ID NO: 44324 - protein, 400 aa, unknown
  TnpB Polypeptide
MMRICLAHKIALDPTPEQRLFFDQAAGTARFTYNWALAEWQERYASGEKPKGHLLKKSFNALRRAQFPWTYDVHRDATAQPFADLQKAFVNFWQGKAAYPTFKKKGKCRDSFYVANDKFHLDGKYVTLPKIGVVKMRESLRFDGKILSATVSREASRWSISIQVQLPEDYCRERTANGHVGIDLGITHLATLSTGEIVDGPKPLKRALTQLKRTNRTLHRRQKDSANRRKAQHRVSKIHARISHVRNDSLHKLTSTLCRENQAISIEDLHVKGMIKNKHLSRAISDMGWGECRRQLEYKTPLFDGQLHIIGRFEPSSKRCHRCKTVKPVLALGERLFVCNACGHIDDRDLNAAKNINQLGQAMPEVTPVESRALVPIPIGTKLNSLKQEPTRAHVCARER

SEQ ID NO: 44325 - protein, 453 aa, Limnoraphis sp.
MFVLEAKLYGSDSQFAIIDEMIRTAGFIRNKCLRYWMDNKGVGQYDLSAYCKVLAKEFEWAKKLNSMARQASAERAWSAIKRFFDNCKKKVPGKKRCDLAPFGFGSCFKSGNPPNALHSPPAGARGSAPREGFPKFKKSRSVEYKTSGYKLSEDRQSITFKDGFQAGTFRMRGAFDLNYYNPKQIKRIRVVRKADGYYAQFCIQHNKTENIEPSRKAIGLDVGLTHFYTDSDGNTVENPRFLRKTERELKRFQKWVSRKKKGSKNRKKAIHRLGKKHLKVSRQRKDFVCKLARYVVTSNDVVVFENLRVRNMVSQRVGRVSRLEATGEPVRVKNHKLAKSISDVSWRQFFEWLEYYGKVLGKVVVPISPEYTSQECSACGEIVMKTLSQRTHICKCGCELDRDHNASLNILAKGLREISRGGQSQTASLELENAFEELSLYLPNENLVDKLSR

SEQ ID NO: 44326 - protein, 376 aa, unknown
  TnpB Polypeptide
MLIYEYKVDASKKQYAAIDEAIRVVQFIRNKCLRLWMDERGINKNDLQCYCATLAKEYPFAARLNSQARQASADRAWFAISRFFENCKTKKPGRKGYPRFQHDNRSVDYKATGWKLDGRHITFTDGGGIGSLRLVGNPKQHIETFPRKQIKRVRIVHRADGYYCQFSVQAERTIEHVSTGSVVGIDMGVKVYYTDSNGNTVENPRHYRKAEKRLKRLHRQVSRKQKKSKNRKKARQHLAKAYLKVQRQREDFARKTASTLVSSHDLIAYEHLQIRNMVKNHKLAKSIHDAAWGQFLNWVKSYGVMHEIQVVAVPPQYTSQDCSGCGARVQKTLSTRTHVCPFCALVLDRDENAAINILEKALDGTLGHRETHGAYP

SEQ ID NO: 44327 - protein, 377 aa, unknown
  TnpB Polypeptide
MLLAYTGRIDDATDALKHTLKRVNEASNWLSQRVCNELRTTNTVKIHHDAYYTLREQFQLPANFACVVIRRVANAYKCLDTKQRFKKPIEFRSYAAIELSKDLFAFRHDGQLGITTTDSGRINCTVRWNRAIDFARARKTLVLSYRPDINTCFVSVLIETDEPQPYTPADWIGVDLGIANIAVSSDGTVYGGEELIHKKEHYRTKRKQLQKRKAKNRKQKRDTHSARRRLNSIRRRERNFTKNTLHTISKRVVAHAKALSRGIALEDLKRARERITVSAGRQHRIRISGWAYRQLQQYIAYKAQLAGVPVIWVSARDTSRTCPECGYCDKRNRRSQAVFRCLQCGYGAHADFVAARNLALRAWGANPRPQMPSVSYG

SEQ ID NO: 44328 - protein, 171 aa, Runella sp.
  misc_feature (10)..(11): Xaa can be any naturally occurring amino acid
IRTNQLLHPXXDGVEFNRENLTKKYELKLAVAQRANKKKRVTAIHAKIKNKRKDWNHKISTAIVNEYDKIAVGNVSSLKLKKTRMAKSVSDAGWSDFKVMLGFKAVRLGVEMKEVNESFSTVTCSTCLQRTGPSGLSALGVRDWVCSCCGTSHLRDVNAAKNILQFSVRGI

SEQ ID NO: 44329 - protein, 365 aa, unknown
  TnpB Polypeptide
MMEVHRTYQAKICNHSQVAESLDRHGWSASKLWNVGNYHTREVWDETGEIPNHEELKNHIKYKGLHSQSSQRVLEELAESFHSWYQKRKSDHRANPPGYRKRNYYDQDGNRVHEEYPRSTVTWKQRVQRRPETQQNSPVERCESQGTPESVGYMLVEYATRPDATVETVQQVRAVYDPAKGRWELHIVCKDESDTPDAPGEETVGIDLGICNFAAVAYNTEEAELYPGTRLKQDGYYFPREIAQCDDSGGERATRLHAKWSERRTHFFHSFAKHIVERCVEKQVGRVNIGNLEGVRETDDGEAKNWGRHGNLDLHGWAFDRFRKVLTYKAKVEGIEVMEVSERDTSKTYCICGRNDDSQRVERGL

SEQ ID NO: 44330 - protein, 416 aa, unknown
  TnpB Polypeptide
MYLTVKQQVKHLSKDDYRSVRELCHAAKNLTNEAIYNVRQYYFTEGEFLKYEKNYTLLKTSPNYRTLNSNMAQQILKEVDGSFKSFFGLLKLAKQGKYAFKDCKLPHYLPKDGFTTLVIGFVRLNGNRLILPFSNSFKKNHKAVEITIPPILAGKKIKEIRIIPKAKARFFEIQYIYEAEYTQGNLNTNNALALDLGINNLVTAVSSTGKSFIIDGRRLKSINQWFNKENARLQSIKDKQHFGKKTTNRQKTIARDRNNKVNDYMCKTARKVIDYCISNNIGTLVVGYNETFQRDANMGKRNNQTFVNIPYGKLRDKLEYLCELCGITFVKQEESYTSKASFWDKDDIPVYNNDNPKEYQFSGKRIHRGQYRTSSGITLNADVNGALNILRKSSVVSLEALYGRGDVDTPVRIRIT

SEQ ID NO: 44331 - protein, 411 aa, unknown
  TnpB Polypeptide
MGRRHVRRAYKLRLRPTAKQHVALGQCLEAQRTLYNAALQERRDAYEQVVRRSPNFYSMQRPEGPINYGLQSAQLTAIRDHVPDQATWSFSSQQATLRTLNRAFDAFFRRVKAGEAPGYPRFKPVHRFDSVLWPKNGDGAKWVPETSRVYLRGIGHVKVTQHREVEGMVKTIQVKREGRHWYLVLSCDDVPVKPLAPTGAVVGVDVGVASFLTTSEGEHVDNPHYAKVGANRLATAQRILARKQRGSNNRRAARATVAARHRKVANQRRDFHHKVARQLVEEYDVLVVEDLKVANMTTRATPVADPENLGQFLPNGGRAKTGLNRSINDAGWAQFRSILEAKAEEAGRTVMSVNPRHTSQACHECGHVEAGNRVSQAEFRCQRCGHEAHADINAARNILRAGLALLVASAP

SEQ ID NO: 44332 - protein, 459 aa, unknown
  TnpB Polypeptide
LITLKIKYEIEDKGKKRILEYIKNYNSVFNCLLSHFQDQNKVLSTKDSFIFINSLNNIFIDTYFKNSTLYDVKQTFEKFGDKKLVFGGRKLFLDRIKNLVSKEEFRLKKLRPLQIVGSAYNKGNCKFQILSENELLFKPTKKEHFILQLKNIGKNYQKKLKALILEQEKCSIPITYKLDLEYVYISLDETKIEKVNIRPKLKNRIFAIDINPNYIGWSVVDWKSEKSYRLIKSGLISLKPLNDYENNLNVSSDSPQKKYIVDKRKFEVIKAGYELAKLANHFRCEIFSLEDLKMASSDKSKGRKFNRLCNNQWNRNLLIHILEKNCKLYQIHFQKIMANYSSFLGNLVYREEKLPDPCLASIEIGRRAYEFYHQYIIKDKNKEKNIIFDKLENVKDRIIKSLEEFDYSDTFENLSDLYYKLKKRKCNYRFSLERALKEHRKSFSSLKHSKSYTIFYNFV

SEQ ID NO: 44333 - protein, 374 aa, Methylomusa sp.
MNKAYKYRLYPDPEQKNLINKTFGCVRFVYNKMLANRKEIYEQFKDDKEALKAQKYLLPADFKKEFEWLKEVDSLALANAQLNLQTAYKNFFRDKIIGFPKFKSKHHSRKSYTTNNQGGTIRLVDNKTIRLPKLKDVRIKLHRQMPLQAAIKSATISKTPTGKYYIAILVEYETKIKPVTPKPETVLGLDYSSKSLFVDSQANNADYPKFYRKAEEKLRKAQRKLSKRKKEGKNREKQRRKVAKLHEKVANQRKDFLHKLSRQIANVYTAIAIEELNMRGMAQSLNLAKSTNDNGFGMLKTFLTYKLAEQGKQLVVIDKWFPSSKKCSFCGNENKELTLADRAWTCSHCGAELDRDINAAINIKNEGCRILNIA

SEQ ID NO: 44334 - protein, 310 aa, unknown
  TnpB Polypeptide
VCRFRLFPIPEQAAGLAEHCRHARFVWNLAVEQQQHWQPGRQAPRYDEQCAQLTAARAEYEWLAAGSQTVQQQALRDFAQAMRNFFNDTHRLPTWRKAGTHEGFRQVGLKLHHIKRLNRRYGQVWVPKVGWVRFRWTRTIPGTVKSYRVTLDRSGRWHIAFAAIPDCLPGPNDGSVVGVDRGVAVSVALSSGELLGIPGLRAGEIQRLRKLQQQLARAQRGSNRRARTKLAIARLRARETDRRHDWVEKTTTDLAHRFDTIRIEDLDVRAMTRSARGTRDCPGTNVAQKRGLNREISRQGWGVLVARLKH

SEQ ID NO: 44335 - protein, 450 aa, unknown
  TnpB Polypeptide
VLSRAVTFQFALDPNAEQRVLLAKCAGARRFTVNHHLARVKANLDVRSAERKVLGEHGVPSEPSTPSLSWSGFSFINDFNAWKNGQSDDSPLNDDGSRGLSWRHELPSDVFECASVDAARALENFTASRRGERSGKPVGFPRFQAKGKVAPSFRLRNRATSGTTPSSQPIRFTGPSHLRLPRFGPVKLFGRTRKVRRMIEAGRFHIYSATVTQRAGRWIVSLTGVAAELHQAERSRFQRHGVPIGVDRGIISLAVAADANGTLIQCFEGVKTLKQAQQSLKAANQALARTTPGSKGRQQARSRLAKRHRKVANTRRHLVHQASKSLVDRAQVLVIEDLNVAGMVKNRHLSRSISDAAMAELSRQILYKATWHGVEVRVVDRFFPSSKTCSGCGLVKSDLDLSTRTYSCGTCGLVIDRDLNAAINLARWQPRESTFEKRAEPPSALLLATA

SEQ ID NO: 44336 - protein, 414 aa, unknown
  TnpB Polypeptide
MWYDYRFRAYPDRTGVTAEAERHIDIHRQAYNHTRYEYNALDTDEDNIGSAYQHQKRLTEWKDEWPVFKEVHSKALQKTVDRFYDNLSNLSQQKENGNKVGNLKWKSPREFRSITYSQHGFKLKNTSGRRATLWLSKIGEIKIRYHREIPDESDIKEVTIKKETTGDWFVSFGLEREEASLPEKTDVDLLNASNCVGIDIGIQNYIHTSDGKTVDWLDLSDEYERVRHEQRNLSRKEDGSNNYKRQRRTVAKVKRHIQQKIKDFQHKLSTWLVREYDAVFVEDLDVKPMLEDSHNARNKQDAAWRQFITLLEYKAELYGTHFVQVDTRGSTKECAKCGTETAKPIWVREHACPACGFECDRDANAALNILQRGFDELGLGWPESTPVETVTATDATQFESVSASYVVETGSLSS

SEQ ID NO: 44337 - protein, 511 aa, Deinococcus sp.
MVPGHTGVDMTIRRAVRLLMVGASGARFVPPDPRPYRDEAVIGNHSAPGIRRGAEREPREGVERRRAPPLHTTEGTGGGIPPSWEELTVFDFRQDHRLIRLSTPVYPTSDQALRFSHWAQVVRDAQCRATSAVITPQSGPSTGMVTLPSLSRAEVTDALLRTCPELTESLPPGAWRGVASQVYALWRPLMGQAVSTAQLPQLVGAAVPLDESVQASGLFGVQIDGIPEPVVADLWRLPCDLTDALLRSAVDHRQSVQGDVQRWRAADRAGDPAALARLHELACRHGVLLDAPDVGPGVERDRPHRARHATLRHGRQPDGQRGWMIDWSLRLPPAWLPAAWRDDVVGVDLGIRAPITWVSGTAHGQLRRSSLPTGGWMPGSTGTALADAVVRHTQFARMRDDLNATLTHLLSYRHVAIEDTNWSNLTPGVRDAMDCTGVTSVLEWLTSLGRVSGTRVVPVAPAGTSQHCAQCGRAGRLDGVLFLCPGAACRPVDRDLNAAGYIRWLGRRSGQ

SEQ ID NO: 44338 - protein, 370 aa, Escherichia sp.
  misc_feature (340)..(368): Xaa can be any naturally occurring amino acid
MKRLQAFKFQLRPGGQQERQMRLFAGACRFVFNRALARQNENHEAGNKYIPYGKMASWLVEWKNATETQWLKDSPSQPLQQSLKDLERAYKNFFQKRAAFPRFKKRGQNDAFRYPQGVKLDQENSRIFLPKLGWMRYRNSRQVTGVVKNVTVSQSCGKWYISIQTESEVSTPVHPSASMVGLDAGVAKLATLSDGTVFEPVNSFQKNQKTLARLQRQLSRKVKFSNNWQKQKRKIQRLHSRIANIRRDYLHKVTTTVSKNHAMIVIEDLKVKHMSKSAAGTVSQPGRNVRAKSGLNRSILDQGWYEMRRQLEYKQLWRGGQVLAVPPAYTSQRCACCGHXXXXXXXXXXXXXXXXXXXXXXXXXXXXXTA

SEQ ID NO: 44339 - protein, 657 aa, unknown
  TnpB Polypeptide
METPKDKPPEFFKSIKTSLKSVLKHPEINIKILNDAVVKSNKIVIHTLQFLKLYLLDYYENNNQTLPDISKELINNSMKVVCGQKTEKRGKPANKETIELKDTLISFFNQHYLPLTQNDPIDYAGLNTILDYLKEDVITMYENNIQLHYVEYVERYVNVVWKKKLIMEKIRKLGKTKMDRDARIRTLCADLRKIKNDLLNVDDKLYESSPHYHNWIKEEKQNILPRKTKYEKNSIYYDLKCSPMDYFPCMIFMMKRVENDGESVNNVFPLRSAISPKYIRLDTTTLVNLLLRKEHGTKTFYKTKGELKKNENKIWDFFFRTERKMFCKTGFSFHHMVSTDGVGLSILFLRNDLVGKKLPMMKKGISRELYIDELDDYSSLQNKTIVGIDPGKDDLIYCVDDSSKDANIFRYSQNQRRKETKLKKYNNIILAMKTNKIEGKTIIDYETELSHFNRKSLQITKYKEYLQEKNRINHILFGFYRKELFRKLKFGKYINIKRNEQKMISDFKKTYGNPENVVICIGDWEQRKQMKYKEPTLGKGIRTLFRKNNYNVFLVDEFRSSCKCSKCDGGICEKFMVREHPNKKKNKDEFRLIHGLLRCKSGCGSWNRDRNGSSNIYKIAKNAINNIDRPSYLCRETSNQSTSTSSYNQTLRRYEKT

SEQ ID NO: 44340 - protein, 224 aa, Okeania sp.
MRYLNVHQGQALRDLERAFKNFLTIPNRGFPVFKKKGRKDSFYLEGSIKIIQGNYIQLPRIGIVKTYEILPSVLVKNVTISKKADSWYISFKYNFESYPTEKVGETIGVDIGINTLATCSDGSKFANVQAYRQAKKRLVRHQRAVSKKVIGSKNRRKAVKKLAKIHKKVADIRADTLHKLTSWLAKNHSTIVIEDLNVSGMLKKRCDPATTPARLRNAHQDTIN

SEQ ID NO: 44341 - protein, 226 aa, Shimazuella sp.
MFLFSTVYEKTRKKYKANCHSDGMGIDLGIKDFAITNREQVFGNIHKTSIIKRTEKRLKRVQRALSRKYEFQKKRGEKPATKKGSNIAKNILQIQKVHQRLARMRDAYRAWVVSVIAKIKPAFITIEKLNVQGMKKNRHLSKSISDQGFYDFKQKLRNACRKMGIELREVAMYYPSSKLCSHCGIKKVKLSLSERVFQCEHCRQSIDRDHNAAINLMQASEYVLLP

SEQ ID NO: 44342 - protein, 395 aa, unknown
  TnpB Polypeptide
MLQAYKYRLYPNAIQMESIEKHINACRFVYNLFLEKKIKHYTEHGKTLSCFALNKMLPALKIEFPFLQEVHSQPLQMASRNLDNAFTKFFREKKGFPKFKSKKNPIQSFQYPQGVKLNWELGKVYLPKVGQVKCKLHRFFEGDIKTCTVSRTSTGKYFVSILVDDKELVQESQPFSSDTTIGIDVGLIHFATLSDGTKVENPRIFKKTSVKLKRLQQSVSRKVKGSNNYKKAKLKVAKCHETITNQRSDFLHKLSFTLVSENQAIAIEDLNVSGMVKNRRLAKHIADASWSEFRSQLDYKCKKYGKTLLTIGRFDPSSKICSHCGYHNKNLKLGDRMWICSDCGSELDRDHNAAKNIKRFALLKQNTGQGLPEEPVEIESDIIDASISEAGSQRL

SEQ ID NO: 44343 - protein, 395 aa, unknown; identical to SEQ ID NO: 44342
  TnpB Polypeptide

SEQ ID NO: 44344 - protein, 404 aa, unknown
  TnpB Polypeptide
MQLTQKIEINPTKGQEGILWTLSNQCRLLYNFALKERLDNEDITYIRQQNQLPQLKTRFPAYAQVYSKVLQMALKTLDANFKSYKELSKTDETANPPKFRGYKYFFTLKYNQSGFKVKNGYLILSHKVSKDLLKFKIPEKFSFDKIYQVDIYQDKQTRKYFASIVYDYKEPEYVDNGLYQAIDLGVTKQALVNTQGKFLDIVNGRPDLYWKKPVAELQARRDHCKKGSRKWKQLNTLKKECETKQKNQLLDQQHKMAKQIVENTKANTIIIGDLNVKQMAQGKRHLNRSTQNTGSLARFSGFLTYKAQKVGKKIIRISEYRTSKACCVCGKIHDMKISDRIMKCDCGNELDRDRNSAVNIMVRFLSQNAMWTGYQQFVDNLRKTGISLEVTLVGSPFFKNSIEF

SEQ ID NO: 44345 - protein, 404 aa, unknown; identical to SEQ ID NO: 44344
  TnpB Polypeptide

SEQ ID NO: 44346 - protein, 376 aa, unknown
  TnpB Polypeptide
MKSDRVLASDSTMTPANWAGDKKSRWRRMRKFKFEVINAHELIKQSFSIDPTKPSRYHTFRVEFNAYKENLLELARGCRYVGEGIVASHFPFKESVRVYVSARDEDYVRFTEDAKAFYIPGLPWPKYNALKDFSLFIETFSGSIAYTNRGILTLEYTDELYTHWRGSLELDIKRPVPLTLEIVEGTVKKDKIRRVVAMDINLFTTYYLTYDIEEGCYEVGREAIPSLKAKYDFLKRLMRIEVETGYGVLFVTEKLSENLKQLCFHLFEDLTFLEHYLIVPNNKNTKTCYVCGEDLTKRKDKIRVPLYVVEDVEVTLEHTYYYCPKCKKAVDPHLNACLNMLRKARELLGAVLSWIPPKRSGVFRLQNSEQLQQDGY

SEQ ID NO: 44347 - protein, 430 aa, unknown
  TnpB Polypeptide
MIRTHIFACAIPKAEADDLNRESGRVYTDTLVRHYRIYRKTGHWLSMYAGKRVEDGVGGPTTLHAHSRDAVQEGFYKACKTAQALKRAGDHAARHPHKRKWYRTSVWKKAGIRVRDGVLVLARAKGLPAVRAALPAPVAALSASVFSEVRLVWDKAARRYMWHVVVDDGIIPKPTTATGVAGVDLGEIHPAALTDSTSAAAVSCRSLRSTVQYTNKRLSVLRSKQDHLVKGSSRWKRLQRRKNRFLAQQKRRERDLLHKASRAVVGWAEQNGVGRLAIGDVRDVGDGKRLKRTEQQKVSQWSHGAMRRYIGYKAEAAGIAVDDTIDESYTTQTCPSCGTRAKPRGRVYACRACGFRGVRDVVGAANIFSRYRYGEVGRVTPPVHAKYLRPFVRVAGEKRSSRLDTSELARCQGLRAETSLATVGREAAPL

SEQ ID NO: 44348 - protein, 396 aa, Bacillus sp.
  misc_feature (77)..(127): Xaa can be any naturally occurring amino acid
MTKHNKAYKFRLYPTEEQAYLMRKTFGCVRFVYNRMLAERKEAYEKYKDDKEQLKKQKLPTPAKYKAEFEWLKEVDXXXXXXXXXXXXXXXXXXXXXXXXXXXXXXXXXXXXXXXXXXXXXXXXXXXPTFKSKKGRKSYTTNVVNGNIMLLTGHIKLPKLKMVRIKQHREIPQDHMIKSCTISMTPTGKYYVSILTEYEKEIVQKEVETVVGLDFAMDGLYVSSEDEKANYPKFYRKMLDQLAKVQRVLARRSKGSERWNKQRIRVAKLHEKVANQRKNFLHHESKELAINFDVVAIEDLNMKGISQSLHFGKSVADNGWGMFTSFLAYKLQEQGKQLVKIDKWFPSTKTCSNCGIVKDISLSERVYSCICGINLDRDYNSAINIKNEAIRLLALA

SEQ ID NO: 44349 - protein, 412 aa, unknown
  TnpB Polypeptide
MRSQKLRLKLTKEQENKAWWFSKVSRNYWNLLVDIDRRNNNGEFDEILSRNGNKTYHSNFYDRKIYNLSQMDYLNLAKIVVDKNYEEDSETWSWYYQPNQSFIYTFLAREIATVRKRNKGKLNFRSIDTIPPSFNVRCDMSSDKKRPSRIYLKENGKLQIPTLGDVEFGSTRKGFDLSCKKQVANISFDGKYWYLSYTEDVDTQVTDLPNFTDGVGVDLGIKILATVSDGTTVPNIKTFRRVRILNKRLKRLQRKVSRKYLINKCNKHNKTKNIIKLERQIKLIHRSIRNIRINHIRKFVSELVKKQPQYIAIEDLNVKGMMKNKHLAKDIANCSFYTIREHLIRKATERYIAVRLVDRFYPSSKTCSNCGSYKNNLKLNNRVYRCDNCHEKLDRDFNASLNIARTNRYTLA

SEQ ID NO: 44350 - protein, 333 aa, unknown
  TnpB Polypeptide
MDPWRLPGRLPRFKGKNYFTTLCYNQSGFILDVDHQRIRFAHRHPSGIELEFALPKLPPLNGRVKQVELFQDRRHRWFVTITCEVPVPLYVDNGLYQAIDLGVINLVTAVNQKGKFVQIRNRRPDLYWKDKLQEVQSRRDHCRKYSNRWWFYQRKWVKMRRKLTNQLRDFQHKVSKSVVMNTRANTIIVGDLAVKAMARKKRMSGCRRQDTAARTLNHSLQNTGFLGRFVQFLTYKAKKVGKRVIRIDEAQTTRRCCVCGKVRHRRLSERIIQCDCGTPFDRDQNTAINIMVRFLLQQPPVNGEPLQEFLDGLHRHTALPQVPWVADSMKVPA

SEQ ID NO: 44351 - protein, 394 aa, unknown
  TnpB Polypeptide
MRLTERIQLRKTNILSQLCHQAKNLYNLANYTIRQQFFQDCHWYRYNELNRLLNQTAAYRALPSQTSQQILILLDRNWKSFFRALKDWRKNPQKYPARPALPRYKPKNGESILIFTNQQCRVRGGYLLFPKQILPPIKTRITRKIHQVRILPRGHRYTVEIIYEFEPQDLGLDRNRLITIDLGLNNLVTVVNNAGLAPFVIKGGVVKSINQYYNKERSRLQAISGKQGIKRQTQRLQRLILKRNNKIIDYFHKVSRKILDYCIKYNFGTIIIGYNAGWKQRIKIGRRNNQNFVSLPFRRLIQQLQYKAALIGNTVLLEDEGHTSKCSFLDNEPIRHHDNYLGRRISRGLFKASNGTLINADVNGGYNIKRKAVPNAFTADGIEGVGLHPYSILV

SEQ ID NO: 44352 - protein, 471 aa, unknown
  TnpB Polypeptide
MATKRLPISISLRVHGAIPHQPLIHRADASLQIPEGVAAVPPLPALVADPWNWVSSPALQGGFPSKPCPAQPEENGYHLVMLNQTYEFKLLPTPAQVETFDRWLDICKGVWNYALAERRDFARAKKSPVNACSIRQEYIIPPDAPKPTFAKQCAALAAAKPSRPWLKEPHTHVLQQVLRNLEASFVATWERGLGFPRFKKRIRSFLFPQLNKQVLSAGRISLPKIGWVKLRQSRPLPDGAIVKQVRIVKRASGFYAMLSLEQDIDIPEPQPHGNAIGVDVGINNFLATSAGELVANPRFFETGQHRLKELNRLASKKRKGSSRWRIAMHRLARQHERLSNVRKDFHFKEAHRLCDTADTIVVEALNIAGMARGNLSKQVLDAGWSQFISILKWVGLKRGVCVKKVDARGTSQQCPECGAAVPKDLSVRVHDCPECGYTADRDVAAAQVVLKRGIHSASGLGAREARGGEAP

SEQ ID NO: 44353 - protein, 396 aa, Massilia sp.
MFLAHRIRLDPNNLQATYLARAAGTARFAYNWALAEWQRQYTAYKADPALPKPNEAALRRQLNAIKRQQFPWMLKVTKSAPQMAIIQLGRAFQNFFEKRARYPQFRRKGRDDRFALTSDQFRVENKRIRLPKLGWVRMREALRFTGKILSASISRTADHWYASITVDIPEVPLPHAENGGAVGIDLGVTHLATLSTGETVAGPKALRTLLDRLRRLSRNLSRKVKGSRNRSKAKTKLARLHARIANVRADSLHQLSTAITRRFHTIGIEDLHVKGMLANRCMSRAIADMGFAELRRQLAYKAQQRGSQLVIVNRWYASSKTCSGCGHQLDVLDLGTRQWSCPACGALHDRDINAAINLKNMAVSSTASACGGEGAGPVPEARGGTGSSEAGSQRKS

SEQ ID NO: 44354 - protein, 436 aa, Proteobacteria sp.
VRPHRWAPGRQAPSQARPASRCRGRPMRRCFKVEVQPTPTQLKALLQHSGNARWAYNWGLAQHQAAHAAWVEQGKPAKWDGWPNAIALHKDLNALKKRDPQDGGVPWMFEASKCAPQEALRDLDRAFKNFFQGRAKYPRFKSRSRGIGGFRLTGSIQVAQKTIQLPRIGRLRVKPGDHGYLPWGRHSAASVSEEAGRWFVGVVGPESDEAQIEGLPAVGLDLGVARLATLSDGTVIDNPKALAAGKRKLKRLQREVARKKKGSSRRRKARAKVAKAHARVANVRSDALHKATTMLAKSHGRIVIEDLRVKNMTAGGGRRKRGLNRVLLDASLREFRRQLEYKGKLYGCEVVAVAAHFTSQKCSVCGHTDRGNRPSQSVFRCLSCGHEANADLNAAINILEAGSCPDSQNACGVGVRRGGPRVTSQPAVKQESAGTG

SEQ ID NO: 44355 - protein, 371 aa, Bacillus sp.
MIIAKKVRLYPSRIQEQKLWQSVGTARFIYNWTLAKQEGNYKNGGKFISDNELRKEITQLKKTELPWLNEVSNNIAKQAVKDACNAYKRFFKGLSDKPRFKSRRKSKKSFYNDNMKLKVKPGSLVSVEKVGWIKTNEQLPVDVKYTNPRISYDNKYWYISVGIEQEEIQEKLTDVSLGIDLGLKDFAICSDGTVYKNINKTHTVRKTEKKLRRLQRQVSRKYEKNKKGNKFVKTRNIIKVERQIQRIYRRLNKIRNNYLHQTTTSIVKTKPYRIVIEDLNVKGMMKNKHLSKAISKQGFYEFKRQIEYKCKFRGIELTLADRFYPSSKTCSQCGKIKKDLKLKDRMYKCICGFKIDRDLNASINLANYKLV

SEQ ID NO: 44356 - protein, 381 aa, Clostridium sp.
MILAKKVRIIPNVEQEQRLWQSVGTARFIYNWTLARQEENYKNGGKFIKDGGLRKELTILKKSELNWLNEVSNNVAKQAVKDACEAFERFFKGFSDKPKFKSRRKSKPSFYNDNIKLKVKFKMVLIEKVGWIKTAEQIPISVKYTNPRISFDGKYWYISVGIEKEEPISKNTEISIGIDLGLKNLAIVSNIDKPFKNINKTKEVKRLKKKLKRKQKQVSRKYEDSKIEIGKEGENSYKFTKTNNIKKMEREIKLIQRRLSNIRLNHIHQTTTAIVKTKPSRIVVEDLNVKGMLKNKHLSKAIQEQCFHKFISILEYKSKFNGIEFLKADRFYPSRKTCSCCGEIKKDLKLKDRIFICPSCNSSIDRDKNASINLSRYKQSA

SEQ ID NO: 44357 - protein, 511 aa, unknown
  TnpB Polypeptide
MRFVKVFVGGGRMENVRSVRRAVAVEIENPPPELYAVEEAYRRIVEEAAVYVSERGRLEREKYSELYRRFRELYPHLPAQLVQQAINQGIEVGKSFLEARRDGRVRKPRPEVRRVSTRFAKDSWSYKRAVGSAAPARLALSLPGGRREVWIKPHRRLWLYWWKALRGEAELASTLTVKRRRGRWYAVFAFDVKPRGEPPAEIVAFDVNENTVAVARVSLLATVDAVARWNRQYLDPAVYSIRTDFGRLAKRYEAVRGRKLEELKRKYPYAGRDGEEKVQNVTDTREFRKFAKRLRERGRKEGRVRHIAREMTKRPAVIITEELGKNPQEEMIGLEEKKVKKRELRHRVKQTPFRKLLKTIEDKARETDSVVVYVSPYRNSRVCPIHFAPLRDNGGWHTLYCPRGHAVDRDAAAVLNMLWKATPEGAVKGVWWEVKEVGKRLKKEVVSKEAVRRANSIIPRPAAYAVWTSLARLKAGDKWPAVLARAGPTTPARGAYEGGARAPVNRPGGTL

SEQ ID NO: 44358 - protein, 512 aa, unknown
  TnpB Polypeptide
MENVRSMRRAVAVELEDPPPELYAVEEAYRRIVEETAVYVAERGRLEREKYNELYRRFRELYPWLYSQLVQQAMNQGKEVGKSFLEARRDGRVHKPRPEVRRVSTRFAKDSWSYRKAVASIAPIRLELQLFGRGAKRQRYELWIKPHRRFWLYWWKTLRGEAELASTLMLKRRRGRWYAIFAFDVQPKRKPPAEAVAFDVNENSVAVARVSLLSTVDAVARWNRRYVDPAVYSIRTDFGRLAKRYEAVRGKKLEELRRRYPFAGRDGEERAQNVADTREFKRFAGRLRERRRKDARVKQTAREVARSPAVIITEDLGENPQEGMIGVEEKAKRGVKKKVKRTELRHRIKQIPFRKLIRAVEDKAAEGGSAVFYASSFRNSKACPIHFAKLEDGGDWHTLWCPHGHAVDRDAAAVLNMLWKTTPTGWVKGVWWDAKEVGKRLERERGLMPKELAERKNPLVPWPVVRAVWTSLTRLKAGDKWPAMLARAASMTPAGGAYEGGARAPPRGAPAL

SEQ ID NO: 44359 - protein, 465 aa, unknown
  TnpB Polypeptide
MQRSKTKKSKRRKERTVIFPPMSKLPFHYGLQLRIYPSCEQMRIVHRNIDAGRWYYNQLVAWGRLRLPKTKGNFPVFDAMRQRCDELMDTRIKEWKDTHPWLNNEDLDSCTFVLAHKAYQAAWNLCKKVKSAGRPNFHKAATHQSYQTSCHYNGKAILAAGEKPDLTNGSVRLLDGRHLLLPKLGSVRYKGSPKLLEKVRRMGMVRIGTVTIRILPTGEVWASLQLASDEPFAQPMPKTGKTVGIDLNLSNFLTDSDGNVVKNPRHYRRMMAHLKKSQRRQGKRLSRAKERMGMKPADHMSRRQLRELGNYQKASLDVRKQQQKVRRQRKDFLDKLSFQYIKNHDTVAAEELRSKNLMKNHALSMSIADAGWRTLLDMLGRKAQMYGKTFVTVNPRNTTQTCSACGHVMKGEGKIRLGVEEWTCPVCGTHHSRDWNAAKNILAKGLEKLGSAPPVPLWAPALVEG

SEQ ID NO: 44360 - protein, 421 aa, Mycolicibacterium sp.
MAKFEVPEGWSVQAFRFTLDPTEDQARALARHFGARRKAYNWAVAVLKADIQMWRETGVETAKPSLRVLRKRWNTVKDSVCVNAATGDVWWPECSKEAYADGIAGAVDAYWNWQASRAGTRAGKRVGFPRFKRKGRDADRVLFTTGAMRVEPDRRHLTLPVIGTVRMHENTRRIERLIRAGRARVLAISVRRNGTRVDASVRMLVQRPQQSGVALPESRVGVDVGVRRLATVTDADGNVIERVPNPRPLDAALTELRHVSRARSRCTKGSRRYRERTTEMSGLHRRINDVRTHHLHVLTNDWPTSTATSWWKGWMRRECCGKKGCPEHALVGADSRMPPWAHRAATCPTRRAGTGHNWWSRTAGSHHRKPATSVGVSRTSAGMRIGSAKVARPRISVTTMPLSTSHATRKHLASSAQLGPP

SEQ ID NO: 44361 - protein, 533 aa, unknown
  TnpB Polypeptide
MNKWRTVKIEKLSEIINEEEYNKIYSLINDLNAELKSLLTLISNDLDTIKDLECLDSSGNFRNYIIKQYGKPYKTWDHIQGNKAKYYRIIIEQARKSILSLKERILIAEICKKYNYDINNDNIIQELKDDNIDYTEGIIRNICRARKEPVFNTDIDFILDFTSEDNQISNVKYYDNKVYYSIKIYDEWINITVSIPDYVRLITGKFARPIIQKNKENQELYLRISYETPEVKMMSNKKDTTGVLSCDLGKIKPFSAAITYEGGSYSTELIASRELERLNEKLSVLNKEKNLLWSKIERNSSLLKGKHDDYLFNHLEDQYSQRKFIINKISRLKEHMGWVIARDIMMHAYYHNVNTLKVEDLKWLDSRGGKWDFSNILSKLIEISELYGVTVLLVSARDSSHTDPFSKERINPLKDRTVNTSNGVMDRDYCAALELGTRKGRGIKKSKIVDKSKKKERVLKRGHTRDKHCSTPKRPRVLRRTTCYKLVKKRNVSLSDFENTTGTSIAVVSSGTVSNNVLCLPLCDSYNVYSKAL

SEQ ID NO: 44362 - protein, 397 aa, unknown
  TnpB Polypeptide
MTEKAYRYRFYPTPEQEQLLRRTLGCVRLVYNMALHTRTEGWYAHTERIDYKQTSAMLTDWKKQEDLQFLNEVSSVPLQQGLRNLQKAFTNFWAGRTKYPNFKKKRSGGSAEFTRAAFRWKDGQLWLAKCSEPLPIRWSRTLPKGCEPSTITVRLDASGRWFVSLLVNDPTVIPLSQLDKSVGIDAGITSLIATSDGEKILNPKHFKRLRYKLRQAQKALSRKVKGSNNREKARHKVARIHATIADARTDFLHKLTTRLVRENQTIAVEDLAVKNMMKNHKLAQAIADASWSELLRQLEYKCQWYGRTLVKIDRWFPSSKRCGNCGHVVDKLPLDVREWDCPECGTHHDRDINAANNILAAGLAVIVCGANVRPDRHESKGQLRKTSNKGRKQKPKS

SEQ ID NO: 44363 - protein, 393 aa, Burkholderia sp.
MQRLQAFKFELMPTGEQRGDMCRFAGVCRFIFNKALALQQKNREAGGKFIGYVAMAKHLTAWRNSTETPWLKDAPVHPLQHALKNLERAYRNFFAGRTAYPRFKKRGRCDSFRYPDAKQIKIDQANDRIFLPKLGWLRYRNSRDVLGEVRNATVSQNAGKWFVSIQTAREVEQPVSKATSAIGIDMGIARFATMSDGSYLAPLNSFKLHEARLCRAQRAMSRKTKFSNNWKKAKARIQRIHARIGNSRRDYLHKATTTISQNHAMVCIEDLQVRNMSRSAAGSRDAPGQNVRAKSGLNKSILDQGWFEFRRQLDYKLAWPGVAAGSLPCRRGTRAGRARPATMCRLIIGGHKRGLRAWPAASRKTPMWSARSTYWRGDTALQPVESRCSRAAP

SEQ ID NO: 44364 - protein, 392 aa, unknown
  TnpB Polypeptide
MIVLEFKAYGKLNQFTAIDEALRTVQFIRNKCLRLWIDGLGKSQYDLNKYCAVLAHEFPFADKLNSMARQASAERAWSAIARFYDNCKKKVQRLKGFPKFQKDNRSVEYKTSGWRLTDDRKSITFTDKNGIGRLKMKGTRDLNFYQPDQIKRVRLVKRADGYYVQFCIQVERIEVIEPTHKTIGLDVGLESFYTDSLGVKVENPRFYRIGEKKMKRSQRLVSRKVKGSGNRRKARVKLARVHLKISRQRKDHAIKLARCVIASNDVVVYEDLRIKNMVKNHCLAKSINDAGWYQFRVWLEYFGKVFKRVTIAVNPAYTSQECSSCGVIVKKSLSTRTHVCQCGCVLDRDRNAGINILNSGLGTTGHVGTFALDASNASGESTSILVGANLLG

SEQ ID NO: 44365 - protein, 441 aa, unknown
  TnpB Polypeptide
MYHHQFITSTINTASTVKLAHKIELIPTTAQQEYFQKACGVSRFAYNWALANWNSQYQDWKEAEEEAKKNGTINHLSKPKEYELRKQFNSIKSEQYPFVKEITKCAVQQSIKDLGVAFVRFFKKTSNYPQFHKKGIHDSFYMDNVSFQVVDKRIHVPKLGWVKMRENLRFYGKIMSATVSRVADKWFVSIQVDVPLNFLKVANKLYSENQAVTNSEADKLTTPSQLKVVGIDLGIKTMAILSYDDKIEKINAPKPLKRLLSKLKRLQRKLNRQGQKYSMENYVDANGETRKIRKYSNNYMKTKIKLARLHAKIRQIRQDFLHKLTTKLVEEFDVICIEDLNVKGMMANHKLARSIMDLGFYEFKRQLLYKAQMYGVTVVIADRWYPSSKTCSHCGEKIKELDLSVRDWECEHCHTVHDRDANAAINLRKLYCTASLAGAAL

SEQ ID NO: 44366 - protein, 620 aa, unknown
  TnpB Polypeptide
MIDEKGVRKVRCVRCAGGRMSARVCVRYVTWCDLLGGERDRVPVHGGSAPGRVGTVTSALGGASPGVQAGDSRLASIGGALILDVRPDDRQRDTAARCGEVGRGPQVLAVSADPVSLAEPSRGYALEGVHQRGDRDLGRVLDQQVHVVVFAVALRQGGPEVLAHLSEDLGEVADHVPGEDAMPVFRHEDQVNVQRGNNMPATPVLVVSVHRLTWYSGRVLARYRYRVYPSPSQEMMLARTFGCARVVFNDCLRLREESHAAGEKISDTDVQRRVVTLAKATPERAWLGEVASVALVQACQDARRAYRNWFGSLSGKRKGRKVGHPRFRSRKDHRQSIRLTRNGFALHGERLYVAKVGDIKVRWSRDLPSEPSSVTVIREADGRYYASFVVEVAATPLPAVSHDVGLDLGLTVLTATSDGELIANPRHLRRHERKLARAQRELSRKQKGSANRVKARAKVAVQHRKTREARADHAHKTALRLVRDNQAVYVEDLAVSGLARTRLAKSVHDAGWATLVRLLEEKAGRYGRRVVKVGRWFPSSQICSACGVKDGPKPLDIRQWTCGDCGTSHDRDINAARNILLEGRRIAAGQAEISNACGGTVSPGFAPAGPGETGTRRSAA

SEQ ID NO: 44367 - protein, 513 aa, unknown
  TnpB Polypeptide
MRTIRRFSRPLNTGKWKALVELARRYAREKEGHLLAFGQDACFAECASERARRDALVAAGYASAHGLQARAWKMALKDAYETLDKQWASLAAELRPRIAQQGDWSAAQKHYAYWLLEDSRRLAQLMAGRAPLPAHFEIDRAQRKTVQNYWRRVIRRRRGTRPHVKVARSIALDANMYSVFEQDGAQYIKVMSLTPRQRIVIPLTGHTPLRGNIRLVLDEEKRRVEIHYTAEVKPTRPLTGDPCALDAGVSEVFTDECGHRYGAKFGSVLTRVSEDLCDTGRKRSRLHQIAKQARARGERGKARRLRRYNLGHKKQQRQRCGCRTEMARQINTGVNAVLRQRKPAVIITERLDLRGKTKSKRLARQVSLWARKTLKERVEFKASAGGSRREQVNPAYSSQTCPTCGFVHRDNRRGDVFQCRYCGHADDADRVAAYNLKARYGDPQITLWTPKERILAILLDRFNARLESRSFATVSGRTPGAEGAWAHRQPESETTDAILLCARENVSAKCDHI

SEQ ID NO: 44368 - protein, 384 aa, unknown
  TnpB Polypeptide
MKQIFISYKYRLYPNKTQIILLNKTFGCVRYYWNQQVSIFKTYNKETNPKPEFKASTELRNENEWMKEVSAAAIQQKEIDFKEYKKQLFSKTRKKKIGFPSFKKKNNRQSFRLPNQKFKIIDNKIQLEKIGKIKIVIDRELPIGKLMSVTISKNPSGQYFASVLIETEINHKIKTNKEVGIDLGIKTFATQSDKIEIGNPKFLNKNQVKLKRLQQHFSRKQKGSNRRNKCKLKIARLHQKISNQRDYFLHNYSTYLINNYDRIFIEDLNVNGMIKNHCLAGAISDVSWSKFVSMLSYKANWYGKDVIKVGRFYASSKTCKCGVKNNNLKLSDREWICKSCGSVNQRDLLASQNILKEGRRSLGDITNAEAEVTKSMKRLELNVI

SEQ ID NO: 44369 - protein, 380 aa, Halobacteriales sp.
MKHEVAKTIRVKLHSLTNVKEGLLSREYEAFQRAVGGEDAHLYSATKQQARKVRRQKNPRYEQPVVLRNDVITVVEQDLPLSKWWVKVPVYNPEKERGGSVWCPAIVPKKDHDLVRGGEIADSELVRRDGEWFVHLVVKRQHKLQEEYDDLLAVDMGARWIAVSVALSDRDTTFYGDDVRRIREHYKLLRKRIGKKKVEKGRQVIERIGNAESRKVEDRLHKIANAIVADAADRNALIVLGDLGGIREDNDKGRYANDKIHRFPFAKLRTFIEYKAREARIEVLTVDEAYTSQYCNRCGSEGMRPSQGLFECPSCGLEDNADKNGALNIAKRALGKFQRPLSNAGAVLAQPITPAPETGELPPVVGTTPSEGTPRLQSWE

SEQ ID NO: 44370 - protein, 313 aa, Clostridioides sp.
LTNLKKELKWLKEPDKFSLQNALKDLDNAYKKFFKEKAGFPKFKSKKINRFSYKTNFTNGNIMYCGQHIKLPKLGMVKVRDKQVPQGRILNATISKEPSGRYYVSLCCTDVDIEAFENTNNHIGLDLGIKEFCISSCGEFIENPKYLKKSLNKLAKLQRELSRKTIGSLNRNKARLKVARLQEHIANQRNDFLQKLSTKLIKENDIICIEDLQVKNMIRNRKLSRLISDVSWSEFIRQLEYKANWHGRQIVKVGKFFASSQICNKCGYKNEEVKDLNIREWICPSCNETHDRDINASINILKEGLRLITIQNK

SEQ ID NO: 44371 - protein, 534 aa, Nocardia sp.
VVAAPAGVRIRTRLHLTADEARTVREIGEFNGHVYRRELAARIALGTLDRRQQSAYRADRKRAVTAENSSRWAGTITRAVEDQYQSGIRALTAHASGLDAAIATLSARCALAPRERAGKITGYRDEAEWFAKTRRLQVLQERAGKVHAALAEGRPSIVMGGKRLWRTRNHLDDAGISPEQWRQAWDATRMFLTADGETGKIGGNETLRVTPGTRHLRIKVPAALADRLGTHLTLAAPVEFHHQGMQWQERIEGSRAVRYDITYDPDRDRWYLDASWTLEPTLPPPLAALRAGRVLGIDLNDGHLATCALDSSGNPIGTPATIALSGQGSSASRRDGHLRTALTAILDRAEYAGCTAIVIENLNFADARATGRETMGRGRRGKRFRHAVAGIPTARFRDRLCAMAARRMLAVVAVDPAYTSKAGNRYWRKPLQAQSNTSDAIVSVHHGAAVAIGRRGLGVKLSRHSSGPRHAQRSVAGQPSSLASAAHRDRVAGEKRCLGTGPCGRPDRSGSERHPSVAKTVRAATERYSLSLNE

SEQ ID NO: 44372 - protein, 454 aa, Nocardia sp.
LASGDLQARCADGTAHDRDRWAERKRALTAESSSRWAGAITKASNELWALARRGQQAHLRSLEAGIAILRARLALPIGAAGTGGKPGGYRSRREWFAKSRRLQILSIRLEAVRADHDAGRVRVVRGGRRLANTRHHLDAAGLTDSQWRARWEAARWFLTADGESGKKYGNETLRITPDGEISLKLPAPLAGWANAPHGRYVLAARVGFAHRGEQWRARVSADQAVAYRIDYDPARDRWYVTASWQHPATPDVPLAAARAEGVIGVDVNADHCAAYRLDRHGNPIGNPRRFDLELTGSTARRDAQVRHALTGILSWARREGVSAIVIEDLNFDAEKTREKHGRRKGFRRLLSGLPTGILRTRLVSMSATAGISVIAVDPAYTSRWGGKYWRTPPSGGGRELTRHEAAAVAIGRRGLGHRIRRRMPPPRPHRSDGAGPRSIQTAPEPGTVRDPAHP

SEQ ID NO: 44373 - protein, 425 aa, unknown
  TnpB Polypeptide
MERTNKFVVVPQSDEDEELLRRLLDASAALWNEINYEHRQNYADPDGDIWDISEYRGRYGGVLGASTVQQIERKNRKAWKSFFAKQQKGEPTGKPGYWGNEDDGREFRTYIRNTSYSVQWGEHSRLEILVGKDLKDEYGLGYRERLKLEVRGNPNWKEYQKQGRLELYYDEQAQTFRAFQPVTIDDSRLAHPLASEEAALDIGANNLVACTTTTGQQYLYEGRDLFRRFCKTTREIARLQSLLRDGRYSSHRIRRLYDRRTKRRDHAQDALARDLIERLYDEGVSTVYVGDLTDVLETHWSVETNAKTHNFWAFRAFVTRLACTAEEYGISVEVRSEAWTSQTCPNCGSTTDTVRHQDSLACSCGFEGHADLVASESLLRRQTTVTRSMARPVCLKWDDHNWSESPRSPRPNEEHTNPQVASVGR

SEQ ID NO: 44374 - protein, 411 aa, unknown
  TnpB Polypeptide
MYSYKVMIHPNNKQETKIRRTLNKCIECNNIIYDYLDSFIKNNEKIPSCGDVRKWFTIQKGILDNEAINKRKNMTKKEMRSNHLDTLFYDVSNDALKQEIKDTYNSFIRYFNKLSKYPVRKKYNNYKKSFYVDSYKIEFSDKKVRLEKIANNQKKNRQILNYINLAEKGRIPTNTSYYNPRVILEGDRFYIVVSVDDEYASKKKIETTSNIIGIDVNVKAIVTSENVFYKAVTFDKNYKKALKKEKRAQNKLSRKYIKSQELKKSLKESKNYNKQRKIKNKYTKRINNLKEAHIDYVITSLIHQRPKIICIEDLDVKGMKESEEYEDVAKGIQQNPFRKFLKALEDRCNNYGIKIIKVDRYYASSKTCNKCNYKKKDLKLGDRIFICPNCELKINRDYNAALNIKKYALEH

SEQ ID NO: 44375 - protein, 378 aa, Ignavibacteria sp.
MKLTAQIRLDSTPEQRDALRETLRRANAACDVISAEAFEHKIFAPYKLHERVYRRIREEFRLSSQVVVRCLGKVADAYKLDKDTQRTFAPLGAIAYDARILSWNFFEHTVSIWTIAGRLTIPFTCCGEHHTDLLCAQKGECDLVVRNGTFYLYATCDVPDAPMMNTKEALGVDLGIVNIATDSDGEIFSGTEIEQTRTWYAKRRATLQSVGTKSAKRRLKKLSGKQRRFQKNTNHRIAKTLVAKAKGTKRAIALEELTGIRKRVTVRKSQRGRHSNWAFGHLRQCIEYKAQCSGVRVILLDPRNSSRTCSACGHCEKANRRSQAEFVCVSCQHTSLADVNAAINLKMWAAVKQPMVSKTHIRHYAGSGTNHPTLAGGV

SEQ ID NO: 44376 - protein, 402 aa, Saccharothrix sp.
VPARYRYRIEPDAARQAMPARTFGCARVVFNDAIRCRTDAHQAGESISPAEVQGRVITAAKATEARAWLGEVASVAPVQSVRDAHRAYRNFFDSIAKRRKGRKVGHPEFKSRKDTRQSFRLTRNGFSLRPNGRLYVAKVGDVKVRWSRDLPSEPGSVTIILEPDGHHYASFVVEVAPTPLPPVEREAGLDLGITRLATVATSDGRRQDVANPKHLAGKLRKLARLEREKARRAKGGKNRARTGRKVAVQHGKVTRARRDYQHKQALNLIRDNQAVHVEDLNTAGMVRNRRLARAIHDAGWARFVRLLEEKAERHGRTVAKVSRWLPSSKTCSACGHLMAEMPLKVRTWTCPSCGTAHDRDHNAALNILAAGRAERLNACGAHVSPSVRVAMGDEAGTTPDAA

SEQ ID NO: 44377 - protein, 342 aa, unknown
  TnpB Polypeptide
MEIAKRLTHSLTEDYVRAVPYQIKKIAVKDCYAAFRNGCKKAKTSGERFSLKYRSRKEPRQSCYIPKSALSAYGIYHRISGELRMREADLIARYEHTDLRLVKDCDRWFIVVPMVMGDTRLAVSENQGSGDVVALDPGIRTFLTYFSENGHFGHLGVGFRRVMSLQYRIDKLLSARDLLKGKECRERRNNLRRAVGKLRYRLRCLVDELHWKCINYLVRNYRVILLPTFETSEMVRRGGRKINKTVVRAMQSYRFYEFGERLAHKCCEYGVTLLRVNEAYTSKTNSFNGEVFNIGSRKSFVYDGVTVDRDMNGARNILLRAVRDSSVSAAMPHTFSAMAERR

SEQ ID NO: 44378 - protein, 418 aa, unknown
  TnpB Polypeptide
MEVRRTAPVKLVVPDERRDDLHESARQFLHCANRTSEFCWSDNSYTECITANTTARDALYGDLREETELTANLVQEAIRRAVQATKGCVERWKQGKRVSQPEFTSWSMLYDKRSATFYRNKVSLSTVNGRVECDFELPSDSPTPYEQYVLSEEFEIRASTLQYDVVDDEFYFHIATRKYDGEGDSESSEVSADTKHQTVLGIDLGVNSLAVSSTGTFWQGDNYDHWCRELEKRRGEMQQRSTQAAHNALLRLGKREDAWRKQYIHTVANELVIEAVEHDCDVIVFEDLTDIRERLPHAKWHHVWAFRRLFEYVSYKAPEKGVSVEQVEPDHTSQRCSRTDCGFTHDDNRDGEHFCCQKCGYEVNADYNGAKNVGLRYARKRRHRLRSSPTSGSGDAEVDLRVNGGTLNGKSHRPIAGD

SEQ ID NO: 44379 - protein, 374 aa, unknown
  TnpB Polypeptide
MKTYCFKLYKSKRNKKLHRQIDTAGRIYNHLIALHKRYYRLYGKHLNIYKLQKHITKLKKTRRYTNWNSLGSQAIQDITERIDKGYKLFYRNLKARVRTAPPSFRKVNKYKSFTLKQAGYQFHEDNTITIMGTRYKYFNSRNMEGVIKRVTVKRDSLGDIYIYVVCESSPKCIKSGSGKSVGLDFGLTTFITASDGSTIASPLFFAKNLKRTKELNRNRSRKKKGSNHYRKAKLELARHHKRIANQRKDFHFKLAKSLAGEYAVICIEDLSMKAMQRLWGKKVSDLGFADFVRTLEHQCSKTNSKLIKVGRFYPSSKTCSNCGHIYSELSLSERSWICPACKVHHDRDRNAAINIHRVGASTLRGGVVRPAAAG

SEQ ID NO: 44380 - protein, 381 aa, Halomonas sp.
MTKCAYKYRFYPTPEQEQLLARTFGCVRFVYNAVLRHRTDAFQERREKIGYTAANAYLSRLKKAEETAFLNEVSSVPLQQCLRHQQAAFKHFFEGRARYPRFKSKRHRQSAEFTRSAFRYCDGQLFLAKCAQPLAIRWSRPLPSEPSTVTVSKDSAGRYFVSCLCEFDAEALPVTPEMVGIDLGLKDLFVTSDGYRTGNPRHTAQHAARLARAQRCLSRKKLGSSNRAKARQKVARLHAKISDCRMDNLHKLSRRLINENQVVCVESLKVKNMLRNPTLAKSISDAGWGEFVRQLEYKAEWAGRQVVAIDQWYPSSKRCSECGHVVDDMPLHVRDWACPECAAEHDRDINAAVNIRAAGLAVLALGENVSGMGQVSMSGSR

SEQ ID NO: 44381 - protein, 416 aa, Prevotellaceae sp.
MQQTKRIRIKPHAELERLCKISNDLYNQSLYHWKKRYDENQEFLSFYELRDEVKQLTNLQGNRNYYLMKAQTSEYSVKLAHNAIKAFFQAIKKWQKTPELFKAKPEFPRFHKSGGLTELYIPCPHDCQIKDGSIIINKDCFIHIPRFEQWQERFQHAKMVRVIPGEKHMTIEVIYEKEPVAADVDTNNVAAIDLGIDNLCTVVTRQGCTLFSGKALKAYNQFFNKQKAQLQSILAKQTEGKRSSKRIRAMYDKRDRFIDTYMHTLTRRIVDMLVAERVGLLVIGHNKGWKQEADMGRKGNQRFVQIPFFKLQSQLKYKCEMVGIRCEEQEEAYTSKCDALAMESIAKHDDYAGRRKKRGLFQSSTGTLLNADQNGAMNILRKYLGDEMYRQLTADWKLTPPKTISISTNFKDQKAD

SEQ ID NO: 44382 - protein, 380 aa, Methylococcaceae sp.
MILKAYKYRIYPNNSQATLLAKTFGCVRVTWNHNVEVFNKYNKDSIEQVKPLTSTELRKKFEWMREVSAAAIQQKEIDFKSYQKSYFSKNRKGKKVGRPSFKNRDSNQSYRLPNQKFTLNSDSIKLEKIGKVKLVLDRPVPTGCKFMSVTISKNKCNQYFAAVLVETEIIQKIKTGKSIGLDIGIKTFLSGSDGSTVENPKFLRDSQAKLTKAQRNLSRKKKGSARRKKAKLKTARIHNNIANKRKDFIHKETTRLVTEFDFIGIEDLNVAGMVKNHKLAKSISDASFSEFYSVLSYKAAWHGKEVIKIGRFYPSSKTCSCCGWKNDELTLSDRIFKCKSCNFEIDRDHNASINILEEALRVNSAIRTQSEHKSTQLLAA

SEQ ID NO: 44383 - protein, 396 aa, Pseudanabaena sp.
MEQVLTVACKLQVDTEQVDKLNATLLAFSDACNYINQTIDPKLTNNVRIQSLIYEQIRDQFGLSANLAIRAINRVAGNRKTAKKAGKPVKAFKPTSADYDARIFSFREKDWTVSLNLVGGRERFKLSIGNYQRHLLNGKIPTSATLCKHQDGNFYINIQVKSMPPDPQPTDKVIGVDLGRRDIAVTSDGATFSGEEVTAVRDRFAKLRQTLQKKASKGTRSSRRRIRKLLQRLSGRERRFQQWVNHNVSKKIVCKALSVNATISVEDLTGIRERTNQQPRNKTERRRSNSWAFWQLRTFLEYKSIRAGIELVKVNPAYTSQTCHVCLHIHPVQGKSYRSGKHFRCEHCSWHGDADLNGALNIASLGTVLVNQPGGSGLSCSLNKHLRATESPRSIA

SEQ ID NO: 44384 - protein, 410 aa, Pseudanabaena sp.
MIVYEFKVKGKDKQYRAIDDAIRTSQFIQNKALRYWMDNRGISRYDLNKYCAVLADLFPFADELNSMARQSAAERAWSAIARFYDRCKKKVKGKKGFPKFKKNCRSVEYKTSGWQLSLTRKAITFSDKKGIGTLKLKGTYDLNYYNIEQIKRVRLVRRADGYYAQFAIAVNVRVETQPTNQVVGIDLGLKYFIADDKGNVEQSPQFYRQSEKQLNRANRKKSKKFSTAKKKAKQRQSINYHKARNRYARKHLKVSRQRKEYCKRIAYSVIQSNDLVAYEDLNVKGLVRNRHLAKSISDAGWSTFRAWLEYFGHKYEKVTVAVPPQNTSQNCASCGKKVKKSLSTRTHVCPHCGYTEDRDVNAAINILRLGLSTVGHTGTYAWGDLPSWAVGENLLSNGESVNQESQRLQT

SEQ ID NO: 44385 - protein, 386 aa, unknown
  TnpB Polypeptide
MKLTLKIKLLPTDKQANLLLNTMKEANTVCNAISDVAWEKKIFNNFKLHHETYHAFKPTFNLSSQVLIRCIAKVADAYKLDKKTKRKFRPLGSIGYDSRIMTYKPNDIVSLWAIGGRIKIPFVCHNRNYLPYIKGEADLVYKKGKFYLFQTIDVPEEDIKDIEEFIGCDFGLITIIATSDGISHSAEWLNTYREHRQKVRSSIQAKADTSKRSTKRNCRKLCKRLSGKERTTANLVNHTISKSIVESAKEQGKGISIEDLTNIRFTSKRRNKKFRTKLGKWNFADLRAKLEYKALLNGVKLVVVNPAYTSQTCYSCKHIGKRTNKVFKCINTNCKVDTIDADYNASKVISLLGSAVNQSEKSNDMCCSIAHVYSGLKPNPSLCVGG

SEQ ID NO: 44386 - protein, 423 aa, unknown
  TnpB Polypeptide
MILAQKYKLKLNQNDKFIIDKLSYHSARLYNTCIYNIRQYYFDNNSYLNYAEQYHQIKNNENYKLLITDIAQQTHRLVDRNFKSFFSLLKLKIKGKYSAKVKIPSYLDKNKGWSILVAGRSARIKNGKIYVGLSKQFKENYDINKKDLIFNLPKNLHNITKLQQLQIKPIYGGNEYELIISYKKDDEDKKLNKNNILGLDCGLDNLLTSYDVKNKSSFIIDGKPLKSINQHYNKQKAKLQSEYERNKLENINTKKFIKLSEKRKNCINNYFNQTVNKIVKYCINNEIGTIIIGDFKGIKQEINIGKINNQNFVSIPFGMLKRKLEMKCEYYGINYVLQEESYTSKCSALDLEKICKHETYAGKRIKRGLYKTNNGKLVNADVNGACNILRKYKCKSDGDLSLTDVSGVINHPVRINPTKPIGF

SEQ ID NO: 44387 - protein, 458 aa, unknown
  TnpB Polypeptide
MSSAGELLVDEERELTTPAIPEEGIHEVEFKNKRTNVVRLLPNGFQERKLRRLADTSAKLFNGLNYERRQQFFKEKEVDFRGTRNKYYEKYKRTLKVNADQIINKNNEEWSSFFSLLKLKKKGGLPPHTKRVGVPGYWKDEAGKRKPLLIIRQDRYEVDEQNHRLTLKDFNMELEFAGKPGWGGKQGRMEIHYDETRNAWYASIPVEVGIKTTKKGNKAKYIVQGERKTIQVKTPKSNRVASIDLGINVLASVVVNDGTWLLYKGVRTKEDYFYFEKKISEVQSLADKTKNIGEHDAYLELLREIRRLFSKLQRRLLHLYRNFAFHLLETLHELGVSTIYLGYPFSIAQHKGNKFTVNMWSYRRLVDAIELKAQEYGMKVFEVVEYNTSKYCAYHYVEVNRKPRGVVSCPKGHKLHSDLNGALNILKKAIGTVVSTVRKPLSFLVLHNGVAPVKGCNP

SEQ ID NO: 44388 - protein, 312 aa, unknown
  TnpB Polypeptide
VYIDLEPSKEFYKLLARGFKPTSHAKIKLDRKNKRVIFHLSLEKEVEIYRPGNIKPVDVNENSVATLYGAFAAILETDLAKTTLGYSYRKKSIQKRNGFDSREARKAMKKLREGKKKKDYRMKTANLIVRDALRTRGVIVIERISGDDIRVMIARYRDKQLRHRIYQSALKGELNTIIDKAREYGVPVLMVDPRNTSKICPIHNAPIEYGEDRIGICSKGDERWHREVVALINIYLKALEALYEGYAQKGFGVSSIDGSPVPLGSTATSEPIEIPRSLWGRWKSLDDHRDAIASLWIKKQNNPKQININDSQ

SEQ ID NO: 44389 - protein, 431 aa, unknown
  TnpB Polypeptide
MKVVRIELLKDLGEKTEAYLRENQLEAAKCWNLCMEMHRAARNSKQPWPGLNELHAATKGKFQLAAQSVQQIVRAFLGSIATTKKLKSKGYIKARYPHKEKRFFPIMWPTQAVAIYEKKIVLPMGRGRKSIVLKRPAELPDGGAAARIVWNRTGYELHWALNAEEQAPVVSEVRATIDLGQIHQAAVSTNTGKALIVSGRAIRSEKRGLNMMHGRLARKQDRCEKYSRRHRRLQRARNKQARRFERRIRDLRHRGVRAVIDFCVATGVSKLFVGNPKGIRKAAKGRKHRQRMCQWEYGKDIQYIEQVGTRAGIECFDGNERGTSSRCPRCGHRKKPSGRNWNCPRCSFKGHRDIVGSVNMHELSFGQKIEFPVAITYLRPGQKSFWQAAGMKNPRLGSSSGLDTGRERRASGARVAEGVPSVHPPTAVGRR

SEQ ID NO: 44390 - protein, 405 aa, Actinocrispum sp.
MIFVRVRYRYRVEPTEAQRVMLARTFGCARVVFNDALRCRTDAYHAGEKISPTEVQRRVITEAKATPERAWLSEVASVALVQSVRDAHRAYQNFFDSITGKRRGGPVGRPRFKSRKDNRQSFRLTRNGFSLCPNETLYLAKIGDVKVRWSRELPCEPSSVTIIREPDGHYYASFVVDVAPTPFSPVGQEAGVDLGISRLATIVATTGRRVDVANPKHLARGQRRLARLQREHARRTQGGENRAKTRRKLAVQHGKVARARRDHHHKQALTLVRDNQVVHIEDLNIAGMVRNRRLARAIHDAGWAQFVRLVEEKAERYGRTVHKVDRWLPSSKTCSVCGHVMDAMPLRVRVWTCPGCGVGHDRDHNAAKNILAAGQAERRNAGGARVSPSARVAMGDETGTTPDTA

SEQ ID NO: 44391 - protein, 202 aa, unknown
  TnpB Polypeptide
MEYAYKFRIYPSKQQETLILRTFGCARYVYNYYLNQRIQAYKNTGKSPSRFEQDKDLTNLKKQGETAWLREVDKCALQNSLKHLDRAYQNFFHSVNCGAHVGFPRFKSKRNRHQSYQTNSNIKVFDDCVQLPKLGKVKCRISKEVKGRILSATVSRNPSGKYFVALCCTDVKIDALPSIGVNCTQENGHEILTHGPVRRTRI

SEQ ID NO: 44392 - protein, 314 aa, Halococcus sp.
MEVKRTIPVKLDVPDERRDDLHTTIEQFNDAANYTIQNGRNDDGYLTLNKSKIHDRVYYDLRDRTDLPSNLCVRAYSKAVEAMKSTVADWKKGNSRPLPHLSEPSAVYDKRTLTIRDRSATLSTVNGRVEVEYVLGDYQRSYLDDDEYERRMGTLHYREDEDAFSLHIVVLKEVKQRGGDRVLGVDLNLKNVAVTSTGTFYDGGRLLWGQNHHFRVRRSLQDKGTRSAKQTLRQVSGRETRFVLDRLHTISRRLVEEARDYNCAFIAVERLTNIRERMDNGNDRIKRQMHNWAFRELRDMLAYKAAEYGFASKT

SEQ ID NO: 44393 - protein, 501 aa, Calothrix sp.
MSTITYVKGLPTPSKEMNNLGFTKFEMFLTDFSLLFRQATIKAVDIILSSNNFEKIKSQLNTQLQKEFNLSKRQVNGVITLALSKVCSASECRKNHIKQLEGKLKSALTWIKNAEKRLLDSQKFYAKKNWLQSKTGCKFPLCCDLNTGCSNWHSLKFQIHNKKRYVYQLDQKIAHLKTARLRVKVASSEVFIVGSSDESFGNQTCQYDGLKLSFRVPYCLEASYGKYVETEIGNFDRNINRLPLCGAKTWHFYRKNNRWIVAVQFTPKPVPKVSRAIQYGAIGIDINPGSIGWAYVDNCGNLKEFGTIPLQSGLGKNFNSQQLVNASLELATLATKYACPVICEELDFSKKKELLREKGRKYARMLSNFAYSKLYQFLESILSNRGISLYKKNSAYTSIIGLVKYSKMYGLSSDVAAALVIARRGMNLSERLPASVSAYLEVNPRKHVWSGWSKLNKITLNAAIIKSRHDYFSVPNWRMVVKDIVEQVRVKTERRAASKST

SEQ ID NO: 44394 - protein, 419 aa, Micromonospora sp.
MADALLATIVSFGKICGVRTAYKCRAYPTPEQAAVLNRTFGCVRIVWNRALAARHARWHTERKSTSYAETDRALTQIKKLPDLAFLNEVSSVPLQQTLRHQHNAMTAFFAKRARYPRFKSRHGRQSASFTRSAFRMRGGVLSLGKTPGTLAFVWSWPDVNVTTLNPTTVTVSRDPDGRWFITLAVDVQAPATPEPTDRAVGVDLGLTDFAVLSTGQRIPHPKHMERRERRLKRYQRMMARKKKGSANRAKAKRKVARAHSRVRDARRDFLHKASTELVRRFDAIAVEDLAVANMVRNRSLAKAISRCGWAEFRTLLTYKAHRDGRHLAVVDRWYPSSKTCSACGHLLATLTLGTRRWSCPSCGTRHDRDINAAKNIAVAAGLVETKNACGADVRHEVSPSVLSAVNQELAGASPGIPHL

SEQ ID NO: 44395 - protein, 200 aa, Micromonospora sp.
VAILVEDPGVQPLPPQATAVGVDAGITSLLTLSTGEKITNPRHERVDRRKLASAQRNLSRKTKGSANRAKARLAVARIHARIADRRRDHLHKLSTRLVRENQTVVIEDLSVRNHRLARAISDAAWSELRHMLEYKAAWYGRTVIAIDRWHPSTKTCSACGRINTTMTLAMRVWTCPGCGSEHDRDVNAANNILAAGLTER

SEQ ID NO: 44396 - protein, 508 aa, unknown
  TnpB Polypeptide
MLDESADNYFITNFKTIFNLNEIEYRSLLAQVKSFRNRELTQTQQKQERIELLQDQICNNTSLSKRKKYKYYKSIFKLKKGLGKESTFGGRALQQRLTVECNKKGIERDENKIHELKTELKNKRIIPFCIMGEANQRGNRFFDISGLLTDGYVVYKPNRSTRIGLQVKTPKKYHNEINLLNELTYAKDIPLTVMLSNEYLYLTYDEKYLHGYGVNVKQRNEEVREIKKRGYSKEYQTAVIKEVYKKYYDEQRNKRQAGKIVNRVCAIDMNPEYIGYSILDKIGNGVKVVHCGLIGFSRLMEKTHKSSDSAESKYRNNKHRYEVTMAAKRLMDIVNHYACSGFIKEELGFKIDGGDKSTEVNRKIQNIWYRNLFTNCITRRCNENGVELIEVNPCYSSFIGNINYGYSDATNASIEIGRRGLYKYEKGGFYPAITEVDIRTLEAKFGDVVGYSTVGNWVNIYKSLVQQYKPVEFAQRLRTGINEVKIPYESFSIWSYKSKVDVYTFINL

SEQ ID NO: 44397 - protein, 337 aa, unknown
  TnpB Polypeptide
MILTYKIRHEKDFSRELALAVKVAEYGLQHKSISSADVKHIGLKSAISNQILKKYSKSKTIKKVCSVKLTIPNQGIKILEDKIFIPCIKLSLDIYFPKNFIKINQIEIGKEFAYVSATYPDAPTIKAVNAIGVDRNTTHHILVASCLETGKVIKLGKSCNHIHEKYKHMRKSLQKQGKYGKVKAIKQRESNIIKNINHKTTTALMNFAKEHNAVIILEDLKDIRQIAKQKKKQRYSLHSWSFYQQQTMIEYKAKKLGVSVQYVAPQYTSQRCSKYGHIEQANRKGNLFQCKKCGIVEDSGANAGFNIAYLYHQGIPQFNIDSDMLKGNTDTPKEATI

SEQ ID NO: 44398 - protein, 337 aa, unknown; identical to SEQ ID NO: 44397
  TnpB Polypeptide

SEQ ID NO: 44399 - protein, 457 aa, Methanolobus sp.
MEKKGLAGRLPRQATWESWPIFGKLQNKKDIVFALLLIIWKIQSLTLAVFVWSSGNLTGHIDIYVLTANGKRKQNILDEFVKMLKAYKYRLYPTKEQKEFFEKQFNACRFIYNWGLQTKIFCYEKTRQSLSHYELELKMVHELKHEHLWLKEVMSIPLIRTLINLDIAYDNFFRELKKDPHFSGFPRFKSKKNARQSFQFHQGYTVDFDAGYLKLPKIGNVECRYHRTFGGTPKTITISRNAGKYFVSITVHDGLETPAKQPYDADSTIGIDVGLTHFATLSNGEKIDNPKHLLKNIERVKVLNRRLSRKKKGSNNRKKAVQQLARLHEKIANQRRDFLHKVSHRLISENQAVAIEDLNIRDMQQNHHLAQAISDVSWFEFGKQLEYKAEWNGKTVLRIDKFEPSSKTCSNCGYKKENMPLSVREWSCPECGTVHDRDLNAALNIKNMALCTAAQVG

SEQ ID NO: 44400 - protein, 420 aa, Okeania sp.
MWTAYQYKLKPNKEQVSTIELWLDLLRRQYNYRLGERFSWWSENRCPVNASPLIMPIPQLRNNPDYYSQKKDLVNTKDKFREYKLIHSQVLQDCIKRVKLAFERWLKADKNGHRLGKPRFKGKGRYRSFTYPQIKQNCIEGNKINLPKIGKVKLIQHRPLPEGFQIKTVTISRKVDGYYVTLSLENKWVPYFPDVEPTTENTLGIDMGLKNFLVTSQGESVPIPQYYRSSQKRLKTLQKRLSRKKKGSKRWLKAVKAVAKQHKKVADKRKDFNFKTANELLLKAEVIQYENLNIKGLAKTRLSKSINDAGWGQFLSILTVKAGNAGVKTIAVNPQNTSQDCSNCGEKVPKELNIRTHSCPHCGIVIDRDLNAAINIKNRAAGHPVLKARSCPMQWQDWEMRSPHYSVSLVWEYVTTLINL

SEQ ID NO: 44401 - protein, 336 aa, unknown
  TnpB Polypeptide
VAVELEVPKDVSKLLYSVESVYLSIVREVVTYAVANNVLSATELQGIFYRKYRLEYQGLHAHLIIQAIRQAVQIARSFITRRRRGLVDKPYPEVRSVSIRFTEDAWSYEQFIRSTAPVRVELSLLGGRREVWLRLHKRFWLYWWRVLSGEAELASTLMIKRRLNKWYAIFIFELKPRVERPQSIVAFDINENTVAVSRVDLPSTVGKVVDWNRQYLMPQLYTIRTDFGALAKRYERVRNAIIERLKPHFTLPNGNYVNVTNIREFRKHVKRLREEDRKLSRVRHVANELTKTPAIIITEDLGEKPQDKMINGVWRGELRHRIKQTPFKKFGGGCWG

SEQ ID NO: 44402 - protein, 529 aa, unknown
  TnpB Polypeptide
MERVRRAVAVEVESPPPELYAVEEPYRRIVEEVAVYVAERGRLEREKYNELYRRFRELYPLPAQLTQQAMNQGVETGRSFLQRKKDSRVHKPRPEVRRVSIRFAKDSWSYKKAISSVAPVRLGLSLPGGRREIWIKPHRWFWLYWWKVLRKEAELVSTLVLKRRRNKWYAIFAFDVAPRKEPPAEVAAFDVNENSVAVARLSLLATVDAVALWNRQYLDPAVYSIRTDFGRLAKRYEAVRNAKLEELKRKYPFAGRDEEERRQNVADTREFRRFARRLREGRRKEGRVRQVAREVTRSPAVIITEELGKNPQEEMIGVEKKKVGKRELRHRVKQTPFKKLLKSIEDKARETGSAVFYVSSFRNSWVCPIHFVLLKNGGGWHVLHCPSGHVVDRDAAAVMNMLWKTTPTGWVKGVWWDVKDVERRLEKGRGLAPKEAVRRRNPLVTWPVVYAIWTSLAQLKASSQWPAVLARAAPKTPARGAAEGGTRAPPRPKGTPALQGWEEVGALEQEGPFGAERRLGLSHESSGLL

SEQ ID NO: 44403 - protein, 383 aa, unknown
  TnpB Polypeptide
LKIKNRNEANKVEKAYKFRLYPNKEQEILIQKTFGCSRFVYNHYLAKRIEVYKTDKSSMSYNQCSNDLTNLKSENVWLKEVDSISIQSALKDLDTAYQNFFRRLKQGDNKAGFPHFKSKKDNRKSYKTKYINGNIQVSENKIKLPKLGLVKCKVSKTIEGRIINATISQNPSGKYFVAVCCTDVNIPQYSPTGILIGLDLGIKEFATTSNGTNIENHKFLKRSEKKLAKLQKQLSRKTIGSSNRNKAMLKVARQHEKTSNQRKDFLNKLSTKLIKENDLICLETLKVKNMIKNHKLAKSISDVSWGEFVRQLQYKADWYGKVIQKVDTYYASSQICSVCGYKNINTKQLAIRQWECPICHTYHDRDINASKNILNEGLRLLSA

SEQ ID NO: 44404 - protein, 383 aa, unknown; identical to SEQ ID NO: 44403
  TnpB Polypeptide

SEQ ID NO: 44405 - protein, 383 aa, unknown
  TnpB Polypeptide
MYKANVYRLYPNMEQSVLLAKHMGCARWIYNKALAMKTEAWTERKANLSRYDISAHLPEWKRDKETSWLKEVNSQSLQAALVNLDMAYTRFFKLKKGFPRFKCKHDNRQSFQVPQSGEVGADFVKIPKVGQIKAVISRECVGTIKTITISRTPTGKFFASVLCDDNNELPVKMPTTEAGTIGIDLGVKDFAVLSTGERIANPRNIKWAARKLARTQRRLSRRVKGSNNRNKQRCKVARVHEQVANRRKDFLHKLTTKLVRDNKTDTFAIEDLAVSNMMQNRCLAKAISDVSWSEFRRQLYYKAERVGKNVLVIGSFEPSSKTCTCGKVNDALKLSDRVWTCSCGTTHDRDLLAANNIKRFALHPRNKILARDTSESTLEECVV

SEQ ID NO: 44406 - protein, 401 aa, unknown
  TnpB Polypeptide
LRYRYRIEPTAAQCGMLARVFGCCRVVFNDALRVRDAAYVAGDKLSDSEIQRRVITNAKTTLERGWLGEVPSVALVQSVSDSRRAWRNFFDSATGNRNGRRVGRPRFKSRKDRRQSFRLTRNGFSIRANGRLFVAKVGEVRVRWSRDLPSAPSSVTIIREPDGHYYASFVVDIERTALRSGEQEAGVDLGITRLATVADTLGGRSDIQNSRHLGRKLRKLRRLQRETSRRQKGSANRDKSRHKVAIAHSEVARARRDYHHKQASALIRENQAIHVEDLNIIGMVRNRRLARVISDAGWGQFLAIIAEKADRYGRTVHTVSRWLASSKKCSTCGHRLVEIPLQVRQWTCPACGAVHDRDHNAAMVILAAGRAERQNACGATVSPSATRRARGDEAGSTPTAA

SEQ ID NO: 44407 - protein, 387 aa, Escherichia sp.
VKRLQAFKFQLRPGGQQEYEMRRFAGACRFVFNRALARQNENHEAGNKYIPYGKMASWLVEWKNATETQWLKDSPSQPLQQSLKDLERAYKNFFRKRAAFPRFKKRGQNDAFRYPQGVKLDQENSRIFLPKLGWMRYRNSRQVTGVVKNVTVSQSSGKWYISIQTESEVSTPVHPSASMVGLDAGVAKLATLSDGTVFEPVNSLQKNQKKLARLQRQLSRKVKFSNNWQKQKCKIQRLHSRIANIRRDYLHKVTTTVSKNHAMIVIEDLKVSNMSKSAAGTVSQPGRNVRAKSGLNRPILDQGWYEMRRQLEYKQLWSGGQVLAVPPAYTSQRCACCGHTAKENRLSQSKFRCQVCGYTANADVNGARNILAAGHAVLACGGCQQTG

SEQ ID NO: 44408 - protein, 209 aa, unknown
  TnpB Polypeptide
LGIKDFAITSDGEVFENPKNLRKAQSKLKYVQRKYSKNKGKHTKHRLALLHEKVVNKRKDFLHKTSTKLIRENQTICLEDLAVSNMVKNHNLAQAINDVSWSTFVTMLEYKAEWYGKNILRIGRFAPSSKTCNCCGYINKELTLKDRSWTCQKCNSVLDRDVNAAINIKLFALKNILSGEHTLKNHDELPTLVRVLTHEAHPIGSAVGG

SEQ ID NO: 44409 - protein, 363 aa, Anaerobic sp.
MKLIAQVRLYPTPDQHAALKQTLERANAACNHISARAFEAQVFHRYGMQNLTYYETKERFGLSAQMVIRCLAKVADAYRLDRTVQRTFKPLGSIAYDDRILSWKLERREVSIWTLAGRQAIPFGAGERQLELLAARQGETDLVFFNGMFFLLATCEIPDPELRDVETALGVDLGVTNIATTSDGEIMTSEGIERNRQHQQRLRANLQARGSLSAKRHLRKLAGRQRRYQKDINHQISKRLVETAQRTNRAIALEDLTGIRARTRARGADQRARHSNWSFAQLRQFIDYKARLAGIPVILVDPKYTSQQCAVCGHIDKANRRHQAEFLCVACGHAAHADVNAAINIAHRAEVMPPIVSDMDPGP

SEQ ID NO: 44410 - protein, 391 aa, Anaerobic sp.
MLRSYRYRLYPSAAQEKNLRLILDACRGLYNLALAERKYAYQLEGRGVSKAELYELARHYRQTFPYADQMFSQTAQSVIEQVDLAFQAFFRRVKAGETPGYPRFKGRGWYNSFLFKQFGVGAKLDGRRLKLFGIGRVRVRWHRPIEGEIKTVRIQHKASQWYACFACEVEKPDPLPSTGRAVGIDVGISALLTTSDGEKVAHPGYYRAGQQKLRVLQRKLARAQRGSQNRRKALRAVQRQQAHVAAQRADYLHKLSAYLVRNFDCIALEDLRVNNMVRNHPLSKSILDSGWSAFRQYLTYKAESAGREIAFVDPAYTSKCCSACGAAFQDFDLSTRWVECDCGLSLDRDHNAALNILSRAGWDTSVPENVTPLFAPSAGGQGQASVRSPRL

SEQ ID NO: 44411 - protein, 407 aa, unknown
  TnpB Polypeptide
MVEYRRYSIVVKKNNPLYQEIDRVCFLSKNLFNSTLYAERQSLFKDGVFKFYNKINKEFVVNNQVDYRALPAKVSKHTQMRVDEAIKSFIKLKKSNINFKPKLPKYLDKDGRFVTEYESGALSFKKDGFIKLSKTNIIFPTKFKKGDVKVVRLIPKTGYYLIEILYDKKIKKVKNKRNKKFASIDLGLNNLATVTSNSFNPFIINGKPLKSINQYSNKMIAKYQSLLPSKQYSSNKINFIRYKREMKVNDYLSKSAKYLVNYLVSQSIDVLVIGTNAGWKQNINIGKRNNQNFMNIPFYKFKNKLAYLCEEVGIEVIEQEESYTSKSSFLDNDTIPTYPNPSNISFSGERTCRGLYKSKNKTINADVNGSLNILKKYLISNAAWNENTFSDLVEACSTPRKVTVSFN

SEQ ID NO: 44412 - protein, 279 aa, unknown
  TnpB Polypeptide
MVGHEYVRRRKQFKKSKLSWRKSQGSKRSLGWIPVRKDCISYKSGSIYHNRQLFDIWDSFELSNYTFGSGSFNEDSRGRWYFNVVIEVAQENNQAVTSIGIDLGCKEDAVSSCGKRLASGEYRKLQQKLAQAQIVKDKKCVKAIHAKIKNKRHDNIHKFTRKLVNENAGIFIGNVSSQKFAKTKMAKSVLDAGWGTIKTILEYKCEHAGIAFEEINETNTTVTCSCCHKIPDSSPKGRAGLRIREWTCCLCGTAHDRDINAAENILALGHERLAVGIPH

SEQ ID NO: 44413 - protein, 385 aa, unknown
  TnpB Polypeptide
MLPNGAPQQLKQTLLVRLDTSQEQLKMLLDTIEAFNEACNFIASTAYRLRTANKMRLQKEVYHAVRDKFHLSAQMAIRAIAKVCEAYKRDRSKKPTFKPHGAMVYDQRILSWKRLEQASILTLKGRIRVSIRIGEYQRVRMDRIHGQADLMLRNRKFYLAVVVDAPEASPYDPVSALGVDLGIVNLAVDSDGTTYKRQDIDKTMCRNEQIKAKLQACGSKSAKRHLKRISGREARHRRNVNHIISKKLVAKAQDTGRAIVLENLKGIRDQTTVQRTQRRRHNSWSFYQLRQFIEYKAKLVGVPVIYVNPRGTSHTCPRCGAQDKKSRPTRDQFRCVGCGLAGPADYIAALNIAARGQVSSPIVPRNFLEPQALLRDKPTISIVGS

SEQ ID NO: 44414 - protein, 384 aa, Bacteroidia sp.
MLRAIKYELNPTKTQKEQIKQTCGCCRLVYNTMLDRKISAYKESGTTVSAIELINQLPELKSEKEFLKDVPSQSLQQAIRNLDSAYTNFFRKGGSGFPKFKKKGVRDSFRIPVACVIDYDNWTVKVAKLGTIRIFKGHNKEIKGKIKSYTISHTSTDRYFISVLYETMDKAKLDNGKSVGIDLGIKDFAILSDGKVFENQKYLKSNLKRLRVLQRTVSRRYQQGKKREEQSNNWKKAVKQVAKLQEHIAFQRYDYLHKTSTWIAQNYSTVCVETLNVKGMQKNHHLAQSISDCGWSMFLTMLEYKCDNLVKIDKWFASSQTCSECGHKEEKVKNLNVREWTCTVCGTHHNRDLNAAINIEREGLSLCGHKVIGCDMPVPRTQLL

SEQ ID NO: 44415 - protein, 425 aa, Aphanothece sp.
MFVLEFKVKAKQQQYQAINDAIRTSQFIRNKCLRYWMDNQGVNKYDLSAYCKVLAHEFKFANELNSQARQASAERAWSSISRFFENCKKKVSGKKAENAVLGSPQVKQFSKTGYPKFKKFSRSVEYKTTGWKVLSPKTINFSDKKGIGTLKLKGSWDLGYFNESDIKRVRLLRKADGYYCQFVLSVEVKEEVKPSGKCIGLDVGLSSFYTDNEGNKIDNPKFLRKSEKSLKKLARRLSKKKKGSNNRKKARARLAKVHLKVSRQRKDFAVKLARCVVHFSDVIAYEDLRVKNLVKNHCLAKSINDAAWYQFREWVEYFGVKFGKITIAVPPQYTSQNCSSCGNIVKKTLSTRTHICKCSCVLDRDENAAINILKNGLSTVGHTGSKAWGENASTLMEEILSKQVIFVNQESPPQIGVRVSKIAWP

SEQ ID NO: 44416 - protein, 408 aa, Halobellus sp.
VEVRRTVPIKLEVTDSDADLLHETIQQFLDAANYVVDEAYDGEWAETRKTVLHEQTYDELRDRTELHSNHVQSARDRAVDALKSTVATWSKGEYASLPTFTTPFCEYNQRNATFFDGHATLSTVDGRVTVEYVLPDESRETPHSNYLLNDEFETTGATLHYRSGSFYLHVRIKATVDAPDLPENGTVFGVDLGIENLAVTSTGSFWSGDELNHWRTEYVKRRESLQECGTRWAHENIQAVGRKETGRFDQYLHRVASELVDEAVHAGCTTIAFEDLTDIRERMPNAREFHEWAFHRLYDYVEYKATTCGITVEQVNPQYTSQRCSTCGFTHEDNRHGESFSCHSCGYENHADYNAAKNIGLTLLRNQTGDEGGAPVGVRLNSGMLTTNGVGPVPDSVRVGIHAESSPV

SEQ ID NO: 44417 - protein, 423 aa, Halobellus sp.
MDDALRRTVPVKLDVPEERRGDLHQTKAQFLHCANRTSEWAWRYDDYCVTNKSKAENALYDELREETDLTANLVQKGIRRAIEAVQSGVEKLKQGEQTSQPEFDSWSVVYDKRSASFNDDYATLSTPDGRVTAEYVLPPEDEREDTPFGRYYESEAWDASIATLQYDEQEDAFYLHVTLKNPNYEGDGTERQESESRSEGAENGVVLGVDLNVTGAFAVTSTGEFIGSADSLTHKRNQYEQRRAKLQQTGTRSAHLTMQSIGSRLSDWSLDWLHNRANDLITEAQDADVDGIIFETLDHIRENIANGSKFQQWAYAKFVELVEYKVESTELFVDTVNPAYTSQRCSHCGFTHEDNRDDKAFECQSCGYEVNADYNAAKNIANRYCGYIHRGQKSRGGWATSQLALKSGTLSVNGDYTPTELLG

SEQ ID NO: 44418 - protein, 371 aa, unknown
  TnpB Polypeptide
MLKNFQYRIFPTNKQLNSLESTLEECRWLYNHLLENRKNAYEQEGKGLSCYGQQATYPMLKEQRPSLNSVHSQVLQNVAVRIDLAMKAFYRRVKAGEKPGYPRFKGVARYDSFCFPQSGFSITHDNRVSLSKIGAVKMVYHRPVRGSIKTCTLHRSSTGKWYVTFSCEYEPEHLEPVPTEVGIDVGLKTFAMLSTGEEIANPRFFRMEEKALAKVQRKHAKLAKGTQERRTHRKVVARVHERAKFKRHNFTHQQSRQIVDCFGVICVEDLHVNRMMHNHCLAKSIHDAAWPAFFSQLSCKAAEAGRQFIQVNPAYTSQDCSRCHHRQKMPLSERVYHCPCCLLSIDRDLNAALNIVGLGRQSCVIPEASAL

SEQ ID NO: 44419 - protein, 345 aa, unknown
  TnpB Polypeptide
VYNNALDQRISVYRQHKKTISVYDQANQLPELKKEFSEFKAVGSQVLQDVLERLDKAYKSFFRRVKQKGQKAGFPRFKGYGRYDSFTLKQAGWKLSGRYLTITRLGRFKLFLSRPIEGDIKTITVRRVPGGKWLVAFSCDNVPPKKLPATNTEVGIDVGIKSFCVDSDGGIVENPACFRKSETILRRRQRSLSRKKKGSNNRAAARVLVAKTHAKISNQRRDFLHKVANSYIKEYGKIMVEELKIQNMVKNQYLAKSISDSSWGTFFELLSYKAEEAGRTVTNVTPHGTSQRCSGCGEKVPKSLSVRTHCCPSCRLVMDRDFNASINILRAGQVLQALTPPVGVA

SEQ ID NO: 44420 - protein, 402 aa, Escherichia sp.
VKRLQAFKFQLRPGGQQECEMRRFAGACRFVFNRALARQNENHEAGNKYIPYGKMASWLVEWKNATETQWLKDSPSQPLQQSLKDLERAYKNFFRKRAAFPRFKKRGQNDAFRYPQGVKLDQENSRIFLPKLGWMRYRNSRQVTGVVKNVTVSQSCGKWYISIQTESEVSTPVHPSASMVGLDAGVAKLATLSDGTVFEPVNSFQKNQKTLARLQRQLSRKVEFSNNWQKQKRKIQRLHSRIANIRRDYLHKVTTTVSKNHAMIVIEDLKVSNMSKSAAGTVSQPGRNVRAKSGLNRSILNQGWYEMRRQLEYKQLWRGGQVLAVPPAYTSQRCACCGHTAKENRLSQSKFRFQVCGYTANADVNGARNILAAGHAVLACGEMVQSGRPLKQEPTEMIQATA

SEQ ID NO: 44421 - protein, 191 aa, Clostridioides sp.
  misc_feature (187)..(190): Xaa can be any naturally occurring amino acid
MYCGQHIKLPKLGMVKIRDKQVPKGRILNATISKEPSGRYYVSLCCTDVDIEAFENTNNQIGLDLGIKEFCISSCGEFIENPKYLKKSLNKLAKLQRELSRKTIGSLNRNKARLKVARLQEHIANQRKDFLQKLSTKLIKENDIICIEDLQVKNMIKNRKLSSLISDVSWSEFVRQLEYKANWHGRXXXXR

SEQ ID NO: 44422 - protein, 251 aa, Salmonella sp.
MAKNKIPLDVRWSRPLPSVPSTVTESRDAAGRYFVSCLCESEPASLPITSSMAGIDVGLKDLFVTDTGFRSGNPRHTAKYAARLAPLQRRLSKKAKGSKNRAKARLKVARLHAKIADCRQDALHKATRELINDNQVVCVESLKVKNMIRNPSLSKATADAGWSEFVRQLRYKGEWGGRSVVAIDQCFPSSKCCSCCGITMKKMPLDVRKWQYPECGTDHDRDVNAARNIKAAGLAVLAHGEPVNPESQHAA

SEQ ID NO: 44423 - protein, 451 aa, Fusobacterium sp.
  misc_feature (347)..(443): Xaa can be any naturally occurring amino acid
MKIIKKAYKFRIYPTLEQVIFFLKNFGCVRKVYNLMLDDRKKSYEEYKATGVKTEYPTPAKYKEEYPYLKEVDSLALANAQLNLEKAFKNFLKNKDFGFPKYKCKSNPVQSYTTNNQNTIYIKDSYIKLPKLKSLVKIKLHKKIKGIIKSATISKNSLDHYFVSILCEEEIEELPKTNKNIGIDLGIKEFATMSDCIKVENLKLSKEYEKKLKREQRKLSRRCKLAKDSNKKLSDSKNYQKQKKKVAKIHNKIRNKRKDFVNKLSTKIINNHDIICIEDLNIKGMLKNHKLAKSISDVSWSEFVRQLEYKANWYGRKIIKIPTFYPSSKTCSSCGNIKETLTLSERXXXXXXXXXXXXXXXXXXXXXXXXXXXXXXXXXXXXXXXXXXXXXXXXXXXXXXXXXXXXXXXXXXXXXXXXXXXXXXXXXXXXXXXXXXXXXXXXXQIGMEERL

SEQ ID NO: 44424 - protein, 380 aa, unknown
  TnpB Polypeptide
MIDDMWQIHVHIRQLDRRYHHMLGKNISISRLNAHVAKLKKRTKTHWKDLPSQVVQDVVLRYGKSRDAFFENIKARKAGETTRKVGFPKIKPRQKYNSMTFTQAGYELEGNRIKINCIETGFSFHKHREINGVIKTLTLKRDRCGDYWICFSCETVDNTEPKSKTGQSAGFDYGNKTFLTSDAGDKIASPQFFKQSLRTLQSLNKALTRKVKGSGNWYRACRALARHHRKVARQREDWQWKLADELCTKFDILCFETLNLDGMKRLWGRKVSDHAFYQFLQILQQKCAKHGKPSSKSDNGLRQQNLAVIVNTLTKTSLFQIDSGHVPNVGLTTTGTSTLLSISNGQAWLPKVERHSDGGLLEKTAVARKHKSHALACGYH

SEQ ID NO: 44425 - protein, 276 aa, unknown
  TnpB Polypeptide
MLNDKIQEYKKSKTMLKNTPAMYKKTYSFLKEVDSLALANVQLHLEKAYKNFFRDPKVGFPRFKSKHHSKNSYTTNVVNGNILVEGNRIRLPKLKWISMKKHREPAENCRLKSVTVSMESSGKYFASLLYEGYSCENQAADKDYSNAKILGIDYAMQGMAVFSEEIELEKAGFFRKNEKRLAREQRKLSRCVKGSHNYVRQKKKVARCHEKIRSQRRDYLHKLSRRIADQYDIVAVEDIDMKAMSQCLHFGKVYRIMDTGCSGICWNISLNGREKN

SEQ ID NO: 44426 - protein, 289 aa, Erysipelotrichaceae sp.
MAISKRSLQKGLIHLFRTDLYIPTKIDPSKVQFVRIVPKNGVIVVKVGYRETLPDLKQDCRRIAALDLGVNNLAVCSSNVMDPLVIDGKYLKSVNQRSNKALAASRSYEEKQHGRKNSPKIQAIFLRRNNRISDYLHKASRYLVNQFVFNQIDTVIIGHNPGWKQDTNIGKRNNQNFCQIPFNVFIRMLEYKCRMAGIQVILCEESYTSKCSFLDDEECRKQQTYKGKRIHRGLYKSQNGKLINADQNGSLNILKKALLTLGQWNRLMYQQCLDRNEKAALIRYNVPRS

SEQ ID NO: 44427 - protein, 387 aa, unknown
  TnpB Polypeptide
MVKAIKVMLIPNNVQKTKMFQYAGASRFAYNWALAREKENYEKGGRFIPDAELRKEFTKLRHSDEYAWLLSISNNVTKQAIKDACTAYKNFFKGLQKFPRFKSRKRSMPKFYQDNVKIRFSNTHVKFEGFSSSRKANKQKMNWVRLAEHGRIPTDAKYMNPRISFDGLNWWISVCVEFPDCRETLNGDGVGIDLGIKDLAVCSDAVKYKNINKSQKVKKLEKQKRRLQRSISRSYEKNKRGESYCKTNNVIKKEKLLLKRNHRLTNIRKNYLNQTISEIVNRKPRFICIEDLNVRGMMKNRYLSKAVQEQGFFRFRKQLENKCSDKGIQLIVADRFYPSSKLCSCCGNIKKDLKLSDRVYRCACGNMIDRDFQASINLKTYGERFAS

SEQ ID NO: 44428 - protein, 475 aa, unknown
  TnpB Polypeptide
VVAVIFGRIGRVCVGVDGARLPRASVGRRDGVMRRAFVFRLRPTARQHVALAACVEAHRELYNAALQERRDAWAHSKTRIYYGDQSAQLSEIRSARPDVAVWSFSSQQATLRRLNKAFAGFFRRVKTAKPGVKAGYPRFKGAGRFDSVEWPKDGDGARGLAEQHRVYLQGIGQVKVDLHRQVQGRVKTIQIKRAARRWMLVLSCDEVPTNPLAVTGCQAGIDVGIVSFATTSDGEHIDNPRWGRAAAGRLAAAQQRLARAKRRSKNRELRRETVAARHRKIANQRKDFHHKQARALVANYDLLVVEDLQIATCCGRPSPSPIRKTPGSFCLTEPRRSPRSTEGSVTPARAGSSRFCAPKRKMLGVPGLRSTLGTPPIAARPAGTQQRTIASRKRNFVAAHPHADMLPKPTNTPRVTSSGLDWPFTRKPREKKPTASSRRRSHLHAFGAEDKCSGHRSGIADPSGSHDRCVDMSRH

SEQ ID NO: 44429 - protein, 378 aa, unknown
  TnpB Polypeptide
MQTVSSYGVEIRKQNIPIRQTLEIYRQAVSYLTEIYEQVWAELKMIPEAKKRFNAAEHLIHTTKKNHAHFDFDIRFPKMPSYLRRAAIQHALGSVSSYESRMEQWEAAGELSGKPNFTCENHAMPVFYRDVMYREGTEGKDEAYLKLYDGHDWRWFRVCLSHTDMEYLRRNWYGKKASAPTLEKRHHKYFLRFSYTEEVALTQTPVREQIICSVDLGINTDAVCTIMRADGTVLGRKFIDFPSEKDRMYRTLGRIRRFQREHGSAQAGERWAYTRRLNIELSRKIAGAVAEYAWENHADVIVFEYLEMNGKISGSKRQKLQLWRKRDIQKRCEHQAHRKGMRISRICAWNTSRLAYDGSGIVLRGRKYKLDNSTPQNV

SEQ ID NO: 44430 - protein, 550 aa, unknown
  TnpB Polypeptide
LRQTGLHAGRRIGRRGFGHVREPAPPPQAVQADQRSQDRPGGGRTQGPTFAVRVRPTGSLLQQPRRRDRVGQRDARKVLRGGACRGHPLPHGVVLGSDLREAVSRQPETGEGRRGGEVRLAYQAEIRPTPRQRAALLQHAGNARWAYNWGLRQHRVAYEQWVELGKPKKWKGWPNAISLHRDLNALKKTNPEDGGIPWMYEASKAAPQEALRDLDRAFKNFLSGRARYPRFKSRSRGIGGFRLTGTIKADHRVIQFPVIGRVRFQPGERGYLPWGKHAQVSVTEKAGRWFVSVVGPEVEEAKPNGNPEVGLDLGVARLATLSDGTVIENPKALASGQRKLKRLQQEVSRKKKGSANRCKARAKLATAHARVRNIRRDALHKATTMLAKSHGRIVVEDLKVRNMTRSGRGKRGLNRVVLDAAFGEFRRLLEYKGKLYGCEVVAVPPHYTSQRCSACGHVEKGNRVSQAEFCCLSCGYEANADLNAAINIFALGAKEAASSTDSLNACGEDVRPDQLRLVRQTSVKQEPGTNLRVGSDRGISPATVESLVPA

SEQ ID NO: 44431 - protein, 238 aa, Enterococcus sp.
MLKAFKFRIYPTASQKQWFVQNFGCVRFTYNHLLKARQESYAKTGVIDYTLTPASLKKQYDFLKKADSLALANAQLNLDRAFRNYFKKRASFPKLKNKKSMWQSYTTNNQKGTIYLKDKYLKLPKQKELIQVNLHRPIEGEIRSATISSRYNEAFYVSLLCEVSAKEITESRRWIGVAYDPQKLIETSSPVDVPLPLLKKTEKEMQLAKRKLGIKGRAAQKRKARLERSKNYQKQSVK

SEQ ID NO: 44432 - protein, 249 aa, unknown
  TnpB Polypeptide
MVKAIKVMLIPNNVQKTKMFQYAGASRFAYNWALAREKENYEKGGKFISDAELRKEFTKLRHCDEYAWLLNISNNVTKQAIKDAGTAYKNFFKGLQKFPRFKSKKRSMPKFYQDNVKIQFSNTHVKFEGFSSSRKANKQKMNWVRLAEHGRIPTDVKYMNPRISFDGLNWWISVCVEFPDCKETLNDDGVGIDLGIKDLAVCSDAVKYKNINKSQKVKKLEKQKRRLQLVSLVLTRRIRKGKVTAKPIM

SEQ ID NO: 44433 - protein, 427 aa, unknown
  TnpB Polypeptide
MKLSQKVYIKLNRKQKKVIDELICHVTKLYNISNFDMRKKKYIPYTQNDKLLKSNWHSDYLHAHNRQQLLRKLDQDWKSYFKAVKDYQKNPNKYTGRPNKPGFKNINTKPGEVIFTKPGITQTHTKENNPKGNLLILSLSKKMKAKYQINNIKLKLTEKVLVLIGELKNINQVTIKKDYFSGEYYLNIVYIKDEKEIKGYTNIMSIDLGLDNLATITFLENEETYIIDGKKLKSRRKYFDKEINYYQSIRMKQTSSKKFKETKKIKKLRKKNRDYQLNYLHHAAGQIIKYAKKHKVRTIVVGDMKNIKNGMKNNKSFVKSPIQNFKKLIEYKGLLSGINYVEQNEAYTSGCSALDLESINKKSYNKKRRITRGLFKTNKGLLVNADLNGSLNILRKYLKLKCIPKLITLATDNGVVNAPKRISVACC

SEQ ID NO: 44434 - protein, 362 aa, unknown
  TnpB Polypeptide
MVKAHKRKNSGSMRRASRVYLSSANVGKVAQLHLFLLLYVNVVNYFIERFWSMKDFTSALTDKVITGRAVNRFKITARLAQCAAKQAKEIVRSQKERKVKTMPLLRRKVATLDNRFVKIEEFKGAAFDLGLSFASGMPKITIPINQTAHMNRFWGHGWQTGSTIRLGMNKRGVWIELIFEKKRPELRTEGKVIGIDRGFRKAFVTSDGQEIGAELRDQIRRKGKRSKTSYYHIRTELFRFLKGLKLEGVKMIVLEDLRYIKHGKRGTFSRHVNRLLSFWSLTRAVNWMRCCCEERGVRMKFVSPYKTSQRCHSCGKIDSRNRKGERFRCVSCGHEDDADHNAAKNLEYLGLAGAYSLRLLPN

SEQ ID NO: 44435 - protein, 423 aa, unknown
  TnpB Polypeptide
MIVTYQYRIEPSSEQQVTMEWWLELLRRHHNYALGQRLDWLRRTRCLIDRCSLVSEPIGEVPGAFPNYNFQAGELKQTKILFPDYKNVYHDVQQQNLKRLEKAWERWVKPDKSGRRGGRPRFKKVGDLRSFTFPRVNSEKAGANIKDRVLTLSKIGSMPIILHRPLPDGFTLKTCTVVKQADGWYACVSLEDGWVPALLPLAEVKTAVGIDVGLKEFLTTSDGDTEPVQQNFRRSQKRLARHQRRQARMQKGSKNSQRQKNRVARIHQRIKRQRKEFHYKVVHKLVKAYDLIGVEDLNIKGLARTRLAKSILDAAWGEFITILEAVAVKRGVRVVKVRPHGTTVDCSSCGWKVPKTLEIRIHDCPKCRTVLDRDLNAAINILVRALNAVGLTVSACGGQGDTQPLKQECLEVILGSPYYTRKG

SEQ ID NO: 44436 - protein, 243 aa, unknown
  TnpB Polypeptide
  misc_feature (220)..(241): Xaa can be any naturally occurring amino acid
METIYRAYKYRIYPSKEQEVLINKHIGSCRWLYNYALEKKTKAYKKDKTRLSRFDLSADIPELKKNQETEWLKEVNAQSLQMSLKNMDEAFTRFFREKKGFPKFKSKHHSRKSFSIPQNVNVDWDNKRVSIPKLKDIRFALDRKPQGTIKSATVSKTPTDKYFISILVDTGIKPPKKYKIKPKTSVGVDLGIKQFLITSDGEKVENPKYLRHHLFRLKKXXXXXXXXXXXXXXXXXXXXXXAA

SEQ ID NO: 44437 - protein, 389 aa, unknown
  TnpB Polypeptide
MLRTYRYLLRPRSDQEKTLTCMVEQHRRIYNLALEQRINVYKESGKGMTYHSQWKHFRDLRRDNPDTLGLVNVSSLQQTLRRLDKAYSAFFRRLKSGEKPGFPRFKSRNRFNTIEYTYGDGCTLRTSDNGRDTFYIQNVGEVRVCYHRSIPQNARMKHACITRRNERWYVSFAMDVPNTNVAREPTGRQVGVDVGLKNIAVLSTGACIENPHWLRRNLAKLRRLQRHASRQVKGSMRQRKTYQHIARLHEHIEHQRRGYLHKESKRLVEAYDLIAIEDLALAFMNRNRHLALSSHDAGFGIFRHMLEYKAESAGIPVVAVNPAHTSQACSGCGRIVPKDVSVRIHACSHCGLVLDRDVNAARTILTLALRTPLGRSGQPVTWAVAPGVG

SEQ ID NO: 44438 - protein, 169 aa, unknown
  TnpB Polypeptide
MVTKEASSNPSFRGRVPPAEAIEGKRWKKAVRLVAKIHRKVFNQRNDFQHQLSRKIVNSYGISFVEDLNVKGLSRGLFAKSVHDAGWAAFFQKLSYKAESAGRRFSSVDPRGTSQRCPCGEANPKQLSDREHVCLDCGLVTTRDPASAMEVLRLGLSLQPLTAVQECCG

SEQ ID NO: 44439 - protein, 411 aa, Micromonospora sp.
VQLRYNFRVYPTPGQQIELARAFGCARVVFNDGLRLRQQAWEAGEKHISDGELSRRLITEAKLTPERAWLGEVSAVVLQQALADLNTAYRNFFASVTGKRKGRTLAPPRFRSRKDNRQAIRFTKNSRFKVLDNGRLRLPKIGDLAVRWSRSLPSEPSSVAIVKDAAGRYFASFVVQTPQDETLPPVDSEVGIDLGLTHFAVMSDGTKIAAPRFLRRAARKLKRLQQALARTQKGSANRTKAVVKVARAHARVADTRRDWQHKLSTAIIRDNQAVYVEDLCVTGLGRTRLAKSVHDAGWASFTAMLEYKAARYGRTFARVDRFFPSTRMCSACRRINDKMALTVRAWDCLCGSHHDRDVNAAKNVLAAGQADNSNDRGAQVRPGLVPAPRGEAVTHPGAACSTRSAEGISVL

SEQ ID NO: 44440 - protein, 471 aa, unknown
  TnpB Polypeptide
MKCRIFRLHKDTNRSKVEKLEALHQEYVSYVRICVQTMLDNRIYNLPKSAKQTFFSRAANLTSQIEKNARDHAVQIVDTWAKGVYARKLKPTITNFRHDGTITNEDVKALCTIGLKQISKPWKFITQDHLDAYHTLLDTYGGNPPVVRDKIPIRLSEMTARLENPSKAVTADFWLRVSSLEARKSVWLPLVGNPYVQQADQVNKGLSARKTRRGFWRFEAVSKDEWVVPEAQEGWSKLGVDVGLNVLAATSDGVLYGGFVKPKFDKLYARIKTLRANRQRQGLKENSPRLDRLESRLTGLVKTETGRVVNTFVRKHPETIFVVEDLDLSGCRGQKRFAYRALQTNLERKASIEKVNPAYTSQECPSCDYVHRGNRRSISFQCRCCGREAHADWVGSSGVLRRSGDEHIRTGDHPRSVKRVLRERFRLRRTSSLGFGRLEQPSSSPLPLGRRLTTVELGLPDGGTASNLMLT

SEQ ID NO: 44441 - protein, 401 aa, unknown
  TnpB Polypeptide
MHVSKKIKLELSARDATTLEFMQAKCRGLYNWWVMRLRDGETWPGTLVAKKTLKESRKYDPELNYVYNKLLQKVFFRLGAAMDAFFRRCRNGEKPGFPRVRPRHCFFTLCYPGCYLKVEKGVLILPTGGHGKNKQYPDIRAKLTEEAPEAFGEVAISRDARGDYYASFCHKRPECECESGEVVAFDLGVKTLAVGTNEQGRFYRINGFKSSRWYNRQLDKLRSKRSRCNKKSRRYKRLSKAYQRVSEKKRNKQRDSLHKASKLISRKMVERTVVVGDLSQRQMVTREHHKKNRYRNRAVYNDWGLFTFIEMLTYKCQLYGKDLVILNEHNTSKMCSGCKHLQDMPLWRRTYKCPKCGLVMDRDENSAINILTRYLARLGPHTGDPVRCADVFTATNTFQYV

SEQ ID NO: 44442 - protein, 394 aa, Mycobacterium sp.
MSRFRLMPTPEQEGVLLAHCRDARYVWNLAVEQQQHWQRGRKAPSYNMQSAQLTEARAEFEWLRAGSQTVQQQALRDFAQAMKNFFSGTHGRPTWRKAGVHEGFRQIAVRPRHVEKLSRNFGRVWVPKVGWVRFRLSRPVPRGVKSYRVTRDRSGRWHIAFAHIPDSIAGPEDSSVVGVDRGVVVSAALSTGELLHAPQPTPGESKRLKKLQQHLARCQRGSKRRARTKRAIAKMRAREADRRKDWVEKTTTDLARRFEVIRVEALDVRAMTRSARGTLERPGSRVAHKRGLNREISRSAWGMLVERLQHKAFGRLERVSAMYTSQRCSACGHVAPGNRKSQAVFECEVCNSGRCNADVNAARNIAAGRVVTARGDLANRRSANREPQLATPSA

SEQ ID NO: 44443 - protein, 334 aa, Cuspidothrix sp.
MVRELTTVFQPKRQRSRSVSKRGKKTWSQFTNLVLYYFIINTFHSNMLRVVKVRLYPNPQQQQSLAQAFGSCRWLWNYFLNLMNQTYKETGKGLSGYEVKKIIPQLKKEHDWLSLTYSQCLQQVCLNLGVAFNNFFEKRAKYPKFKSRHGKQSIQYPQNVKVADNQLILPKIGKVSAIIHREIEGKIKTVTITKNCSEQYFAAILFEDGKEKPESIAEGKAIGIDLGLTHFAITSDGSKFDNPRILNKHEKNLKIKQQQLSRKQKGSNNRNKARKKVARVHRKITNCREDFLHKLSRRIVNESQVIVVENLQVKGMMQNHCLAKSIQQYILAKT

SEQ ID NO: 44444 - protein, 376 aa, unknown
  TnpB Polypeptide
MKRTVSLKLRTSPEQAERLARLQAMFAAACNLVVPLAAQARISNRVKLHHAAYYAIRQAMPALGAQMACNAVHQVASAYKTLLANRPKFRNEDWPLITFVQRSSVHFDKRTYSLQSDMLSLFTLEGRVRLAFRTGDFQRQHLAAGIPKEAELVRKRTGWFFNLVLDLPDPAPRPHGDVLGVDLGENNLAATSSGMLFGGGTLRHERDQYLQLRRRLQRNGSKSAQQLLRKVSGREARHVKHVNHEVSKAIVAEAVRNECSVITLEALTNIRERIKTGKRMRSRLHRWAWAQLQNFVVYKAEAAGIRVAYVNPAYTSQTCAVCGNMGIRSKHRFSCPICGRLAHADRNAAQNIASLGSVFTGPTGVVNRPHVAALTG

SEQ ID NO: 44445 - protein, 374 aa, Glycomyces sp.
VRHRAYRFRCYPTPEQADNLRRTFGCARLVYNKALEYRHKAYYRRGESITYNQTSAMLTRWKQADRYAYLNEVSSVPLQQALRHLQKGFAAFFKQQTGYPRFKKKRTGAGSAEYTRSAFKWNAGQLTLAKQAEPLTIRWSRRLPVGAVPLTVTVSCDAAGRWFVSLLVEEDIPALPERAEAIGVDAGITNLLTLSTGEQVSNPRHERRDRARIRRRQQALSRKQKGSNNHRKARIELARAYARIADRRRDFLHKLTTRLVNENQVIAVEDLGVRGMLAGHTLARAIADAAWAEFRRMLEYKAEWAGRTVVAVDRFLPTTKTCSACGTLQEAVPLSQRVFECAACGHTEDRDLNAAKNILAAGLAVTACRDGVRH

SEQ ID NO: 44446 - protein, 427 aa, Glycomyces sp.
VLRGFRVRLYPTATQEQFLSRTLGCVRVVWNQVLNWRKEQYAQHRTFGSYRDASGHLTELKRRPDFEFLREVSSVPLQQALRHQQRAFENFFAKRANFPRFKARANRGSATFAKTAFRIRDGRLHLAKLAEPVRWVWSFDVPVEELDVSSVTVTREPDGSWWASLCAEMTDSQEPEPPEPTGKAVGVDLGVHTFGTLSDEAEPLEAPDLRRKEANRKRYQRRMARKKPGSANRNKERKKAARAYRKERQAREDMLQKTTTRLVREYDTICLEDLHIPGLLKNRRMRALIQRLGWRRFRALLKAKCARAGKQLVIIDRWEPTSKQCSDCGFVLEQLRLDVRKWTCPGCGARHDRDVNAAKNILAAGLAVLAEQRARARATAEPEPAAGKACGAHVRPRGHSPPRQRAAKQEADLSDEVRPFSGRNGRE

SEQ ID NO: 44447 - protein, 394 aa, Acaryochloridaceae sp.
MLVLEFKARTNSQKATAIDEAIRAAQFIRNKSLRLWLDVRGTSKNDLQKYCKVLAKEFPFAASLNSMARQAAADRAWFAISRFYDNCKKGIKPIGFPKFKKFSRSVEYKTSGWKLISPKKIKFTDKCGIGELRLIGSHDLAFYLEELIKRVRIVRRADGYYVQFCIKVDREESLELTGNAIGLDVGLADFYTDSNGCKEPNPRFLRSQESRRKKLARRFSKTQKGSSNRQKARKRLARLDLKISRQRKDHAVKLARCVVQSNDLIVYEDLRIKNMVKNHCLAKSISDAGWYQFRSWIERFGVVFGRMTIAVNPAYTSQACSSCGAIVKKSLSTRTHVCQCGCQLDRDENAAINILSEGMRTVGHTETWLLDSQNASGEVASLSVASGQLMKAAS

SEQ ID NO: 44448 - protein, 356 aa, unknown
  TnpB Polypeptide
VLKTLQIKLLPDDKQQGALVDTFIKFNSACNFVSRIAFEGKLYNKVILQKITYRDIRERFGLAAQLAIRVIAKVVETYKADKTSFHEFRDFGSIVYDQRILSFKGVDEVSISTTSGRVRVPITIGKYGEIPFERIRGQCDLIRKNKMFYLMVAVEVPEEPIIKPKDIMGVDMGIVNIAVDSTGKYYSGDEINEVREHNADLRSRLQSVGTKSAKRHLKKLSGKEGRFARTTNHIISKEIVQKAKGTSSAIAIENLSGIRMRTTVRKGNRYIHNSWAFNQLRSFIEYKAREAGIPVIVVDPHNTSRECPHCHAISRKNRLEQSRFRCISCGFEGEADFIASLNIRNRAAVSQPIVAS

SEQ ID NO: 44449 - protein, 353 aa, unknown
  TnpB Polypeptide
MGKIMKLKPIREKDIYLQEAMNSTIKYCRIIRKPFKNKYKYFLQIIMEGSAPKKIKLGIGKCGLDEGTSTIAYYNDTKASFYVLCENIKKYEKEIKEYTIKYERQRRLNNPQNYDENGKIIKGSRFKNTKNTIKTLMKLKNAYRKKSKYIKQNNNYLVNRLLEQCDLIIKEPMNFKALAKRAKETKKSDKISTSTKKDESKKQVTKSTCSVATLYKKKKRFGSSINKRAPGYFNSRLESQIKRYGGDFIDIDIKNYKASQYNHITKEAKKPKLSERTKLIGKDIVQRDLYSAFLLYCYKDKSHINFDECEKLFKDFLNKQEQTIKEERMLYNYAIKEKEELDKAHKNFGLNDF

SEQ ID NO: 44450 - protein, 494 aa, Pseudomonas sp.
VKRAKNPTFVVELPVSVSQEAERQLMARLLAGTRLYNAALGESLRRLDLMRESKAWQAARKLEAKERTETFRAITKEFGFTSASVSAFATGCKNAAGWKNRLSANETQRIAETAFAAAEQYSFGKRGRPRFKNARRPLKSFSGKTNKTGIRYRHDLGIVEWAGLALSVKYPPIGKDKWLEEALKAETKFCRLLWRTVKDKRRWYAQLLQTGLSPIKEKNTTQAGREVGLDVGPSTVAVVSDTGGDLVAFCPTIEQPWKETRRIQRAMDRSRRATNPHCYNENGTWKKGAKVKVVSKNYLDLKRELAETERRLAAERKRSQGELVNSVIRLGNVIKTEKLSYKAWQKLYGKSVKVKAPGMFITGLKRKAESAGGQFLELNTWSLKMSQYDHVSGEYNKKTLRERWHFLGGKTAEETLLVQRDMYSAFLALCVVENKHQSSQLRERWSVVKQLLGQAGWCRKPEVASGGTIVLPTVIPSELLACQSGGGSATARML

SEQ ID NO: 44451 - protein, 355 aa, unknown
  TnpB Polypeptide
VISVYRYRVKSLTGLLNKQSRACNFVWNFCNDRQKDALRFGRRWHTGFDLNKLTAGSSKELGLHSGTVNAVCEQYAKSRSQKKRPCLRYRGKKSTGWVPLKGRELKREGNAFRFAGSTFRVFNSRALPDGKIKDGTNFSRDSQGNWFLNIVIEVDAVAAGIRQPIKGVGIDLGLKDFAALSTGEKIEAQRIYRGAEKALAVAQRAGKKRRVSAIHAQIKNRRNDFHHKLSTRIVREFDYIAVGNVNAAGLAKTTMAKSVLDAGWSSFRSQLAYKAVRHGAWFEEVNESYTTQTCSDCGVLPDSRPKGIAGLGIRNWVCSECGGVHERDVNAAKNILNKFASRAGHGALVVGIPVL

SEQ ID NO: 44452 - protein, 412 aa, unknown
  TnpB Polypeptide
VIYGRGFWCRLSEAPDRPILESPYVVLRFPVTPSRHVAEFRLSPHIIQKLACAVRVGAVTVTRTTLSIAYEPRPVASTRPRGIIGMDVNKREHTTADTDGSVRYIGNAALGYAQERRKKHRALGVTGGKPKQKRRKARATPRHVKHPGRKPKNKQRLPRKKRRDERVNRRERARINTRFRNKKTNYLYNLMHALAACGMMLALEQPTIDRLLVRRNRKMSGAERDLLKMGLSQGTITRTAREVFAKYGLPVCDVDPFGTSSRCPACDSRLWAPEYNTGAWKLWRRTKACIPCLYYADRDGVAAINILCRCCESAYEPAAGPGEPHCDDPGRRVAGDWEQRAQQKQQLVQTLLLGAAAVRFPHVGEGQRPKGSAKNPSYHTVGDARLLDDRPDASNGSNGVGPPGACLLGGIC

SEQ ID NO: 44453 - protein, 407 aa, Ktedonobacteraceae sp.
MLLCKKVRLEVSAHDAATLEFMQGKCRGLYNWLVMKLRSGEKWQGWKAAKKILQQSRVHDPELNAVYGKLLQDVYFRLDASMQAFFRRVKAGEKPGFPRVRPRHCFFTLCYPAMYIAVEGNKLRLPTGGKGKNKRFPDIIAILTEEAPVDYKEVAISRDSFGRYFASFSYDVPEQACDQEGVLAVDLGIKTLATEVNEQGRFYHIGGFKGGRWYNRQLDKIRSKRDRCKKGSKRYRRLSQTYQRVSQKKRNKQKDCLHKASHLIVSKVVERTLVIGDLSQRQMVMKKREEHKNRSRNRAVFNDWLLYTFVQMLVYKCTLSGKELVILDERNTSKMCSGCGRLQAMPLWKRTYRCPHEECRLEMDHDENSAINILKRFLARRGPHTGDPVRRADVFTAIEHVNTFEPV

SEQ ID NO: 44454 - protein, 392 aa, unknown
  TnpB Polypeptide
MTKALKYRIYPNKKQEQKLLSDIELCRCLYNVALEQRIISYKQSRKSISCYDQIKQLPELKESFPEYKSVHSQTQQDVLRRLDKSFKAFFGRIKKGEKAGFPHFKGRDFYNSICYPQSGFKIKGNKLHLSKIGNIKIKLHRFIKGTIKTCLIIKESNQWYACFSSEIENKEIENRPIKTAIGIDLGLASFATLSNGEKIDNPRWFRGSEEKLARQQRRLSRKKKGSNNRTKQKEKLVKIHHKIKNQRKDFSHKLSRRLVNEYDLIAYEDLPVKNMIKNRYLAKSISDVSWNGFCQMLRYKSAERGAYALPVSPRNTSQICSNCGEIVEKALWTRRHKCNKCGLDMDRDENASLNILRLGIEEYRRNYGNQRLGSLLNGADYEPRSLFHLGNG

SEQ ID NO: 44455 - protein, 447 aa, Firmicutes sp.
MNINQAYKFKLKTNPEMERVIDNYIGCSRFVWNKSLALIKLRLESKNIEKAVLKNIIVGKRYNTRYYLPNYNELAAMLTFWKKTEECSFLNKAPSQVLQQTLKDLEKAIKDAFVPSNGKRFPIFKKKGRYETGIRFPQGFKLENNRVFLPKIGWIIFFRSKDIKGTVKSITLKKESGSYYISVLTEQVIEKGIWSDLNIESLNPIGIDAGVKKIMTLSNGAYFEPIDFSKIDKKISRAQYILSKKQHSRKKGNKTKKSKNYTKQAVKLSLAYKKKSDTKNDYLHKISTAIAKNHGFVAVENLRIDNMTKSAKGTIDNPGKNVQAKSGLNRSILAQSWSMFYDMLEYKLIFRGGYFIKVNPAGTSQECPECRSKHKDNRKTQESFLCISCGFTANADLIGAINIVRKALPEYDFKIPQGMRKFTPVEYSKSNEVWNEANGSCQQQEPL

SEQ ID NO: 44456 - protein, 459 aa, Lactobacillus sp.
MVIEKRGEIMPQTRLPFMMGLKLVMYPNHHQERVAWKNLNASRFIYNQLLANSWVDSAIKRNKLDQQYPIPAEYWRYKTTKQGKGTLLKASQIRPTGLARIKGNPRYPWLDDSDLDSDMFTNTEINYKNAWKMFHKVHTVGIPKFKRKSRPVQSYSTSNHYSSSQVNAKGGLPSLYNGSIHFTADSQHLQLPKLGLVKVKPTRSLPTNAMIRIATVTIKHHPSGKWFVALLLKSDKPFNAQLPRANSEVGIDLNTDNFLTDNNGQTIKNPRYYRTIKKRLAKEQRILSRRYRRAKKEHRSLRNSKNYQKQKLIVARLHEKVRNQRINFLHQVSTALIKNHDLVVAEDLKSKNILKNHALAMSISDVGWRTLLTLLEYKAPKYGRTFIEINPAYTTQTCNRCGFRMGTNGTQKLTLKDRTWTCPCCDTFHVRDQNAAQNILAKGHLELTKPLTENSPIYR

SEQ ID NO: 44457 - protein, 422 aa, Cyanobacteria sp.
MLSLTYEYKAIPTPEQVQMIEHTLTVCRQVWNYALRERKDWLNSRKCQVNACSIVSEYIIPADVKYPNYYDQANALTRAKSEFPELKTVNAQVLQQVLRKLETAFLDMGRKGMGFPRFKNRYRMRSFVYPQLGKSQFLKGNQIKLPQLGWLEYVKSREIPDGFVVKQARIVRKASGYFVMLTLECDVNVPDVMPNGHPVGIDLGLEKFVATSDGDVVDRPRFFKVLHRKLKLLQRRLKHKKKGSNNRHKLNRKIARLHQCISDTRKDWHFKLAHKLCDGAGMIFVEDIDFRAWAKGLFSKHTLDAGFGQFLSILKFVCWKRGVYFGEVNKDYTSQVCPQCDAHTGKKELKDRVHSCPECGHTTHRDVAAAQIVRNRGLSEVGRILDHKENACGDGLAGTGNRLVKSPRSRKKSYEARLKTAS

SEQ ID NO: 44458 - protein, 398 aa, unknown
  TnpB Polypeptide
MKLTFRYALRPTQAQERTLLEWLDHLCELQNSARDNRKFAYEEGRFVTRNEQEQLLKVAREKYDDFREVPQDFQVSILKRVDKAFDAFRRRCKEGAEKKGYPRYKTRVRSLTWCLRKHTLKTGERVRQNPIIETDFRHNRLKVPKLGEVKIYMHRPLQGDPKEVTIVKKSSGWYAHISCDIGDTPKVEPTDAIAVDVGTTHYLTTSDGEKEDNPRWYRQAEGLLRKHSKDFSRKKKGSHRRKKQQHKLALHHERTRNKRKDFIGKLVYKLYHHEKKNVLVAEDLRVSNMVKNKHLSKSISDASWATFFEWCASIAERDGLHFHEVDPKNTSQTCSACGEKSHKKLSLAIRIFDCQFCGTSLDRDHNAAVNILLRAACAHRGERWVTNLYETRNLSVDR

SEQ ID NO: 44459 - protein, 442 aa, unknown
  TnpB Polypeptide
MELIRAHVYTLRPTPEQKLLLAQTAGVVRLVYNLALEQRRTWSGRRYAGGPPRSFGSKGSSRELSELRAAYDWIGAVSQTAQNQALIDLDRAFANFFEGRASYPTPRRKGVHDAFRQAGREISVRRLNAKWSEVRIPKIGWVRYRDTRPLRRNETGIINIRNATVSRRAGGGWEISISHRWSAPEAETPTGAVGVDRGVAMPYAMSDGTQVSLPETMVGREAALRRAQRKMSRKRRGSRRYAKARARVAHLKARNARARKHLAHVTSRALVRDYGLIAIEGLRIRSMVASARGTVGEPGRNVAQKRGLNRAILNVGWHQFEMMLGYKLEETGGTLIKVPAAYSSQECAACGHVDKENRKSQAVFVCIACGAADNADTNAAKVIRDRALRGETAEARRWNTPLLDVEGTAIAPEEASTPCVRKGLKAPKLASEIHLTSGGGRC

SEQ ID NO: 44460 - protein, 434 aa, unknown
  TnpB Polypeptide
MRKLKAIRVRVYPTPEQEQSFLRIAGCCRLVYNLGLIQRRDFWRQHKNTTGRSIGWHGQKRELTALKALPEAAFLREAPSHCLQMALQDLDTAYSRFFEGHAGYPYPRRKGENDSFTFPDPAQIRIDVANEMLVLPKFGRKRGDGGVLKLRMHRKPYGELRRVSISRDGRHWYASILMRTKARVPQLPAPAPADVIGVDRGVTAPFVTSDGVSFGKQVEGAPQRCKQRRLARALSRTQRGSRRREKARLRLLAHKSKMARRRRDQTHKITAAIAKSHRIVVIEKLRVLAMTASARGTVETPGRNVAQKSGLNREILDRGWGEFRRQLGYKLAWRGGQLLEVPARNTSRTCAECDHVAAESRISRDLFRCVACGHEDDADRNAALEIRRRGLVALGLRQHPAGTVGAARGALCDSTAMKREKENDGINAKTLVDA

SEQ ID NO: 44461 - protein, 388 aa, unknown
  TnpB Polypeptide
MLIQAFRMLEVHRTHQAKILNHSQGEESLDRHGWSASKLWNVANHHSRKVWKETGEIPGHGDLKDELKTHPKYNGLHSQSSQRVLEELAEAFNSWYGSDDDRDNPPGYRKENYYDDQGRRVHEEHPRSTVTWKQNGIKHDTTNNRVRLSKGANHKEHPRAWEYILVEYETRPGVTVENLQQVRAVYDSTKERWELHLVCKDEIETPNAPGNETAGVDLGISNFAAVAYSTEDADLYPGNRLKQDGYYFPKEIAKCDDSGGDRATRLHHKWAERRTHFFHSLAKHIVERCVEKEVGRINVGDLEGVVKMRTAARRTGASTGISTYTGGRSTASARFSNTRRESRESRSWKCLSGIRARHVAHAGKQTTHSASTAVCTSVMSATQRSTPT

SEQ ID NO: 44462 - protein, 403 aa, unknown
  TnpB Polypeptide
MIVLEFKAKGKTIQYAAIDEAIRTAQFVRNKSIRFWMDNRGIGQKELYRHNTALRAEFPFVKALNSHACQVAVERAYSAIARFYSNCKKSIPGKKGYPKFKKNCRSVEYKTSGWTLSPDRKSINFIDKIGIGKLKLKGTWDLHFYQLDQIKRVRLVRRADGYYVQFLVSAENKADVELTGKMIGLDVGLKEFYTDSNGCTEPNPKFYRTGEKQLKFMQRRVSRKNIGSANRRLAINRLGRVHLKISRQREEHAKRMARCVIQSNDLVAYEDLRIKNLIKNRCLAKSINDAGWYQFRKWLEYFGKKLGKITVAVNPAYTSQECSSCGSLIKKSLSMRTHTCRCGFILDRDWNAAINILKLALSTTGHVGTWVIDPNASGDSTSTLAGAILSGQVGSMNEESPHF

SEQ ID NO: 44463 - protein, 226 aa, unknown
  TnpB Polypeptide
MLTFEFSPPPMRRCSSILAVDLGERFVATAVLWRKGVVKAQFLGREIRGVRRHYAWLRRRLQKGLTQAVKRIGSKERRMVNAILHRVSKRIVSLALAANSYIVLGDLTGIRQRAKGKGKRLNRIVSSMPYHRLTKMIEYKATLVGIPLITTSEACTSKTCHICGCEGRRKTQGLFICPHCGEYNADLNGAINIAKKFERSLGYMPLDGAACEPALNHAEESMEAPS

SEQ ID NO: 44464 - protein, 399 aa, Kribbella sp.
MCVVSRYRLAPSPDQVSGLLDLCRHARYVWNLGLEQRLMWRPGRRATPGYVAQARQLTEARAAEPWLKAGSQMVQQQALRDLEQAWRNFWNGTHRRPTWRREGVDEGFRIVGSQVQRVEKLNRKWGRVLVPKVGWIKFRLSCALPAAKSYRVTRDRSGRWHIAFAVIPSVIEAPGNGEIVGVDRGVAVSAALSTGEMLSCPGLSKREQVRLKKLQRRLARAEHGSKRRARVRTAIARWKARETDRRKNWVEQTSTDLARRFDLIRLEDLQIRNLTRSARGTIEQPGRNVRAKAGLNRGILANGWGQLAARLEHKAPGRVQKVNAAYTSQTCSACGHCAPESRENQTVFRCVACRYEANADVNAAINIARGIAAGRAVNARRETAIPASETREPQLATST

SEQ ID NO: 44465 - protein, 328 aa, unknown
  TnpB Polypeptide
LQEERSLSGRVDRPDQKGYPKFKKHQTNSSVEYKTSGWKLSEDRRFLTFTDSFKAGTFKLWGSRDLHFYQQGKIKRIRVVRRADGYYAQFCIDTERLEQREPTGKTIGLDVGLNHFSTDSDGNQIENPRYLRKSERALKRVQKRLSRKQKGSKNRIKARGRLGRKHLRVSRQRKDFAVKLARCVVRSSDLVAYEDLKVRNMIKNHHLAKSISDASWSLFRQWIEYFGKVFGVVTIAVPPHYTSRKCSRCGEVVKKTLSTRTHQCPHCGYVADRDENAARNIRQIGLATAGHVGSWEDDSRNVSGEIDLCLGESTPPSKSARGKRKSKA

SEQ ID NO: 44466 - protein, 353 aa, unknown
  TnpB Polypeptide
MIQEWFPILTSIWNWAIKKIELDAADHIYYNKFEFVNMLANHNKRLGIPSHTIQAILKDAHTTWQRCFKKLARAPRLKGQRNRLTSVSFPDPIKKAHVNSTSIELPYLGKLKFHKQIIPSGNIKCARIVKRASGFYLCLFVDAQSNRIAHKGCEAIGIQLSVDGRMALSNGDIIQREAQLQKHLNRLAQAQRGGNKKLVARLHERIANCRKDANHKLSRKMVEQYDTIVVNKDDLKQRARNLGLLVADSANYQLRLMMCYKSENNDRKYIEVASNTSTAGATISTVTCSVCRSPSGPTSLTCLKVREWVCVSCGTLHDRDVNTAKNTLISGLGASHESAAKRVRNLLTNHYEL

SEQ ID NO: 44467 - protein, 475 aa, Acidimicrobiaceae sp.
VVIYQAFRFELCPNNLARSALSSHAGATRFAYNWGLAKVSAQMAAYESSRVLALRQGADAVEAKDWARAVVGPLPSTLPALSREWNQAKYEVAPWWASNSKEAYKSGLDALARALKGFFSSHSGQSKSRPVGFPRLKKKGSRRSFRVGTGSFGVRDLRHVRLPRIGMLRTNEPTAKLARRLGDGTARVLSATVSEHAGRWYVSFCCEVQRPDPDPPVGPAVGVDLGVKRLAVLSDGEVVENPAHLSRYARRIARLQRQCSRRRGPGKAQLPSGRWRRSKAKLARAHLKVANARADGLHKFSTRLAKTCGAVVVEDLAVKAMTASSKGLGHWRGKAGLNRSMLDASLAELRRQLSYKCTWYGSKLVVANRWYPSSKTCSGCGLVKTKLALSERTFCCERCGLVIDRDANAAANLAGLVKATTGTASGAGTSRGPASANAQGEERFMPAGRCSSLNCVDSTGQPGQTATASAQAGAA

SEQ ID NO: 44468 - protein, 186 aa, Lactobacillus sp.
VHVQPKAKANVQSEPAIGIDWNMTNNVAYHDSDNKQYQLSPEVIAKADGYEDQINKLRRKRSMMHGSAKYITKKIQKLSAKRAQPLNEAYRKIAIELVDPIEVLVMKKIGAKDMRKSTGKAKNRKLALLKPYEAKQVIQNRAFKQGVTVVEVDAYKTSQVEYGTELIDKHPLSQREWISPITGKSH

SEQ ID NO: 44469 - protein, 254 aa, Lactobacillus sp.
LHKRASEYDFSDVKVIKLKRKDDGTYQFQIVHVRPKAPANVQAKPAIGIDWNMTNNVAYHDSNDKQYQLPAEVIAKADWYEHQINKLKRKRSLTHGSTKKLDKKIQKFSAKRAQLLTEAYRHLAIEIVDPVEVVVMEKIGAKDMRKSTGKAKNRKLALLKPYEAKKVIQNRAFKQGVTVVEVDAYKTSQVEYGTESIDKHPLSQREWVSSVTGKVVNRDHNAALNILDWGLHPIHHIKVKTFAKVTATMVSSII

SEQ ID NO: 44470 - protein, 390 aa, Lactobacillus sp.
MLKTHKVRCYPNKTMQKFIDNACHCRRYCYNQALETWNSMYDASLVLQDKSMRPNERKVRDDLVDNKADWQYAQSARILQLAVHDLGQAWKNFFNPKMPNHERPKFKSRKKSRPVFKTDRAKIVDEKLCLDKPQGYQGDWYPVRLAEAPRWHGLLRQVTVNCDADSYYASLSIEVDESQSLPINKRICGIDANIGRFVYNDDKQTKTIRVLTDQLTDLYTRITLYQRRLARKRNENPKRFQSNNYRAMITKLQRSYQKVTRIQNDLMQKFTTQLIQDNGTIAIEDLDVQHMKMNKHLAKNLHRSQFGRFKQLLQYKAEWYGRELVMVDRYYPSTQRCSQCGEVKVGAEKLTLAGNALHHTKHHEYHCYACGARLERDANAVQNLIQYAKG

SEQ ID NO: 44471 - protein, 330 aa, Lactobacillus sp.
MDEPWVQEKRSRSKTFAFTEKLKVTLSYQQILKQERSLLVQDKLFNYSLNYMYKTFGRKHIDRNIPSGIKRHELINHIIKMFLSEKYQLKRWNVKVLFLSSHNAQLFLQTLIINFTEYQKLLRAGLNWSAKIKFQYKQNIIKDKRGKHKNPHHNSWYKRGHLRFNLKSKTRAVEIQKDTPIRILSTCVIKVPNFGILHLYRNANEYDFSDVKIIKLKRKGDGTYQLQIVHVKPKAKANVQAEPAIGIDWNMANNVAYHDSNNKQYQLPPEVISKADQHEHQINELKRKRSLMHGSTKKITKNLDYSPRYWGHEIASGWSESNVWIVANTD

SEQ ID NO: 44472 - protein, 394 aa, Lactobacillus sp.
MPIKTHKVRIYPNAQMRQVLDAGFGYARYCYNQGLELWNVMYESFVLTGNLKFKPNGNKIRDILVNEKEDWQFSFSARILQTAILNLKKAWQNFFNPNMIHSKRPTFKSKRHKRQSFTTDRAKVVNSKYLKLDKPLGQNYDLIKMAEPLRFTGDIKTATITKRGERYFASIAVQVADQPVPQFVESFDIQAVDMNIGHFNANAMSLTTITTRILHLHSKIKHYNRQLARKRKVNPRNYWSHQYAKTKCRLNKAYLDIVNLQQDMLQKFTHSLLADCQTICVEDLNVNAMKMNKKLAKNLHRGLFGRARRIIEYHANWNHQLFIKADRFYPSTQHCSLCGFIKTREATGGKQTLSGDSINQKHQLYHCFNCGANLDRDKNAVDNLIAYAAGLTAE

SEQ ID NO: 44473 - protein, 415 aa, Lactobacillus sp.
MVIFISSWQHEFISLVYNTVEEVKHMLMTHKVRCYPNKTMQQFINKAYHYRRYCYNQALETWNSMYEASLVLQDKTLRPNERKVRDELVANKADWQYAQSARTLQLAVHDLGQAWKNFFNPKMPNHKKPKFKSRKKSRLVFKTDRAMIVDGKLCLDKPQAYAGDWYPIRLSEAPRWSGPLRQATVNRDADGYYASLSIEVDESHPLPSNHRVCGVDANIGKFVYNDDNQTKAVRVLTDQLTNLYTRITLYQQRLARKRNENPKNFRSNNYRAMITKLQHSYQKVARIQNDLMQKFTTQLVQDNGTIAIEDLDVQHMKMNKHLAKNLHRSQFGCFKQLLKYKAEWYGRELVMVDRYYPSTQRCSQCGEVKVGAEKLTLAGNALHHTKHHEYHCYACGARLERDVNAVQNLIQYAKG

SEQ ID NO: 44474 - protein, 437 aa, unknown
  TnpB Polypeptide
MEQMVIQKAARGKVVNLADSISSAIDFMLRDQKRLWNWIHNLNIEHYAQTGNFIFYNEAASLLTHQRRFGSFSEGSVVAQQQCLRSYEKALKDSFPNAKIRLGFPRPKKRATDCSLRFPSVVIPTIRVGNVITHAKLPKIGLIRVRNLEVPVGSKINSFYLNKEADGYWLSVQFGIIIDQQINDNNSVIGIDGGLSVMVSFSDGEQIQALKPLKKSLKKLKTQNRSLSRKKKGSVNRRRQAKKVARVHTKVRHSRRNTQHQLSRRLVNEHGLIAIETLSLSGLKRLKHQGFAWSDIGLGELYRQIRYKAKWSGVEVYEHPRFVRSTGCCPDCRHVGERIKLGISSWTCTQCGTSHDRDIAAAKWLELCAIENRTKVGAVSSESVKTERSQSPKRGGLRSAMQPIAGMRSEPSGLPVHDGPPANRPSDDMCLAHASTG

SEQ ID NO: 44475 - protein, 224 aa, Microcystis sp.
MSDLKIPTSKREIIAARIVPKSSCYVIEIVYERRSETTDKQQIAGVDLGVNNLITQNNQPSSKRLIFLTHKRNCRGENYLHTASKKVIDWCIRPQIGTLIIGHNEWMKQSLNLGKRNHQQLVNIPHYRLIEMLTYKAQLKGIKVIITEESYTSQSSALDRDELPKYGEEKPLFKGKRLARGLDKMGKNQLLNADVNGAFNIIRKVITDVIEQGIRGLPFNTLRA

SEQ ID NO: 44476 - protein, 380 aa, unknown
  TnpB Polypeptide
MFRAIRVRLYPNKAQEQELNKVLGAYRFVYNHMLDRRKTAYETDKTNLKITDLSKYFHGSLLKDEQYAWLKEQNTKVMKQAIRQMDVAYQNFFNHHNGFPKFKSKKDKQSALFPRGAISKRNTFETKHITLITSLQNLRFRCSDLYHKRLQKYKDNIRSATLSKTKSGNFFLSILVDIPEAECVKFGKTNKQVGIDLGVKDFVITSDGFVFENKHFFKKDEKKITKLQRKLSRKVKGSNNRNKQRIRLAKVYERLSNKKENYIHSVVNEILKSYDTVFMEDLNVHGMLKNHSLAKAIQEVGFYRFKEILQSKALMNGKQVVLVDRFYPSSKTCSCCGYKKKDLKLSDRFWTCPECGEHHDRDINASKNILIEGQRKLRAG

SEQ ID NO: 44477 - protein, 387 aa, Cyanobacteria sp.
MSYNIIMTQSLSVKCKLIVPVESRPRIDETLRGFADACNQILAVAKRDNCWNTTKLHHKVYKPVKEATGLKANHVCQAIRRVINNAKAVKQIHKFRSTSISLDIRTFRYVEKSQVVGVTLKCGRVDFKLSIGGYQMALLRGQNLTSATLCKSKKGDYYINFVVEIDTPPTGKTPKVIGVDLGRRDIATTSTGKSWSGEQIQSVRDRLSQTRANIQRKRSRSSRRLLRRLSGRERRFQEWLNHNISKQLVQEAKSRDAALAFEDLSGIRDTLNKKPTSKTERRRTNNWAFYQLKMFVGYKAAIAGVLVVFVPPAYTSQTCSRCHHVHPEKGKSYRNGKKFKCGHCGFEHDADINAACNIADLGKSVSLPESPGIVCLLEGQLPLFRLA

SEQ ID NO: 44478 - protein, 145 aa, unknown
  TnpB Polypeptide
MTAVRMKLHRPISEKWKLKSVTVSREPSGKYFASLAESFDAVCVEDLNLKGMAGGLHLGKGVHDNGYGLFLSMLEYKLEERGKYLIKVDRYFASSKICSVCGNKKEELSLSDRIYYCECGNRMDRDANAAVNIMNEGKRIFAECA

SEQ ID NO: 44479 - protein, 397 aa, unknown
  TnpB Polypeptide
MSARYRLLPTPAQEAVLRDHCAHSRYVFNLAVEQYQHWRPGRKSAPGYLEQCRQLTAARAEHPWLSAGYQMVQQQALRDFTRATAAFFDPRNPAEQPSWRKAGRDEGFRIVGRRGREWNVRRMARHVGQVWVPRAGWVRFRWSRPVPLGVKSYRVTMDRAGRWHIAFAAIPDPIPAPHTGAVVGIDRGVAVSAALSTGELLYAPGLTAQERRRMRRLERKLAHAKRGSNRRGQVKRAIARLRARETDRRKDWVEKVSTDLVGRFGVIRVEDLKIRNMTRSAKGTRVNPGRSVRQKAGLNRGILRSGWGLLVRRLEQKAPGRVEKINPAFTSQRCSACGQVDRKSRESQAVFRCTACGYACNADVNAARNIAAGHAVTARGGDGVARPVNREPQLLAS

SEQ ID NO: 44480 - protein, 403 aa, unknown
  TnpB Polypeptide
MIQKAYKFRLLPNKTQQVLLSKTFGCCRYAWNDWTKEFNKPVTEEKHFKTVKELRNETGWMKEVSFCAVQQKERDFDQFKKQFFSKSRKKKVGRPKRKYKNDKQSFRLSFGGGGTFFIEENKIFLAKIGLVKCIFDRTIPEDAKFVNCTVSKDSVGDYFVSILVEEKEKYLPKTGKVTGIDVGLTNFITLSDGTVVDNPRFFRENQAKLKKAQQHLARKVKGSNHQKKCRRYVAKVHRKIAGDRLNFLHRLSYLLVKEYDLIAVEDLNIAGMLMNHCLAKSISDASWSEFIRQLEYKCAWYGKDLRKIGRFEPTSKKCYKCGYINHELTLSIREWDCPICGTHHHRDHTAAINILDLAVGTDTALQTWRECKTFEECHSSAVPDEASIITEDLESGNLQLCSR

SEQ ID NO: 44481 - protein, 745 aa, unknown
  TnpB Polypeptide
MERVHKDRLKNVARNKTVVKKVNEVVNNCNRIYTYTLQFIKLFIISKYDAHVIEELDKSIKDDIDKPIINDPNIMDFEDDIDVLIYNRSNKKKKKKKKKKIKKERGLFTPQFIRYAIQTVTSTIDNRGRVANNDPILDELEEFYNNEFSELVGGYKPLRTNITHILFDAMTVEILTSYKNNVWMHFIQRVKRYINSMYLYNFNKKYYYLLDTKNKKDEEKYETLKKDLMKEVNIIKLAVLGIDISDNTFNNTVLINYRNSIKHLRKTLIPPLKKSLPEDLKIDPYKFVYSMLYMNNEYERLGISSHNMLPLRHSFSPRNILIDTSVIVETFCSENKAALYKDIQINAVDIWKLFLKEKVTRNHPNSKYMFNNVINTNGFTVSIHKADQDRINKKIQSHSHIKGSKQVINKDGIIKDEDEDIIDDEEDNDSNEEDEDNNEEDEIKPTIIPKKKKDDEIPYIHNLDTTTLTGLVNKIKIGGDPGVNNEMTFISEDGKKLILSAAQRRFETKITLNKQKRRDHLEKNPLIKKLIEDFTVNGKTNNYNKFKEYIRTRNILYNQVEKYYQLEFHRRLKWHTYISTQKWEHKLIDTITKFFGTEVNGTYNKDDIVIGIGDWSINQAFKGCMPSKGMGLKRLFKKHFKNTVSVVEKYTSKVCSKCKHNVEYYTKVTESATYKGKNKSYVHGLLCCTNKNCSKLWNRDINAATNILQILLGHIYTHKRPLYYEGTPLKAIRREIIKQGLLINF

SEQ ID NO: 44482 - protein, 81 aa, Okeania sp.
DHKLAKAISDANWAELVRQLEYKAQWYGRELVKIDRYFPSSKRCSNCGHVVGKLPLSVREWNCPECATHHDRDINASINIL

SEQ ID NO: 44483 - protein, 301 aa, Firmicutes sp.
VESTSLQQTLRDLDNAYSRFFKKLAGFPKFKDKRCPKQSYRSQMVNNNIQIRENHIKLPKLGFVKFANSREVKGKILNITISRTNTYKYYISICVDTEIEMMPRATGEIGIDLGLKDYLVTSDGLPVPNPKYFRKYEKQLGKAQRRLSKKNKGSKNYNKEKLKVALLHEKIAHTRRDFLHKLSTAIVAENQTIVVEGLKPGNMIKNKRLSKSIADASWGIFLDMLEYKSLWYDRKYIKIHTFFPSSQLCSSCGYQNKNMKKLHIRTWECPICGEFHHRDENAAKNIKAEGLRVAFKTIADI

SEQ ID NO: 44484 - protein, 420 aa, unknown
  TnpB Polypeptide
VRGDDVYRNQKNQVRHLTKQEYVALKALCRLSKNLYNATLYAIRQYYFTEKKYLRYESAYHALKDNENYKLLNTDIAQQTMKVVDRNFKSFFALVNKAKQCDYKFSNIKLPHYLPKDGYFMLIIPRFTVKDGYFTIPMSNAFKKEFGTVKLPFPKNLDKEQVKEIRIIPKHNCKFFEIDFVYIQEQQTMQLNPNNALGVDLGLDNLATCVTNAGASFIVDGKKLKSINQWYNKENARLQSIKDKQGVKGLTNRQYRLLTKRNNRVNYYMNKTARIIVNYCIQNNIGNIVVGYNLDWKRNINIGSCNNQNFAQIPHGNLRVKIKSLCERYGINYVEQEESYTSQADFFANDTLPVYNTDNPQEYNFSGKRISRGQYRTYQGTIINADCNGALNILRKSNLVDLRVLQARGCLDQPERIRVV

SEQ ID NO: 44485 - protein, 498 aa, Vulcanisaeta sp.
VAVELEVTKELNKLLCSVESMYLSIVREVVEYAVANNVLNATQLHKLFYHKYRGEYQDLNSQLIIQAIRQAAEVAKSFVERRKKGLVNKPYPEVKAVSIRFVVTTWSYEEFVKSVAPVRLELSLPNGRTEVWLRPHKRFWLFWWRVLNGEAKLASTLIIKRKANKWYAIFAFELKPRVMKPQSIIAFDINENTVAVGRVDLPSTVDKVASWNRQHVTPELYTIRTDFGRLAKRYGRIRSAIIERLKPGFALPNGKYINITNTREYRKRVRKLRERGRKVGRVRHVANELTRTPSIIITEELGSNPQESMIKDVGKDELRHRIKQTPFKSIEKAVGDKALERGSRIFRVSSYRNSRVCPIHFTRLWETNDWHVLYCPKGHYVDRDYASVMNMTWKITPESWTKAFWWNLRREMNWREYEEKSNPIISKHIVYFLQTLLKTLTASKQSPAMLARGSPMNPAGGADEGWARAPPRPKGTLTLQDGEEVSSETTLPTPLIKA

SEQ ID NO: 44486 - protein, 405 aa, Bacteroidetes sp.
VLKSYKYRIFPTEQQQKLLTNIFGQVRFVYNLGLETKSLAYSGTKHNLSWIDLANQIKELKNTECDWLRQSPAQALQSALRNLDNAYTGFFKHKRGFPKYKSKYRKQSFQLPQGVHLTEDRIFIPKLKLVDIALSRPIKGTIKTVTISKTPTNKYFVSILTETGELIPKKRPIEEQTTVGLDLGIKDFCITSDGRKFENQDFLKSKLNKLRIEQRSLSRKVKGSNHYTKQKLVVALLYEHIRNKRQDHLHKTSTHLITDYDTICLEDLNVKGLTKRCKPKQDETGKYLYNGQKAKSGLNRNILDCGWTTFTSMLEYKADWYGKNISTIGRFDPSSKTCSDCGTIKHDLKLEYREWACETCGTIHDRDVNAAINIKNFGLRNQPSVTQSNGIPYACSVESFGFNRM

SEQ ID NO: 44487 - protein, 302 aa, unknown
  TnpB Polypeptide
MLARRGFRYRIYPTPEQAARLRQWEGALRVLWNLAHEQRLAYLRRHAKLPSAFDQINKLTGLRAAVPWMADVPRNVSAQLLVDLDSAWQRCVSRLGHRPRWKKKGRDVISITEPHPKGFRLTEAGVVFPKLGEVRAVRHRPCVGVPKRCTIVLSHRYAKSHGTVVVENLNVKGMVRGSLGRQIHSAGWSSFCSMLRYKLAATGGTLVEVQAHYSSQTCPACGVVDAASRFGEVFCCVACGHRAHADLNAAQVLLSRRNGGDAGRGGYGEVSRPVKRQLRVARRGHSTEHRLGLLKSPGLQSG

SEQ ID NO: 44488 - protein, 401 aa, Actinomadura sp.
VRTAYRCRAYPDPEQAAILGRTFGCVRLVWNKTLAERARADHAQGKRTSYKQTDAALTEWKKTQDLAFLSEVSSVPLQQALRHQHTAFANFFAGRAKYPRFKSRTGRQTAHYTRSAFRMRNGELRLAKTTAPLAFVWSFDDVDVAGLDPTMVVVSREPDGRWYLTFSIDTDAPAPAPLVGYAIGIDLGIKDFAVTSDGTRIPNPKHLEKKQRNLARYQRRMARKQPGSNNRSKAKDKVARTHRKVRDARQDFLHRTSTNLVREADTIVIEDLAVTNMVRNRALARAIADCGWGEFRRMLEYKAERAGRTVIVIDRWFPSSKTCSCCGHVLEHLSLSARRWTCPGCRTRHDRDINAAKNILAAGHAAAGRLPPGDVCGADVRRPGNTPPPTAQKQKHLRREP

SEQ ID NO: 44489 - protein, 450 aa, Frankia sp.
MKSLQAYRFALDPNDAQLAGLSRHAGAARFAYNWGLARVKAALAQRDAEASYGLTGDALTLVPWTLPALRLAWNAAKHEVAPWWAECSKETFSAGLDQLVRGLKNFTDSRKGRRRGRRVGFPRFKKRGKARDSFRYTTGAYGPATDRSVKLPRIGQVKVHEPMGALTGRLADGRARLLGATVSRTAGRWFVSFTIEVEREVPSSPSRRQCAAGPVGVDLGVKHLAVLSTGETVANPKHLAGSLRRLSRASRAYARSKPASVGRRKRAARLGRIHARVAHQRRDGLHKLTTRLAKTHDTIVVEDLHVAGMVRNRHLVRAVSDIGMAQIRRQLTYKTRWYGSTLVVADRWYPSSRTCSGCGWRNPSLTLADRTFTCHSCGLIADRDHNAAVNLKHLVAASASETENARGGDRKTALARQVPVNREPGTAQAGQTGSAVPPRTAARQRLTHDS

SEQ ID NO: 44490 - protein, 378 aa, Herbidospora sp.
LRTCAFRLEPRGGAARFLEPGRKSSPGFAEQCRQLTEARAEFAWLRAGSVVVQQQSLRDFAQAMANFVAGTHGRPGFRKRGKHEGFRIIAVKATDIRRLSRNVGEVRIPKAGWIRFRWSRPVPDGVKSFRVTRDRAGRWFIAFAAIPQPIAAPRTGEVAGVDRGVTVSAALSTGELLIVPALRDSEKARLLRLVRKLARAMRRSKRRCAVKAAIARLKARETDRRKDWVEKTSTQLAQRFDVIGVENLKIRNMTRSARGTKDAPGKNVRQKAGLNRAVLAAGWGGLVTLLEHKAPGRVVKVDPAFTSRRCSACGIVDRRARESQAVFRCRSCGFTGNADVNATRNIRDIAAGHAVNARGGDRDAGPVNREPRLVPPLA

SEQ ID NO: 44491 - protein, 406 aa, Limnothrix sp.
MMLVVKARFRYRIYPNRLQRLMLVKTFGCARVVYNDAIRLRQDLYQQGEKVSDTEIQKRVITQAKLTVEREWLSEVASVPLVQSLQDVHLAFRNFFKSLKGERKGRKIGFPKFKKKHSTQSIRFTTNGFSVKPNSVYLAKIGCVRVKWSRELPSDPSSVTIIKDAADRYFASFVCEVDPIALKAINNGVGIDLGLTTFATLSTGEKVRSPKPLAKSLKRLRRAQKSLSRKVKGSKRRYLARRKVARIHARIKDQRTDFLHKLSTRIVRENQAIVLEDLNVSGMVKNRKLARAISDAGWYSFRQMIEGKSIRYGRDFQVISRWEPTSQRCSSCGQLGGKKPLDVREWVCMQCGAIHDRDVNAAINIQVAGGQSETQNGRGGQRKSSSLVAADEASTRGLVEQLRLFA

SEQ ID NO: 44492 - protein, 569 aa, Desulfotomaculum sp.
MKKRKKNKKKSNNPDSGISYTVCGEFFPEVYPAFCSEKWSRGMEDPLSTEMRLFCSCERWAFNQLLEDNLREELKKQGQGTFGINSRYCDDAICKAKAVIESQKELLVLETEETETKLARVKKKLGWAEKDLDKVVKANDPVKIEKVKRTVHGRRARVKKLASKLDELKTHQNNSTIPKVVIGGRSLWKRVCKGRVSREEWRQARQNRLYARGDETKGGNPNIKISWRSGEFTLSVIISHLSEQTGTDSKGRRIMTRAPKVTGKLWLPEKHQLKTWELLLSGAPYTIELIKGKDGRYRVHITFTVTVPETVTNPNRGYLGMDTNPDGVALANVGYTGQSEPWPEGFDVPYPKALHKFAGEFQITAHPNGFLYLKISELAYSRSFRRTYLIGVLAKVVVDIAKVLGKPIAVENLDFSKDQLDTNKKFNRMAFNFPFKKMVETVLRKAFREGVGIKQVWPAHTSTIGYYKYMERYGIIIHHAAALVIARRAIGFRERITNEIKQKIQVIREKPNQKVNSLPGEGKGMTPKIKRLFKRLDEKVLVHNGLTRFKQESFYSVWRDLKQLALSSR

SEQ ID NO: 44493 - protein, 414 aa, Allostreptomyces sp.
VVSVDAVPVRRTYRYRFHPTDVQAAELERTFGCVRKVYNLALEVRTRAWLQRQERVSYNDTSAMLSQWKKAEELAFLSEVSSVPLQQALRHLQAAFSNFFGGRAEYPRFKSKKRSRKAAEYTRSGFTFRGGKLTLAKMADPLSVVWSRPLPEGVVPSTVTVSRDGAGRWFVSMLCEDAGVRPLPVTDAAVGIDAGLSSLVTLSTGEKVANPRQEHRDRARLAKAQRELCRKAPGRGANREKARRKVARIYARIADRRRDYLHKLTTRLVRENQTIVIEDLVVSNMMGGRLARAISDAAWAHMRFMLQYKAAWYGRELVVVDRWFPSSRLCSACGSIRAHLPLNVREWTCGCGQVHDRDVNAARNILAAGLAVTVCGGSVRPHRSTPERPRSVKQKVQPAREGIRPVRAEEVKSK

SEQ ID NO: 44494 - protein, 388 aa, Streptomyces sp.
LAKAFGCARVVFNDAVRAREDARAAGEAFPKAAELSTRLITQAKQTTSRSWLGEVSAVVLQQSLRDAETACRNFFASLKGTRKGPKIGPPRFKSRKDARQAIRFTANARWNITDSGRLNLPKIGAVKVKWSRTLPTTPTSVTVIKDSAGRYFASFVIDSDSQAEAERMPATDQTIGIDLGLTHFAVLSDGTKIESPRFLRRAEKKLKKAQRELSRKQKGSKNREKARLKVARAHAKVTDARHEFHHQLSTRLISENQGIAVEDLSVAGLARTRLAKSVHDAGWSSFVHMLEYKAARYGRTLVKIGRFEPTSQTCSTCGVKDGPKPLDVREWTCAACGTVHDRDINAAINVKTAAGLAVSACGAPVRPGATAQREETGSHGFPTEPCAA

SEQ ID NO: 44495 - protein, 222 aa, Streptomyces sp.
VQPLPATGQAIGVDVGLSHLLALSTGEKIANPRHERRDRAALARQQRRLAKKEKGSANRARARLKVAKIHARIADRRRDTLHKLTTRLVRENQTIVIEDLTVRNLVKNHRLARSISDAAWSEFRSMLEYKAQWYGREVIAVDRWFPSSRLCSACNTLQDRMPLHVRTWTCDCGVTHDRDVNAAHNLLAAGLAVTVCGAGVRPQRSTPDRRSATKQKIPRREP

SEQ ID NO: 44496 - protein, 492 aa, Streptomyces sp.
VGDRGARSDVRPCPPARQARCEVIGLACREPVRELHLPRPTQGVPTPAVEGSDPAVVVVLRRLGRHGERRDGAAAHRHRAGTPLEEEGRLVNRAYKFLLRPTAGQKATLGEMLRDHCSLYNGALQERRDAWRHSSKTSIKYGNQSAQLKEIRAFDPERHGRWSFSSQQATLRRLDKAFQAFFRRVKAGQTPGYPRFKGVGHFDTVVFPKDGDGCRWDSTPHDRHTRVRLQGVGHVRVHQHRPVHGRVKTISIKREGNRWYVVLSCDDVPAEPLPPTCAVIGIDMGTTRFLTTSDGKHVANPKFLDTAAAELADAQRHLATFPKRAQQRNKKHRAAARKVAKLHAKIRKQRLDFHHKTALALVRDHDAIAHERLNTAGMTRAPKPKPDPKTPGAFLPNGAAAKAGLNRRILDAGWAQFLGILANKAESAGRLLVPVDARNTSRTCLACGHVAKENRTTQAKFECVTCGFTANADHVGATNVFNRAGLVLCDVA

SEQ ID NO: 44497 - protein, 293 aa, unknown
  TnpB Polypeptide
MCRGTWKEPSGNFFGNRKWDSQITNQKNSRKSYTTNMINGNICLQEKSLKLPKMTPIKIKLHRSIPEGWKLKSVTVSREPTGKYFASLLFDCENQTAEKRQAEKFLGIDFAMHGLCVFSTGERAGYPMFYRSAEKKLAREQRKLSRCEKGSRNYQKQRKRVALCHERIKNQRKDFHHKLSHDLAEKYDAVCVEDLNLKGIAGGLHFGKGIQDNGYGQFLSMLGYKLEERGKYLIKVDRYFASSKICSVCGNRKKELALSERTYICECGNRMDRDVNAAVNILKEGKKIYKKCA

SEQ ID NO: 44498 - protein, 552 aa, unknown
  TnpB Polypeptide
MKFNKIKGTVFRMYKTKGPDLLLPLYNILQGELNRILSTPTYVEALSKIELKYKDENGEEQSKLNGMLWKEIHEIIGDSLKGKVPDAWYLRILYHNIISLLKSRQEQIKIYEILKSNQYKIDNTLRAKLVQEKLYPTNSYLETLAVAKDMPVLPERKTFILDFSVSDKQMFRVGKNSNSYEIKIHSKKDVKAYNLETGWISFEMFLPTYIRESFTGKTAKPQFYWDCNKDEFVCAIPCEIKKLPHEYENIMGVDLGKIKVYSATVVRKDGSISDEYVPTEELQNLVDKLNRINQHIKLVYEKRKRSSKYGNFTKRQDRRKLDYKRSRNKRTKLQFAIARLVAVEVVNIAIKEQCKEVHLESLSWVKSLGGKWNFSQVQDCIEEVAELFSIKIVKVSAYNSSKTNPVTLEIGKISSRDVIFKNGQKVDRDQLAGLNLALREPKKQKQRKIKTLNIRDSVVIQRQSRRLNNYLMKKSVMSEIKSKRKINKEYLRAKELSSKPDLIKKENKKIVMFSHDKAKSDFAIVSVYKSSNFKLVSYFTNNLQFKHIYTDL

SEQ ID NO: 44499 - protein, 406 aa, unknown
  TnpB Polypeptide
MNLTEKEIVYSTDERFDLIKELCHLSKNLYNASLYDVRQYYFETKSYRTWQSQVPIFTKTKNPDYYALQSYLASEVIKQIGKQFIGFFNNKSNKKKRIPKYKDKHGYNVITFNNKTISKQIEFDEDKQLYTYTLCKRSYNLKVQSTKPNIKMVKFVYDEANDLIKCFKIYEVKQSELKSDNSRYFSIDPGLNNIVSIYNNIGIRPLLYNGRPIKSINQYYNKLNAKLRSELPTNMKSSKRLKQLSFKRNNKIDYEMHKISSHIISQAVKNNISKIFIGNNIGWKNEIKMGRRNNQNFTNIPHTKLFNQLLYKGLMNGIEVVFTEESYTSKASFFDKDYLPKYGESDNHKFSGRRISRGLYKDSKGNLWNADLNGGGNIMRKISDKAAYKNIRKTKELMKRPILITL

SEQ ID NO: 44500 - protein, 418 aa, unknown
  TnpB Polypeptide
MRRKKKITENPIPTITRTHKIRIYPNKHNQEVFQKYYDYQRSVWNRAIDERNAQYKIYKEMKATGLYTQKELNKNYFPHTNNLRKMEKFDWEDNFYCRVRDIQFDNLCQAWDNFFNPSMPNHKKPKYKKKKDVENHKKLALKNLRIKGEWLFLPKSRYSKPEYRFTKIKMAESLRFNGRIADNFIVSVKNNKWYVTITVETPLEEKVAISKQSTGIDVNVGSIDYLKSDGLNKDYGKFYLLPQSLLKQYDKIKYYSRVISKKRNKNPYYIHSKSYHETITKLNNAYTKAYNIQEANLNNMVKYFFDNYNRIVIEDLDVNSMKMNKRLCKSLHRNSFGRFKQKMIDKAEEYNVEFILANRYFPSTQTCSKCGHVKTGDEKLFLWGDKYGNDHNTYVCYHCGTIQDRTENAILNLVNYKK

SEQ ID NO: 44501 - protein, 398 aa, unknown
  TnpB Polypeptide
MSRYRLLPTPSQQAVLLDYCAHARYVWNLAVEQHSHWHPGRTSAPGYLEQCRQLTQARAEHPWLAAGSATVQQQALRDFAQAMAAFFDPRNPTRRPSWRKAGRDEGFRITGRRGQQWDVRRVSRHIGQVWVPKVGWVRFRWSRAVPLGVKSYRVTYNRAGRWHVAFAAVPAPIPTPGTGEVIGIDRGVTVSAALSTGELLHAPGLTGREQWRMRRLERKLAKAKRGSNRRVRVKHAISRLRTREIDRRKDWAEKASTNIVRRFDLVRVEDLRIQNMTRSAGGTLEHPGSNVRAKTGLNREILRSGWGLLVRRLEEKAPGRVEKINPAFTSQRCSVCGQVDPKSRESQAVFRCTACGYASHADVNAARNIAAGHAVTARGGFRHAGPANREPHPLLQSA

SEQ ID NO: 44502 - protein, 463 aa, Moorea sp.
MKTPGKVIRTDKWTLNPMTEQRELLGETVRVYRRACRYLVGIIYTHWGELGSLTADQLTPAVEKLMHQTAKRPNIKYPQFNKTFYKFPSYYRRAAIAFAAGQVSSFVTRYQSWQSGNRKRKISNPPRFNAETGCYPTLYKGQCYKLHGFNQVEIKVFNGKNWIWTKVQITGLRERHACATNKMMSPALIFNDRYCHLSVPFNCKPEKRKPEANVTAVDLGINTTATIAVVTQTGTVIHREFIHPGRDIDRRDKRLKSVSVRASKTMGKGGKLHKAFCSKTYKKCQRINNQISHIVSKRIVEIAEKFNSEAIRQSRRFANVFENLKGWKPKGGRKRSNLRQRFHGWLKAKIRNFTEMKWAELGGKVIEIVAAYTSKLAFDGSGTVKRNSKKYSLATFPSGKRFNADLNGAYNIGARGVFKLTRRNDEEGRSSKKSGRPPRSWACLCDLWTSGSFKLAQDTPTSV

SEQ ID NO: 44503 - protein, 531 aa, unknown
  TnpB Polypeptide
MSINSRYLREEGALAKNQAYKAFAVRHSRVLDLNGEVLDAAPVMAELAAEVRDISAYATYVVRNDMKLGSELANVNVVQPAVAGRRAGITMPDFLATGKSGRSRKEFLVQHNVVTAFRSWQERIDAVNGASSKYVSQGWKRTMNASAPTYGEDYVNLGAVDRQYAVIESNPFTTGEIVLKMVIRGAWYRLIFNFDNVRFPEGKVTLPLVKVENNQPVFIFSVVTDNSIVQFSGDYVIGVDVGINNYATVVVRNSDTGRVVHETTLSQRVHSLWNSVRASERQVKQLLKKARSLLYDRQGKMAALDEAQLHREAASRKKRELAILAAQEIAYLSYFYDNAVVAIEDLSWIANTMRHGRWNRGAFIQWLTHYVTQNGGWVVSVSSANTSQVCHACGEKVKHPAHEVSVCPTHGMMDRDVNAAANIAARAVPKVEKARKTRAKSRKLQPQVALKTPVARDSLRYPGRDRTKHVPTPKRKNRPRNVREVILPSSPARVNMTTVLADCGAYGTTETSQAAINLGNMAYECRLCTLN

SEQ ID NO: 44504 - protein, 503 aa, unknown
  TnpB Polypeptide
LNGELLDATAIMAELTSEIQSISAYATYVVRNDIKLGSELANVNVVQPAVAGRRAGVTMPDFLAAGRTGNSRKERLFRHRVVTEYRSWQERIDAVNSESSKYVSQGWKRTMNASAPAYGEAYVNLGAVDKSYAVIENNPTADGEIILKMVIRGAWYRLIFRFDTARFPEGKVTLPLVKVENNQPVFIFSVVTENPVVQFSGDYVLGVDVGINNYATVVVRNSTTGRVVNETTLSQRVHSLWNSIRASERQVRALKKKAAGLLYQRQSRMSALDEAQFHREAASRKKRELAILAAQEIAYLSHFWGNAVVAVEDLGWISNTMQNGRWNRGAFTQWLTHYVTQNGGWVIPVNSANTSQVCHACGSNVTHPTHRVSLCPKHGEMDRDMNAAANIAARAVPRVEKARKTRAKSRKLQPQVALKTPVARGSLKYPGRDRMKNCPTPKRKNHPRNVKEVILPSSPARVQATCLVTGVLADCGAHGISETGQAAIKQGDKTCKCRLCSLN

SEQ ID NO: 44505 - protein, 526 aa, unknown
  TnpB Polypeptide
MAKNQTYKAFVARPSYVLDLSGEVLDTELVMSQLVSEARGISAYATFVVRNDVKLGSALACVTASVPAEAGRQAGVTMPDFLAAGRTGRSRKEKLVQYNVVASYRSWQERVNAVEGTSTKYLSRGWKRTMNASAPTYGEDCINLGAVDKQYALIENDPFTDGEIILKMVVRGRRYRLIFRFDATRFPEGKVTLPLVKVENGVPVFIFSVVTDNPVIQFSSDYVIGVDVGINNYATVAVRNTGTGKIAYQTTLSQRVHSLWNSVRASEKQVRSLRKKAAELLYQRQARMSALDEAQLHREAASRKKRELAILAAQEIAYLSHVWDNAVVAVEDLSWNRNTMQNGRWNRGAFTQWLTHYISQNGGWVVAVNAANTSQICHACGDEVEHPEHKVSVCAKHGAMDRDVNAAANIAARAVARVEKARKTRSKNRKLQPQAPLKTPTARDSLKYPGRDRTKHAPTPKRKNHPRNAKEVILPSSSPARVIVTRVLADCGAYGTTETDTAAINQDYISHECRYVALIDTLLLTR

SEQ ID NO: 44506 - protein, 345 aa, unknown
  TnpB Polypeptide
MHERLRFRGAKLLWATISRQADGWYVSIQLELHDLDHLSPAKNQGRIGVDLGVLNFATLSNGLVFEGPKPLKKYSEKLAKLQRKFSRTEKNSHNRAKLRIKIARLYEKISNIRLDAIHKLTAFLTANYSEVCIEDLSVKGMMRNHHLARAISDMGFREFRRQMEYKMKQRGGRLIIASRWFPSSKMCRFCGLTNKALKLKHRLWVCPHCGRIIVDRDVNAAINLCNYIDRVDKSDSCSDSGRAAASSQKGNAVSSESYPDVCPAGEDPSRLKAAAERQGCQSTMQTCRKTLAGNDAADPGENSKAFYYGVGSDDWGSQRNSLPGSFGAEVVSKQTVNVQVCSEAQ

SEQ ID NO: 44507 - protein, 377 aa, unknown
  TnpB Polypeptide
MAYKCRAYPDEAQQGMLARTFGCVRLVWNRTLADRHRLYHAEGKGLSYAASDAALTAMKKDPDLAFLAEVSSVPLQQALRHQYKAFSAFFARRARYPRFKSRRGRQSATYTRSAFRMKYGALHLAKTSAPLAFVWTWPEVDVTGLDPTTVTVSRDPCGRWYVSFAVEVADPVRLPAAGAVVGVDLGVKDFAVTSDGEHIASPRKLARRERNLARYQRRLARCQKGSANRGKARGKVARAHRKVRASRADFLHRSSARLVRGHDVIVVEDLAVKNMVRNRRLAKAISDCGWGEFRRQLEYKAAKAGRHLIVIDRWYPSSKTCSTCGHLLAELSLSTRHWTCPACGTRHDRDINAAKNILAAAGRAVGAEMALMPAELT

SEQ ID NO: 44508 - protein, 431 aa, unknown
  TnpB Polypeptide
VDQSLKNKISKTRNETRERRSHLICKTYCLKIDYSRLNKKQKESLRMMFVEAKWLCNHWINEDKIFEANYKQKKVIVKNRHKEFEERTLKFLPAKCKQSILQSMRESIYALSRSKKCGHKVGRLKFKKEFNTLIFNQYGTIGTHKIYDKNKIKILGIRKLVIIKGLDQLPKNCEFGMAFLRNKPSGYYVHITTYSRKETTKEEKKKFKEIGIDFGIKEMVTTSDGEIFDNVSIQEPEHLKRLQQKLNRSQKGSKNRYKIKLLIQREYEKLNNKKEDISNKVVHQLISQYEKIYIQDDNFNGWKTKGKHWSKKIHHSCLGRVKQKLISKGAIVINRFLPSTKMCYKCGNSYSVGLNERIFKCSNCGLIEQRDVKAAKTILMFGNGSLQIIKNRKVPMEHRCQPVETKTSVSKKLFGISSVDETGRSFKKPKD

SEQ ID NO: 44509 - protein, 356 aa, Lentibacillus sp.
MVPTISLKVELLKPTIEKQNVYQTMTQTNTDFANWLLTYDDLNKATSKVFKLFSSNKQLPSAVVNQTIRDVKSQKRHQKAKKYKRLWCAFNNQNAKIEYDSLYKISFPTLEKRIGVPLVVRPFQQKWLDKVLNGEAKQGTVDLFKKRGRWFVTIAISYDVEKTTNEKVLGIDLGLKNIATCSVGTKSLFFKGNQIAFKRRRFSSRRRKLGKLKKLQAIKKSKDKESLWMREMNHTISRRIIRFARSNGVGLIRMEDLTGIRMAKSKKEAGRNLNNWSFHQLQTFIQYKAEMAGITVEYVVPNYTSQTCKCGNCDKQNRNGLMFKCKKCSYKNHADLNASINIAKALSGISKHKQVI

SEQ ID NO: 44510 - protein, 436 aa, Actinokineospora sp.
MNRERDGRQGPCASWPFRLQQSLLVLSVMIASLIGMSRYRLQPTPAQERLLVDHCGHARFVWNLAVEQHAHWRPGRKAAPGYNEQCRQLTQARAANPWLAAGSVIVQQQALKDFAQARANFFRRTHRRPTWRKRGQSEGFRIVAISPDDVRRVSRNVGEVKVPKIGWVRFRWSRAVTNGVKSYRITRDRAGRWHVAFAVVPEPIAGPGTGAAVGVDRGVAVSAALSTGELLSVPTLLGTEKARLLRLQRKLARAQRGSTRRGKVKIAIARLKARESDRRMNWVEKTSTLLARDFDVIAVEDLKIANMTRSAKGTREAPGRGVRQKAGLNRGNLANGWGQLVTRLEQKAPGRVVKVDPRFTSQRCSVCGIVDREARESQAAFRCRACGFACNADVNAARNIRFAAGHAVAARGGPPLGGPANREPQHDDHLSYGSRC

SEQ ID NO: 44511 - protein, 338 aa, Enterococcus sp.
MLKAFKFRIYPTTLQKQWFIQNFGCVRFTYNHLLKARQESYAKTGAIDYTVTPASLKKKYPFLKTADSLALANAQLNLDRAFRNYFKGRASFPKLKNKKSMWQSYTTNNQNGTIYLEKNYLKLPKQKERIKVNLHRPVEGVIRSATISARYNEVFYVSLLCEVSDQNLDGSNRWIGVAYDPQKLIETSSPLNVQLPLLKQTQDSIKIAQRKLWIKSKAAQKRKVRLEKAKNYQKQKRKVMDLYLKQKYQKEDYLEQLSGKLIRHYDYLFIEAVPNDCFSTKFSLQDWYKFIHKLRYKAHWYNKSLLLINMNEQSHLSCDQKSVTLEKIGKQVMFDEMN

SEQ ID NO: 44512 - protein, 402 aa, Bacillus sp.
  misc_feature (330)..(397): Xaa can be any naturally occurring amino acid
MAKENPSNYKTLQIWIKKGHRMYSYFQECCHNAKNMYNTTNFYIRQVYTGLTQEKELQPLQKEVLANIHKNIGKMNDTQLLAYQKKLEKEKLKPKEEQKEITCNLFSEPNFEKPYVDYNFLDALFKAMIQNDYRALPTQCSQSIMKGVFQNWKSFFASLKDYKKNPNKYAGMPRIPKYIRSSEKEILYTNQDCIIKNSRFLKFPKTKLQLNIGKLGFTEGKLKQVRVIPKYNEYVVELVIDVPSEQQMIEENARYMSIDLGIDNLATIVTNTGMKPVLVKGKHVKSINQYYNKMKSHFTSILRNGKQTNEGPFTSKRIEKLHQKRYLKIXXXXXXXXXXXXXXXXXXXXXXXXXXXXXXXXXXXXXXXXXXXXXXXXXXXXXXXXXXXXXXXXXXXXSKFSG

SEQ ID NO: 44513 - protein, 394 aa, Herbidospora sp.
VRRSFKYLLRPTCKQAVALAACLEEHRQLYNAALEHRRIAYRRAGVTVRYGDQSAELKHIRSDDPEGQGRWSFSSQQATLRRLDKAYRAFFARVRAGRTPGFPRFRGRGRFDSVEWPTDGDGCRWNSQPDHPTATFVRFQGVGHVRVHRHRAVEGHVKTVSVKREGSRWYVVLSCDDVPARPLPATGAAAGIDMGVASFLTTSDGDHVVNRRHLVTSADRLAEVQRDLARRQQGSGRHRRTVARIAALHAKVRRRRLDGAHKAALTLVRAYDVIVHEDLRITAMTRSAAGTIERPGRNVGAKSGLNRSILDAGWGVFLRILTDKAESAGRTLISVNPSGTSRMCAHCGHSAKKNRPTQAEFACTACGHIAHADVNAAINILRAGLALRTVVNAA

SEQ ID NO: 44514 - protein, 426 aa, Aphanizomenon sp.
VAKNKKAMGVQQVLLSPDNETKAVLEYLCQQSGKLYNSGVYFARQTFLKTGKLLTGKFDLIYEPSVSKTMVAQSMPSIPAQQTLLSVTEAFKSFKELRSLFIKGQLHFKPKVPGYLTGSKLFKVAYPHSGGQKPTLVNGQLRFSLGLTVKRWFGISEFFLPMPSNLDIAHVKEFTILPKNGAFYLEMSYEVEKQQHDLDINQALSIDLGTADNLAACVDTLGNSLLIDARSMKAMNQLWNKKISTKKEGKSEAYWDAWLDRVTRKRNHQMRDGINKAAKLIIDHCLKYGIGTLVIGWNEGFKSNANMGRINNQKFVQMPLGKLKDRLRQLCELHGIRFQETEEAYTSKASFLDGDSLPKYGEKPEGWKASGKRVKRGLYESGDGSFVNADLNGAANILRKVSGRLSLSLDQLSRRSLAIVARIKLN

SEQ ID NO: 44515 - protein, 408 aa, unknown
  TnpB Polypeptide
MLNAYKYRLHPTREQSEFFNKSFGCVRFIYNWGLQKRIEAYAKDKGRISYVQLCSMLTDLKKEEQYSWLRDVSTECLQQALRNLDAAFTRFFREKKGFPRFKSKSRSRQSYKAILSVHVDQERRRIKLPKIGWVKYGNNRKFEGDVRSVTVSVTPSGKYHVSVLVDDGKEIPEKLPVTFDTTIGIDMGIKDFAVCSNGDTYENPRHLIKAEQRLRTLQRRLSRKKKGSNRRNRARMILARQHEKVANRRQDYLHKISTKIVRENQAIVVEDLNTKGMMKNHRLSKAIGACGWSTFFNMLEYKCERQGKTFIRIGRFDPSSKMCSCGHVYRGLKLSEREWVCPNCGSVNDRDLLAACNIKRFGLQEQNLLFVNKPVAHGGSDVEVPTMDDRQEIDLKSSVPVKRQYIKV

SEQ ID NO: 44516 - protein, 467 aa, unknown
  TnpB Polypeptide
MISAVQLTKASGGCPGHQAGEESGAPRSGARKGIARTACLHRFYGSACHPVRVRTAYRCRAYPDQAQQQVLARTFGCIRVVWNRTLAERHRLYHADGKSLSYAASDAALTAMKKDPDLAFLSEVSAVPLQQALRHQHKAFSAFFDRRVRYPRFKSRRSRQSAHYTRSAFAMCGGELRLAKTNAPLRFVWSWPDVDVTSLHPTMVVVSREPDGRWYVTFAIDADAPEPLEAAGHAVGVDLGVKDFAVTSDGERIANPRHLERKAANLARYQRRLSRCRKGSANRSKARAKVARAHRKVRDARRDFLHRASTRLVRGNDVIVIEDLAVKNMVRNRKLAKAISGCGWGEFRRQLEYKCQSAGRDLIVISRWYPSSKSCSACGYLLGELSLSTRHWTCPSCGSRHDRDINAAKNILAAGQAVTACGAGVRHAGTSRVRSAVKQELQPTTAGIPVFRTRSSQEPPLAVRRAT

SEQ ID NO: 44517 - protein, 361 aa, Clostridium sp.
LLKSYKYRIYPNIEQQIYLAKTFGCARFVYNRMLADRIKFYEENKDLDIKQVKYPTPAQYKKEFEWLKEVDSLALANAQLNLDKAYKNFFRDKSVGFPKFKKKNNTNNYTTNNQNGTIYIENNHIKVPKLKSMIKVEQHRQFNGLIKSCTISQVPSGKYFISILIDTENYQLHKIDKKVGVDLGIKEFAITSDGDFFSNPKHLKKSEKRLAKLQKDLSRKQKGSNNRRKARIKVAKIHEKIANQRNDFLHKVSTQLINENQVIVIEDLKVSNMIKNHKLAKSIADVSFAEFRRMLEYKAEWHGREIIIAPSNYASSQLCSNCGNKSSQTKDLSCRTYICTECGMILDRDINASRNLLKLAM

SEQ ID NO: 44518 - protein, 374 aa, Clostridium sp.
MILGKKVRLYQTKEQEQKLWQSVGTARFIYNWTLAKQEENYKNGGKFIFDGDLRKELTILKKTEELKWLNDVSNNVAKQAVKDGCNAYKNFFKGLADKPRFKSRRKSKPSFYNDNIKLKVKENSILIEKIGWINIKKNVIPTDCKYTNPRISFDGKYWFIAVGIEKDQPVVELTIESIGIDVGVKDLAICSNGMTFKNINKTRVVKQLEKRLRRLQRRVSRKYIKNKEGSKFVKTSNIIKMEKQIKLLHRTLTNTRSNHNHQATNMIVKTKPSRVVMETLNIKGMMKNRHLSKAIAKQCLYDFKRQMQYKCEFNGIEIVEADKWYPSSKTCSECGHIKPKLPLSVRTYICEECGCVIDRDYNASINLSRYELVV

SEQ ID NO: 44519 - protein, 398 aa, Actinomadura sp.
MSRYRLQPTSSQEQMLLEHCGHARFVWNLAVEQHAYWRPGRGAAPGFAEQCRQLTEARAEFAWLRAGSVTVQQQALKDFGQAMAHFFARIHRRPTWRKAGRHEGFRIVAVKPGDVRRVSRRVGQVKVPKVGWVRFRWSRPVPGGVKSFRVTRDRAGRWHIGFAAIPDSIPAPRTGEVVGLDRGVVVSAALSTGDLLHAPGLREGERARLARLQRRLARAQPGSKRRARTKAAIARLNARETDRRADWIEKTSTCLARRFDVIGVEDLKIKDMTRSARGTVEAPGRGVGQKAGLNRGILAAGWGALVTRLEHKAAGRVVKINPRCTSQTCNACKHVAGSSRKSQAVFSCVACGYRANADVNAARNIRDTAAGHAVAARGGLLLSRPANREPQHDLPLRG

SEQ ID NO: 44520 - protein, 431 aa, unknown
  TnpB Polypeptide
MSEKHIINKSHHLYKEIDLLCFKSKNLYNKALYTVRQEFINTSKLKDEGVLEHANYFNYYDINTQFINSKDVDYCELPRKVSNQTLMLVDKNFKSFFALCKLYKSNKDSLTGRPKLPGYLHKTKGRFVTTYELGAISKPKLREGIIKLSGTNIEFPTINKHNGVLKQVRLVPMSNKKYKIEVIYDVEEQNMNLNKDNIISIDYGVNNLMTITSNVEGFQPRIIKGGQVKSINQFYNKSRAELQSQLPNHLTLKDSNGNPRQLNNSNKIDSLTHKRNCKLENEFHSYSNKIIDLCLQYDIGTVVVGCNKGWKQESKMSKTVNQNFVSIPYTKLTHQLKYKSELIGNVVVEQEESYTSKASFVDDEEIPVYDKKNYVHYVSTGTRKERGMFVTKSGRRVNSDVNGSYNILRKYMKSIGRSLDSSRCLLVPIVI

SEQ ID NO: 44521 - protein, 388 aa, unknown
  TnpB Polypeptide
MYYVRKQKFNSQKELCDKLSRESGKLYSNTVKFFWRIVRKKGMWLNPNSLMRIFNSNQMHAHSADASVQQFFHALKSWRKVRKTVPQAKPPKKLKKYTAVMWKRSAIRVKNKQLILSNGRQTEPLIINWQYKLVPVMTTLRWDDSGYELIFCYKQDIPKKKYFPESPVEIDIGQIHIAACSEGTILNGRLLRSFRQGRERGCFILKKRMSNKKKGSEQWKKLKRAKDRFCEKTMNKSKDILHKYTTGLVMYLRNKGYNTLVVGDLTGYRVENNCGHKRNQENHAWLYSKISWYLKYKWENLGLKYVSQEESYTSRTCPCCGNQKKAKGRNYRCKCGFVGHRDLVGATNILRKYLGSFGKRNEPVDGFMAHPLDIKYKPDIHVAHGFVL

SEQ ID NO: 44522 - protein, 373 aa, Parachlamydiales sp.
MIVRKSFRFRLKPTKKQTRFLNEHLEECRWLYNEYLEQRILAHEELAMSLTKVQQLMFLPEIKTERASLEKVRSQVLQNIADRLDKAFQAFFRRCKAGETPGFPRFRGAHRYNSFCYPQSGFALDGGELKLSKIGNIRVQLHRPVEGKIKTCTLRKNTSGDWDVSLSCEVEVWPKAPKEEAIGIDVGLTHFATFSNGKKISNPRFFKKGEEKLARAQRQLSKLKKGTLERRKKGKSVAKIHEKISNQRKDFCHKESRKIINQYQYICVEDLEIKKMIQKSSFAKSIADASWNQFRQFLTYKAEEAGRKMGLVNPAYTSQTCSQCGRQEPKSLGDRWHCCSQCMYSASRDCNAARNILALGLDGLSASSRSPPL

SEQ ID NO: 44523 - protein, 399 aa, unknown
  TnpB Polypeptide
VSNIIRAYKFRLYPTPAQELALGQFLDTHRILYNEARDQRIWAWAMERKSVTYCQQSAWFKGFRPERQCFASLNFSSAQATLRRLDKAFKSFFRRIRAGQKAGFPRFKHEDRWHSVLFPANGNGIRLKGNRLRVQGFDRQLRVRKHREAEGRVKTISVKREAGRWFVVLACDLGSRDFVPNGKPSVGIDMGLTHFLTDSDGDRVENPRFLKETLPELRRANRSLARKEKGSKRRVKAKSKLRRVHAKVSNQRRDFVHKASRDLVSKFGLVGAEDLRIGNMVRNRRLARSISDAGWGMFLEAARYKAEEAGCVFVSVDPRGTSQDCSGCGRKVPKGLSVRWHECPHCGLSLDRDHNAARNILFRALARTGPTNGETNLGLLHGDSSRPLLPRGRSGSPRL

SEQ ID NO: 44524 - protein, 390 aa, Bacillales sp.
MEKNKAYKFRIYPTKEQEILIAKTIGCSRFVFNHFLAKWDEAYKTTGKGLSYDSCSKELPMLKQEFGWLTEVDSTVVQNSVKHLADAYKKFFKKKGNHPRFKSKRNPVQSYKTNIQGKSQLPEVSIIGNRLKLPKLKWVRFANSRKVEGRIINATIRRTASGKYFVSLLAEQKIDELPKIGSSVGVDVGLKNFAILSDGTVYQNDRYFRMLEKKLAREQRKLSRRQLIALNRKVKLSEAKNYQKQKRKVARIHEKIANKRNDFLHKVSTEIVKNHDIIGIETLQVKNMQKNRKLSKSISEVSWSEFHRMLKYKADWYGKTVVKVGKTFASSQLCSSCGHQHKDVKHLGLREWTCPNCGVHHDRDVNAGLNLKQEAERILASSTVGTTGLA

SEQ ID NO: 44525 - protein, 199 aa, Microcoleus sp.
CRVPLLIRWSRTMPDTCEPSTVTVKLDASGRWFVSVLVEDATVKPLLHTDKAVGIDAGITSLIATSDGKKVANPKHFKRLRFKLRQAQKALSRKVKGSNNREKARLEVARIHAAIADSRTDFLHKLTTRLVRENQTIAVEDLAVKNMMKQRKLAQAIADASWSELIRQLEYKCQWYGRTLVKIDRWFPSSKRCGNCGHI

SEQ ID NO: 44526 - protein, 242 aa, Microcoleus sp.
MPDTCEPSTVTVKLDASGRWFVSVLVEDATVKPLLHTDKAVGIDAGITSLIATSDGKKVANPKHFKRLRFKLRQAQKALSRKVKGSNNREKARLEVARIHAAIADSRTDFLHKLTTRLVRENQTIAVEDLAVKNMMKQRKLAQAIADASWSELIRQLEYKCQWYGRTLVKIDRWFPSSKRCGNCGHIAPVSNKDTRHRWAARAAIAFARSSMHFSLEGLVPKPLSKSALINTDLDSTIPPDR

SEQ ID NO: 44527 - protein, 396 aa, unknown
  TnpB Polypeptide
VIKLRKIQLKPTKKQRKTLTKYINDSRFTYNEGVNLFNTYGISNHFELVNKIVTKTANYDTIIPNWFYSSIPISIYETPKTIRSQELKVLSTNIKSAFSNLKNKNIKYFKMNFKSKKRLFNEIINEESRTSSITKKDNKEYLNISKLKNIRIKRNKKDKIEYNITSDIKLQKTKLNKYYLLLPYKEDKIENKEDNRICALDPGQRTFLTGVDLKGNIFRIGEDIQDKIKKLKQKISDCQSKLSNHKKRTIIEYKKYMRTKYDFYTQTLKLKNLIKELHNKTIKYLTTYYDKIILPRYETQKMVKSKMKGFNKQLLSLNHFEFRERLKNKCKELNKKVIIVSEAHTSKTCSLCNYYNPLLGSLKKFKCNYCNKVMDRDDNASYNILKNVLLGTLKIY

SEQ ID NO: 44528 - protein, 436 aa, Thermococcus sp.
MKRSVTVKLQPSKEQEEKLHQLTDLGAKVWNRVNYLRRQQFFQGQIVDFNTTEKTVYEEFKKEIGSATVQQICRKNAEAWRSFFTLARKKRNGELPEWLKPKPPNYLKECEKRKPFIILRNDQYRIEGNRLILKGLGKFKRLEIQFKGRIHLKGRQGRLEITYDEVRRKWYAHISFTVKEKLESEEWVNLPRKPKGNLSAGIDLGVNNLMAVYVESGESFLVNGRPLKSIAFYWQKKIADYQSKLNKSGQKTSRKFRRMHGKAKLQAKHYINTVMRQTVKRLYDLGVSTIIVGYPKGIAQNSDKGKKQNFILSHVWRFNTVIKRLKEVAEEYGIQVVVVNEAFTSKTCPVCGKPHEGARFVRGLFKCPATGLTFNADLVGAFNILKKVAKTITPNLGGLFAQRRGNWPEARPEGLKARFELGFSEAPQTSPPMARG

SEQ ID NO: 44529 - protein, 360 aa, unknown
  TnpB Polypeptide
MQLTETVKLYPNKYQTELIKATMSEYISTVNKLVFDAANGRSITKMTTADVKVNLPSALCNQCIRDAKSIIRKYNKALRNLDTKVRLPVLKKMCCYINNQNFRINDDSIGFPVMINGKSKRISVKTKMSERQKSIFSSSKLGTMRIVVKGHDLVAQIVYDAKEDDAFSNDNVMGVDLGIKCPAVSYCPDGSIKFYGNGRKNKYIRRHCNNLRKRFQKAKKPKAVVKINNKEQRIMKDIDHKLSREIVNTAKAHDISVIKLERLQNIRSTTRTSRKNNHSLHTWSFYRLATFIEYKAKLAGIEVEYVDPAYTSQICPICGSVHHANDRNYTCRCGFHTHRDLLGAINICNSTEYIGNRYTA

SEQ ID NO: 44530 - protein, 411 aa, Erysipelotrichaceae sp.
MIVQRVEKHLIKQNNSYYPILCDFTHKSKNLYNHANFLVRNEFIKNNKWLRYGEMDKILKTDLTFDDYKQMPTAQSAQQILRLLEKDWKSFFTAIKDWNNHKDRYLGRPKLPKYKPKDGKHILILTNQNVKIKDGVLCFPKTFKGFTINSQFLQKDNFVSFQQVRFIPNYKSFTVEIVYNIEVPNALLPDNGRYLSVDIGLDNLATIVNNVSVKPIVINGKGLKSINKYYNKQISHYREVAKRMNDRDYTNRMNRITLKRNHKIDDYMHKASKYLIDYALENDFNTIVIGNNKNWKQESSMSKRVNQSFVGIPHMRFIEMVQYKAQNVGLNVILTEESYTSGTSFLDNEEPIKANYDKSRRVQRGLFVSNNGTKINADVNGAYQIMRKVFPKVNADGIQGVALHPIRVSVA

SEQ ID NO: 44531 - protein, 590 aa, Ferrimicrobium sp.
MKRTVRLATLPLNKGKYDELCSVIKRYTDAKRVFVAHLRQTSLWGLLDRSKSFRDYAKARGLYPTSINVHLIDQAAFDAVDTCIRHIESCFARADIKAKTWRRFTDKNERHYAYACLARYSAIGQIMGGGVPEIPTVAIPPDARAKIASYLHRVIRDALGSSWPTVVKSRSMSLDSSLYSVVDNETRTGKTRRYVKVISSTRNKRISLPLSGISQVSGNIRVVLDEEHKRAFVHVSYDVARQDRATGPAVALDWGITEVCTDSSGVHHGNEYGRALTSMTERRNKTGKARNRLHALSKRDAGSRRTKHIARNNLGTKKQQARLRRTKAQLQTISGATIKEVVYGDGNRTRAKKRVPQLPSQRPREIIIEDLSRLQGKARSKNISRLCSSWARNENQERITVHAYVGGSGIKTVNAAYSSQTCPDPGCGYVHHDNRHGDVFHCRNPYWDCNWQGDVDHVAAMNLLNRIKDRQISRFTPYREVKKILEERFLRRLESRGIPTDDAATAQRLRLQAYHDNPSWTWEVVNHRLALVLSLWIGQNTQRRLESEDKRGAYGCICISERVVNMWSDVPPSLPVGRRAMGLALNRWTG

SEQ ID NO: 44532 - protein, 293 aa, unknown
  TnpB Polypeptide
LKPHKLFFKYLNDGWEVKAGVKLRLIEEERKVLAYFVFEKEFDEPSPSGNFLSVDYNADNVSFGIQEFLIQVRTDLGRLTRFYSDVRKRIQETHLIGWKRKLPSRKGRKLLKKFGQRKRNRRIDLQRKLAKRLVELAKELNATIVLEEVPKNFNQKIMGRRKKNEKRLRDTLHNIGMNGFQKFVTEKAVEYGVPLVFVNPSYSSQVCPRCGAFRVKPDDDALRQRVFECPVCGFNLDRDFVAVLNLLGLFPFSLKADEPPVEDSVSPVMLVVEANLLHHKNSLIVISQGLQQK

SEQ ID NO: 44533 - protein, 414 aa, unknown
  TnpB Polypeptide
MILRGFRFKLAPSGEQENLFRQFAGVCRLVYNLALEQRRDFWRQFQRQTGQQLNYVRQARELTALRAEYDWMAAVSQTCQQQALRDLDRAFTNFFMGIARYPSPRRKSVNDSFRFQGREVEVKKLNAKWSAVRLPKIGWVKFRDTRPMRGVCKNATISLDALGWHISFACEIENTAPANRRPPVGIDRGVANTLALSTGERISVPRSLEAIERRCRAAQRVASRRKRGSIRRAKALRRAAQLSARRARIRRDWHHKAALGISRRFGAVVLEDLNIKNMTASARGTIDAPGSRVRQKAGLNRSILDQGWFGFEIILAYKLDERGGYLLKADPAYTSQTCSECGTVDRQSCESQAVFACQHCGFRAHADHNAAINILRRNTASMRMEEGHRLSSEVRTGSGITPAENPPAAAEGRC

SEQ ID NO: 44534 - protein, 342 aa, unknown
  TnpB Polypeptide
MREYTKAFNTCAKWGFENHTWNKVENHKATYKLIRESGSLPSSLVQGARDCACEALKAEKCKTLPKRKLFASMRYNQRVATVNMIHGIATIATTGGRVKAAFHVPDSYLPYLGWTVKGSTLSYRRDTKDFYLHVSIEAANPAVVSDIKVLGIDRGIKNIAVCSDNKFFNGKAVKNVRGEYAKLRAELQSKGTRSAKRKLKEMSGRERRFVTDVNHCIAKSIVNTGYTVFALEDLGKIRVQKRKGKELDRKLNNWSFYQLERFIGYKAEALGKRVILIDARYTSQKCSVCGHVYKGNRNGSDFLCHNCGFHLHADLNASRNIAQAGISCLGRLPVNQPNVASI

SEQ ID NO: 44535 - protein, 400 aa, Calothrix sp.
MLDVLKVRIYPNKGQEISLAKSFGCSRFIWNFYLNRTNTQYEETGKGMTYCQMAKDLTQLKKLPDYEWLQEPTAAVLQQSLKNLESAFKNFFAKRARFPKFKSKHSKQSIRFPESCSIKNSGLKLPKLGIVKASFSKNVDGKIKSVTVSKTSTGKYFAAILFETKDLTTKAQGKISGIDLGLSSLITVFYGENCYKVDPIKPTRKYAKRLRIRQKALSGKVKGSNNRRKAVKVVARIHEKISNTRQDFLHKLSRKLVDENQVLIAENLCLKGLARTKLAKSIHDASFGMLLNFISYKLDREGGKFIQVDRFFPSTKLCSCCGYKNDSLNLSIREWICPSCQTTHDRDENASRNLRAEGIRILSTNTVGHTEIQACGEAVRLVGTCAKKRVSEKQESPATL

SEQ ID NO: 44536 - protein, 485 aa, unknown
  TnpB Polypeptide
MEKESKNHYKTHQIWVKKGHRMYEYFQTMTQNAKNMYNTTNFYIRQVYTSFIQEKPLQPLQKEVLDTIDIKLNQMNEVQWESYQKKIEKQKSKPKEKRKEVTCNLFKKPSKENPYADYHFLDSLFKVMAQNDYRSLPTQSSQGVMKTVFQNWKSFYASLKDYKQNPSKYKGKPRIPKYSRSTEKEVVFTNQDCVIKNNKFLKFPKTKEQLNIGKLGFSEGKLKQVRVIPKYNEYVVELVMDVLTEQKEYVDNGRYMSIDLGIDNLATIVTNTGRRPLLVKGKNVKSVNQYYNKMKAHFLGILRNGKQTNEGPFTSERLEKLHQKRYCKMKDIFHKASSEVIKVALEENINSIIIGQNKQWKQNINMGKQNNQSFVSIPHRLFISMIEYKAAQYGIQVMITEESYTSKASFLDGDDIPTYGKNEGIKQFSGTRIKRGLYRSGCHLLVNADVNGAANILKKAFLRLTKETHFNSEVINVWNPQTKII

SEQ ID NO: 44537 - protein, 413 aa, unknown
  TnpB Polypeptide
MHYTYRFRLKPTPEQRERLDYHRDTCRQLYNHALGEFEQISDSAGALNQRVRQVRDQLTDLKEWWDELNDLYSTVAQAAVMRIEDSVKALSELKQQGYNVGSLNWKAPEDFRSFTYVQSGFEFDRKNGQTVLSLSKLADIPIVQHRKIPDDVTVKEVTIKREPTGEWYACFAVDGKETPENPDNPQQCVGIDVGILKYAHDTDGTAVESPDLSAERERLERAQRDLSQKEHGSHNWEKQRKVVAQRHADLKRKRRDFSHKLSNYYASEYDLVAVEDLDVKGLVERPGNSRNRASAAWGTFKRMLEYKCEREGTHFVAVDPKDTTKECASCGVATDKSLWVRKHSCPACGFEMDRDANAAINILSRGFEQPGVGHSEETPVETALPVDTPVSAKRVVESGSPTLNERTAPAVSE

SEQ ID NO: 44538 - protein, 303 aa, Okeania sp.
MKLVERHVISKSHDLWSEIDHKAFLSKNLFNLANYHYRQYFFSDRKKLNFNELYHKVSKSDDYQALPTKVSKQIIRRLDSAWNSYFAALREWKKQPNKFLGRPKIPKYKHKTKGRNILPYPNESIYKKTLKKGICHLSMSEIKIPTSQTEIIEARIIPKSSCYLIEIVYEKAESTTEARQVAGIDLGVNNLIAVTTNQTGILPLLIKGRPLKAINTFYNKQRSYLQSQLKTKHNKNNSHRLKKLTHKRNCRVENYLHTASKRVIDWCVNHEIGILIIGHNQTWKQEIKLGKKNNQQFVNIPHY

SEQ ID NO: 44539 - protein, 396 aa, Sinosporangium sp.
MAVRRSFKFLMRPTRHQEIALAACLEDHRQLYNAALEHRRTAYRKACVTIRYGDQSGELKHIRADDPGGQARWSFSSQQATLRRLDKAFRAFFDRVKQGRTPGFPRFKGKGWFDTAEWPKDGDGCRWDSQPGHPTVTFVRLQGIGHVRVHQHRRVLGTVKTISVKREGSRWYVVLSCDDVPARTLPAAAAVAGIDMGVASLVTTSDGEHLDNPRHLAASADRLAVAQRDLSRKKRGSKRRRKAVARVAALHAKVRRQRLDGAHKAALALVGAYDLIVHEDLRIANMTRSASGTIERPGCNVARKAGLNRSILDAGWGVFLTILSHKAESAGRELIAVDPRNTSRTCARCGHCAKENRTTQAEFACSACGHTAHADVNAAINILRAGLALREAAEAA

SEQ ID NO: 44540 - protein, 346 aa, unknown
  TnpB Polypeptide
MLNDRKKAYEEVKNDPSKKMTFPTPAKYKKEFPFLKEVDSLALANAQLHLDKAYKNFFRDKSVGFPRFKSKKNPVQSYTTNNQNGTVALIDSKFIKIPKLKSLVRIKLHRQPKGMIKSATISRHASGKYYISLLCKEEINELPKTNSAIGIDLGITDFAILSDGQKIDNNRFTSKMEKKLKREQRKLSKRALLAKNKGIPLSEAKNYQKQKRKVARLHEKVMNQRTDFLNKLSTEIIKNHDIICIEDLNVKGMLRNHKLARSISDVSWSSFVAKLQYKADWYGREIIKVDTWFPSSQICSECGHKDGKKSLDIREWTCPICHTHHDRDINASINILTEGLRIQTLA

SEQ ID NO: 44541 - protein, 445 aa, unknown
  TnpB Polypeptide
VAILKYTTETKLYIKNNKNIIEYFNKVKEQYSYIMRKVYYIIRNNPELKINLLNTKLQNEYNISRRTANSIIKTVQGRINSIKELKKTEIKQKKYKLEKISEELEKLIPILLDLKLQAEKNDIQDLTKYRNLKTKIAFMKIRKDKLINKINSLNYQIENNKFKITFGTKKLFRQNLEEFLNKRDNQIIFVGSKEEKGCNSTFQLKYISKINQFIIKIRKDFKYKNEKGENRYVYGKCFFNNYKNKLKETLKSQNSPLTYRIIKRNNQYYLQCIFEINNNNNLSLTRNTYGTIGIDFNKGFVAISQINKYGHLVKTDKMTYRFKNGNKTKNDLLLIINKLTKLAINTGKDIVVEDLNFLKTKSKATKGKSKKGKKYNKMIHSLAYKMFLDKAEQICNRKNVELIKVNPAWTSWIAKNKFCDKMKLNVHTGASFVIARRGMDIKDII

SEQ ID NO: 44542 - protein, 361 aa, Firmicutes sp.
LPSKKQGGDKVQITVQAKILPDKEEVNLLNSTTKEYIRLINQIVSDYVTAEKDLKYTSKSIGAELPSAVKNQAIQDAKSVFRKYQKTKKQSILKKPVAIWNNQNYGLKDNFLSFPVLMGGKAKRIEVPVLLTDYQKQLLVNKPGSLRISQKSGKYIAQIAIHAPESIAKCDQVMGVDLGLKIPAVAVTQEGKTKFFGNGRQNKFIKRKHRSVRRKLGKLKKLTALRKRANKEQRWMKDQDHKISRQIVNFAKENQVALIRMERLTNIRNTANTSRKNEKNLHTWSFYRLAQYIKYKAILAGIKVEHVNPKYTSQKCPKCGERNKASDRKYKCGCGYKAHRDRVGALNIISATVVDGNSLSA

SEQ ID NO: 44543 - protein, 407 aa, Mycobacterium sp.
MARFEVPEGWCVQAFRFTLDPTEDQARALARHFGARRKAHNWAVATLKAYIEAWRVTGIGTVKPSLRVLRKRWNTVKDEVCVNAETGAVWWPECSKEAYADGIGGAVDAYWNWQNSRSGKREGKTMGFPRFKKKGRDQDRVTFTTGAMRVEPDRRHLTLPVVGTVRTHENTRRIERLIATGRARVLAISVRRNGTRLDASVRVLVQRPQQPNVAQPGSRVGVDVGVRRLATVANEAGAVLEEVPNPRPLDAALKELRYASRARSRCTKGSRRYRERTTEISRLHRRVNDVRTHHLHVLTTRLAQTHGHIVVEGLDAAGMLRQKGLPGARARRRGLSDSALGTPRRHLSYKTGWYGSALVVADRWFPSLSVEPTVRPGLARLVAVKRGREAAAWLPNNPETGCKSRDH

SEQ ID NO: 44544 - protein, 437 aa, Escherichia sp.
  misc_feature (148)..(277): Xaa can be any naturally occurring amino acid
VKRLQAFKFQLRPGGQQECEMRRFAGACRFVFNRALARQNENHEAGNKYIPYGKMASWLVEWKNATETQWLKDSPSQPLQQSLKDLERAYKNFFRKRAAFPRFKKRGQNDAFRYPQGVKLDQENSRIFLPKLGWMRYRNSRQVTGVVXXXXXXXXXXXXXXXXXXXXXXXXXXXXXXXXXXXXXXXXXXXXXXXXXXXXXXXXXXXXXXXXXXXXXXXXXXXXXXXXXXXXXXXXXXXXXXXXXXXXXXXXXXXXXXXXXXXXXXXXXXXXXXXXXXANIRRDYLHKVTTAVSKNHAMIVIEDLKVSNMSKSAAGTVSQPGRNVRAKSGLNRSILDQGWYEMHRQLEYKQLWRGGQVLAVPPAYTSQRCAYCGHTAKENRLSQSKFRCQVCGYTANADVNGARNILAAGHAVLACGEMVQSGRPLKQEPTEMIQATA

SEQ ID NO: 44545 - protein, 412 aa, unknown
  TnpB Polypeptide
MRSQKIRLKLTKEQERLAWWYSKVSRNFWNLLVDIDKRNNKGEFDDILSKNGNRTYYSKFYNRNIYHLSQSDYTNLAKLVIAKNYETDQEKWSWYYQPNQAFIYNSLSRELVKIKKQNKGRLNFRSVNKTQPNFNVTCCISSNKKRPSRIYLKENGKLQIPTIGDVRFGSVRTDFDLSCKKQVAKVSFDGKYWYLSYTEDVETQVVDLPDYTDGVGIDLGIKTLATVSDGTTIPNIKTFRRVRVLNKRLKRLQRKVSRKYRINKCNKHNKTKNIIKLEKQIKLIHRSIRNIRINHIRKFVSELVKKQPQYIAIEDLNVKGMIKNKYLAKDITNCSFYTIREQLIRKAKERHIAVRLVNRFYPSSKTCSNCNHYKKDLKLNQRVYHCPNCHEKIDRDFNASLNIAKTDQYVLV

SEQ ID NO: 44546 - protein, 375 aa, unknown
  TnpB Polypeptide
MKEIYKVYEQNSTVPDFQYLKTNLCEQTEYKVIGGRYYGIIIEAISNFKKYLSTSRYAESKNNNVAEKKNLKKINPPSASKETFPVILKHPVQRDNQIIFPATSLTPELSIAMPENYCDKEIKQVMLTPRHHFYDWELIIQYVLPDIEHSDLDFNHALGIDLGVGNFCTCATNKGDSFILDGRKLKSIVQGFSKYNKKFLKYGNKATKRQASLQWKTANKVRDYLNKSVAYLVDYCVQNHIGTIIIGWGLHFQTFNIGKKNNQIFSFFPYAVFVDALKAKCERHGIICRKTDESFTSKASALDLDPIPAFVTNAEQHFSGHRRYRGIYITKGGIKINSDVNGAINVLRKSNAVTDEQIARLSSRGLAPPQRIFVL

SEQ ID NO: 44547 - protein, 224 aa, unknown
  TnpB Polypeptide
MLRNTPASYKKEYPWLKEVDSLALANVQMHLESAFHKFFREPSAGFPRFKSKKSSRKSYTTNVVNGNIFLEGKYLKLPKMTAVRMKLHRPISEKWKLKSVTVSREPSGKYFAGLTESFDAVCVEDLNLKGMAGGLHLGKGVHDNGYGLFLSMLEYKLEEQGKYLIKADRYFASSKICSVCGKKKEELSLSDRIYYCECGNRMDRDVNAAVNIMKEGKRIFAECA

SEQ ID NO: 44548 - protein, 609 aa, unknown
  TnpB Polypeptide
MARSSLPSFVHEFALADPSTAVERVLLARLEMVRRLSNELLSEGLRRVDRMRQSVEFRQLRAELVVAKTGSGRARCGIGTGQHEPVLRFTNERERHQAWASVRERHGLRNAYDLSSYATTLSRSVAGWAGYDAIGAAIIQHTLVEQTWRAIDNFAFGGATRTGRPRRRGWRNPLTSVTSSSSVKNGDTLRFRDGNLVWSGRHATVVLRALVDTADPLTIYALERPIKQVRVGYRPIRGRRRWYVQLVLAGDAYCKNRSPRDVGTVGVDVGARHVAIVGPSAAALVDLGKEVAIQSAAAAAKERRAARAQDRSRRATNPHCYDERGRWKKGARVHVRSKNFGAIGAERREAQRVLSETKRQRRQALANETLTIGSEIRLEALSYRAWQAGGMGRTMRSSTPGGFVAALERACAKYQRPLVAIDARAACLSQLCHACGVKTKRPIMGAIPLRGNYCTCGRESAQRDLYSAFLARFCDARGYVDTRQAVEAWLGASKLLGMAVSTYNQRTSVDVLRRPLGNESESVAVQIRRRSDLARRRRSGRGNAFREGDVQVRTTPNSRSAAAAVERLTDDRAEHGRSIAVESAVAAESAGSQPANELTFHRRSKLGAR

SEQ ID NO: 44549 - protein, 402 aa, Escherichia sp.
VKRLQAFKFQLRPGGQQEREMRRFAGACRFVFNRALALQNENHEAGNKYIPYGKMASWLVEWKNATETQWLKDAPSQPLQQSLKDLERAYKNFFQKRAAFPRFKKRGQNDAFRYPQGVKLDQENSRIFLPKLGWMRYRNSRQVTGVVKNVTVSQSCGKWHISIQTESEVSTPVHPSASMIGLDAGVAKLATLSDGTVFGPVNSFQKNQKTLARLQRQLSRRVKFSNNWQKQKRKIQRLHSRIANIRRDYLHKVTTTVSKNHAMIVIEDLKVSNMSKSAAGTVSQPGLNVRAKSGLNRSILDQGWYEMRRQLEYKQLWRGGQVLAVPPAYTSQRCVCCGHTAKENRLSQSKFRCQICGYTANADVNGARNILAAGHAVLACGGMVQSGRPLKQEPTEMIQATA

SEQ ID NO: 44550 - protein, 351 aa, unknown
  TnpB Polypeptide
MKMIKALRVRIRDKHAALLSEMARQVNFVWNYVNELSSRSIRERGRFLSAYDLHPYLKGSGKLLGLHSQTIQGITEEYVTRRKQFKKQQLAWRRSGGSRRSLGWIPFKAATWKDGQVVFNGHYFKVWDSYGLAQYRFRSGSFNEDARGRWYFNVVVEVDVQPSPGQEALGIDLGLKDVATCSDGTKLDNARFYRGLEPKLAIAQRAGKKARVRAIHAKIANRRKEALHQFSRALVERCGTIIVGDVSSTKLVKTSMAKSVLDAGWGQLKAMLAYKCAHAGIVFKEVNEAYTTQTCSCCGVLPNSRPRGIAGLGIREWTCSECGVTHDRDINAARNILAAGHGRPAVGIPVI

SEQ ID NO: 44551 - protein, 378 aa, unknown
  TnpB Polypeptide
VEQVTITSKIQIIVNDDNVKSLLDDTMHTYKNACNYVSDYVFNTHDLKQFSLNKVLYSNLRDKFNLKSQMAQSVLKTVIARYRTILENENEWIKPSFRKPQYDLVWNRDYSLNKDVFSINTLSGRIKLKYYASGFDKYFNTDLYKFGTAKLVNKHDKYFLHIPITIEVKETSLDDICNVVGIDRGINFVAATYDSKHHTKLISGKAIKQKRAKYKKLRKQLQQVKTPSSRRRLKAIGQRENRWMQDVNHCISKALVNNNPKHSLFVLEDLKGIRNATEKVKVKDRYVSVSWSFYDLEQKLMYKAKLNESKVIKVDPRYTSQACPMCGCVDKANRNKKIHLFTCKNCGYKSNDDRIAAMNLHYMGINYLIDKKVPVLVE

SEQ ID NO: 44552 - protein, 354 aa, Chloroflexus sp.
MKTFVSKLRPTPAQVACLSETVETCRQRYNHALSERKTAYRERGESIGFARQCASLPMLKREVPHLQRVHSQVVQDVVRRGDRAFQAFVRRVNAGEKAGYPRCKGRGRYDSFTYPRWGNGVKREQGRLVLSKIGALRLHNDRPVEGTPNICIIVRNADGWYAHIVCAVAPSPLPPPGRSVGIDVGRESFATLSNGVQIANPRSYRTAERKLKQAQRRLSRRVKGSNRSRKARTLLANAHLKVKRARRDFAHTIARAPVNEDDHIVVEKLNIRGMVRNHPLAKSISDAGWGIVLNILLAKAARAGRVVWKSTLPERRTYARAVASPFPNGLPFAGTPARIVVVNCTAIIMLRLTS

SEQ ID NO: 44553 - protein, 466 aa, Chloroflexus sp.
MKTFVYTLRPTPAQVACLSETVETCRQRYNHALSERKTAYRERGESIGFARQCASLPMLKREVPYLQRVYSQVVQDVVRRGDRAFQAFVRRVNAGEKAGYPRCKGQGRYDSFTYPRWGNGVKREQGRLVLSKIGALRLHNDRPVEGTPTICIIVRNADGWYAHIVCDVAPSPLPPTGRSFATLSNGVQIANPRSYRVAERTLKQAQRRLSRRVKGSNRSRKARTLLANAHLKVKRARRDFAHTIARAPVNEDDHIAVEKPNIRGMVRNHPLAKSIHDAGWGIVLNILLAKAARAGRVVVAVNPAGTSHVCAHCGESVPKRLAVRWHSCPYCGCELHRDHNAALTILKKGGGTAFGEAQPLGGLQNREPPQALAVGVSGELDAAVGGQRATSTLGEVWRFAQESRIATLIDESGLRLTPVDDPTTPGALDDAVDEVIATVIEQGGQVVFVPNGSLGVHQRIAGILRY

SEQ ID NO: 44554 - protein, 391 aa, Chloroflexus sp.
MVKPAATTGTTQNLTHKQGARMVELKAYQYRLTPTKGQVRLLEQTLELCRWVYNETLAYRKQIWEQQRLHIEPGKTNALLASWKTSHPELKRIHYHVLQDIQKRVHRACEAFVRRINRGQKAGFPRFKGRGWYDSFTFRQVGYSLSINGQWINLFNIGRVRMILHRRIEGTIKTLTIRRTRTRKWYASFVVETQSKPLLPTNRAVGVDVGLHQFATLSTGEVIANPRFFRKDEKALRKAQRRLAKTEQNTTERAKRQKVVAHIHERITNRRKDFAHKLSRRLVNEFDVIVFEQLRIAQMIKARRLAKSISDAAWRQLITYTHYKAASAGRMFVEVDPRGTSQRCSRCRSIVKKDLSTRQHRCQTCGLEIDRDHNAALNILAVGLHSLGRNP

SEQ ID NO: 44555 - protein, 286 aa, Chloroflexus sp.
MRSLPMLKREVPHLQRVHSQVVQDVVRRGDRAFQAFVRRVNAGEKAGYPRCKGQGRYDSFTYPRWGNGVKREQGRFVLSKIGALRLHNDRPVEGTPNICIIVRNADGWYAHIVCAVAPSPLSPTGRSVGIDVGRESFATLSNGVQIANPRHYRVAERTLKQAQRRLSRRVKGSNRSRKARTLLANAHLKVKRARWDFAHTIARAPVNEDDHLAVEKLNIRGMVRNHPLAKSISDAGWGIFLNILLAKAARAGRVVVAVNPAGTSHICARCGEFVPKRLAVRWHSCP

SEQ ID NO: 44556 - protein, 380 aa, Chloroflexus sp.
MKTFVYTLRPTPAQGACLSETVETCRQRYNHALSERKTAYRERGESIGFARQCASLPMLKREVPHLQRVHSQVVQDVVRRGDRAFQAFVRRVNAGEKAGYPRCKGRGRYDSFTYPRWGNGVKREQGRLVLSKIGALRLHNDRPVEGTPNICIIVRNADGWYAHVVCDVAPSPLPPTGRSVGIDVGRESFATLSNGVQIANPRSYRTAERTLKQAQRRLARRVKGSNRSRKARTLLANAHLKVKRARRDFAHTIARAPVNEDDHIVVEKLNIRGMVRNRPLAKSISDAGWGIVLNILLAKAARAGRVVVAVNPAGTSHVCAHCGESVPKRLAVRWHSCPYCGCALHRDHNAALTILKKGGGTAFGEALPLGGPKNREPHRL

SEQ ID NO: 44557 - protein, 481 aa, Chloroflexus sp.
MSVQRYRHIRGSVSTIHYHFVRCPKYRRKVLTGAVADRLRMLIHERAAELHLEVVALEVQPDHVHLFVTSPPTHAPHHIVNQWSRSSYVGSAGVVSAETIQHYIEQQKRSEMKLTVQLNLLPTPEQADARKRSLETANAACDYISRIAFSTRTFRQFARHTLVYRDVRATFGRTAQLAVRWIANVADAYKLDRKVQRSFRPYGAVADDDRILSFAMPDSLVSIWTLDGRQAIPFVCGERQRALLAARQGERDLISHRGNWHLLVTCDVKEAEPQDVDGVLGIDVGVATIAADSDGVTSSGTAINTVRYRHRRLRSTLQQIGTLGRRRRLRTLAGQERRFARHVNHCISKWIVAKAECTKRAIALENLTHMRTRMKARRSQRAPLHSWSFAQLKAFIVYKAALKGIPVHFVDPRNTSRTCPACGHCAKENRRTQASFVCTSCGFAGPADVIAAGNIARRAAVNRPYCSETDASVAPEQSRRL

SEQ ID NO: 44558 - protein, 216 aa, Chloroflexus sp.
VCDVAPSPLPPTGKSVGIDVGLESFATLSNGVQIANPRHYRAAERTLKQAQRRLARRVKGSNRSRKARTLLANAHLKVKRARWDFAHTIARAPVNEDDHIVVEKLNIRGMVRNRPLAKSISDAGWGIVLNILLAKAARAGRVVVAVNPAGTSHICARCGESVPKRLAVRWHSCPYCGCALHRDHNAALNILKKGGGTAFGEAQPLGGPQNREPHRL

SEQ ID NO: 44559 - protein, 212 aa, Okeania sp.
LTRGITSLLTTSDGEKVANPKNLQRLHKKLRLAQKSLDKKPDKKSNNYHKARLKVARIHAKIKDSRGDYTHKLTYVANPTAPLRLIRENQTIVVEDLAVNNMVKNHKLARAISDANWGELVRQLEYKAEWYGRQLIKIDRYFPSSKRCSNCGHVVEKLPLNIREWDCSECGAHHDRDINASINILAAGLAVSAPVAHGGDPQDRAGLSVERP

SEQ ID NO: 44560 - protein, 195 aa, Okeania sp.
MVEKGYKFRFYPTPEQENLLRRTLGCVRLIYNKALAARTQAWHENKERVSYKQTSAMLTSWKKQEDLDFLTEVSSVPLQQSLRHLQTAFTNFFSGRTKYPNFKKKRNGGSAEFTKAAFKWKDGQIYLAKCAEQLPVRWSRQLPAGCVPSTITVKLDPSGRWSISVRVNDTRDLRLKPVTKQVGIDARNYQFTNYQ

SEQ ID NO: 44561 - protein, 421 aa, Fusobacterium sp.
MYLTLKQQVKHLSKKEFRNLKYLSHIAKNLTNEAIYNIRQYYFKNKKYLSYNKNYKILKNSENYKKLNSNMAQQILKEVDGSFKSFFGLLKLAKNGQYDNKKIKLPKYLAKDRFTTLVIGFVRLKDDMLIIPYSNLFRKTHKEIAIKLPPILKDKKIKEIRIIPKQYSRYFEIQYTYEVKEIQRELNRENGLGIDLGIDNLCTCVTNTGASFLIDGRKLKSINRYYNKINAKLQSIKDKQKIECTTLRQKRIIRKRNNRINDYLSKAVRIIINYCLNNDIGKLVLGYNEDFQRNEDFQRNSNIGSINNQNFVNIPYGKLRDKLIYLCKLYGIEFKLQEESYTSKASFFDGDEIPIYDKENPQEYIFSGKRIKRGVYQTGVGKLINADCNGALNILRKSKVVDLSILYNRGELNTPKRIRVV

SEQ ID NO: 44562 - protein, 142 aa, Cuspidothrix sp.
PNPKHYKQGLTKLKRLSRIYSRKVNGSNNKHKAKIQLARHHAKIANLRKDTLHKITTYLCKNHAKIVVEDLNVSGMLSNQKLAQAILRLRSVQVADCGFHEFKRQLEYKAKKFGCEIIIADRFYPSSKTCSNCGHKKESLSL

SEQ ID NO: 44563 - protein, 436 aa, unknown
  TnpB Polypeptide
MQLVERHVIDRNDPRYAAIDEAAFKSKNLYNAGNYEIRQSYIFTGKYLNYHEMDRRMQSHEAYKALPAKVSQQVLKQLDHDWDAFFKALAAYKDEPSKFQARPKIPGYKHKTQGRNLLVYTIQAISRGKKGLKRGIIKPSMLNIEVRIKHKDINQVRIVPRKGFYVVEAVYSREEKQAPVNPAYYAGIDIGMNNLVALTSNKPGFRSVLVNGRPVKSMNQWYNKRKAELQSILRRKGTTKRIKHLTNKRNRRIDHYMHTASKRIVDLLVKEGIGVLCIGKNDAWKQEANMGKRTNQNFVQIPHARFIQMLTYKAQLVGIRVEVTEESYTSKASLLDLDPLPVRTNGAESHTFSGKRIKRGLYRAKDGRTINADINGSGNIIRKVAPDAFSEVEGVEDGKAVLASLVVHPVRIVVPRRTQKASNGVSKRSREREKTL

SEQ ID NO: 44564 - protein, 269 aa, Actinomadura sp.
VSIKLPAPLAELANARHGRYVLAARVAFAHRGEEWRDRISVNRAVAYRIHLDVARGRWYLDASWTRKNLPVVPLEALRAGGVVGVDTNADHLAAWRLDNHGNPVGAPRRFDYDLTGPATHRDAQLRHALTRLLNWATATGARAIAVEDLDFTDSTTREKHGRRKKFRNLISGIPTGKLRARLLSMCAETGIGVIAVDPAYTSKWGAQHWQAPLSTPRRPVSRHQAASVAIGRRALGHPIRRRTTPPPHHQTERWCRASDRPGRTGHPKA

SEQ ID NO: 44565 - protein, 483 aa, unknown
  TnpB Polypeptide
VLLTLSIHSTKKSVVNKLKRASKTFQHFKNLIYLCAAEYYHTTKDIKPFLSKTFLEKFVKGREKLPFENEKIKEWKKELVTLWTEKIGSDTAKALVGTVAKEFKSVLEKWKNGERASLPKPKKLDSLYSFTLETNPNMVVDKRELQGKRKSNHIVIRIGKDFGAVKFKIPAGIDIGHIKVNWSASGEVTYLVNYEVPENEIELNKDLFLSIDLGVKNLVSAVSNKEGLPSFIIDGNHLKSFNQWVNKLSAKLQSEGKEIEHRKLWRYRNKRINQLFGAVSNFIVALCLKEGIGKIVISDSLTEEYQRESDKGKKFNQTFRLIPLGKLIEKLEYKCQLAGIEFLREPESYTSKVSAVTGNIEEISGKSKEELTEEDIKKLHFTGKRVKRGLFKDQKLNKVFNADLNGALNIAIKKLGKRIREEFLKLSSWLDKLSRAIKLTIFPHTKYSVSPLFERITDSNSLPAHNLKEWRGEGHLITIANGN

SEQ ID NO: 44566 - protein, 225 aa, unknown
  TnpB Polypeptide
LGLGSVRFHKQEIPEGTIRCSRILKRPSGWHLCLVIAADPIAIPHKADALVGIDPGFNHLLVLSSGVKVDHPRELEATAKRLGQAQRGNDQRLAARLNERAANQRNDRNHKLSRALVESCSDIYFSKDPHTAIAKKFGKSVTSSSHAQLRSMLAYKCTASGRRYVEGASKNSTRTCSACGHLTGPAGRAGLSVRFWRCSECGADHDRDVNAAQNTLKSGLDEPTK

SEQ ID NO: 44567 - protein, 384 aa, Kurthia sp.
MLRHKAYKFRIYPTKEQEVLIAKTIGCSRFIYNHFLGLWNETYTQTGKGLSYSTCSAMLPKMKKEETTIWLKEVDSIAIQSSLKHLADAYTRFFKKQNAKPTFKSKKNPVQSYTTQFTNNNIAIVDKKLKLPKLGLVSFAQSRVLKGRIINATISLRPSGKYFVSLLCEEEIYEHPKTNSSIGIDLGITDFAILSDGQKISNNRFTSQMAKKLKREQRKLSKRALIAKKNNVGLFEASNYQKQKRKVARLHEKVMNQRTDFLNKLSTEIIKNHDVICIENLNVKSLLKNHTLAKNISDVSWSEFVTKLIYKANWYGKEIVKIDKWFPSSQICSECGNRDGKKGLHIRTWTCPRCHTNLDRDINASKNILTEGLRLLTVGTTELA

SEQ ID NO: 44568 - protein, 388 aa, unknown
  TnpB Polypeptide
MHKATFQYRLSPTPAQETAMQHALDECRWLYNRLLEERKLAWDDTETTVALYDQIKRMVALKAERTTLSDVHSQVLQNVAVRIGLAFKAFFRRVKAGETPGYPRFRGANRYDSFCYPGSGHKVDEQRVYLSKIGRVKAVIHRPLEGTVKTCCVRRARTGKWFVTFSCEVEDAPLPAIDSGIGIDVGLTTFATMSDGTEVANPRFFRRDERDLARAQRRFSEHPKPERGHPSTRERRRRAKIVARIHERIANRRRNFAHQESRKVVNAHDTIAIENLSINRMVHNHCLAKSIHDAAWAMFAAMVAYKAACAGRRFIAVNPAYTSQDCSRCGHRQKMSLSERTYQCPCCHLVLSRDVNAAHNILRVGLHSLGEGPSKPIAFSRGSSHSDN

SEQ ID NO: 44569 - protein, 390 aa, unknown
  TnpB Polypeptide
MDRTIRIRLTPNPEQVSALTDTARQFTDAFNLVCAHGWAEGEKNGVALHHATYRKSKEAAPNLVSDLHIQARVKATEAIKGALTRRRQGRRASCPRSHACPPRYNVHTYRLDWTAGVVNLSATAGRQRIPFRVPASAVRYAGYPTATADLIQKRGRWYLHVVVSVPAPEVEPTETVVGVDLGVTRAAVSSDNRFHGERRWRELEARDFRVRRALQRKGTKSAKRHLKRLSGRTARRRRDHDHVVSRRIVDGVPAGTTIAVENLTHIRSRARARKANGGQRRLHSWSFANLRACIAYKAEGKGIRVEGVDPRHTSQTCHRCSFQHRSNRRSQAEFWCRSCGYRTNADRNASLNIAAKLLASRGMTVAGGPPSSGLSCPPASSGEAQAVCCS

SEQ ID NO: 44570 - protein, 400 aa, unknown
  TnpB Polypeptide
MKQRYQYRIYPTSQQVHSLAKLFGCCRVVWNDSLASCNSSDKLPSQVDLQKTFITQAKKLEQREWLAEVSNIPLQQSIADLGVAWKNYFDSLKGKRKGRKVSRPKFKKRNGRQSARFRIGGFSIKHGKIYLARIGRIEVVWSRELPSPPSSVTVIKDAANRYFVSFVVEVNPAILPDNGQSVGIDLGITDFATLSTGKKIKAPKPLKKNLRKLHKAQRKLARKKKGSRRRELARRKVARIHARISDIRNDFLHKLSTRIIRENQTIILEDLNVSGMMKNRKLSRAISDLGWRSFRTMLEAKSEMYGRDFRVISRWEPTSQRCSCCRQIGGKKELSVREWTCLFCGAVHDRDQNAAINIKVAGGLPETINGRGGWSKTASNAASSSEASTHQFPKQPSLFG

SEQ ID NO: 44571 - protein, 367 aa, unknown
  TnpB Polypeptide
MLVKAVRVKLRTNDVTAAALADTMTKFNAACNTLSQIAWDTQTFRQFDLHKIAYHQTRADFGLPSQLTVRALAKVADTYKADRSQKHTFGPRGAVVFDARCFRMKGVSSAELTTTQGRHSFSLVHGGKQRQQLSQGVMGEADLLFVDGAYYLSIAVKFPAPPKADTSGGVLGVDMGIVELATDSEGQSYSGSVVKAVRCRVREHRRQVQKKKSCSAFKRLQKINRRASRFVRNVNHCISKSLVQKASVLRKALSLEDLTGIRERASVFSKAMRWQMGNWAFADLAAKICYKAAEVGIPVVFVDPRDTSKTCHKCGHCERANRKSQASFLCLKCGLCENADRNAAKNIEAQGLLSKPLMFRPVATAIG

SEQ ID NO: 44572 - protein, 396 aa, unknown
  TnpB Polypeptide
VRRTNTFKLRATKEQEQELFRRADACACMWNQITYKRRHSFFNGQLDWNTDDAYHHYKKLIGSASAQQIIRKNNEAWKSFFALLKQKKAGALPSHIHRIRPPGYWKDRCTRKRKLKYLVRCDNYCLSTTMLTLPFKLKLKWKGSNKWQGKQGRLEISCDDLTGQWHAFMPVEIEPPHQRQGKKKAYVDLGVKVPIMAFIEDTKHVFGYRANSMLADWWYWNQKLAKQESLLKTTNDIHMSKELSRLYRTRKRRFRDVMNKLVNDFVVRCWSHGVSEIVLGELTNIRATAQFSKKSNSMIHLFWSHRYLVTRIKEKAEEYSITVREIDERGTSSVCPRCGSKRIVRKGRLFKCVQCALEAHRDVVGCVNIGLAQGELLSAGVVNRAVARPSFLTIEV

SEQ ID NO: 44573 - protein, 386 aa, unknown
  TnpB Polypeptide
MGYDVNLTGTVEMTVRSEPLAQLIRNYTNGLRFLVSEILGDPSSYGKWRYVKKTRRIKWEHDLSRIHHSFYEVLKHRFSLPPKFAIACQKEAVSIVKSVLNNENNRGKCVIRNYRARCDYQAYKIETKNGKCYLKLRNFGEIEVAGFNPKWLDKYKDWKLGDLIMKLENGVVELFVTFKKVVKVVEPSENAVAVDLNFNEVVMGNHEFEARFRTPLQKIMHIKKNHIEKSQKKYNMQWKYVKGIRNAISRWWGRISGMTDDFVKQVSKRIVEIAKRLGYDTIVIEDLNGLREEQVKLKKSWRERFTFFTYRKLQKWIEWQAKKEGLAVIYINPANTSKTCPKCKSLDTEFKERTLICKNCGFSMDRDSVAVINLVNKWLNVLRCGV

SEQ ID NO: 44574 - protein, 413 aa, Acidimicrobiaceae sp.
LLTVAHCRNYCYRLHPTVRQIRVLLRQLDFQRELYNAALEERIGAWQWERRSVRYFDQCKTLTELVDVRPEVVACGITLCRGTLKRLDRAFVAFFRRAQKGENPGFPRFKSAQRFDSLQWEDRSGWKMKVEERRLRLRGIGEIKTNYHRPFAGTPKAITVKREGTKWWVNVRCVDVPAQPLAATGRKVGLDLGVVNLVATSDGKLHVGELFGAQTRKRLALAQRRLATKQPGSNRRCRQVEEIVRLHRKVKNQRMNAVHQLSRALVNDYDLIVVEGLKVKNMVRAPKAISDPDQPGKFLPNGAAAKAGLNRSIHDAGWATLLSLLSYKAESAGRTIVTVDPHYTSQTCFECGHVESGNRLSQAEFRCCACGHEAHADVNAARNILRAGRAQRASARVGSKLTHCPIVSRRGIR

SEQ ID NO: 44575 - protein, 401 aa, unknown
  TnpB Polypeptide
VKERKAALFRLYPTPEQYAQMAQIAGACRFIYNLALEQRRDWYRPGRQFNSVTQSRELTQLRAEVDWLKAAPIHPLQQALRDLDRAYQNWWAGRAQAPTPRKKGLNDGFRFPDPVSLRVERTGTSSGRMKLPKLGWVKLRGWCALPGDICNITVSRRAGQWFAAVQWERDVAEPEASTMPAVGIDMGVAIFAALSEGTTIAPANHGKRALKALRRAQRALSRKKRGSANRRKAIQRVARIHKRVADARKDFLHKHTTIIAKNHGLVVVEALKVKAMSASAKGTAEKPGRNVRQKAGLNRSILDQGWGMFRTMLGYKLADRGGRLVEVPAAYTSQTCSACGLADAANRRDQARFVCIGCGHEANADINAALNILRRADSALKPVEGHRSKRPGETGTIRKAA

SEQ ID NO: 44576 - protein, 426 aa, unknown
  TnpB Polypeptide
MAKSKKVMGVQQCLLSPDKDLKSILEYLCGESNKLHNCAVYYARQIWFKARKFVTGFDLVNEMNRNPHFRAMASEVSVQTCLAVGESITSFAALLKKSINGELEQKPRFPGYRNPGFQLIAFPKRALKLVDGKIRLPLGLQVKAWFGLKEFFLPMPSNLTFGELKEVRILPRNRCFYVEYVYPISQVQVEVDPLKVLGLDHGLNNWLTGVSNVGTSLIIDGKHLKSKNQWYNKTVARLMDEKPNGFWSNRLARITEKRNRVMRDATNKAARKVIDHCLENEIGTVVFGWNKGQKDGANMGKKNNQKFVQIPTARLKTRIQQLCERFGIQFVETEESYTSKASFVDSDFLPKYREKPEGWESSGRRVKRGLYRTGNNQYINCDCNGAVNIIRKVAVMLGLDLSGISRGELSAPLKFRLWTLQESQRL

SEQ ID NO: 44577 - protein, 375 aa, Tissierella sp.
MKIVRTFKIKLNLSNDQISMIDNTTQSFLEALNYASKVSFDNGEISNKPALQKIVYNDLRAKFNLKSQMAVNVCTAVCGSYATQHSNKVYGVLAKYKAPKAIYSYGRDYSFLDDKKVISLNTIDKRIKVPFKVNNYFKKYLTKDWVFGSLELVKLKNNYYAHITVNKEIEEQPITEFKNIIGIDVGQNFIATIYDSKEKVKFYKGRHLKDMRAKYKHLRKQLQEKGTHNAHNKIKAINQREQRTMTYINHCISKSIVDYAKETNAIIVLEDLKGINLSCKVKRENRYYRVSWAFDELQRFIEYKAMNSGLKVMCINPKYTSQTCPKCGHVAKNNRDKKLHIFKCRACGYTLNDDLIATKNIQHKGYDERIRLEAV

SEQ ID NO: 44578 - protein, 418 aa, Tissierella sp.
MDGGDRMYLTIKQQLKHLTKEEYLILKELTHTAKNLYNVALYNIRQHFFQTGKYLNYYENYPLCKDNENYKLLNSNMSQQILKEVDSSFKSFFQLLKLKKQGKYNGKVSIPKYLDKDECFTLVIGFVRINGNKLIIPYSRSYKKNHKPIYITIPPNLKDKTIKEIRIIPKLSGRYFEVQYTYELEINQRELNKNNALSIDLGINNLATCVTNKGQAFIIDGRRLKSINQWYNKQMAKYQSIKDKQKIKGITNKQAAITKKRNNQVSNYINKSLRKIINYCINNDIGTLVLGYNDDIQDKINIGRVNNQNFVNIPIGNIRAKLEYLCKLYNITYIKQEESYTSKASFFDGDEIPTIGDNVSMSFSGNRVKRGQYKTNCGKTLNADVNAALNILKKSKVVDLSILYNRGEVDTPIRIRIA

SEQ ID NO: 44579 - protein, 475 aa, unknown
  TnpB Polypeptide
MKRAKTPTFLLELPLRIDWSQESHVRAHLEAARCLYNALLSEAMKRLRCMRNDPAWNKARAISRSHKQERAQAFSALRKKYRFSEYGLHEYAKLARVSWIADHIDSTMAQTLATRAYQAANRVCVGKAKQVRFRSSGRGIDSVEGKRNDVGMRFVLDPTAGDGGFLIWNEEVIPAIVDWLDPVVQHGMLHNIKYVRLLRRKAPSAQAQGADTDGNRYYVQLVLEGHAFVKPKHEKVGKDTVGLDIGPSTLAIVPRSGAADLIAFCEELTPDTRKKRRLQRKMDRQRRANNPDNYDEKRRVKKGRLHWKESKQYKATRRQHANTERKLAAYRKSLHGHLAHRITQVGTTITIEKTSFKAWQKLYGRSIGLRAPGMFVAHLTRIVAKTGGTLHEVSAYQTKLSQYCHQCRQYHKKLRSQRWHKCPCGFGPVQRDLYSAFAAFLPGTGANYSLCQPPRVGRCGAAPESRDGGPATTCE

SEQ ID NO: 44580 - protein, 392 aa, unknown
  TnpB Polypeptide
VYSLKLELKLNNKERSKLAGCAGFARFTYNYGLDMLKQSWAFVGVKATDAQRLAAIEKLFTSEVKTKAEYVWMKEYPSGIYTSALRNLARGVSRWREGVSGFPQMKFKRKGDSFTVLKKAGVYDKPVKEGGKLIAFTNRQVLYPGKKIIIPGLGEFRLKRALPFLCSSQTFTISRTADKWFVSFAIDADKLSALIHEKKSVGIDLDVKCFATLSDGLFIQVPPTVKQAKAKLSEEQWRNRNKQKGNRKQGIKSSKNAKKHFAKVARQHSHIANIRKNFLQQTTTELSRKYERIRIEDLNVSGMIANGKLSEAISSLGLYEFRRMLTYKSSFYGTKLEIVDQWYPSSKTCSCCGHIQPIPLSERVFRCERCTHEQDRDWNAAINLMNAPKSKV

SEQ ID NO: 44581 - protein, 391 aa, unknown
  TnpB Polypeptide
LVNTIFTQIFEYIRFFPYIRGMKLTLKTKLIPSEEQHRILLETLKEANAACNQISDIAWRNRTFNQFKLHHLCYNDIRNTFNLSAQIVVRCISKVADAYKLDKKRQCVFREYGSISYDSRVLSYSNTHVSIWTVSKRQKMPFVCHNTNYLPYIKGEADLVFKKGKFYLFQTVEVPEEDMEDVEEFIGCDFGITDIVCTSDGKTFSSESLNRYREKQRKIRGSIQSKGTKGRIHECKRGCAKLLKRLKGKERTTATIINHTISKQIVMEAKVRGLGIAIENLSNIRSTSKRRNKSFRKELNLWSFHQLRSFMEYKAKMAGVPLVVVEPAYTSQTCSVCHHIGARRNKSFKCGYCGCDMDADVNAAKNIALLGAVVNQPEKSGMWPCTLHITA

SEQ ID NO: 44582 - protein, 431 aa, unknown
  TnpB Polypeptide
MQSVSSARFVTPPLTERKRELLGELLDQFVARVNFCIQKCLEHNVTSRASLHRVAYEEWKSRFNFATHWFHSAGQVATQILRSWRKLCRQGQADQKKPPIYEARTMRLELWGNKNQTGICRFQGDAVQIRIRCGEHLWLPLIVTEHHERMYLGDWREGKTKIGEITVSAFRDRANVYVPFKREVEATRVEGVCGIDINERSVDLTILKPDQEPKHIKLDISKLPAIRHSSQLKRKSIQEKLDVPPQRPVQKRRLRAKYWRRERNRTNQILHVVSKQIAEIAERERVAVAFEGIKGIRGSMRSKRKSKNGRALRKDMRRRLNQWPFRKLQSYADYKILRRGLPTVEVSNYHKSKDCPMCGQYNRPNGHTYRCQACGFEASRHLVASWNIAKDGARHVPADCWQMQPMAERLVAAEKPSVEPERIPLQFATGF

SEQ ID NO: 44583 - protein, 630 aa, unknown
  TnpB Polypeptide
MYQAATQLNTTRLTSAHCGNGVIVGSLTSLRRLEGSVDMQSPKQLKIVRIRGSKGPKSTSAIAASPLPSKKMTLLGKRQQCEQSSQTTPSSPISAQVSTSSEGGCRPFWSEHCAEKSKMLWLPTAIGSHALPQNSSSGSFVPVEQTSWFNIQQWQHQKQTLQKTFSPSLQCLPVGAMDADATKPPRPRKMPKYKDADERPFVCLEDGCGCRFKKKFMLTKHHNQKHLDCITVSRSVRLYPNKEDTKVLRRWMGCSRYMYNEAVNYINENNVYQYEAIREVLTKEENLPRDWLKNLPSDARKYAVMNACDAFKSNFAKKEKDPSHTFEVKTRSKKSSVQQFTFEAKSLRVLKEEGNTLRLGIVDTRVHQLTQEGIACSIKHKALIDQSRDPILQMDKLGRFTLIIRYWKPSQLETQEQRSRRSSIVSLDPGVRTFMTTYSPDGTSYKLGDQASNRIYRLMIVDDKLQGRLQTNLRCDGSRMSKANRRNLRQSRVRLSERIDNLVTELHWKVANFLVSRYEEIVIPPFETAKMSKRYEATRQQWRKIGKKTTRQMGRLRHFQFRQRLLYLAKCHGVQVHVVTEEYTSKTCTNCGDLHQTLGGNKVFKCASCGVAYDRDAGGSRNILIKNMNF

SEQ ID NO: 44584 - protein, 404 aa, Desertifilum sp.
MIVLEFKAYGKASQFNAVDEALRTVQFIRNKALRFWMDGLGKSQYDLNKYCAVLAKKFPFVNQLNSMARQASSERAWSAIARFYDNCKKGKPGKKGFPSFQKDNRSVEYKSTGWKLAQNRKSIIFTDKKGIGRLKLKGTRDLHFYQTEQIKRVRLVKRADGYSVQFCVSVDRVETIEPSGKTIGLDVGLNNFYTDSNGEVVENPRFLRKSEKVLKRSQRRVSRKIKGSNNRSKARQVLGKRHLKISRQRKDHAVKLARCVVQSNDLVAYEDLRIQNMVKNHCLAKSINDASWYQFRCWVEYFGKVFKKVTVAVNPAYTSQDCFSCGTTVKKSLSTRTHLCRCGCVLDRDTNAAKNILASGLGTVGHTGTFMLDMSNALGESTPTLAEAILSEQVGSMIKESPSF

SEQ ID NO: 44585 - protein, 403 aa, Cyanobacterium sp.
MFILEYKLRGKPKQFEAIDEGIRTVQFIRNKCVRYWMDSKSVGKSQVYKHTTTLRNEYPFVKNLNSTACQQAGERAWSAISKFYDNCKKQIKGKKGYPQFSKRTRSIEYKKSGWKLDRDDKRITFTDGNNIGTLKLIGSRDLYYFQEFQIQRVRIVRRADGYFCQFCLKLDVRDITPELPQTQKMVGIDVGLNWYYADSDGNFVKNPRYYRKAEKKLNRLNRLKSRKFKKGKPVSQNYLKAKKRYGKAHLKVSRQRVEFAKSLALRLIQSNDLIAYEDLKVKNLVRNSKLAKSINDAGWSELRKWIEYFGVKYRRLSIAVTPNYTSQDCFNCGKRIKKSLSTRTHVCSCGYIANRDTNASLNILRKATEGHSGSWSELLDLNAWGDLSSTVVGSNTCHSKTNR

SEQ ID NO: 44586 - protein, 443 aa, unknown
  TnpB Polypeptide
MWRRTVAWRSKMQVVKTVKIPVHYATTKRKLDILNRLTARLTYGAWLWSRIIETNDIRTRSGLRGREFEQEVRERTGLSAGFVQCCADTALWMRKSYWKLHREWRQKVARAQRVGDERWLRKLMKREPQQPFSNGLQHKIPIWFDYRIGSLEVSETKLSPRVIRISTLKRGERITVLLNPAKYHLDLLEQGKIKSFQLVKRGRKFHAHVKVEYEVQAQPVRAVRGVDLGIRRSAATVLLRPNQPLRRGDFSVIRDGEKTHRLNELNKKVAKLQQLKKWEALERMRNKRRHVAEYYDRLTAKRVAEISNGCAVAIGYPKGIKYENYRGNGKRKLRRLIARWAYGRIIRYVQEECAERGIVAVASDERWSSKTCHRCGSQNTERLTQSVVHCYECGLTYNADFNGAINIGSSILAMPRSRRAEVDPALTSDELAGKASEAGSPRF

SEQ ID NO: 44587 - protein, 409 aa, Streptomyces sp.
MQLRYSFRLEPTPGQRMALAKVLGCARVVFNDGLALRRTAWETDKSRIAMGELARRVITTAKQTPERGWLAEVSVDALQSALRDLDAAYAGFFASMTGKRKGPRIGPPRFKSKRDHRQSVRFSKNGFRLRDNGRLYLAKIGDVRVRWSRALPSVPSSVTVVRDAAGRFFASFVVEVAPVVLPEAKSAVGIDLGLGHFAVLSDGTKVDSPRFLRRAEKRLKKAQQSLSRKAKGSKNRAKARVRVARLHGKVADARREFHHQLSTKVIRENQAVAVEDLAVKGLARTTLAKSIHDAGWTQFVAMLEYKAALYGRTFVRIGRFEPTSQVCSTCGVKDGPKPLNVRHWTCLACGASHDRDVNAAINIKTAAGLAVTACGAQIRPGPVPAQRDETGTHPKSRPSDGLRREIPSH

SEQ ID NO: 44588 - protein, 455 aa, Streptomyces sp.
VRLEVKTRTFIHSGGGNQKPRMAGICRRLALRRGGVKRAFKYRFYPTPDQAAQLKQTFGCVRKVYNLALEVRDRAWKEERRRIRYSDTSAMLTEWKRQDDLAYLAQVSSVPLQQTLRHLNTAFDRFFAKVSGHPRFKSRKATRQAAEYTRSAFSWRDGVLTLAKMTTPLDIRWSRPLPRGSQPTTVTVSLDAAGRWFVSILVEDRPRRPGEVATAVGVDFGIRSLVTLSTGRKVSSYPGGGRRQAGRLAGAQRELARKKAGSKNQIKARRRVAAIHARIADRRRDVLHKLSTRIVQENQLVVIEDLPVRNLMGNRSLARSIAHAAWAELRRMLEYKCAWYGRTLVVVDRFFPSSRMCSTCARVGDPLPLDVREWTCGGCGTRHDRDHNAAKNLLAVGQTVSACGADVRPQRKLSGRAVGDEAGKPRARAVGVPAPVGRGGCQTANSWKAMVFSTG

SEQ ID NO: 44589 - protein, 430 aa, unknown
  TnpB Polypeptide
MAWEVTRTVRVRLEVPNDRKSDLHATNSKFQYCANRTAEWAWRYPEDDCVTSKSEAEAALYDELRHETDNLHANLVQKAIKRATDDIGNCVDRFAEGENTSRPEYDTFSIVYDKRAATYYRNRVSLATVNGRVECKYDLPNNPEGTPHGEYLLNEEYDFATSTVHYDSDTDEFYLHAAMEREIDVASPEKAEDSRVLGVDCNVTDHIAVTSTGRFVGNADYLNHKRREFEKRRANLQQTGTRSAHLTHQRISDRFGRWNKDYIHRCSSEIVVEAERHGCTHISFEDLEQIRNRISDDKEFQQWAFRELQDQVAYKATERGIVVETVEPSYTSQQCSKCGCTLEENRDGQRFACLDCSYTANADYNAAKNVARKLAVKLQRGQMSPAGGAFCQYALKSGIMTVSGTDVASDTPVSAERESTDKPTAEAVGS

SEQ ID NO: 44590 - protein, 324 aa, unknown
  TnpB Polypeptide
VTSEEVNCRNPWVLETGYNIRANASFEAHQAYKTNLEKVKSKSIKYFDLKYKRKRNITWTIGISKENIIQKDPKRLFIYESTGIVTSTEAIPEINKDCKLHFDGKYYYLIVPRTIEKRPSKAKNWFCSLDPGVRKFQTLYSPDGNESIIIGDRASTEIYKLLLKLDKCNDSTKEVKLRHRIKNLQKELHDKTSRFLCENYNNIYIPKLTKENDIISNKNRTIRKKTVRNMVVLAHCKFVEKLKTKANEYTNVNVHVITEEYTSQICLSCKKRTKCSTELYKCKYCGFQTDRDYLGSCNILLKQWGLLEVPRQDTANVDMRFSVM

SEQ ID NO: 44591 - protein, 386 aa, unknown
  TnpB Polypeptide
MLNRTFGCVRVVWNQTLATRQARWHAERKSISYAETDAALTAMKKDPGLAFLSEVSSVPLQQALRHQHQAYSAFFARRARHPRFRSRRGRQAAHYTRSAFTLRGGQLRLAKTAGPLQFTWSWPAADLAALNPAMVIICREPDGRWYVTFTLDTDAPEPLPETGHAVGVDLGVTDFAVTSDGQKIPNPQHLERRARRLARYQRRLARCRNGSVNRARAAAKVARAHRKVRNARRDFLHRTSTRLVRSADTIVIEDLNVSGLVRNRRLARAIADCGWGEFRRQLEYKCERYGRRLVVIDRWYPSSKTCSACGYLLAELSLGTRCWTCPCCGARHDRDINAAKNILAAGRAVAACGAGVRHSGTSRVRPAVKQEPQPVTAGIPVLQGGE

SEQ ID NO: 44592 - protein, 445 aa, Bacteroidetes sp.
VLLIIIITFVLQFTFFILNDKINFITLVERHKIGRASVHFEELDSLTFLSKNLYNYANFLTRQMFIETTKEKEEGKREHAEWLRYNTLQKMLQNERQPDYTALPAKVSQQVLMQLERDWKSFFEALKVYKTSKDKFTGRPKLPKYKDKQCGRNLLTYTIQAVSKTELKSSVIALSGTSVKIRTKQHEIQQVRVVPRVGFYVVDVVYKKKKEDLCLDKKRVAGIDIGVNNLAAVTSNVCGVTPLLINGRPLKNINAYYNKKLAKYKSIIGVGTSRRIRTLTEKRNNKVDYYLHHASKLIVSHLVFNNIGTLVIGKNKQWKTSVSMGVVGNQNFVQIPHARFIEMLQYKAESVGITVFTTEEAHTSKCSFIDNEPIEHRAKYVGKRVKRGLFKSGAGTLINADCNGSGNIIRKVIPNAFAEGIQGVVVSPKRVLSTLNSLKNIPQFS

SEQ ID NO: 44593 - protein, 364 aa, unknown
  TnpB Polypeptide
MLKAFKYRLYPTRKQAGVLTTHLEECRILYNHFLADRIQAYQDRSESLTCYDQCKRLPFLKEDRPSLTQVHSQVLQNVAIRVDLAFKAFFRRCKAGDKPGFPRFKGLGRYDSLTYPQGGGFTLKESWLRLGKIGNVSIKQHGPFAGTPKTCTVRRSATGKWYATIVCAVEPQPMPDSTEAVGIDVGLARFATLSNGQQIDNPRFFRQDEDELAKAQRKLDKAAKGTPARVKARKVVARMHERIRFRRHDFAHQLARRLVSHYGLISVEDLTINGMVHNRCLAKSIHDAAWSQFRQVLSYKAEEAGRTLVAVNPAYTSQDCSQCGHRLRKALAQRRHICPCCGLNLDRDENAAKNILRLGLQSQG

SEQ ID NO: 44594 - protein, 402 aa, Escherichia sp.
VKRLQAFKFQLRPGDQQECEMRRFAGACRFVFNRALALQNENHEAGNKYIPYGKMASWLVEWKNATETQWLKDSPSQPLQQSLKDLERAYKNFFRKRAAFPRFKKRGQNDVFRYPQGVKLDQENSRIFLPKLGWMRYRNSRQVTGVVKNVTVSQSCGKWYISIQTESEVSTPVHPSASMVGLDAGVAKLATLSDGTVFEPVNSFQKNQKTLARLQRQLSRKVKFSNNWQKQKRKIQRLHSCIANIRRDYLHKVTTTVSKNHAMIVIEDLKVSNMSKSAAGTVSQPGRNVRAKSGLNRSILDQGWYEMRRQLEYKQLWRGGQVLAVPPAYTSQRCACCGHTAKENRLSQSQFRCQVCGYTANADVNGARNILAAGHAVLACGEMVQSGRSLKQEPTEMIQATA

SEQ ID NO: 44595 - protein, 362 aa, Bacillus sp.
VNQLSQTITVKVKLLPTKEQASILNAMGKEYISTINALVSEMVAEKKTTKKTTKNVPANLPSAVKNQAIKDAKSVFSIKIKKSKYTIIPILKKPVCVWNNQNYSFDFTHIRLPLIIDGKAKKAPVRALLVDKQNRNFDLLKHKLGTLRITKKSNKWIAQISVTIPTSEKTGTKIMGVDLGLKVPAVAVTDDEMVRFFGNGRQKKYVRRMFKSKRKKLGELKKLNAIRNLDDKEQRYMKNQDHRISRAIVNFAKENKISVIRLEQLANIRQTARTSRKNEKNLHNWSFYRLSQFIEYKANLVGIKVEYVNPAYTSQTCPKCSEKNKAQDRKYKCNCGFEKHRDLVGAMNIRYAPVIDGNSQSI

SEQ ID NO: 44596 - protein, 241 aa, unknown
  TnpB Polypeptide
LQYREPLVVGNKLAGIDVNIDRIAVTILTNQGNFLKSKVFYYHEMEYVSSNCRSNIAGEVAKEVIDYLLAENIGAMVLEDITLRQQHDTNKKFNRLTHSFAKKKLMEALIRRGLRNGFQIKKVNPAYTSVIGRFKYSQKLGVSVHEAASYVIGRRGLGLEERLSKEVIRLLKEQVKPHLIKLLASMEESEKKSARGKKHRKYLGMLLNNIDRFKELHSWKIWNVVHKTLKLINGEPILITV

SEQ ID NO: 44597 - protein, 390 aa, Streptomyces sp.
MWNCLHAWWQMMPKNKRTLANADAAIRQARRDIDFLAVLPAQAAQAALKTYFQAWKNCWDGRADAPNFKGRFRSVMSVDIPQGRDLNVVRVHRRWGMVNIPKLGRVRFRWTKDLPVGKHANKENRITGARLVRDALGWHIAFRVMTLDPEPEPHQGPEAGIDVGVTVPLALSDGKTYEHGEWLTDKEQAKLLGLEQRAAQRKQHRKPGEKTSRRLQHTYDQIAGLRAKAKRRALDWQHQTTTAIARTYGTVVVEALTITNMVKSAKGTADKPGKNVAQKTGLNRSISGEAWGRTVTLLKYKTARYGGILHKVPAPGTSQRCSACGLTTPGSRENQAVFVCKNPDCGWSGNADHNAARNILYLYRIGHVAIPAAGRRSRQARRRVKPATAR

SEQ ID NO: 44598 - protein, 417 aa, unknown
  TnpB Polypeptide
MKVQGARNGADQRVASLVERSSSQRSILQFYILKLNISYGNIIVYLLLLRKEVYLMNKSFEIRIYPNQEQQILINKTFGCVRYVYNYMLKLKQKAYNIFELKLNYVKISSILTKLKQRKAWLYEVDCVVLQQCLRDLDAAYIKFFNGAGYPKFKTKRGKNSYRTNCNLHLDQDSKKIKIPKIGWIKFRDKTNFNGLKKIYNITISKTPSRKYFASISAEVDITAFAKTKKSCGVDLGLKDFCILNDGTKFENLRFLVNNEKRLRMLKKSLSRKVYGSKNYEKARIKLAKFHEYIVNCRKDYLHKISTFLVKNYDIICAETLQVKNMLKNHKLAKAISDVSWSEFCQQLEYKCLWHGKQFIQIDTYFASSQICSNCGYKNSNIKDLNIREYDCPKCGIHHDRDINAAINILNKGLILL

SEQ ID NO: 44599 - protein, 253 aa, unknown
  TnpB Polypeptide
MKAPFMTNILILLYLHPLHFHAMMLLMQRVNIYQLNHLSHKQFQCCKAAQIEAAKVWNVCMETHKAARVEHTAWPGRNALQRATKGGQFALHSQSVQMVVAAFLANIQTTRELRQTHPYQRMALWEYGKDIDYLTHKSKQAHISSFTGSERGTSSRCPACGHHHKPKGRNWVCRKCRFSGHRDLVGSVNMHKQAYGNHELRFPRTFTYLRPSGKPRLRSSRADTPQSCLSESLAQPRITDTVSSETGHTSDVA

SEQ ID NO: 44600 - protein, 383 aa, Microtetraspora sp.
VKLVMQVKLHPDAATQAALRETLALCNRAANHASRRGFTTGVKGKTSLQRLVYGELKAMGLSAQPAIHVVRKVAGAYAALKANLKAGNYGPQGSKRRATVESIPVRFRKDAAQPFDDRCLSWQLDARTVSIWTVRGRCGRIPFACSPAQLGMLTRYRRGESDLVFRGGAWYLYAICEVPVPDVYDPDGFLGVDLGIANIATTSDGIQHAGRQLNQVRHRNRRLRSRLQAKGTKSAKRLLRKLSGREARFAADTNHRIAKTIVTEAERTCRGIALEDLGGIRERVRLRKPQRVTLHSWSFAQLRSFITYKAQRRGVPVVYVDPAYTSKGCSACGHVDNRNRPDQATFACTSCGFAEHADVNAARNIAARGVAGWAVSHAADDAA

SEQ ID NO: 44601 - protein, 406 aa, unknown
  TnpB Polypeptide
MKSNNRSYTVLKINQSHDYYKWCENACLESRYLYNTMLYEYRNSYFDNNVITLTNAELYYIGKDSEHWSNIPAKCSNQVWMQLTTNINSYWAAIKSYNKNTEKFKKCPRIPNYNKGMNIVTFEKQALLTNKLPKNHIRLVRTDIVLDLSKYEGEIREIQIIPKLNHFIIKAIFKQTIHQEDLINDLVASIDIGVNNLAAITTNQALIRHILINGRPLKSINQYYNKTKAKLQSKLPKKQKSSKRISCLTDKRNNKIHDYIHKASRYIVNWLINNKIGTLVVGKNKEWKQEVNIGSKNNQNFVMIPHARFIDLITYKFEAVGGIVKLVDEAYTSKCSALDLEPIKKHVEYKGKRVKRGLFKTNNGDIINADINGSLNILRKAIGNDFISNLIESQQWAKQSPIKITL

SEQ ID NO: 44602 - protein, 387 aa, unknown
  TnpB Polypeptide
MLSLVCYRMRLYPSKTQAKDLAATLDVCRSFYNALLDERKVGYDNGHKVTKTEQLRRVKELKAIGLPLFVHSHVLQVVASDLDKAFQNFFRRVKAGQTPGYPRYKGRDQFDSFGLKEYTNGFKIDGRRLEISGIGRIAVRWHREILGTIKTVRVTRKANKWYACFACEVETDGETEALPPTGRAVGIDVGISHLLATSDGEFVENPRWYRAGQKDLRRVQRSVARKKKGGRNRRKTVLQLQRHHERVKNRRQDFLNKVAHGLISRYDVIALEDLRIKNMVRNRHLSKSILDAGWNYLTQRLRAKAESAERVVEFVPAAYTSKTCSACGVIFETLTLSDRWVSCECGLSLDRDHNAAKNILCRSRLGNSLWASTQGSGLSVAQEAIAL

SEQ ID NO: 44603 - protein, 436 aa, Sulfobacillus sp.
MQETIVFPYRVSVPPTEGAKASAARRSAGDLWTRLVTIHRFCRKRHWRWPTESPLKAHVKRRFPLHAQTVQALIEKFSATIDGVRTKRQNGDKKARYPWRFRRYFNPIFKGQALQMQGSHLRLSLGRGREPIRVWLPDALPTGTMVQAELGYGEIFLTVTRILDDPQPPVSEKVGGLDIGVIHRGMVSDGQEALAVSGRGLRSVKQGRAKGLTKLQKKRRRTQPGSRRRRRLNRARHRLSQQVNRVSRNALHHAANQIVAFGVAQQLTVLYAGDLSTLNHQKRHRRSRRMNQDVGALEFGRLEHYLAYKLRRHGIRLMPISEAYTSQTCPRCGHLNKVAGRTYHCRACDYQAHRDGVGAVNILNTGMHGEIRPGEFLVPQRITYRRPVPFKRALRRSPAEPRHVAGGINDSESGGPLRGVHTPRRSDHGSPRISAL

SEQ ID NO: 44604 - protein, 469 aa, Moorea sp.
MLLNYQYQAYPSTQQKLELNDWLRICRYWYNWQLGDRFRWWNENRTAVNSCPLITYLPELRDNPGYFSQKKLLPIWKKDLVTVVHSGELLDFTRVPANTLQDVCKRADLAFSRFIKGDCNGSRSGKPRFKNQARYRTLKIDGKDCFSVARIEKKWIWLKISKLKGWLKVRLHRPLPDGFKIKNILITKKTDGWYTTLCLEDSTVPAFTPESVIPTWDNGIGLDAVLYGDDYLATSENTKLPSLKSYRKNHSYLVGLTQIPQFNATCRVGKTLPTLPMDSVRKSYLEKVQTKKNAKTKGSKARRKLQSREARIHQRIARSRKDHAYKTAHVLVRSGKKVFYYENLNLTGLNKRNKPKPDGKGGYLPNGQSAKSGLNKSWLDAGFGQFFEVLGYIAGKAGAVTKKCNPAYTSQLLSYRDEFVFTDCDLREYWDEQEMLLVDRDINAAINLKRVGLGVFPTIKRAHRESGYK

SEQ ID NO: 44605 - protein, 456 aa, Saccharopolyspora sp.
MSRTFQPRPGFTVQAYEFALAPTEQQADALRSNCGGQRFAYNWALARVKANLDQQEAEGSYGVSEDEVTPGLNWSAYSLRKTWNAAKHAVAPWWAENSKEAYSSGLANLATALNNWNRSRKGQRVGKRVGFPRFKSKRSTWSATFTTGAFGLAQRNRRHVRLPTIGTVRTHESTRKLARRIEADTARILKATVSHRRGRWLVSLQAEVQRDQPQPATTGGTVGVDLGVKHLAVLSTGEHVSNPKHLDRAQRKLRRLQRQTSRRTGPDKRTKQKPSNRWHDTQDRVRRVQHYVANARAEGLHQLSSRLVDEFDTVVVEDLNVAGMLKSRTLSRSIADVGMGELRRQLDYKTTWNRRRLVVADRWYPSSKTCSACGAVKTKLRLSERTFNCDACGLSLDRDLNAARNLAGLAEAAGGTSTESCAGTENEPAGNPGKTSSAGVGYRHGKAAPDGAAKAA

SEQ ID NO: 44606 - protein, 397 aa, Saccharopolyspora sp.
MSRTFQPRPGFTVQAYEFALAPTEQQADALRSNCGGQRFAYNWALARVKANLDQQEAERSYGVSEDEVTPGLNWSAYSLRKTWNAAKHAVAPWWAENSKEAYSSGLANLATALNNWNRSRKGQRVGKRVGFPRFKSKRSTWSATFTTGAFGLAQRNRRHVRLPTIGTVRTHESTRKLARRIEADTARILKATVSHRRGRWLVSLQAEVQRDQPQPATTGGTVGVDRGQAPGGALHRRTRVESEAPGPCAAETAPTATADVPPHGSGQADQAETVERWHDTQDRVRRVQHYVANARAEGLHQLSSRLVDEFDTVVVEDLNVAGMLKSRTLSRSIADVGMGELRRQLDYKNYLEQTSPGCRRPVVPIQQNLLGLWRGENQAAPVRADLQLRCLRPVPGS

SEQ ID NO: 44607 - protein, 402 aa, Escherichia sp.
VKRLQAFKFQLRPGGQQEREMRRFAGACRFVFNRALALQNENHEAGNKYIPYGKMASWLVEWKNATETQWLKDAPSQPLQQSLKDLERAYKNFFRKRAAFPRFKKRGQNDAFRYPQGVKLDQENSRIFLPKLGWMRYRNSRQVTGVVKNVTASQSCGKWYISIQTENEVSTPVHPSALMVGLDAGVAKLATLSDGTVFGPVNSFQKNQKRLERLQRQLSRKVKFSNNWQKQKRKIQRLHSCIANIRRDYLHKVTTTVSKNHAMIVIEDLKVSNMSKSAAGTVSQPGRNVRAKSGLNRSILDQGWYEMRRQLEYKQLWRGGQVLAVPPAYTSQRCACCGHTAKENRLSQSKFRCQACGYTANADVNGARNILAAGHAVLACGEMVQSGRPLKQEPTEMIQATA

SEQ ID NO: 44608 - protein, 518 aa, unknown
  TnpB Polypeptide
MKKLEKCVKLESVELNCFQIKDIENTLNAYLKCKNYFYDLLYGDQYMVKVQNASKLRTELSKNQKAKGISYQDLFHIPQRYWVMPLFDVCSNLNSNWSNLANKLKKTRVQHNKNFTDEERIYCYVIFSDRQMWYNVLHWITIKNKYLDSLNISDKRKKSLNNYIRRITKENMFIKPHSDENRCMWLDMNMYSYSDKFDYTKLFLSTLKKGSMLEIKLKGKVKFPRSGNLQVVYKKDKKVIELHKTIKTRTSDKKHKDKKGIDKGYANLFSCSDENEYGMNMGIFFTENAEWLNKKTYSRNFYIDLCKKIEKEKQILVDRKNKTTSVKEQQFLSKRIHILDKKIMNIKTNNLGNKKFNKAYGRRKEYCAQRMNHEIIRFFTEHDLKILGVEDLTFVNYMAPYKGRKFNRKMSYWLKGLLENRLEYIAKRNGCEIVKVNAAHTSKFCAKCCAKLEGRTGKHNEIAICPNCGELNANTNSAKLVEDRIDDKEITLYTPHDKVKEIMEQRYLNNKKKNKNLK

SEQ ID NO: 44609 - protein, 429 aa, unknown
  TnpB Polypeptide
MLIRKAFQYRAYPNKTQTIQLDRILWLCRDLYNGALYERREAWRLAHKSLSCYEQINELPAVKEVAPEYKDVPSHVLQDVIRRLDKAFQAFFRRIKAGQTPGFPRFVGRGRYASFTYPDQAGWKLTAGQLHLTGLGRLRIFFHRPIEGTIKTLTVRRDADHWYISFACEVEIPDPPAADEPTAVGIDLGLLHFATLSTGEHIANPRPLRTAEARLAIAQVRLTRCQKRSKRRGRARLRVSRLHRKVRHQRRDFLHKLSRRLVNEYGLIVFEELAIRNLTRRPKAKVDADQSAAAGETVYAPNGAAAKAGLNKSIHDAGWRMFQDFCASKAAWAGRIVLFVNPAYTSQTCSGCGVIRKKALAERWHSCPECGCELDRDHNAAVNIFRLGLSLRASVEAPGYKPGEEVTGYNLRSPAERLSRFEGLGLSGC

SEQ ID NO: 44610 - protein, 435 aa, unknown
  TnpB Polypeptide
MAQILTAKLKLLLTPAQHAALRATQLAYRDGLNAVSRYSFAHGKISSAAKLQQAMYGELRGTHRLPAQLACAVCRQVGATYQGLWTKVRQNATHRRAGHTTRRYRGLDRPPKYVAPTLAYTYGRDYGFKTGQTVSLITLTGRVVVPYLGYGKHVALIQTGARAGGAKLWYDPRRQQFYLLVSLEIAVPDPAPEQQPHVVGVDVGIRYLAVTATPTGQQTFYSGKPVRHRAAHYHRKRQQLQQQGTRSATRRLRQVAGRERRFRLDVNHRIARAIVTAHPQSLIGLEDLTHIRERTNRRHSKKASAKQRRANRRQATWSFAELQAQIAYKAALAGSVVVQVEADFTSQQCLRCGHRSKGNRPGQGLSFVCEQCGARLHADLVGARNIALRTLLVRQDWISTGGLSTRPDGSGDEAKAARLQRYAELRPSPDPSLPL

SEQ ID NO: 44611 - protein, 429 aa, Thermoprotei sp.
LNKRLKTLKRTVILEGWINRYGRQALREITEAYKEMLQEMVEYAVENKASQATLHKLFYHRFREKHPWLPTRVIKGAYRDAVRRAKSFRELKKKGIAKTDKPIVKRITVTYSDSQDWKLKDGAVMVRTHRGWVKIHYRGHKQLHKYLYSGWKLSSELRLKPNGRKIIIYLTFTKNFEIIYNPNNVVAVDVNENNVTLTVFRDKKLYEAYRIETDLGRLVISYAERRKRITRGKSTRTRSVKKALKKLKERERKQDIIYKTARIVEELAIQNNAIVVIGNVHRGKKRLVERTRMRTLRLRIHQWSVSALVEALDNKPLHVVEVSEAYTSSIDPFTSRRIRKFTPSMIRFAVRGRKKIRVDKIQLRLAKLGNGLVLDRDVIGAINIGLKYLSSDGRAMALGSTEPHAVWVKLMSPHQGLTPLTELKVLKTI

SEQ ID NO: 44612 - protein, 401 aa, Symploca sp.
MIVLEYKVKAKQAQYRAIDEAIRTVQFIRNKCLRYWMDAPKEAKIKRFDLNKYSTELRNQFNFVKDLNSMACQSSAERTWFAISRFYDNCKSNKAGKKGYPRFQKDNRSVEYKTTGWKLHQTKRRITITDKKGIGELKLLGKWDIHTYPVKTIKRVRLVRRADGYYCQFCVDVECVDIQPKTGHEIGLDVGLESFYTDSNGYQEPNPKFLRKAEESIKKVQRQIYKKKKGSTGRRKARAKYSRKHLRVSRQRNEHAKSLARNVCKSNDLVAYEDLRVSNMLKNHCLAKSIADASWYQFREWIEYFAGKFGKLAVAVPPQYTSQKCSQCKRVAKKSLSTRTHVCQCGCKLHRDTNAAINILQKAKSTVGQTGSNAKGVATSTLLGATLVEQVATMNLESPLL

SEQ ID NO: 44613 - protein, 402 aa, Escherichia sp.
VKRLQAFKFQLRPGGQQEREMRRFAGACRFVFNRALALQNENHEAGNKYIPYGKMASWLVEWKNATETQWLKDAPSQPLQQSLKDLERAYKNFFQKRAAFPRFKKRGQNDAFRYPQGVKLDQENSRIFLPKLGWMRYRNSRQVAGVVKNVTVSQSCGKWYISVQTESEVSTPVHPSASMVGLDAGVAKLATLSDGTVFEPVNSFQKNQKKLARLQRQLSRKVKFSNNWQKQKRKIQRLHSCIAKIRRDYLHKVTTTVSKNHAMIVIEDLKVSNMSKSAAGTVSQPGRNVRAKSGLNRTILDQGWYEMRRQLEYKQLWRGAQVLAVPPAYTSQRCACCGHTAKENRLSQSKFRCQVCGYTANADVNGARNILAAGHAVLACGEMVQSGRSLKQEPTEMIQATA

SEQ ID NO: 44614 - protein, 392 aa, unknown
  TnpB Polypeptide
MQEFRLMVNRGIRYALENGLTSKSSMEKFGQSLAREYHINGAHARTAMSVALSLDKGHRRRLRNGKKSKVPYVFKPFLRADDVTFHVTPETGHIRLSLRNGEWSAFDVRLSQYHIETMARGKIKQLVLNGTKAVLIIEKEVLERYEPTSILALDTNERSLDGVSLTPEGAVPVSIPYPDVSVVQHRHFVRRRKLAKKKCNDRRVWRKLAAKEGRRERNRVSQRLHLVSKGLVELAVREQAAIALEDLHLPKGGGAGRRMRRRLSSWPQRELHRQIEYKAEERGVPIIKVDPRYTSKTCPRCGEIKRRSRVGQVFECAKCGWRLDRQINAGLNICRTALAQPPKEVETRGLGGLRLDPDALANDAMILLYAPGNAGAHGVSGRSGSFGRVTAQ

SEQ ID NO: 44615 - protein, 359 aa, Trichococcus sp.
MLKAYKFRLYPTEIQEAYFANCFGCVRFVYNQMLNDKIDHYKETKQMLKNTPAQYKQEFPFLKEVDSLALANAQQNLEKAYKNFFRNKSVGFPKFKSKHKSNASYTTNNQGGNIRIEDNKIKLPKIGFVKIRQHRYFEGLIKSCTVSMAKTGKYFVSILVEQEVPEWVPAEHKIGIDLGLSDFAVTTNDAGETMKYGNPQHLRKTEKQIKKSQRALSRKKKGGKNREKARLALAKKYEKIANQRRHFLHQLSNKLTDENQVLVIETLSSSNLMKNHRLAKSIADASWSEFCRQLAYKAEWKGRTLIKADRFYPSSQICSACGHRDGKKALHIREWTCPECGAIHDRDINASRNLLALAK

SEQ ID NO: 44616 - protein, 365 aa, Peptococcaceae sp.
MRKTFKYRLNPTKFQRTKLNQTIELCRKVYNDTLALRKDTWEKEHKSISLYDTNKILTGWKQERPELNNVFSQVLQNVQERVDLAFKAFFRRVKAGQKNGYPRFKGFGRYDSFTFKQSGFKLSDRLFISKIGDIKINLHRPVEGKIKTVTIQRDRLGNWYACFSCEVETKPLLVSSEMVGIDLGLTTFATLSNGETIERERWLKRDEQDLKRIQRKVSKLAKGSPERKKAIKALNHVHTRIKNCRDNFAHQESRKLVNRYGLIVFEKLDIDGMQTKGNRTINKGIADVAWSQFVSKTHAKAEEAGRGFILVDPKNTTQQCSGCGLIVPKDLSVRIHHCPDCGLKIGRDLNAALNILARGLSSLRL

SEQ ID NO: 44617 - protein, 433 aa, Oscillatoriales sp.
MGDQVNTSEAKNKMLLSFKTELKPNNRQMTQFRQHCGVARHAYNFGNAIILDILKQRETDKSVKVPNAIDLHKRLIAEIKPSNPWYYESSKASPQQALAEVRTAWDRCFKKVSAQPRFKKKGKSKDSFYLEQGTKAKPAIRNDGKRIKLPKIGWVLLHETLPISAVHNCVISRQADSWFVAIKYEVEKPAVPANRPSVGVDIGIKELAVTSDGKVFPNPKAYRKMSKKMKYLQRSVSRKVKGSKNRLKAIRLLGRHHAKIGNIRKDAIHKLTNHIAKNHSIVKIEDLHIKAFLKNHKLAGAIADCGMYEFKRQLEYKTEKFSSQLILVDRFFPSSQICSGCHVHRHKMPLKSRTYHCPECGHTEDRDLNAAKNIERWFEGIHIPIRSDPTVSSTLIACGADKPLKSHLETALKQEVSIETINVHLSLDLGSFG

SEQ ID NO: 44618 - protein, 634 aa, unknown
  TnpB Polypeptide
MSNSLERAQARKDGKLATRMARAGVVTATLADGTKVTGEIVSARLRYLAEMVRAQAEKRIFEVWAAQAVLDLPKSPSHAYVAMLATYDSLIWPPENFHASQRVLRLAEELAGRTLRSAGRSLSILEALVNFEPLPADITETEQRNLWRAVKNYRDDHGSDPASVYDLIACPDFSAGFYNCPLDAADNQQVKLEDDQLSILLPACEFPGKADWAWHTLTLKIPAFAESKYPGAKVRKPSLRLTPEELYFLVPLDIELPELHKDLMERQAGEEKILGVDWGERRLATAALVARDESGQVYTTGRPFYFDAGDLQGKQARRRAEAEHLAKEIERMEKEEREARKSAPARVAKIAVLKRERDLLWRRISQCNRQLEYAAANWVVAIALAEGADTISREDIDSLEARGLGSKVNARVSNQVRGGVYKRIDEKAQLASLAVVAVVPRGTSSFCSRCQRKSVFQQAPDRKYGRKNPATGNQAAHQNWLVCEDCRSSDRDHSSGEAIGARGFDAPLAKRNSRNKPVAGPASRRPIKHRPERPDPSTEAQQARKLAQAIPFPTCEQTQHAPRSCRTVSPRRVDRGSALVARPPERRTLTNLESSEVSPPRVLDGLAGGYWRRITFSRPRALVIPPGTVLTQGM

SEQ ID NO: 44619 - protein, 634 aa, unknown; identical to SEQ ID NO: 44618
  TnpB Polypeptide

SEQ ID NO: 44620 - protein, 347 aa, Microcystis sp.
MEKAYSYRFYPTPEQESLLRRTLGCVRLVYNKALHLRTQAWYERQERVGYTETSSMLTEWKKQEELDFLNEVSCVPLQQGLRHLQTAFTNFFAGRTKYPNFKKKHQGGSAEFTKSAFKFKDKQIYLAKCTEPLPIRWSRQIPDGCEPSTVTVRLHPSGRWHISIRFDDPTIKPLPVTDKAIGIDLGISSLVITSDGDKVSNPKHFKKHYRRLRRASKSLSRKQKGSKNREKARIKVAKIHARITDNRKDHLHKLTTQLVRENQTIVVENLAVKNMVKNPKLSQAISDVSWGEITRQLAYKCRWYGRNYIEIDRWFPSSKRCSNCGYIALENAVKCSRVGLSRLWDSP

SEQ ID NO: 44621 - protein, 418 aa, Microcystis sp.
MKLVERHIISQNHPLWSEIDHYAFLSKNLFNLANYHYRQYFFENSQKLSFNQLYHLVSKTSDYLALPTKVSKQIIRRLEQAWVSYFAAFKAWKKHPEKFLGKPKIIKYKDKTKGRNLLIYSQESIYKKPLKEGICHLSMSDLKIPTSRREIIEVRIVPKSSCYVIEIVYERRSETTDKQEIAGVDLGVNNLMAVTTNQTGVAPLLVNGRPLKAINTFYNKQRSRLQSQLKTRNNQPSSKRLLFLTHKRNCRVENYLHTASKRVIDWCTIHQIGTLIIGHNERMKQSLNLGKRNNQQFVNIPHNRLIEMLTYKAQLKGIKVIITEESYTSQSSALDRDELPKYGEEKPLFKGKRLARGLYKMGTNQLLNADVNGAFNIIRKVIPDVIDQGIKGLPFNPVVLDPLVSEPVELRMTKLSGF

SEQ ID NO: 44622 - protein, 347 aa, Microcystis sp.
MEKAYSFRFYPTPEQESLLRRTLGCVRLVYNKALHERTQAWYERQERVGYAQTSSMLTDWKKQEELDFLNEVSCVPLQQGLRHLQTAFTNFFAGRTKYPNFKKKHQGGSAEFTKSAFKFKDKQIYLAKCTEPLPIRWSRQIPESCEPSTVTVRLHPSGRWHISIRFDDPTIKPLPVTDKAIGIDLGISSLVITSDGDKVSNPEHFNKHYRRLRRASKSLSRKQKGSKNREKARIKVAKIHARITDNRKDHLHKLTTQLVRENQTIVVENLAVKNMVKNPKLSQAISDVSWGEITRQLAYKCRWYGRNYIEIDRWFPSSKRCSNCGYIALENAVKCSTVGLSNLWNTP

SEQ ID NO: 44623 - protein, 222 aa, Microcystis sp.
LAKIEAMSFYIRVSPLITPVHCITQTEEPKQLNRLNKKKSKKYRKGKKQSRNYHKARKRYARKHLRVSRQREEFVKSVALRLVKSNDLIVYENLNIKGMVKNRHLAKSITDAGWSVFRQWLEYFGDKYGKLTIAVSPHNTSQNCSNCGQKVQKSLSTRTHVCPHCGYTDCRDRNAALNILQKGLSSVGRTQTLNASGEIPSWLVGEILLANGDSMNEESPSL

SEQ ID NO: 44624 - protein, 355 aa, Microcystis sp.
VKVSRTVLKPSQNGDISGLGQPTSEQSVLLAKSFGCARWFYNYALNLTSETYKQTGKGLSRDEIIKLLPSLKKEHEWLSEAPSQVLQQAALNLSSAFLNFFEGRAKYPNFKKKQNRQSIRFPQHCKLKDDVLVLPKIGEVYCQVSRQPEGDLKSVTVSVNPSGEYFASCLYDDGKDLPQKSSEGKAVGIDVGLTHFAITSDGTKHGNPQYYRKYEQRLARRQKKLSRQQKGSKNRNKARVKVAKVNSKIVRCREDFLHKLSRKLVDENQVIVVENLAVRNMVKNPKLAKSISDAGWGQFCTMLKYKAEWEGKIYIGSAEKVFRRDRVWGVGCGVWGVGFYRFSSGQLPNFQRKST

SEQ ID NO: 44625 - protein, 269 aa, Microcystis sp.
LVGTWDLGYFQESDIKRVRLIRRADGYYCQFVLSCDVKEDVKPSGKCIGLDVGLASFYTDNNGNKVDNPQFLRKSEKRLKRLQRRLSKKKKGSKNRQKARQRLAKAHLKVNRQRQDFAVKLARCVVHSSDVIAYEDLRVKNLVKNHCLAKSINDAAWYQFREWIEYFGVKFGKITIAVSPNYTSQNCSNCGETVKKSLSTRTHQCKCGCVLDRDENAAINILKRGLSTVGHTGTFGLDPINAWGENTSTFSEAILSKQVISVNQESPSL

SEQ ID NO: 44626 - protein, 428 aa, Microcystis sp.
MLVVEAKLKNGTLEQYHRLDEAIRTSQFVRNSCVRYWMDHKGTTRNDLQKLCSVLANNKETPWVNKLNSQARQSAADRAWQSINRFYQNCHAKIPGKKGFPRFKKHSRSVEYKLTGYQLSDDRRKIRFTDGFKAGEFDLWCSQKTLVYYSEQQIRRVRVVRRADGYYCQFLIDVERQEYHKPTGQITGIDLGLKEFYTDAQGNTVENPRYLRKSEKRLQKAQRRLSKKFRKGKKQSKNYHKQRVKVAKLHLKVSRQRKDKAIKDALALVQSNDLVVYEALKVRNLVKNRKLAKSISDASWYQFTEWLNYFAKIYRIVCVAVPPHFTSQDCSVCGTRVQKTLSTRTHQCPNCQTVLDRDHNAAINILKKGLKYLGNHLNGTVGQTETDPNALGESGLWIFSGDIENLSCLVEQGISDSDLERIPRHSVA

SEQ ID NO: 44627 - protein, 335 aa, Microcystis sp.
VITLTYQYKLKVNRQQEREIIHILDVAKSVYNYALSERKDWLNSRKCLADRCSLVSEYIIPADQPYPNYFVQAKNLTEAKKVYPILKTVNAQVLQQVLKTVDKAFDHIKSKGFGFPRFKKKMRSFVFPALSKNFLGDEYLNFPQLGKIRIRKSREYPSGFEPKQARIIQKASGFYVLVSFQSPELVPDMTVGKTCLGIDAGIESFVATSRGDLIKAPRFLLKVQSKLKLLQRRLKHQVKGSNNWLKLQDKIARLHEKVSNTRRDWHFKLAHYLCDLADNIFVEDINFVSWSRGIVRKQSLDSGIGSFINEILPFVVWKRGKYGSSGIVMQIINLK

SEQ ID NO: 44628 - protein, 318 aa, Microcystis sp.
MARQASAERAWFSISRFDNNCQRGLAKKGYPKFKKFSRSVEYKTSGWKLTEDKKFIHITDKTGIGKLKLIGTFNREILDKSTIKRVRLIKRADGFYCQFVLDIERVETFDSTGKEVGIDLGLNHFLTDSNGDKIDNPRFLRKSEKRLKKAQRKLSKKKKGSQKRLKQKSKVARLHLKVSRQRKDFAVKTAKALIQSNDLVVYEDLKVSNMVKNPKLAKSISDASWSMFTDWLDYFGKIHGKFVVAVNPQYTSQQCSSCGNIVKKTLSVRTHVCSCGCVLDRDENAAINILARANIVGRTEIQALGQTTHCLLGESLIS

SEQ ID NO: 44629 - protein, 241 aa, Microcystis sp.
MFVLEYKVKPKPNQIEAINEAIRTTQFVRNKVLRYWMDNRGVGKTELFRYNTALRKEFKFVDDLNSHACQTAVERTLRAITRFYDNCQNKVKGKKGYPKFKKHSRSVEYKVSGWKLSANKRHITFTDKKGIGTLKLIGSRDINYYQPDQIKRVRILNRADGYYVQFCLKLDPRDRVKPLTPSQKATGIDVGLKFFLVDSEGHQIDCPNYYRKAEKQRLFVTCYGSIGGHKSTKSLYGKRLN

SEQ ID NO: 44630 - protein, 400 aa, Balneolia sp.
MIKIKAYKYRIYPTVAQRELLAKHFGCVRWVYNYALAKKVAAYATNKTTISSYDLIKEIVILKKNEETAWLSEVNSQSLQMALFNLDQAFTKFFRERAGFPNFKKKGGRDSAQFPQSTNVDFDNNKLFVMKFREGIKCRFHRTFEGRIKTTTISRTPTGKYYASILVEEQAPDIIQHPLDVAKALGIDVGIKSLITTSAGDKIENPKHLRQSIKKLKKAQRRLSKKVKGSNKRNKQRHKVAVIHEKIANQRKDFLHKITRQLVDESQVTTYCLETLNIAGMLKNHKLAKAIGDVGWHTFVEFLSYKAAWAGKNILRIGMFEPSSKACNACGLINSKLTLKEREWICDCGAVHDRDINAARNIRDFAFAKQNLLGQGLPEDTPGEIAFLVAVSEPGSPHPL

SEQ ID NO: 44631 - protein, 440 aa, Turicimonas sp.
MRVEEIRIGRNHALFPACEKACFHTRTLYNSGNYQLRQAFFKHEVVDYRKIDKCFKQNNDPLYRRMPSAASAQRTLIVLQNDWKSVFQATKQYEKHPEKFKAKPKIPRYCKGKKTFVVERNGFSVKDHILCITGLGSLKIRCVANQQFNEKKDRSVLQEVRIIPRNGIYVVHLAYKEANRYDARTVGLDSARILGIDLGVTNFATMTAVGPDTENLYPLIAKGGRLKALNQYWNKQCAELKSRKKYGHLGAKANRRAFRIKDYLHKLSHFVIEYCLNHGIGRICIGRNKDWKQEVNTGKRNNQSFVQIPHAQFVGYLRYKAESVGIEVIEVEEAYTSKASALDLDPIPEYGKGKEVKFQGKRVKRGLYRTLSGRLLNADVNGSINVIRKLFDKEVRDALLGEPAVGGRLFRPKVLDANSGTFRIRESQCSIETARRSPRL

SEQ ID NO: 44632 - protein, 322 aa, Turicimonas sp.
LRILGKGALRGTIQLIKKLDVYELRVCREALCKPERTEGEIVGFDTGYTEVAALSNGAFVGQKFGEKLTRFSDYCKDKGQKRNKLWAKARELESSAKEKDRRKAQNIFKHNLGRKKHNAKYQRAQDSIKQEINKAINSIVQGKGDGLEGVKVKELVIEKLSAHMGKTRSKNWNRRLSSWARGYIRKCLEQKCKQFGIRLTQVNACHSSRVCPACFYPSKDNRVSTDRVKCRNCSYEGHADTCAAKEILRRRSGEIPLYAPPGKVFEMLMVQYKRGLEVPKAPPFSCKTQLNESEGEKKSLYSRDDQVFSTSQKRQTVACISQ

SEQ ID NO: 44633 - protein, 407 aa, unknown
  TnpB Polypeptide
MSVRSAVFYIDGQPAPEARFLMEDFRLATNGGIRAGLQAGVTSRNALCKLAYKDSRKEHPGLYAQHLVSAFEVAASILKNHRRRLRKLRTGRAVRPPYVKRLMMKAENQAYKLDRKDGIVDLPVRAGLHVKFKLVVSRYHRRYLDDDAYSLGSLTLLPDRVVIAFRKISPKPYAPKSVLSLDTNERSLDGVLIRKDYGAPIIAEFSDVAIIQQRHHDTRKRIQKKKANDRRTARALCKREGQREHHRVEYRLHQVANTILSFAKSQESAIVLEDLRGIRHKKGKDMNRRLSMWPRRELHRIIEYKAEDNGIPIVKVDPMYSSRRCPICRSIQHSRMGTEFVCGCGWHLDRHINASINLLQTASSKGLAGGLRFDPGAFRHDTMMILCEPTVAARSEPNGMSGGVVTQ

SEQ ID NO: 44634 - protein, 700 aa, Actinomadura sp.
VVRLPLVIPDEATRIRVEKLFAAAWQLKRALRGDARARTDAYHAASARRAAPSPVPGAAAAEWREELGLSRAGLERAAYGHLDASGHLKHHLSKAVAMHLADEVWCGVERHLFPGATGRRHGRPRRGSWWGFTRIPGRARSHTTARKWETFRLHGTLDGHLGTYRHPNLPGGITPQQAAALAGQPAPTRRAARVRGRAGRRTAQPQGMSVLAQPRRMPAPVPPTVRGRAAWWEHDGPLALVYAGGPASGRGDLVLPVRLPQGAGRWPHLLHALGDPGCRHKVDLVRRPTTRGWVYEAHLLILKPAYVSPATAARRATAPRDRRGGVDGNVSNLATVSFPAPSDSARAEQPDTASSSVVSTQLTLSPAEHGDLARAARKARGRQRAMERSRRAANAAQYELSKRQRRREKRRAAQGLPARAVPVPGGARRTRADGVPLQAPRRDALSRSHQRTRARHARAADRAAKSKAGRARQVAGALVAVHGPHLIIEDCDIRTWQQRWGSACARFTPGLLITALVRECTATGGRLLRASTYTTALSQHCLCGQRVSKILADRIHRCDNDEGCGLVGDRDLVAAALAAFITFGDPDDLRTARVDYTASRHAIGVHGLSSGPQGALTASTVNLDTPARPGRPGTPATPTRPPRRRRWKNNPVASARRTRQRAVPTPDETHPATRWDGHAGQTQPHTRLPGGSTKDPPGRT

SEQ ID NO: 44635 - protein, 325 aa, Halobacteriales sp.
LEFGVGDVLQDRYDFDHQERITLDVHGNPQWDGNDGRVELVYDEAADRIRVTHPVRIQPAHLREQRRDGFTHTLDSENATQAAAIDVGANNTLAIVTDHGETAVYHARPEFDRFRRLSDRIAERQSQLPDNRYSSRRIDRLYDERRRKRDHARDAAVKHAAEWLLARNVDTVYVGDLTDVLDAHWSTSVNEKTHSFWSHRQLLDRLGLTFGDVGIDVVEVNEADSSSSCPACESEAVRRRGDEFRCRDCELEAHSDVVGAWNVLRAEEGPMARPAALRAGRRRDAPQSGAYWEWNGHEWTPAVFGERSRPIDQTSVGEPASSQPG

SEQ ID NO: 44636 - protein, 433 aa, Peptococcaceae sp.
MFATQKVRIKGLTQAEYEILCLLHRHAKNLCNVALYALRQHFFATGKLLSFNKLYHQCKTNENYHLIQAGVSQQILKRAHGNMKSFLALSTKAALGQYPAEKVKIPKYLPKDGYSQLLCSTNAITVHDGFFQIPMSNRFMQEHPGLTIKIRVPDRIANRPIREVRLNPLHQARFLEAEFVYKTADKAQLVGEPETLALDLGVNTLAAGISTTGTAFLIDGKRLKSVNQWYNKERSRLQSIKDLQGIKGETNKLALIAYNRENFMRDCLSKAGHLILQHCLDNKIGRVGVGVNPGWKQAIKIGHVNNQNFVQIPFWKFRRFLAYLCEKNGIEYVEITESYTSKASFLDRDLLPEFDPEHTEKYVFSGKRVKRGLYRSADGQAVNADLNGAANILRKACSGIDLSRASHALCLNPIRLYPLATIKKRALKSKAAA

SEQ ID NO: 44637 - protein, 404 aa, Streptomyces sp.
MLTGRRYRLQLTEAQAELSEEYGNICRSVWNTGLDQRRQYRRRGGWMNYVPQAAELADAKTEHEWLKAAPSHILQQTLKDLDKACRDHGTFKVRWRSKARWSPSFRFPAGNLIIVERLGRKWGRAKLPKLGWVTFRWSRPLGGEVKSATVSRKGRHWFVSFLVSTEETTPEQHAMPDTVVGIDRGVVVAATTSDGDFHDRAFVTEGEKTRYRRLQQRLAHTKKGSANRRKAVAAMNQIMGRITDRRGDFCAQVANQITAKNALVVLEDLKTRNMTASASGTLTEPGVNVSQKRGLNRTILDKGWHRLELALANAARYTGARLVKVNPAYTSQRCSACGFVTEGNRESQSVFVCKSAGCGYTAHADVNAARNVKAAGQAVSACGDLGVSRSVKQEPVSRATGRNP

SEQ ID NO: 44638 - protein, 469 aa, unknown
  TnpB Polypeptide
MSNLINKAYKFRFYPQNDLKEILAKTFGCTRFVYNQTLAFSETHYAQKPILESQGLIYKSLTEKDRVNFVKTLKDSIELDPLNPNFNQLKYPWLFDVSSVSLQQSAKNLHKDYSRFFKGQSGKPNFKAKHINHNSFTITGQGSIHFDNDFAKNYQFCLPKYKKPLNIKWGKSNKAGNKTTKRLFNHLAVSSFTISQNPSGQYFISFLVKEEFISKDSINNKVSFDLGLKTMAKVYQGKIDAEGKPVFQDFNLPDFLKAIDKKLRKSQRNLSRKEKESKNRDKQRLIVARIHQKRVNIIQDYYQKKSTKLVNENQEIILEDLNISGMKKNRKLSRAIYHVAWKRFVSMIEYKSKWNKRLITKANRFYPSSKTCSKCGHIHHGLKLKDRTWTCPGCNAQHDRDENACINLYNYKHTVGTTVNACGGNYFKSNDLSRIVRPKKTKKIISKSLMANSSESNATSCIKAGIHVL

SEQ ID NO: 44639 - protein, 395 aa, unknown
  TnpB Polypeptide
MNKSYQYRIYPTKEQKVALAKHFGCKRWIYNYGLELTNKHYKETGKHLSWVEVANTIPKLKKNQETSWLSEVNSQSLQSAIKNLDSAFTRFFKKQGKFPKFKSKRNKQSFQVPQFYKIDKENSCIFLPKIKGKIKVVFHREIKGEPGTLSISKNSANNYFVSIQVDDGKEFSKKPKPNKHKAVGIDLGIKDFAILSNGEKIPNPNITKDKEKRLAKLQRDASRKVLGSNNRKKANLRVAKLYQYINNKKQDFLHKLSTRLIRENQTVCLEDLNVDGMLQNRCLSKAIQRCSWSEFVRQIMYKADWYGINVLQINRFAPSSKMCSKCGWIKEDLKLEDREWVCKCGVKHDRDVNAAKNILAFAFHPKNKSGQELPVEPTEKLISTTKREFRSKSVH

SEQ ID NO: 44640 - protein, 405 aa, unknown
  TnpB Polypeptide
MSYLTLVAKVEAEPAAREVLLDAMLCGTKVYNGLIYELRQEYERTGKSKVSKQNLNQILKTLPRAKAYYSLSVQATRDEVLGAYKSYFALKKGGHADARPPGFRRKTSYSGLRYYDGYGVVLDGDQLTLSLGLSRLDGVRQVTVRVQYRDDVVFRRVVNVLLTYDTKNGMEAHLVVEVEDGQANGTRKVAIDLGETQAISAMFDDGTDLLYSGREIKAIRRYWQKVRAKVKPPTAENCKKSRRYRQIERKESRQVNHLLQLISKDFVERCDQIGVNTIAIGKLSGIREKIDYGERLNQRLHAWPFAKLTNMITYKAKRYGIQVIQVDEAYSSQTCHACRKVAKANRKTRGSYACACGWHTHADVNSSANLFQSAFQVSPLTRSSGDVASPVVVSLITQRHMVCEA

SEQ ID NO: 44641 - protein, 385 aa, Brevibacillus sp.
VGDESALRRKDFCFFVPSAITSRTYVLEQAILISKTLGCSRFVFNRFLTQWNETYKQAGKGLTYHSCSAQLPQLKNEQPWLQEVDSTALQSSIQNLADAFTRFFKRQNEAPRFKSKKNKVQSYTTKHTNRNIRIVGNQIKLPKLGWVTFAKSREVEGRILNVTVRRNASGKYFVSVLCEVPYSPYIPVDKKKTIGIDLGLKEFATFSTGEKIKNPKYLRLYEKKLNQWQRRLSRRKKGGNNYDKARKKVAILHEKVANSRNDFLHKLSTRLIHENKVICLEDLQVNHLIKNHKLAKSIADASWSTFRDMLTYKAEWHGRTLAFVGKQFPSSQLCSTPNCWNRNKDVKNLNLREWTCSYCGTRHDRDENAAINIEREGMRLLCETT

SEQ ID NO: 44642 - protein, 328 aa, Methanocalculaceae sp.
MPHPIRAGGSITHFPENVMPCGRNGIRPTMRGTQARIVTLKEEHPFFKGVYLKVLQMVNYSLWNNIASLSQMKKRGRKIGKLRFKSASRFRTLNYNQSGFSSTPGRVRSRSQRSEPFPLRLYRPYTKTVKGVLITRCGDTWYVIIQAAAVIESTREGRSVGIDVGLNSFAVDSDGTAIENPRFNERSLNTIRKLQRSIARKQCFSKNWKKAKSRPEKAHDHVTNQKRDFLHKLSRSYVDRYRTICVEDLDIKGLKETGSSKGLHRSIHDLSWGRFYSYPGYKVLSAGTQVIKVDPRNTSHICANCGSIVKKTLSERLHECPYLRECYR

SEQ ID NO: 44643 - protein, 415 aa, Cylindrospermum sp.
MAAKRVTFRLYPSKIKADKMPYLRRLHKDLYNACVEHRRTSYKKFGKSVSYYDQQNCLPEFKEYWEEYKELGSHGLQDTVKRVDLAFKRFFKLKSGYPKFKSSRHYKGWTYPCNSGWKACTNGQNGYLKITNLGKIKMRGQARDWGQTKTCTIIFKQGKWYASITVDCIPFRPQTDTGAIGLDFGVYNAIADSNGDVIEHPRFVKIAQSKINQIAKTSRRKKPPSRGVKASRRWRKANKTVAKIQSKVARQRQYLQHKVSTQIVSRNSLVATEKLNLKGMTRKSKGKNQRQKSGLNRSLLDVGIGNLKDLIKYKVTEAGGFYIEVPTTKVKPSQTCPNCGHQSKKTLAQRVHHCSQCGYQCDRDVAAAMVMLNDARGMERASTGADESTSTWCGSFKQVAQLKRQKLTPQRSRGE

SEQ ID NO: 44644 - protein, 403 aa, Streptomyces sp.
MIVEDVAVACAVAVLRSDVMKLVVQVKLLPTPEQAAALEATLRACNRAATHASAVAFAKGLKDRNGLQKQVYGDLKATFGLSAQPAVRAVKKVVDAYSALKANLKAGNLGPPTSKRHRRAVGAPIAFRPEAAQPFDDRCLSWQYDARTVSIWTVDGRLKAVRFACSPGQLKVLVAHRKGESDLIRRDGKWFLIATCELPDPPVYEPVDWIGVDRGIVNLATTSGGTNYQGRRLGRYRRWQARKRAELQAKRTRSATRRLARRACKEKRHATQVNHVISKEIVSVAQRTGRGIAVEELGGIRDRVRLRRDQRGTLSSWPFRQLGQHLAYKARMAGVPFLEVDAAYTSQRCPRCGHTGRANRPDRDHFRCRRCGLVGPADVVAGVNVRDRARSAWVFVTAPASVP

SEQ ID NO: 44645 - protein, 412 aa, unknown
  TnpB Polypeptide
MRSQKIRLKPTREQESLMRWYSKVSRNYWNLLVDIDKRNNQGEFDELLSKNGNETYYSKFYNKDVYKLSQTDYLNLAKVVVAKSSEVDNERWSWYYQPNQSFIYNFITRELVKIRRRNKGKLNFRNINKIQPSFNVCCCISSNKKRPSRIYLKENGKLQIPTIGEMSFGSVRADFDLSCKKQVATISFDGKYWYLSYTEDVKTQVTNLPEHTDGVGVDLGIKTLATFSDGTRAPNIKTFRRVRILEKRLKRLQRKVSRKYLINKCNKYNKTKNIIKLEKQIKLIHRSLRNIRINHIRKFVSVLVKKQPKYIAIEDLNVKGMMKNKHLAKDIINCSFYTIREQLIRKATERSIVVRLVDRFYPSSKNCSNCGSYKKDLKLSQRVYNCNHCQEKIDRDLNAALNIAKTDKYILA

SEQ ID NO: 44646 - protein, 372 aa, unknown
  TnpB Polypeptide
MVLCNIAFKFRVYPTKEQQILINKTFGCCRFVYNHFLAKRRDAWINNKQSINYTQTCAMLTKLKKDEQYKWLKDVDCTSLQNSLQHLDRAYKNFFEKRAKYPRFKLKKVRAQSYQTRNNSNSVCIIGNKIKLPKIGLLRAKIHRNVVGRILNATISRTATDKYFVSLCVEVDKSALMHPNAGGMIGIDVGLSVLYTDSNGRKVDNLRVFKRHARRLKLTQQRLARKKKGSKNYEKQRKKVVKVHEKIANTRKDYTHKQSAAIVHENQIIAIETLRIKNMVKNRKLAKAIYDSCWAELFRQLQYKAEFTDTRVLEVDPFYPSSQICSYCEHRNFNVKNLGIRMWTCPNCGAVHDRDINAAKNILRQALKKIVT

SEQ ID NO: 44647 - protein, 790 aa, unknown
  TnpB Polypeptide
VEGGAKNIMEGPLKRKRSRVHSNFIDGISNKMQRVLDIDSSNYTMVSPLHRDFDNGKNYTIYNERYTITKDHELYDLFVSCSVLSNELYNHLMLVERGRFLNNKTVYFHQDLKKYIYDRIKWRKDDNYAHYLTPQDHQLLWCFDRVPEDIRLGTVYDAADRWYKFMDEEYHMQKYYKEHGNEISYDLFTSMLPKLPRTKMGVNRRRSFTINPNKIVVSKNPHYVEKRNRKNYKNGSRRTIENYCSLIKLPGKMIPNTYKGKLNNFYIPTMQEHKRDIVEIRVTPNRGIFNVDIKYRIQQMTKKPTHNSYDCYGFDTNRIAGIDFGLDNLMAVANNVGAAPLLIKGKSLVAMNTYYNERIYHLLHNCGLGRYRHTKQTICLDQRRMNKMHNMMNNAVVKLISYLDLIQCKTLVLGINSSLYDGFLKEKDLVDRRPLDFNYLIRRIYRACKRSNINVVTVGESYTSITSILDNQLPTKENKEAYRRVTNRLYMTQNFGIINADVNSAMQMICKYKKDAFYKVFKKCGIDMIYTNNMSGAPILHKKGVYHTHIIKDHSPLEYESAYQYYRLKTEYDDPAGSAAYHMNIATSMLRHLPIKFYRWVLTSRYEWQLSKVPVHNNFIDQWLDLDVNYTTIIGPNNYHVSRYSYCRAMFMEYLIRSAKTRPLHKKYITTVFGTKVKSIVRQLQIDRQLKEVYPHYNIKESAAPMLRGKPGAGMLQPVSVEINDASIVSIIDKRHRICLPKSYIETSSSSSYALTSIDKMINSANCNRGIDKNTYKAFDPFVDKKRPVR

SEQ ID NO: 44648 - protein, 374 aa, unknown
  TnpB Polypeptide
MILARKLKLKPTPDQAKILLETIKQYEQAVNLPLKTGHKEHISNGVELHKLTYYKLRELTQLPSQLVCSARCKATESLKSIRSRTKGKFNTKEPRSKKFPTIRYDRNSCGITPSSVKLATINGRIEIPMLSHPLMKDEWDKAERTCELQYRKHKKDWYLIVFVNIEEPEASGDRVLGIDRGCQHVAVTSANEFYDSKHLRKVKGKYKYLRHRLQNKGTKSAKRLLKKISGKENRFVKDTNHCISKKIIAKPYDVFVLEKLEIKKAKKLGKKFNSILADWSYFQLEQFLTYKAKLAGKRIEHVDARYTSQKCSVCSHVERGNRQSQSHFCCRSCGFELNADLNAARNIRQNFHASLATSLTGRAISTVHTTQPSG

SEQ ID NO: 44649 - protein, 363 aa, unknown
  TnpB Polypeptide
MLKHKAYKFRIYPTQKQKVLLNKTFGCVRFVWNYNVECFNNNADNTLSVKDLRVEHSFLKEVSADALHQKARDFFEFKRQYFNKSRKKQLGRPTFKKKRLYNKYRLANKKFSLSATHIKIEKIGKIKVVVDRQIPESAKYLSVTISKKPCGHFYASVCVEEDILPKNKTHLKVGIDLGIKTFATQSDKVEIANPKFLVKSQNKLRRLQRIFSKKLKGSKRRERFRYKIARLHEKVSNQRLHFLHSYTTELVNKYDVLVIEDLSVEEMLKDKILSKSISDASWSLFRFLLTYKADWYGKELIVVDRYFASSKTCRCGYKNKDLKLDDREWVCPSCKARNKRDLLASINILEEGLRIKSVGVDAD

SEQ ID NO: 44650 - protein, 541 aa, unknown
  TnpB Polypeptide
MPKLASYFECQTHLAKNLRNSANFILRNLRTGLKKDPVDRTSNENEVIETVRIGIEMANEKLQKDVDRLTKQLQSLPVSDPARTKIQKRIENKQKNHPVMPTSDHWMLTYETLDAVMKNTKNPDYYAMPSQVNQQVLRKVLKDWKSHFELLASYRQNPGKFKAQPKQPGYIRTPYTTVTFTNQVAKRSDIKGKMHITFPRCLVPLCVGKPEGSYVRTEVKPCYGGYMVYVTFQDAVKIPEAPTNPTRILGLDPGLDNFLTALTNFSATPFIIDGHWLKSINQNFNRRRAALMSELTKGMDSTNSVKNSARLNRISKKRACRIDDFFYKAAHYIVDFCLKNKVEVIVCGHNKDQKQKINLGANNNQHFVSIPYTRFFWILTCVAAKAGIPVIETEESYTSKASLIDKDPIPVYKEGDRLEYHFSGKRISRGQYESKEGTILNADVNGAGNIIRKVYPNAFDGVTDFSYTNKTVIRVTREALCHAKHKKKHARPQRKRGMNRWLHHRRQEQKLVYFALFKVSSAKDKTKYIEELKQTAAKKTA

SEQ ID NO: 44651 - protein, 416 aa, Streptomyces sp.
MTEPVKRAFRYRFYPSDAQAAELMRTFGCVRTVYNLALQARTSAWYTERRRINYVQTSALLTAWKKTEEYAYLAEVSSVPLQQALRHLQGAFTNFFEKRSAYPRFKSRKKSRNSAEYTRSAFVYRDGRLTLAKMREPLDIAWSRPLPKGQVPSTVTVSRDSAGRWFVSMLCEDASVKALPTSRAAVGVDAGITSLVTLSTGEKVVNPKFEKKDRAKLARAQRELSRKKRGSRNHDKARTRVARIHARSADRRRDFLHKLSTRLVRENQTIVIEDLAVRNMLKNRALARAISDASWAELRFMLEYKARWYGRELIAVDRWYPSSKTCSACGHLVARMPLNIREWTCTACGAHHDRDENAAKNVLAAGLAVSACGAGVRPQRRISGRAAGVEAGNLRRSAGQRRGVGESPSAESGEAN

SEQ ID NO: 44652 - protein, 427 aa, unknown
  TnpB Polypeptide
VPCGARQGFVGTVWQAVSVRTAYRCRAYPDAVQQAMLNRTFGCVRVVWNCILAMRQQRYVTERTGMSYGQASAALTALKHDPGRAWLNEVSCVPLQQALRHQQRAFAAFYAKRARYPRFKSRQDRQAAEYTRSAFTLRNGQLRLAKTPGSLAFVWSWPGIDVAGLDPTTVVVSKEPDGRWYVTLAVDAQPPEHFPVVGRAVGVDLGVHDFAVTSEGDRVANPRHLERRARNLARYQRRLARCQKGSANRAKAKAKVARAHRKVRDARRDFLHRTTTRLVRDYDLIAIEDLAVSNMVRNRRLARAISDCGWGEFRRQLEYKCQRVGRQLVVIDRWYPSSKKCSACGYVLAELPLNVRTWRCPSCRVLHDRDLNAAKDILAAGLAATRGNPGDACGADVRHLETPPVRSAVKQEPQPVTAGTPVLQDGE

SEQ ID NO: 44653 - protein, 372 aa, unknown
  TnpB Polypeptide
MEYSYKFRIYPNIAQAQQIHRTFGCCRFVWNHYLAQRIEAYRETGKSPTRFTQDKDLTSLKKQEETIWLREVDATALQSSLRDLDTAYQNFFRRVKKGGKPGYPKFKSKRNHRQSYKSKCVGANIKVLEGSVQLPKLGKVKCRISKPVEGRVLSATVSQTPSGKYFVALCCTDVDMEPLPSTGAVVGIDMGLKAFAITSDGVEYPNHKYLSKSQKKLAKLQRQLSRKTKGSSRREKARLQLARLHEHVANQRQDMLHKLSTDLMRQYDLICIEDLAPKNMVKNHRLAKSISDASWGEFRRQLEYKSKWYGKQVVTIDRFFPSSQLCSVCGAQWPGTKDLSVREWFCSVCGTVHGRDINAAKNILNEGLRLLA

SEQ ID NO: 44654 - protein, 302 aa, Lactobacillus sp.
  misc_feature (30)..(33): Xaa can be any naturally occurring amino acid
MLPACWWLTIIWRWLIRTYSNIGVAIPGSXXXXSICLVEAKRRLKLPKIGSIRTSKTGRLANAKIKRYTISHESTGRYYISLQVEIEVHDLPKTNQQVGLDLGVSDLAIDSTGVKYGTFNAQWLKKQAQRWQAKFSRRRHQATVAMHQWNHHHKLSKMALNDYQNWQRAKMTKARYQTKIANQRKDYLHKLTTALVRKYDVIVIEDLKTKNLMRNHHLAKAIANASWYQFRTMLEYKCDWYGKRLVVVSANNTSRICSSCGHNGGAKPLAIREWTCHQCQTHHDRDINAAVNILKRGLKATG

SEQ ID NO: 44655 - protein, 412 aa, Paracandidimonas sp.
MQRLQAFKYELMPNGEQQSNMRRFAGACRFVFNKALALQKANHEAGEKYIGYVAMAKHLTAWRNGSETPWLKDAPVHPLQHALKDLERAYKNFFAKRAAFPRFKKKGRHDSFRYPDAKQFKLDAGNGRIFLPKLGWMRLRLSRDVLGTPRNATVSQSGGKWFVSIQTEREVEQPEPQATSAIGIDMGVARFATFSDGSFLAPLASFKKHEIRLRRYQRAMSRKTKFSSNWTKAKARVQHLHTRIANCRKDYLHKATTTISQNHAIVCIEDLQVRNMSKSAAGTADAPGKNVRAKSGLNKAILDQGWFEFRRQLEYKLAWTGGILIAVAPQNTSRTCSSCGHVSKDNRKTQAQFLCVACGHEENADVVGAINVLARGHRVLACGEDVSHARPARAKHAASVKQEPAEVSQAQA

SEQ ID NO: 44656 - protein, 271 aa, unknown
  TnpB Polypeptide
MRTLLKNFKTEINPTEEQKVKIRKTIGTCRYIYNFYLAHNKELHDNGEKFMSGKSFSVWLNNEYLPQNPDKLWIKEVSSKSVKHSIENGCVAFTRFFKHQSAFPNFKKKGRSDVKMYFVKNNPKDCRCERHRINIPSLGWVRMKEKGYFPTTKDGYVIKSGHVSIKADRYYVSVLIEIPNNKIANNSNKGIGIDLGLKDFAIVSNGKTYKNINRSTRIKKLEKQLIREQRSLSRKYENLKKGESTQRANIQKQSLRYKNFIIKWIISVQIT

SEQ ID NO: 44657 - protein, 374 aa, unknown
  TnpB Polypeptide
MEYSYRFRIYPNDEQRSLISRTFGCARFVYNHFLNLRKEAYEVSGEAINYVKSSAMLTQLKKDLAWLKEVDSIPLQESLRDLDFAYQNFFRRVKSGEKPGYPRFKSKHDRRKSYKTKQHISNGKPTIWVDAGHIRLPKLGLVKCRISKEVKGRILSATVSQNLSGKYFVALCCTDVEVDPLPSTGAVVGLDMGLKSFAITSDGVEYPNHKFLTKSQKKLARLQRQLSRKSKGSIRREKARVQVARLHEHIANQRQDMLHKLSTDLIRQYDVVCIEDLAPKNMVKNHKLARSISDASWGEFRRQLEYKAAWYGKHVVTVDRFFPSSQLCSACGAQWSGTKDLSIREWTCPECGTVHDRDHNAAKNILNEGLRLLA

SEQ ID NO: 44658 - protein, 432 aa, unknown
  TnpB Polypeptide
MRPRKGRCRIEVTKANIAYKFELMPTREQKRIFAQAAGWRRFVWNKAVELQKRCLEQEVPFLKYTELAGRLVLWKKEDDMLWLLEAPSQALQQCLMDASAAIQAFKAKKKGFPKFQARGDGDSFRIPQVRPTDWDEANGRVRIPKAGFVRFRKSRPIQGKIKQMTVSVECGHWFVSVVTEMDFANDGPRRPGEVGIDLGIAQTVTLSDRTVFQLDVESIKKHEKQIAVLQRQLCRNKEARQKLAKLGKANPFDKREPSRKRRRLKAKIQNHHRCIRNIRRDFMLKTAHTIAQNYGGVAMEDLKLKNMTKSAKGTVEEPGKNVRQKTGLNRSLARVAPYAMRMAIHWAVFKSNGRLILVDPKYTSQTCPICGCTSSSNRPSQAHFGCQKCGYTANADVVGATNVLKKSRTGSVRPCSELGNKTATGTVLFVAS

SEQ ID NO: 44659 - protein, 367 aa, unknown
  TnpB Polypeptide
MLKAYKYRIYPNDEQKVQIAKTFGCCRFVYNQTLSYRKESYEQDKKSVSKTDCNNYCNRKLKKDYEWLKEVDKFALTNAIYNMDAAYQKFFREHAGYPKFKSKHDSHKSYTTNFTNGNIAVDFEGGKIKLPKLKAVKAKLHRNFSGQIKSVTVSQVPSGKYYVSILVETEHMELPHTNQNTGIDLGIKDLCITSDGKKYENPKIIKKYEKKLIKLQRQLTHKEKRSQNYCKTRKKIALCHEKITNTRKDYLHKISHEIISENQVIVSENLQIKNMVKNHHMAKSISDVSWHELTRQLEYKSKWNGREYVKIDTFYASSQICSVCRYQNTETRDLSIREWLCPVCGTKHDRDINAAKNILAEGLRQIA

SEQ ID NO: 44660 - protein, 421 aa, Geminocystis sp.
MFKTQKNQIRGLSQTEYLALQELCRLSKNLYNVGLYSVRQFFFAEKAFLRYESNYHQCKTNENYQLLNTDIAQQTLKVVDRSFRSFFNLIKKAKSGNYQFNQISLPRYLKKDGYFSLIIPRIKVKDGFFKVPMSREFKAKYGEVKLPFPDRLVDKSLKEVRIHPKYNCHFFEVEFITEEELQIVEFKSDNALCIDLGLNNLATCVSTNGASFIIDGHKLKSYNHWYNKSNAKLQSIKDKQGTKGVTKRQGRLLLKRNNQIRDYLSKTARYIIENCLRLDIGTLIVGTNKGWKQDINIGKRNNQNFVQIPFYSLKEKLKSLCETYGIQYIEQEESYTSKASALDNDYIPNYNPDNTAKYKYTFSGKRVKRGLYESKDGIRVNADANAAWNIGRKSKHKGFSQVCKGLLTSPLRISDLNVSLS

SEQ ID NO: 44661 - protein, 388 aa, Geminocystis sp.
MEVTRTIKLKFKNLNKCKADIFVEMTAESTRVANELLAIPYMERRNMTTAKVVSSLKSALLNQVIRHTCSATGRKAKHYNVLPPEINKQNWKLMKVGDTFSLSFPTVQGEKRVPVEVASRHWQYILDGILLGEISYGSFKLICHKNKWYAYVSITEDVPEVKAQKRLGVDRGQNQIAVVAGSKGFGKFYSGREVKHRRRYFQKRREELQKAKKFRALKKWNKKERRWMEAINHTVSCRIVRFAEYHQADVVIEDLESCRKTMKQRKKDRSNMGQSRHSWAFYSLEQKLDYKLSLKGLRMLKRPAPYTSKSCSKCGVLGNRKGHHFNCPNGHYSNSDLNASRNLAQYDGFSCQLDLKKADSVIDSVGLVDAVLGNPPNSMKQLPFGVNV

SEQ ID NO: 44662 - protein, 418 aa, unknown
  TnpB Polypeptide
MKRLQAFRFELKPNGEQERKMHRFAGAARFVFNRALAVQNEERQKTGRKQSGYGALCRMLTMWRNDSETAWLRESPVHTTQQALRNLEAAWSRHFDSLKKLKQGEIKADEVIEPPKFKKKHKSRESFRYPDPGQFRVEQGNNRLFLPKLGWIGYRNSRKIEGEIANITVLRDGPKWYVSIQTAREVEKPVHRSSFVVGIDLGVVRFATLSSGEVIQPLNSLKEKQVRLKRYQRMMARRVKGSRSWHKAKARVNCAHRKIANARNDFLHKTTTAISKSHAIAVIEELEVRKMSRSAAGTKENPGRNVRQKSGLNRAILDQAWSEFRRKLEYKQHWRGGRVVLVSAQRTSQQCPRCHHTSPYNRQTQALFSCVGCGYTHNADDVASINILSRGSELLRDEGRTWRTLAPGGKPQPGSPVK

SEQ ID NO: 44663 - protein, 383 aa, Planomonospora sp.
VQLRYNFRLYPKPGQRAALARAFGCARTVYNDGLRARQDARAQGLPYVSDTELSKRVITQAKQTSERSWLSEVSAVVLQQALADLNTAYRNFFASLSGKRKGPKVTPPRFRSKRDNRQAIRFTRNARFSITAGGKLRLPKIGDMDVRWSRDLPSAPSTVTVIKDAAGRYFASFVVETSDEPLPETASEVGIDLGLTHFAVLSDGRKIDNPRFLRRAERRLKKAQQALSRTAKGSNHRKKAVVKVAKAHARVADARRDFAHQLSATLIRENQAVVVEDLAVKGLARTKLAKSVHDAGWSQFVAMLTYKAARYGRTLIRIDRWFPSSKMCSVCGALAASMPLNVREWECACGAVHDRDVNAAINILAAGRAERLNACGGTVRPAA

SEQ ID NO: 44664 - protein, 368 aa, Planomonospora sp.
MAQIVKRAYRYRFHPTPEQASELARTFGCARYVYNKALAMRSRAYTAEGRRVSYVESSAMLTAWKREQGLEFLSEVSSVPLQQALRHLQAAFANFFAKRAKYPTFKSRKKSRASAEYTRSAFRWRDGTLTLAKMDAPLDIVWSRPLPEGAQPSMVTVSRDSAGRWFVSLLVEESIRPLDPVDAAVGLDAGITSLLTLSTGEKITNPRHERADRRRLAKAQRNLARKATGSANRAKAKRKVARVYARITDRRRDFLHQLTTRLVRENQVIAVEDLTVRNLVKNHALARAVSDASWRELRAMLEYKTVWYGRELIVIDRWFPSSKLCSSCGALQGTMPLDVRSWECACGAVHDRDVNAAKNVLAAGLAER

SEQ ID NO: 44665 - protein, 371 aa, unknown
  TnpB Polypeptide
MSALQTTVPVRLYPTAEQAAILRAHCQEYISTINVLVQALDSDVLPDGGKDTSTANFTASLPSAVKNQALRDARAVWKRSLALEVLPVLRKPICQWNNQNWRLEGDTLVLPVCQDGKVQQITVRCAPVTPRDTPGVLRVKRKRHRWIAEIAYTLPTPEPSTEPGVIGVDLGIKIPAVVHVLGKGTRYLGNGRYQRRMRRRFYAGRKQLQKAGKVRAIRKSRGKERRWMRDINHKLSRQIVTHAQQQGVGVIRLEELAGIRPRISQRTARTSRGAKRSHAARKNNRMKHTWSFFQLTQFITYKAERLGIRVEQVNPAYTSQTCPACFARNKAQDRRYVCTECGWRGHRDAVGAINIARTTGQLGNRAGAAVA

SEQ ID NO: 44666 - protein, 427 aa, Escherichia sp.
MHQENTMLPRRISVSLFIDQSIIWPVKRLQAFKFQLRPGGQQEREMRRFAGACRFVFNRALALQNENHEAGNKYIPYGKMASWLVEWKNATETQWLKDSPSQPLQQSLKGLERAYKNFFQKRAAFPRFKKRGQNDAFRYPQGVKLDQENSRIFLPKLGWMRYRNRRQVTGVVKNVTVSQSCGKWYISIQTESEVSTPVHPSASMVGLDAGVAKLATLSDGTVFEPVNSFQKNQKTLARLQRQLSRRVKFSNNWQKQKRKIQRLHSRIANIRRDYLHKVTTTVSKNHAMIVIEDLKVSNMSKSAAGTVSQPGRNVRAKSGLNRSILDQGWYEMRRQLEYKQLWRGGQVLAVPPAYTSQRCACCGHTAKENRLSQSKFRCQVCGYTANADVNGARNILAAGHAVLACGEMVQSGRSLKQEPTEMIQATA

SEQ ID NO: 44667 - protein, 442 aa, unknown
  TnpB Polypeptide
MTKSMSCTAAIKLGLNINKQKKQQIEDHFSQFLDFQNKVSQKIHQLLKDGSISSIENFSIIYLGEKVTDSKVRELDWMQQILSDVGIDKNKVNKSALRSLYWEVFRRYTSYIQRNKQLSVNKNLPAKPIDIRPKAINLKEKLVKVYDSLDKISFLSIEKKGPDLDVQIDISKSFTNNHKFLDFNKKGEKITGGIFNFRKSELVITVDKTIEVQKPENMIGFDINQSGKNFLVFSDKVNGENFFPKPETVSKMEKTLKQINKAIKDKSSNINSAKRRKLRLIWKKQHKKLEREIAKFLIPILESIDFSKTGLAIDTVATGATAGSYGQDKVISLCTDYCKKNKIFYYLIPTPYTSQRCSSCGKIDKTQRNKEKYKCTCGHQGHADFNAAKNIKEFGEHLVSIDHPLFASMNKNHKISTLKVLKEKYNFNRNPLVESPISFVVG

SEQ ID NO: 44668 - protein, 216 aa, Okeania sp.
MKARYKYRIYPNNIQKTALAKLFGCARTVWNDSLGYCNELYRQGEKKPSNGELQKQFITQSKNTKHREWLSEVSNIPLEQSLNDLHQAYQNFFNSCEGKRKGKAVKPPRLKTKKSRQSARFREGGFKIEPHKVYLAKVGKIKIIWSKKLPTEPSSVTVIKDSANRYFLSFVVEINSETLAKTDNLVGIDLSIKTFATFSNGKKVEVPKPLKKKINK

SEQ ID NO: 44669 - protein, 356 aa, Okeania sp.
MQSIKTKLKVNNYQKTILAKHAGVARHAYNWGLATCITEYKSTKKRPSAVTLHKRLVAQVKSQNPWYYEVSKCAPQQALRDLERAFKNFLSIPQSGFPKFKKKGKKDSFYLEGSIQILQGNYIKLPRIGIVKTYEILPSVRIKNVTISKRAGDWYISFKYDLEPENSTPKQRDVIGVDVGISALATCSDGTVFASVKPYKQAKKRLTCYQRRVKKKEPGSKNRSKAVKKLAKAHKKVADIRADTLHKLTTWLAKNHSTIVIEDLNVSGMLKNHKLASAIADCGFYEFKRQLTYKCEWYGSKLVIADRFYPSSQLCSHCGHRQKMPLHKRTYECSNCGFTADRDFNAALNLENYVHQ

SEQ ID NO: 44670 - protein, 398 aa, Kribbella sp.
MSRFRMYPTPAQQSALLQQCGHARYVWNLALEQWSMWTRDKRPTPRYVEQARQLTEARAAFDWLRAGSQTVQQQALRDFDEAVRYFLAGSHRRPTWRKAGLHEGFRIVGAQASRIVKLSRKWAAVNVSKVGWVRFRLSRAVPEAKSYRITRDGVGRWHLAFAVIPPPIPAPGTGEVVGVDRGVTVSAALSTGELLSCPGLSVTEQVRLKHLQRRLSRCRRGSSRRRRVKAAIAKLYARAGDRRKDWVEKTSTDLARRFDVIRVEDLRIAQMTKRPRPKPDPERPGRHLPNRRRAKAGLNRGILANGWGDLVTRLEHKAAGRVEKVNPAYTSQTCNVCGHCTPDNRKSQAVFRCAACGHQANADVNAAVNIAAGRAVSARRETPVQVSLKREPQLTTST

SEQ ID NO: 44671 - protein, 367 aa, unknown
  TnpB Polypeptide
MAKVFRYRLKPTKAQIAKLNEQLELCRWVYNETLAMRKNAFEQEERSVSYFESKRMLPFWKESKPELSTVHSQVLQDVVLRVNLAFRAFFRRVQSGEDPGYPRFKGKNRYDSISYPQSGFSIDGNKLWLSKIGEVKFWMHRPIEGFVKRLTIRRSATKKWYVSFLVEESVNHILEPSERVIGIDMGITNFAVLSNGEFIENPRFLLTDEERLKAVQSKRDKLPKGSPERRKASKAVGHLYERVANRRENFAQQLSRKIVNTYGIICFEDLNITKMVKNHNLAKNILDVAWNKSVQYTIYKAVEAGRKVVLVNPANTSQMCSGCGQIVKKDLSDRVHDCPYCGLTLDRDLNAAKNILRLGLQSVPING

SEQ ID NO: 44672 - protein, 434 aa, unknown
  TnpB Polypeptide
MAHRYRLTPASDQEVVLREHCAHARFVWNLAFELSQWGTLETYGEATRRKRADGTEYARQKRRPVRPRPGFAAQCRMLTEARAEYEWLREGSRSVQDQALRDFDRAMSAFYDPGNPAQHPAPRTKRGGQGFVIRDTSARRVSRNVGEIHVPKCGWVRFRWSRDLPAELGMGRVTLDAAGRWHVSFPALQSPVDRASAGATAGIDRGVATALVTSDGQHFRAPRISDRDAERYLALQQRFSRQARGSKRREQTRLKMARITARVTDRRKDWAEKASTRLVRDHDLIVFEKLSTPNMIRKPKPKPDPEQPGRFLPNRRRQKAGLSKGILASAWGVLAGRTQEKAEASGVPVVYVDPRFTSQQCHACGHTEKGNRDSQAVFTCLKCGHYDHADTNAARNILARGLAAQAVPAHARGQRAPRPRKTRQLAAGTTRSAG

SEQ ID NO: 44673 - protein, 397 aa, Anoxybacillus sp.
MGRNAFFIYFSLKKYKIKLVKGGEDMKLTLTAKIKILPTSEQEQLLQKTMQAYRDACNAVSEVIYKENTLVQAKLHKMTYRKLRSTFGLKSQMAQSVLKTVIAKYKTNQTNEHKRCQIAFKKPQIDLVFNRDYSLTKGLFSINTLEGRIKVPFQTKELETYFDGTWTFGTAKLVNKHQKWFLHIPVSKEMEEANLHHICQVVGVDMGVNFLATVYDSNGQTLFFKGRHIKHKRAKYKQLRRQLQKKQTPSARRRLKKIGQRENRWMQDVNHCISKALVERYGKNTLFVLEDLTGVRQRTEKVSVNHRYEMVSWAFYDLRQKIEYKAHKHRAKVIVVDPTYTSQTCPKCGHTEKANRNKKTHTFCCRTCGYTSNDDRVGAMNLQRKGIEYIVEGTTQA

SEQ ID NO: 44674 - protein, 479 aa, Caminicella sp.
MSKSIAENKNIRTYKMRIKDKKFKSKVIDYIYKYRHFENMYIILLNQDYKQNIGDFRLLTDYEIMRALFRRTTPKKLEEKLTYIRNKYKNHQIMNDLIKLSKDLKIHNLVEIMKRVKSEYKGYFTKIKNGDYKARPPKPKKLSKLTNYTIPLDSYKGFSLKRKNQIGINLNNKMIRTYINHKELEKVVGSLKKIKAVHLNFSNNELYLLFIYEKEEKEIKEKPYKSAGIDIGINNLLSIYVDDKETPSLIIDGKKYKTYNANFNRFIGKLNKEISTTKDKNRKRYLEKYRTYLYEKRNRYFCDQFHKISKRVLEYLEKYNVTEIILSNNLNNLKNNGKCKLNKAVKQNFIQIPFGKLLRYIEYKAKDYGIKVKFVDESYTSKVSSLTEDIKVIQKFLQYNLDLTNALGGKRVKRGLFKDEVINIIINADLNGARNICLLGNKKAQQNYKIGGGNRWLNVKLCNPIKVESDFELCRLIAS

SEQ ID NO: 44675 - protein, 415 aa, Mastigocoleus sp.
MIRAAPSSAAQMRRQAVKVRLYPTEQQVQILAQHFGCARWWWNYGLNKCIETYKETGKGLSQSGLNSMLPKLKKEKETIWLSECYSQVLQSVSLNLSRAYQNFFDGRAKYPRFKSRHHRQSIQYPANVKQIGNDLKFPGKVGVVKAKIHRELDGKIKTVTVSKSPSGKYYASVLLEHDDDNLAPSTDGKVIGIDLGIKDFAITNDGEKTSKYANPKHLAKYENKLAKKQRIAARKKKGSNRRKKAMKTVARVYERVSNVRQDFLHKLSRKIVDNNQVVVVENLNVKGMVRNHKLAKAISDTGWGTFVNFLEYKCEKEGKVLLEINRWFPSSKTCSNCHYQIKELPLDVRTWICPSCGTHHDRDGNAAKNIRAEGIRMLSSSGTGEEEAANGEGVRPKRGRKSKLRHSSVKLEAHT

SEQ ID NO: 44676 - protein, 450 aa, unknown
  TnpB Polypeptide
MQIFTSYKVKIIRSEKEFSDTAVVYQSALRYLLDIVTQEWSILKDIKADSEKGVSANQMRLRTLERLIHKTAKTPFPKYPFDEKFYKLPSYLRRAAIMEAIGMYSSFQSNLANWEQENPKKRGRKPHFPTVGRSFPALYKENMFIPSDGYVAKIKVFIHNTWDWMTVQLRKSDVDYITSHCKNRKMSSPTLRQRGKNWYLDFSFEERTELKKTKLKDTIVLGVDLGLNSACVCSAMTIDGTVIGRKFLDLPVEKDRLSHILGQIRKSQRLGGQKNTARWAKADGINKHMAQQTAKFIVDTAEKFGANVIVFEHLNFQGEKRFGRYAQKMALWKANEIQRIAADKAHRLGMHISHICARNTSKLAFDGSGEVRRDKKNYSICKFQTGKQYNCDLSASYNIGARYFIRALLKPLSKKARLAMEAKVPSCAKRITCTLSTLISLRAAMAPVMC

SEQ ID NO: 44677 - protein, 377 aa, Pontibacter sp.
MLRSYKYAMLPTPEQQEQLQRFFGSCRFVYNLGLETKIAAWLQARKNLSCIDLVNQLKELKDTDASWLTECPSQTLQMSLRNLDKAYSSFFKGGGFPRFKNRYSKQSIQFPQGVRVDFEHNTVFLPKLKNVSAVLHRKFEGQIKTVTVSKTNTGRYFVSILVENQASMPAKKPVNEETTVGVDMGVRSFATLSAGSSFENIRTLRTNLKRLRTEQRTLSRRFRKGVKAQSSNYHKQKLVVARLHERIANQREDYLHKVSTQLIKQYDTVVLEDLNIAGMMKNRKLALAIGEVGWHKFETMLNYKAEWYGKNIKYIGRFEPSSKLCSACGAIQQELKLHHREWTCVKCATTHDRDVNAAINIKAFGLRNQPASVNVSQ

SEQ ID NO: 44678 - protein, 425 aa, Methylacidiphilum sp.
MLIRQAFKYELMPGGQQQRQMRRFAGSCRFVYNKALALQKERHERGEKKLGYAGLCKLLTEWRHSVETQWLAEAPLHPLQQTLKDLERAYANFFAKRADFPRFKKKGRSDSFRYPDPKQIKLEQHNSRIFFLPKLGWLRYRNSREVLGALKNVTVSQSGGKWFISIQTEREVEQPIPQGGAVGIDMGVARFATLSDGTFYAPLHCFKRHETALRKAQQSLSRKVRFSNNWRKAKARVGRIHARIGNARRDFLHKTSTAISKNHAVVFVEDLQVRNMSGSAAGTPEAPGRNVRAMSGLNKSILDQGWFEFGRQLDYKLAWRGGRLIAVPPQNTSRACPCCGHVSADNRQTQAWFACVECGFEDNADVVGAINVLRAGHARMACGSNRSGGRKQEPPKRLRKEQSVRSAVGISGLQAGEDVKLCISI

SEQ ID NO: 44679 - protein, 419 aa, unknown
  TnpB Polypeptide
MGTSVAVDRIRLGQRALLPTDMPLGIINNNYNTSFINFTVVVSMVCRMKLTQTFKLMKSNRRKRELLDMTIERFKECVNAWLFEIRQLGEYPTRKNVHSFAYKRVREQFKDLHSDVVQEAMNRAIETYRAWLKTKGQKPTFTADVVSFKNINVKIDRHLINVPLINKERVWLPMYIPKKLRKFLKMKHGRVQISKIGNEYYAQVSFEVLEPESYEPRGWLGVDIGINHIVVISDANGKINKFYDGAIAWKKSIEYRRARLQFLKDKGIKKGAWRALKRLSHKEKNKMSYINHKIAKEIIELAKHYRYGIAIENLKGIRHHYNAKRHRKRLHKWAYRDLIDKIVYKAKLNGVPIVFVDPRNTSRTCSKCEYLVEKGVKGRWFECPKCGFQLDRDLNAARNIAKRAFLLAMNGEASSPQRR

SEQ ID NO: 44680 - protein, 552 aa, unknown
  TnpB Polypeptide
MKRRASRPTKTYRFRLGYRPKADVWFGETQELFNRVAAFYFDVIEVHPGVLELADDKEALTALERLTHATAQNSQPVMPLAEAIPEPIPAMFRRAAIHAALGSARSFHSNLERWRKQKAKAEEKARAKGKPSKFHARPPIPPRRWNKSTVLYDGMWDEFDGHAVLLKVWTGDSWTRVKFQVSGRPVPAGWKLGSPQIVRQGGQWHLHIPTTCNGFKFPAKVEKQLADKKRTRICAVDLNINDSLAVCTIHSADGAVVATRFIRGGRELQHRRKRALGRVARKRSQTGVIREYQSDNAKLFRYVRAIDNDTAHRVSRRIVKFAREYGASVIVFEHLGHFRPEKGKYSKRGNEKRSYWLRGKIYRYTQYKAWEHRIITSRVNPRNTSRECACCHTLVARYGAGEAPIEFRPGAPLFLCPACLKRGNADRNASVNIGHRFIERYSTHLEKPQAVSAPPKGGAEQCSKEQGVSVSHGTSGERYGAQRTRKQGKPVKQARPSSEGADDRVGTAQEKREGPRPSRRIPRSLRPQRSGGYAANTPSAAYAGVPEEAAGL

SEQ ID NO: 44681 - protein, 427 aa, Natronomonas sp.
MDYVLKYRLFPDGQQRERLDWVRDTVRQVYNHALHRFNRIPEDAGTVKQRVTQVRDELPELKDWWTDLNNVYSTVLQQAVEQIETNITNLAKRRDAGYDVGSLNWKAPHEYRSFTYRQTGFELDDNSGPSGRGLLTLKKVNGETLQVPIRLHRDLLDETDVKHVTIKKDRTGAWFACLNVEQAEPDKPDPAELDTKDTVGLDLGILNFIHDSDRRQLGRLNLSSDRERLEHEQRNLSRKQHGSNNWEEQRQMVAKVHKRMRNKKSDFKHKVAAFYTTEYDAVFVENLNVKGMLESGRNSRNTHEIGWRDFITILKHHGRKRGCHVVEVDPKDTTKACNECGVKTDKPLWVREHSCPSCGYTTDRDYNAALNVWERGLEKLGVVHSEDRTPAETATAVEQTHRESVSASRVVETGSPCLKEATQSVAE

SEQ ID NO: 44682 - protein, 381 aa, Azotobacter sp.
MTKRAYKYRFYPTPEQAELLARTFGCVRSVYNRILRWRTDAFFKEQQKVGYTQASARLTAIKKLPELAFLNEVSSVPLQQCLRHQQAAFKNFFEGRAKYPAFKKKRHRQSAEFTSSAFRYRDGKLFLARCDEPLAIRWSRPLPGEPSTVTVSRDSAGRYFVSCLCEFEPETLPVVPKTLGIDLGLKDLFVTSEGERFGNPRHTAKYASRLALAQRRLSRKQLGSKNRARARRKVARIHAKISDCRADGLHKLSRRLINENQVVCAETLAVKNMIRNPQLSKAIADAGWGEFVRQLEYKGGWAGRQIVQIDRWYPSSKRCSCCGHTLERLPLDVRRWSCPECGTEHDRDVNAAINIKAAGLAVLALGENVSGMGQVSVSCSR

SEQ ID NO: 44683 - protein, 486 aa, unknown
  TnpB Polypeptide
MKAPQRSRFLFLHPDANAGKIAALEALQGVYTTYLQVCVAMMIAAHRFTIPLSQRERQAFFPKCNTLTSQIVKNCRAHAVQIVSAWAASKYTNTLKKKFWCLWQGGWIDDVSYVAFCAIGKHSIDTPTPLLSAENIELYWRMFLLNPDFAGKTPTISDRCGMRMSEMTATFAKSIDVKLTQWWIGFSHLQAGKRHIDLPLVATPYIQDVKDASKGVLARKDKQGRWRFEVCDTKKWEIPMPAPNKTLGCDVGFNTWGALSNGHLFGTDLKARFLALYEVIKRIRANRQRQGLRRNSKRLECLESRLTGLVKGMVGQITNTMLRLYPDYLFVFEDLNLSGCKGAMRFAYRALYHSAARKMPTAIVNPAYTSQECPSCGYVSKNNRNGIKFRCRSCGRKSHADVVGGINLLRRSEDKQIGLDDDPPTVKRILQERYLLRRNAANKDSSARTCKNAPVPSGPDLTVDVPISGVRIELNQGRSGQLVLFG

SEQ ID NO: 44684 - protein, 246 aa, Salmonella sp.
SGLDVRWSRELPSAPSTVTISKDAAGRYFVSCHCEFEPVSLPITAKTVGIDVGLKDLFVTDTGFKTGNPRHTAKYAKRLALQQRRLSRKKKGSKNRAKARLKVARLHAKIADCRMDNLHKLSRKLINENQVVCVESLKVKNMIRNPKLSKAIADAGWSELVRQLQYKGEWAGRSVVAIDQYFPSSKRCSCCGFTIQKMPLDVRKWQCPECGAAHDRDINAARNIKAAGLAVLAHGEPVNPESHHAA

SEQ ID NO: 44685 - protein, 331 aa, unknown
  TnpB Polypeptide
MYDVSKCVAESALRDLEKAFVNFWRSSKNGIKIRFPKFKKKGRNDRFRLYGSIRVIEKAVQLPRIGSVRLKELPQIHGRILSATISRKADRWFVSLCVEQEIPSPPQITGERIGVDLGVRSLATLSNGRKIENPQALLRKLRKLRRYSRKVSKKKRGSKNHTKAIIRLARLHWRISNIRKDALHKTTTYLAKNHSQIIIENLGIKGMMKEQKISRAITDMGWGEFRRQLTYKTKWYGSELILTPRFFPSSKRCSNCGHTKKKFSLSAQLFKCKACGLHIDRDLNAANNLVAASWAETQNACHEMGGYRPPYGQCPSMKQEPNTSKADLPAG

SEQ ID NO: 44686 - protein, 152 aa, Beggiatoa sp.
METTPVKKSKNQALVVGVDLGIKKLATLSNGETVAGRKPLKKLSRRLARLQRHLAKCTKGSKRYNRQKMKITRLHYRIRCIRQDGLHKLTHHLCQDFKVICLEDLNVKGMMKNHKLALAISDMGFYEFKRQLEYKATLFIIVMNVVFPFVVI

SEQ ID NO: 44687 - protein, 461 aa, Acidimicrobiia sp.
VAFKFRLYPSPEAARLLERYAAAERAIYNRVVEYQYELRALQQRRRRHGGRMGLPRAEFDYSDINAWAKAEAPWLVGIPGSVRSQAERIAYRALVDSLRLQGRRQARFRRRGGGTDGFSWQAATASGEVRKINKRWHEVRLPRARCAPVVWCRVRVDTGREPPAAAYRAGKVLRITRDAAGTWWLTMTAPAVPERAAPAGSSCGLDLGVIHTLTLADHTGRVLHLKMLRPLSDAEARRLVDLQRSQSRSRLANPCEQPPCPHTSGSCWRTSRRYQRRRVEIAVLRLTKKKKNQDWIENVTTRIADPYHHVGVEDLSVRALTASAAGTVAAPGRNVAAKRSLNRGIREQRWATILRRLDDKVTARGGQLMRVRAANTSRRCHRCGHTAAANRTTRALFCCVACGHRDGADANAAQNIHDLALQGHPPARGGTATAPTGATPAETDAEARPEAADDASIAPAA

SEQ ID NO: 44688 - protein, 462 aa, unknown
  TnpB Polypeptide
MDLLFSPMIERDIIYCCYYLLLLGLVRFPIQLLCALCPPHSSVAATISTRHRPHNVRWSIGVAETPVFRPERSVPHSQYQSMIIYPLNDIFNSMLQTLMVRLGPTPAQHKMLCDTMKRFNEACNDIANTVFFMHSANKVEVHKTVYYPIRERYGLSSQLAIRAISKTCEAYKRDKSIKPEFRPDGAIVYDQRILTWKGLEYVSLITLEGRQLIPVRLGDYQKVRLDRIRGQADLIINKGVFYLCVVVEVPKASPYDPVDVLGVDLGVKNLAVDSDGEIHSSECIRESRHRSDSLKGRLQSVGTKSAKKHLKKLSGRLARFAKDVNHQISKNLITKAKVTSSLISLEDLEGVSKRTTVRKSQRRDHHSWSFNQLRQFVAYKAAVAGVPLVLINPAYTSQECPICHCISGSNRPKRDDFCCICCGFSGPADNVAATNIAARVAVNLPIVSRFFAEAQALAFRPE

SEQ ID NO: 44689 - protein, 587 aa, unknown
  TnpB Polypeptide
MPQDICLQLKLPLNTVSAPLVSEIGLTMIKLKLRELRVVKDFTTSPMSENVSEDLIINKQVPQSHILVSPLNTKNKIFKGKLNISKKNTNMKKSSQILVQDSITIEKVSKNCYPKWNLEMSKKLWLPTKIDCVDMELNSLKESSERIIRHSWFSVTKLVAKNQNLEQIYSTSATSSSLKEMKENQLNLEMKENQCLQKPLLSVRIHLYRLNIDKELQKIYKNTFDVCRKVYNLCVDWHRQNPQEIPKLKILRSLFINSDSIYNDIFKEVPYEMKDGAIRDFITALKTSKILVKSKKVKFFEMKYRIKKRNQSLNIPHKFINYQKDKITNKLICYAFPTFFGKKSLNSKKIIKKPKHDCRLLWKDDYYYLAVPVEKKIKEKKKKNIQCSIDPGERNFNTLYGTDKEAFLVGKSFKIDKLSLTASNLRNGIDKYGNKINKRKKRKNVIKIAGNMERKAKNLIKDIHHKLCKFITSKYSNVIIPEFKTQEMVKKKEGKIRKIGNGTARRLLRWSHYKFRQLLIAKGEINNCKINVESEEWTSKTCGNCFNVKENLGGAKQYKCLNCKVKIDRDLNGARNIMILNYKKMDI

SEQ ID NO: 44690 - protein, 446 aa, unknown
  TnpB Polypeptide
VFGLLRSAGDVWCCVLELNGWRRRRQAAPLAGYQELCRELAVSGPGTFGELGSAGARSVLRRYSDAWFAAAMRRKGGDGSVRYPRRRRGLVPVRWYAGTFALQGRVLKIPVAKGCPALLVRLDRDLPYPPGQVRSVTLGFDAGRLYLDVTAEVPVAAYPPGRGPDPGRAAGVDLGIIHPYAVAGPGGRGLLVSGRAIRAECRQHLRDGKGRSRAAARRAPRPGQRGSRRWRQHRRRVRATQARHLRRVRQAQHEAARALISWAVEHRIGTLTVGDPRGVLAGKAGRRHNQRVRDWRIGHLIRALADKAETAGITITLVDERGTSSTCPKCSRRVPKPAGRVFSCPHCGQGGHRDLVAAASIAARTGGGIIPAIPSGAGITHRRAGTHLPGVHPARRDPRRGPPSRPAAPGHLAGTGPPPTPPGTRGVARPKARNTQAPDNPSKTYE

SEQ ID NO: 44691 - protein, 446 aa, unknown; identical to SEQ ID NO: 44690
  TnpB Polypeptide

SEQ ID NO: 44692 - protein, 373 aa, unknown
  TnpB Polypeptide
MIVRKSFQFRLRLTKKQDRTLRGILGECRWLYNELLEQRKLAYEELDISLSKYQQTMFLPLLKEERPSLAQVHSQVLQNIVDRLDKAFQAFFRRCKAGEKPGFPRFRGVHRYNSFCYPQSGFSLIGNELKLSKLGTIRVKMHRPLEGEVKTCTLRRTASGDWNVIFSCEVHVEPRAPKEEAVGVDVGLEHFATFSNGQQITNPRFFKNGEKVLAKAQRKLAKLKKGTPKRRKQGRVVAKVHERISNQRKDFCHKESKKIIDQYQYICVEDLNIKKMVEGSYFAKSIADASWNQFLQFLTYKAAEAGRKLGLVNPAYTTQDCYRCGHREKKQLSEREHRCSQCGYMASRDFNAAQNILALGLDGLGAIPRSPRL

SEQ ID NO: 44693 - protein, 382 aa, Escherichia sp.
MRRFAGACRFVFNRALALQNENHEAGNKYIPYGKMASWLVEWKNATETQWLKDSPSQPLQQSLKDLERAYKNFFRKRAAFPRFKKRGQNDAFRYPQGVKLDQENSRIFLPKLGWMRYRNSRQVTGVVKNVTVSQSCGKWYISIQTESEVSTPVHPSASMVGLDAGVAKLATLSDGTVFEPVNSFQKNQKKLARLQRQLSRKVKFSNNWQKQKRKIQRLHSCIANIRRDYLHKVTTTVSKNHAMIVIEDLKVSNMSKSAAGTVSQPGRNVRAKSGLNRSILDQGWYEMRRQLEYKQLWRGGQVLAVPPAYTSQRCACCGHTAKENRLSQSKFRCQVCGYTANADVNGARNILAAGHAVLACGEMVQSGRPLKQEPTEMIQATA

SEQ ID NO: 44694 - protein, 353 aa, Pseudospirillum sp.
MKYTKTLKVRVRDKHCPLLNQMARSVNFVWNYINELSHRSIKERGGFLSAYDIQKYTQGAHKELGLHSHTVQKVGAEYAARRKQFKKNRLNWRKSGGVRRSLGWIPINTGMAKWKNGQVYHNGHYFKVWDSYGLGQYSFRTGSFNEDARGRWYFNVVVEVEAEIPAGQDKIGIDLGLKTTATCSDGTKLEACHFYRDLEPKLATAQRAGKKKQVKNIHAKIANRRKDALHKFSRQLVNRAGEIYVGNVKASSLTQTTMAKSVQDVGWALLKTMLEYKCDHAGIVFKEVNESYTTQTCSHCGALPDERPQGIPGLGIREWTCRACGVTHDRDINAAKNMLALGHERPAEGIPVL

SEQ ID NO: 44695 - protein, 256 aa, Salmonella sp.
MMMLILKAYKFRLEPTPEQSQRLRQLCGCARFVWNLGLAETKRILDSGEKLPSAFELNRMITVWKKMPEYIFLQDAYTDNLQQKLKDLHTAWKRCFDKKLAAKAPVWKRKNEGRDSIRFVNFEKYCCLENRRVKLPSGLGWVKFRQSQRVNGKIKNATISQLAGQWYISFQVEIETAEPNHTSTTIVGLDAGVAKLATLSDGTVFEPVNSFQKNQKKLARLQRQLSRKWICPYISRHLLSLNPLLACCRRYSRGER

SEQ ID NO: 44696 - protein, 348 aa, unknown
  TnpB Polypeptide
VYKQYIPSAFEVAIAALKNYRRRVRKRQRTSVPYFRRPLLKAENQSYRFDRATGRLVIPIRRGERVEFDLPLSEWHHSILADPSWGLGSLTVTSDRIVLAVRRAAPEPYHPEGAIALDTNEDSLDGVAVHAGEHTLVTVPFPEVRVVQATHFRRRRLLARKKTHDRRVRSRLLQREGRRERNRLSQRLHVVSKGLVQVAKSTMSGLVLEELTLRGAGGRSRRMNRRLSSWPRRELHRQIEYKAALAGVPVIKVNPAWTSKTCPVCGARRRDRVGKEFVCLKCDWEMDRQINAGLNILKSALASNEALARAVRFQPGALRHDVVSPLYDLSALPTGAREEPSGAEFLAG

SEQ ID NO: 44697 - protein, 293 aa, Escherichia sp.
VKRLQAFKFQLRPGGQQECEMRRFAGACRFVFNRALARQNENHEAGNKYIPYGKMASWLVEWKNATETQWLKDSPSQPLQQSLKDLERAYKNFFQKRAAFPDSKRGDRMMHSATRRALSSIRKTAVFFCRNLAGCATGIAVRSRGCENVTVSQSCGKWYISIQTESEVSTPVHPSASMIGLDAGVAKLATLSDGTVFEPVNSFQKNQKTLARLQRQLSRKVKFSNNWQKQKRKIQRLHSRIANIRRDYLHKVTTTVSKNHAMIVIEDLKVSNMSKSAAGTVSQPGAMSGQNQV

SEQ ID NO: 44698 - protein, 208 aa, Escherichia sp.
MKRAYKYRFYPTTEQAKLLAQTFGCVRFVYNSILRWRTDAYYERKEKIGYLQANARLTALKKEPEYIWLNDVSCVPMQQVLRHQQQAFANFFAGRAAYPAFKSKRHKQAAEFTASAFKYCDGKLYMAKSRSPLDIRWSRKLPSAPSTVTITRDAADRYFVSCLCEFEPVSLPITASMVGIDVGLKDLFVTDTGFKSDNPATPLNMRSD

SEQ ID NO: 44699 - protein, 378 aa, Actinobacillus sp.
MLLRKAFKFEIRPNGEQVRKMKQFCGCSRFVFNKALAWQNEQYEQDNHHKFSYTKLANLLPQWKKELVWLKDCHSQVLQQSLKDLESAFKNFFQKCADLPKFKKKGVKESFRFPQGCKIEQKNDRLYLPKIGWVRYRNSREIVGEVKNVTVSMKCGRFFVSIQTEFEQEIPTHKGGEIGIDMGIARFATLSNGEFFEPLNAFKTHKGKLAKLQKQLKNKVKFSKNWQKLKDKIGKLHHKIANCRKDFLHKISTQISKNHAMIYVEDLQVANMSKSAKGTAEVHGKNVKQKSGLNRVILDQSWFEFRRQLDYKTQWLGGFLLAVPPQNTSRTCPCCNHTAKENRQTQENFECVECGYTENADVVGAMNVLTRGQAIVQA

SEQ ID NO: 44700 - protein, 387 aa, Blautia sp.
MVKAIKVMLIPNNVQKTKMFQYAGASRFAYNWALAREIENYEKGGGFISDAGLRKEFTKPRHSDEYAWLLNISNNVTKQAIKDACTAYKNFFRGLQKFPRFKSKKRSMPKFYQDNVKIRFSNTHVKFEGFSSSRKANKQKMNWVKLAEHGRIPTNAKYMNPRISFDGLNWWISVCVEFPDCREILNDDGVGIDLGIKDLAVCSDGAKYKNINKSQKVKKSEKQKRRLQRSISRSYEKNKKGESYCKTNNVIKKEKLLLKRNHRLTNIRKNYLNQTISEIVDRKPRFICIEDLNVSGMMKNRHLSKAVQAQGFFWFRKQLEYKCSDKGIQLIVADRFYPSSKLCSCCGNIKKDLKLSDRVYRCACGNMIDRDFQASINLKTYGEKFAG

SEQ ID NO: 44701 - protein, 387 aa, unknown
  TnpB Polypeptide
LEWLLGEFRLLVNESIRIALREDIRSRTRLARVAYQDLSCRHLVYKQYIPSAFEVALGVLKAHRRRLKRKKRSSVPYIRKRMLKAENQSYRLDRETGRLRIPIRGTEGVQLHLPLSEWHRSFLSDPAWGLGSLTVVPGKIILVIRKEAPKAYEPEGAIALDTNEDSLDGVVASDEGMVPTSLPFGGVRRIQGTHFRRRRRLATKKARDRRVMRRLLNREGRRERNRVRQKPHCVSKRLVQFAKNGKAAIVLEDLVLHGAGGRSRRMNRRLSSWPRGEIHRQIEYKAALVGVPVIKVNPAWTSKTCPVCGARRRDRVGKVFVCLMCDWEMDRQINAGLNILKTALASNEALARAVRFQPGALRHDVVSPLYDLSALPTGAREEPSGVE

SEQ ID NO: 44702 - protein, 375 aa, unknown
  TnpB Polypeptide
MIKALKVRLEPNNKQMSKLFQSAGVARWAYNWTLAKQAENYASGGKFIRNGDLRKELTLLRQTEEYKWLNNYSNNITKQAVKDACDAYCKFFKGLVEKPKFKSRKKSPPKFYQDTEKTKFKGGKVRLEKIGWVRLSEKGRIPENTKYTNPRVKFDGVHWYISVGIEVEQESVELTDESIGIDVGIKDLAVCSNFEKPFKNINKTREIRKLEKKLRRLQRKGSNKYEKNKEGRSYVKTSNIVKLEKDIRKLHRRLDNIRTDYRHKVTTEIVKTKPSRIVIESLNVSGMMKNKHLSRSIQQQGFYEFSKIIQYKSERQGTEIVVADKWYPSSKTCSECGYVKPKLSLSEREFRCECCGAVIDRDKNASINLSRYKAL

SEQ ID NO: 44703 - protein, 386 aa, unknown
  TnpB Polypeptide
METTRNYKYRIYAKGGKLKKLQSTLDTCRFVYNKVLETRKSSWETEKKSIGVYDCNNLIKNWNIEGVHSQVLQNVSARVDLAFQGFFRRVKEKSAEKTGYPRFKGYDRYDSFCFPQSGFKIKGKKLHLSKIGNVKMIEHRPIEGKLKTCTIKREGNYWYAIFSCKVEKEISNRFEAKSVGVDVGCIDFATMSDGNTIANPHFLRKSDVELKEIQSKYSRLKQLPKDDKKKVKVKKKLVKLHCKVKNQRKDFLHKTSRKLVNNYSVICVEKLNVKSMLTNGWKELNKSILDSGWTTFRNMLNYKAVEAGGLVLEVNPAYTSQICSGCGVKVRKKLSDRIHKCNTCGLEIGRDLNAAKNILRVGMDSLSNRKATLKACSLYRGVGAFT

SEQ ID NO: 44704 - protein, 309 aa, unknown
  TnpB Polypeptide
LIPGDKQAAINQQIGNARVVHNDYLSKRIDYYNENKKTLTVTQYKKEYLPALKEEKEYLKDTDKFVYENACHNVDDAYNRFFKGLSGFPKYASRTKPNGNSYTTNFTNNNIELKMIDGIPYVKLPKIGNVRFILPRGKTLIDIQPQEVSIKGATVSREPDGSYRISLRMESVIDKPVFPTVINAREIVSVDLGLKEFGVFGNLEESVPVPNPRWIQVHAKRLRRFQQSLSRKQYDQNTHRGSKNWEKARAKVAKEQRKTADQRRDFHHKLSRAIADNYVAFICEDLAVKNMMQNRHLSKSIASVGWSQF

SEQ ID NO: 44705 - protein, 382 aa, Pseudogracilibacillus sp.
VDHVLKHKAYKFRIYPNKYQEKLIAKTIGCARFVYNHFLHRWNTTFAETGKGLSYNQCSAMLPKMKRVEETEWLKEVDSIALQSSLKNLADSFSRFFNKQNERPRFKSKMHPVQSYTTKHVNQNISIDGNLLKLPKIGHVPFAESRKLHGRILQATIRKKPSGKYFVSILCEEKIHDFPKTESAIGIDLGILDFAVLSDGQKVDNDRFTSKMEKKLKREQRKLSRRALLAKKRGINLFEAKNYQKQKRKVARLHEKVMNQRTDFLNKLSTDIIKNHDIICIEDLHTKGMLKNRKLAKSISDVSWSSFVSKLQYKAEWYGKTIVKIDRWYPSSQICSECGHQDAKKALSIREWMCITCHTNHDRDINASKNILVEGLRKLSLT

SEQ ID NO: 44706 - protein, 546 aa, unknown
  TnpB Polypeptide
MTVEVFVAIGYIAGVECISFSGGALAKNQTYRAFASRPSYVLDLNGELLDSARVLASLVSEVRDISSYATFVVRNDVELGDELARVAATQPTTAGRRAGVTMPDFLVSGKSGRSRKEMLVQHRVVTEYRSWQERVKAANGESSKYVSRGWKRTVDASAPSYGEDYVNLGAVNKQYAAIENNPFTDGEIVLKMVIQGSWYRLIFDFDNERFTEGKVTLPVIKVQDGQPVFIFTVVTDNPIVQFSGDYTIGVDVGINNYATVVVRDTKTGQIVHTSTLSQRVHSLWNSVRASQRQVRGLRKKADGLLSQRQERMSALDEAQLHREAASRKKRELAILAAQEIAALSHVWGNAAVAVEDLSWIANTMKNGRWNRGAFVQWLTHYVSQNGGWVVAVSPANTSQLCYKCGSKVTHPTHEVSVCATHGVMDRDVNAAANIAARAVPRVAKARVTRAKNRKLRPQAPLRTPVARNSLRYPGRDRTKNKPTEKRKNHRRTVKEVILPLRPARAQAPCLDTRVLADGGTLRASGTSLAALKQGNRAYNSRLCCLI

SEQ ID NO: 44707 - protein, 450 aa, Deinococcus sp.
VKITLTAKLKLRHTPEQKKALDAVTLAYRDALNFTSQKAFEMGKTSNAAKIQREVYATLRERFGLGAQMACSVPRYVGAVYKTLWAKAKQSKAAREVNPKAKRYKGLDNAPKFVSRTLSYQYQRDYSFKKGQQVSISTLNGRVVLPYEGYAKHLEYIAQGAEIGAGKLWYSKAKKQYFLLVPLTFELPDPDPMTHKQVVGVDVGMRYFATASNTSGKALFKSGKATLRKAERFQKARKSLQQKGTRSAVRRLVQLSGRERRFIADVNSSLAVQILKAFPHAFIGVEELTGVRERTERRSRKNSSEKTRKANRRRARWSYAELLGFLAYKAPLHGSMVVKVDAHYTSQTCPRCGHCSRENRPHKGLMFICESCGYQLHADLVGARNIGLRALLVRQDWASTGCLSCTPGRPQSADPQAGSAGRDVSDAEAKAERLKRYSELRWSPDASPRL

SEQ ID NO: 44708 - protein, 293 aa, unknown
  TnpB Polypeptide
MLCRAVAVELEVTRELNKLLYSVESAYLGIVREVTEYAVANNVTSATQLQGLFYSKYRSEYQGLHAHLIIQAIRQASGVAKSFVERKKRGLVSKPYPEVRSVSLRFTEKAWGYEQFIRSTAPVRLSLSLLGERKEVWIRPHKRFWLYWWRVLSGEAELASTLMLKRKGGKWYAIFVFKIKPRVAKPQSIIAFDINENTVAVGKIDIKTTVSKVVNWNRQYMIPELYTIKTDFGRLARRYGRVRNAIIEKLKPGFALPSGNYVNIANTREFRKYVKHLREGLGRLVVSGMWRMN

SEQ ID NO: 44709 - protein, 323 aa, unknown
  TnpB Polypeptide
MRAAFTVQSTSLQELGEAFVSWYKQDDPDANPPGYGKHGDEHPRSTVTWKNQGFKLDTTYNRVRLSKGTNMKPSRYAADYILCEYTIQADEQTLADVETVKTVRAVWTGDQWELHFVCEMQIDQPETPGEKTAGIDLGICNTAAVSVGDETLLYPGNVLKEDTHYFRQEEYNTEGKNGPSNHAEWARQKKSRRQNHFLHALSKDIVEQCERRNIGTIAVGHPKKIREDEDWGRHGNKRLHDWAFETLLSHIEYKAEERGISVERVSEGKLKTSKTCCECGKEADSNRVERGLYVCENCELVANSDLNGGGKHEVSGNSESRSK

SEQ ID NO: 44710 - protein, 412 aa, Streptacidiphilus sp.
VQLRYNYRAYPDTAQCTALAQAFGCARVVWNDCLRVRKEALAAGLPYVSSAVLSKTHITQAKRTPERSWLADVSAVVLQQSLRDLDAAYKNFFDGQQGKRPRVGEPRYKSKRDTRQSIRLNANSFSLRDNGTVYVAKVGDLSVRWSRPLPAAPTSLTVTKDSSGRYFLSFVVDTDADVLPESSIETGVDLGLAAFAVLADGRTIDSPRFLRRAEKKLKRLRRDLSRKEKGSRNRAVARAKVARQCARVADRRRDWHHKHSTQIIRENQAVYVEDLAVSTLGRTRLGGSVYDAGWAQFVRMLEYKAVKHGRYFARIGRFEPTSQRCSTCGVKDGPKPLSVRTWTCGACGTAHDRDVNAARNILAAGRADRLNALWSTGRTGKIPARCDEAGSHRDGRKAVAGVPGPEAGEHVK

SEQ ID NO: 44711 - protein, 445 aa, Clostridium sp.
MKLFSTYSVKIQHYNHIFKETVSLYRAAVDFLIGVCLDEWSNIILTDQKLVRQQYVEHLCHQTKDNPEVKYPAFDRKFYKFPSYLRRSAISEALGKVYSYQSNLINWEAEDPKVRGRKPSFPKAGYVYPSMYRTVMYEQSGDYEMKIKVFLRNTWDWLTVRVRKSDMDYINHRCTSRKKCAPTLQKRGKEWFLDFPFEETVKLPDTNVFNQTILAVDLGINAAATVSVMRADGTILGRHFCRLPKEYDSLTHAINRIKKAQQHGNHRTPRLWARAKGINRDIAVKTAHFIMDVAALYNADAIAFEHLDLTGRKRGSKKQRLHLWRSQYVQSMVTDKAHRLGMRISHICAWGTSRLAYDGSGRILRGKEAELPTYSLCRFQNGKVYNCDLSASYNIGSRYFIRESLKSLPARERLALEAKVPQAAKRSTCTWSTLINLNAELVHAA

SEQ ID NO: 44712 - protein, 365 aa, Clostridium sp.
MQKGIKFRIYPNRTQKDLIDRTLGCCRLIYNKGLAMRDEAYKNGNPIGYSKTSAMLTELKRCEDYAFLKEVDSIALQQSLRDLDRGFVNFFQKRASHPAFKTKHTPHQSYRTVNQGNSIRIEGKYIKLPKLGYVKVRKSMETGHINNATVTRTPTGKYFVVLNVDFEPKVIENSGKSIGIDVGIKAFYSDSNGDTVPNPKYFEKSMRKLIREQLKLSRKQKGSNNRNKQRIRLARVHEKVTNQRNDFLQQQSTMLIRENQTICIEDLKVRNMIRNHKLAQHIASASWSRFFDMLSYKALWYGNTVIKVPAMYPSSQTCSCCGYRNPLVKDLKVRVWECPDCHTVHDRDTNASINILNKGLEMLSA

SEQ ID NO: 44713 - protein, 404 aa, Cylindrospermum sp.
VLKAVKVRIYPTAAQKAHLAQAFGCVRWVWNQSLATMTATYLETGKGVTAMTMKKSIPLWKAEFEWLSECYSQCLQQSVLNLGVAFGNFFDGRAMYPTFKNRQEKQSIQYPQNVKVLNNCQIKFPGKLGTVKAKVHRDIQGTVKTVTLSKNPDSRYFASMLVDDGMECPESSSKGNVIGIDLGLTDFAVTSVGSKYQHPRATKKHERNLARKQKKLSRKKDKTTNNRRKAKLAVAKVHSKIKRVREDFLHKLSRKIVDENQVIVVENLAVRNMVKNHCLAKAISDAGWEMFCTMLKYKAEMVGKVYLELGRFFASTHLCFHTLKPLPKMDLSVREFDCPHCKERHDRDINAAKNIRNEGLRVLALGTSVIAPEGYVRPKQYGRKSTTVAAVVVERRSPHSTRSG

SEQ ID NO: 44714 - protein, 383 aa, Microbispora sp.
VKLVVQVRLLPTPEQAAALAATLSACNTAANFASATAFTTGARREYGLRKHVYRELKARGLGAQTAQHVIKKVADAYTTLKANLRNGNYGPPGSARRTAIEGKPIAFRAQAGQPFDDRCLSWQIDTRTVSIWTTAGRMRDIAFTASAEQLTMLAVYRKGESDLVCRDGMWFLCATCQVPDPPVATPEGFMGVDLGIANIATTSDGKRHSGRGLNAVRHRQRQLRARLQAKATKSAKRLLKRRRRKEARFAADTNHTIAKQIVTEAERTGRGIALEDLGGIRDRVRLRKPQRVTLHSWSFHQLGSFIAYKAARAGVAVIYVDPAYTSQACSACGHVDKKNRPGQATFCCTSCGFAEHADVNAARNIAARGVAGWAVSHAADDAA

SEQ ID NO: 44715 - protein, 375 aa, Helicobacter sp.
MMLVTRILYAKNINKGKLKALNEQAQILGKLRSQIWQEYGALKCLNTSDRKIRDLWVKEKREFKVLANAWKETLRDSFNNIKLYLEVAKTSIKKDIFKHYKTKEEQKEAFIQLKKDEWLKDHFLHRKMRKAFKHGKNSVFNQIIVRSDDYKVFELNNQCWISIPSLIKNKRIKIPLNTTMEYKPSGTLRLIIKNKVVEVHSSYEKRTNRACGNGIIGIDKGYSEVFATSNNEFLGNGLGKILTQYSDKLKVKYQRRNKLLALMKKAQKNNQLEKANRISKNNLGKIKQNKENHKVKQRLKTLIYNACHQVVDKAKVVVCEDLKENFSKNTSYGKNTNRRLNSWVKGLIAAALIKCNSVQRFCIAFSQSCIHFAMR

SEQ ID NO: 44716 - protein, 246 aa, Tetragenococcus sp.
VKVLKAYKFRIYPNEEQIQYFIQTFGCVRFTYNQLLYARKKALQAGDYVTRLTPAQLKKDYPFLKQTDSLALANAQRNLDRAFKNYFSKRAGYPKWKSKKSHWQSYTTNNQKHTIYFIGEELKLPKLKSLVKANLHREILGEIKSATISAKNNQLFFVSILCLENVMSLPKTGESIGVAYCSENLVQMSSTNVFLSRKSNSYYQLKTAKKRLELRAKLAKKKKSVVESGQKLSKAKKESPEIVYDN

SEQ ID NO: 44717 - protein, 361 aa, unknown
  TnpB Polypeptide
MIKTYSLNLVGNKSKIEFLYSIYNDCQKVSDYIFNYIKENKEYRKSEIHKNTYFNLREMFPNLNSKLIQQIRDKVLSSVKDKKLFKCKRINVPIIIDYQSFNLKFEGKYFNCFLRFFKINFPLEGKRIIKKLKRVRKIKRIELIPKGKYFKVFFNCEIEDKEPIFKKIVGLDVNLKNIYLSDGKKFNLDLYVHKKLNYRKHKKQIHIQKWSEGYVKSLTSDVSDYLFENQVGYLIIEDLKNIRRSFSKKLGTSKGKKLNYLINNAFPYSMFLNYLENSCSNKGILIRKINPAYTSKTCSDCGSRNTKRPKQSLLICNDCGSKQNADLNGAKNILLFSQKNSVMSEDRKTNSLNKTLEAMTL

SEQ ID NO: 44718 - protein, 356 aa, Lachnospiraceae sp.
LDIQQRSYEAGGKFVQDGELRRAFTRLKEEPEYAWLKEYSNNITKQAIKDACTAYKNFFACRAELPKFKSRKKSKLSFYVDTCKIQFTNMHVKLEKLTAGRKKNRQKFNWVRLAEKGRIPIGSKYYNPRITFDGLHWFISVGIEYQDHTEKPENCGIGIDLGIKDLAVCSDTKPANININKTQAIRRLKKKKRRMQRQISRKYERNRQGNSYSKTENIKKAEKKLLKLSHRLAGIRHNHIHQATTEIINRKPKFIVMEDLNVKGMMKNRHLSQALAEQCFYEFQRQIEYKAAWHNIKFIKADRFYPSSKRCSCCGTVKSSLKLSDRVYKCSRCGIVIDRDRNAAVNLYQYGKDKTA

SEQ ID NO: 44719 - protein, 218 aa, unknown
  TnpB Polypeptide
MKTGYQVINYKFRLYPTKEQEEKMLEVLDRCRFVYNKMLEGLNKQDKPSWLELQNSLPELKEQYPELKKVYSKALHYEPYRLFSNLRGLARLKKNGKKVGRLRFKGKGWFKTFTYNQKGFKIIETGKRCELLHLSKIGDIKVRMHRKVEGKKIKQVTVKRYSSGKWYAFVCCEQTIPDKKGIEKGVGIDVGIIHYVTDTCGRQIEHPLYLNKSLKSLS

SEQ ID NO: 44720 - protein, 244 aa, unknown
  TnpB Polypeptide
VTLTKTPVKEQIICSVDLGINTDAVCTIMRADGTVLGRKFINHPSEKDRMYRTLGRIRRFQREHGSAQTQGRWAYTKRLNTELGKKIAGAIVRYAEENHADVIVFEYLEMQGKISGKKKQKLHLWRKRDIQKCCEHQAHRKGMRVSRICAWNTSRLAYDGSGAVTRDRENHSLCTFQTGKRYNCDLSASYNIGARYFIRELLKPLPATERSLLEAKVPPVKRRTSCVYADLRKLHSEMERLKAA

SEQ ID NO: 44721 - protein, 426 aa, unknown
  TnpB Polypeptide
VKAVKKEKRDLAYARKRQKIIETETPEEKFIRLEKERKARIKQQKKDEKDDTGKSIRIRVYPTTEQKARLKGYFGCARFIYNKCVRMYLQDPNVTMQQLRTAIVGNPNYTTSDTWVLEYPFDVRDEAMRDFWKNVVSNREKGGTFTMKFKRKKAHTKQSVSVLAKHWNKPRNWYSWLFQPAVLESHQRLPQELKYTARFKKTHTNRYYLCLPKPLEVMVDNQAPNTKCIFFDPGSSPILTGYDLEGVVYIFGEKDMTRIGRLLHYKNKLRSKSDKATTHKKRYSLKRAYLRIYEKIKYLMTDFHCKVTKWLCENYTHIFIPRLNFHKMTKLHKKPKERLASIEHCALVDRMVNKTREYPWCKVTQVNEAFTTKTCGRCGTQNHHVGRSKTFHCVNNECNLVCHRDVHASVNILLRYFTKRAVTHEA

SEQ ID NO: 44722 - protein, 369 aa, Lactobacillus sp.
MQRELDRLCDYRRYCWNLALETWQDMYEARTLNKDNNPSPNECRVRDELVNNKADWQFTLSARCLQLSVKDLANAWKSFFDKAQLDWGKPHFKSKKVPRQGFKTDRAKVINGKLRLDKPRGIKSWFDIPTYEALRMKQVKIASIFRERGHYYAALSYEEKAGIKVKTGKKTAIDVNVGHFSYTEGRINILPARLQKLYKRIKHYQRILAKKRRVNGKLAGRSNNYVQVRTKLQRDYRRAVNIQNDLLQKFTTELANNYDQIVIEDLNVKQMMMTHVASKGIQRSLFGKFRQILSYKCAWYDKELILADRSYPSTQRCASCGYVKNGADKITLQGNRKHGTKHNEYVCYECGYSNDRDDNAVLNLLALTK

SEQ ID NO: 44723 - protein, 387 aa, Clostridioides sp.
  misc_feature (228)..(285): Xaa can be any naturally occurring amino acid
MYPNKKQQELINKTFGCCRFVYNKYLAKRIEVYKNAKETFTYKQCSSDLTNLKKELNWLKEPDKFSLQNALKDLENAYEKFFKKKAGFPKFKSKKINRFSYKTNFTNGNIMYCGQHIKLPKLGMVKIRDKQVPKGRILNATISKEPSGRYYVSLCCTDVDIEVFENTNNQIGLDLGIKEFCISSCGEFIENPKYLKKSLNKLAKLQRELSRKTIGSLNKNKARLKVAXXXXXXXXXXXXXXXXXXXXXXXXXXXXXXXXXXXXXXXXXXXXXXXXXXXXXXXXXXLQVKNMIRNRKLSRLISDVSWSEFIRQLEYKANWHGRQIVKVGKFFASSQICNKCGYKNEEVKNLNIREWICPSCNETHDRDINASINILKEGLRLITIQNK

SEQ ID NO: 44724 - protein, 371 aa, unknown
  TnpB Polypeptide
LVIVTVQLQLLPTKDDAVKLEATMRRFNEAADWLAGEAFALKSANKIALQKTHYAALREKFGLSAQMAVRCIAEVCGAYKRDKSKRPHFRPLAAVPYDQRIASFKSLDRISLLTLAGRILVPYVMGNYQRGRFTAAKGQCDLIRRKDGKWFLLVTVDLPEDTRLPATDFIGVDFGVVNIAATSDGAQHSGAGIEACRSRYSRLRRSLQQAASAKVKAKVRPKNIRRKLKAIASRESRFRRDVNHCISKKLVAIAKDSGRGLAGEDLQYIRDRTRFRKQQRAKMSGWAFFQLRMFLTYKAILAGVDLRIVDPRGTSRTCSPCGYEAKSNRKSQAEFVCGQCGHTANADVNAARNIRSRALVNAPIVAELCAA

SEQ ID NO: 44725 - protein, 371 aa, unknown; identical to SEQ ID NO: 44724
  TnpB Polypeptide

SEQ ID NO: 44726 - protein, 422 aa, Okeania sp.
MIVREAKLLNGSKVQYQALDEAIRTAQFIRNRAVRLWRDEPDVNKARLSLLCKELAHEFPFAKKLNSMARQASAERAWNSISNFYRRCREGAKKKGYPQFKKNSRSVEYKTSGWKLSEDCLTINFTDGFKAGQFSLFCNHETREDLFRLKINRVRVVKRADGYYAQFCFDANRQEAGNYTGNVIGIDLGLKYFYKDQNDNTAIYPKYLRRTQKRIKKLQRRLSRKFVKGKPQSNNYHKARIRLGKSHLKIQRQRKDWAVKLARCVVSSNDVVVYEDLKIQNMVKNHHLAKSISDASWYQFTQWLDYYGKVWDKTVISVAPHYTSQDCSNCGHRVKKSLSTRTHQCPECKTEICRDTNAALNILKKGMNILGVEWVRGTEGHSGTSGKPGTLEKSSTAVDEEKSDSISCLVESRINFVKNPAL

SEQ ID NO: 44727 - protein, 283 aa, unknown
  TnpB Polypeptide
MNVILTYKITESESGRSIAAFLLDSGYSSRLVVHLRNTAESFFLNGKIVYSNTILQPGDCLNVHVTEKKASEQIVPVPADLSVVYEDEHVLVIDKPAGIPVHPSQGHYENTLANAIAWYYRNEEKKLAREQRKLSKMQKGSNNRNKQRLKVAKLHEKVSNQRKDFLHKQSRQIANAYDCVCIEDLDMKAMSRSLNFGKSVSDNGWGMFTTFLRYKLEEQGKKLVKVDRFFASSQTCSVCGYKNAKTKNLAIREWDCPQCGTHHDRDVNAAVNIRNEGMRLVNA

SEQ ID NO: 44728 - protein, 442 aa, unknown
  TnpB Polypeptide
MQTVSSYGVELRKQNIPVRQTLEIYRSAVSYLTEIYEQVWEELAEIPDAKRRFNAAEHLVHTTKKNPARFDFDLRFPKMPSYLRRAAIQHALGSVSSYETRMDLWEKSGEKAGKPRLAYENHAMPVFYRDVMYREGKEGKDEAYLKLYDGHDWKWFCVRLNHTDMEYLRRNWSGKKASAPTLEKRHHKYFLRFSYTEEVTLTKTPVKEQIICSVDLGINTDAVCTIMRADGTVLGRKFIDHPSEKDRMYRTLGRIRRFQREHGSAQTQGRWAYTKRLNTELGKKIAGAIVRYAEENHADVIVFEYLEMQGKISGKKKQKLHLWRKRDIQKCCEHQAHRKGMRVSRICAWNTSRLAYDGSGVVTRDWENHSLCTFQTGKRYHCDLSASCNIGARYFIRELLKPLPATERSLLEVKVPSVKRRTSCVYADLKKLHSEMELLKAA

SEQ ID NO: 44729 - protein, 528 aa, unknown
  TnpB Polypeptide
MRGKSKALKTRQDKDYTMSNHTSRAIQLELPLFATAGSVPQNSEMTLIDKSPICNPSTQTQKSSKILAQDSTSKEKVCAPYWTDFCKEINSSLLLPVGTDSQDLDLNLYNIWSNKTVDKSWFLTKQYTVHNQNLPRIYSQSFTSFPVECTDLGNTLKKSKKIYLKLSPAQKRKIKYWFGASRFAYNETIRYLQTPETKANWKGIKTGIIQGLPDWCKDAPYQIKAIAIKDACQAVKNAKKKYIDGGGISRCRFRTKKDPVQSCYIPKSAIKDAGIYHTVLGELEYKETLPDGFGDCRLVSFSGDYYICLPTESPRHKTENQGRVVALDPGIRNFLTFFSDNSFGWLGKNANLRIQKLCFKLDKLISKISKAKSRQKKRLKNAATRLRGKIKYLVDELHKKTSRFLVDNFDVILLPTFETSIMSRKAKRRIRSKSVRQMLTLSHYKFKKFIKHKANEFHKIVIDVNEAYTSKTVSWTGEIINNLGGSKIIKSRLDGRIMNRDLNGARGIYLRALVDTPWLRDNLNLCIC

SEQ ID NO: 44730 - protein, 376 aa, unknown
  TnpB Polypeptide
MFRTVKVALPFDQALVQTAFAFNKACQTVLDYGSKHKVYNKSVLNKATYQQVRKEVPNLPSALVQTARDEASEMLLRTDFAKIIKKRLSVRYDKRTFKFYPDSNHASLTTVHGRLNFPFKHYSYLDTWRGEYTNAQLIIRKNSVFLNVQVEVPDVEKKATGKVLGIDRGILNIAVCSDGTFFNSKRLRAVKGRYRHLERRLQHVGTRSAHRKLQRLAGRERRFVLNTNQCISKVVVNKPFDVFALEKLEITRKKKNGKRFNRLLGSWSPNELQRFVAYKAEGQGKVVVFVNPKFTSQRCSRCGFVHKWNRHGLRFRCGNCGFELNADLNASRNIEVLGRSEYLRLFVNEPIVASGEASPTGVVDGSYKPRPSGRGS

SEQ ID NO: 44731 - protein, 403 aa, unknown
  TnpB Polypeptide
MRNTKHKLFFDKTLKYLHNDLDICGIVRNHFIALCMRYYRRYGKGLSYSKMSAHLTKLKKLEKYRHWNIPYSWALQNVLKRLAQSFKEMRTLGRGPPQLKSCKKHKGMTFRGNQIKLEYLLPKQKHERSCATYQIRLNRRWYRFSLHRSIEGKIRQVQVTRDVLGDVYITLTEECSEVKPEPKTGKAEGFDMGIKDFLTGSDGERYTSPMFYKQNANDLAKAQKEYSRKVRGSKNQERCRKRVFRIHKKTANQRTDHHWKLAIELCQKFDIMFFEDLNLRGMKALFGKQVSDLAFGEFLQKLHHQSKKRVKTVLKIGRWTPTSRCCSVCGYKSENLTLAAREWDCRSCGTSLDRDHNAALNILKEGVASFGLGEVRPIVLLGKIVGYSVEVTSRLLKSTNAFA

SEQ ID NO: 44732 - protein, 355 aa, Lactobacillus sp.
  misc_feature (338)..(338): Xaa can be any naturally occurring amino acid
MKRSSKPIKSYSKTVRAYSLKLDEDTYTKLDQLFINYGKCRNMFLNQYCGISHMLDVKQYRKLRDQIKGSKQNKKYVAKYNFLDKHWCYALSDACANINSMWSNLANQIRRVVQANEAIDKDERHLIYYLLSIRELWYYALTNNQAVLLDLSHGLQKHLAELEEAVTPKQRKHAYSYLSRLTRRYKYTPRKHHSLNKSMTYDESMYKFTGDQLEELAISSHVSRKRFSLKLTSPWHYRLNGNLQIILDRDKKRLEIHKVIKVRQKKEYQAGTKLGIDKGLATLVSCSSGREYGKGFSQFTRPEIEQESQYLARRNPYYGYRYQLKKKLNQLKNANIPXKVLASLLDLKLNRKANT

SEQ ID NO: 44733 - protein, 373 aa, unknown
  TnpB Polypeptide
MILGKKIRVYPSKEQEQKMWQSVGTARFIYNWTLGKQEENYKSGGKFLSNHDLRKELTMLKKTELLWLNEVSNNVAKQAVKDACEAYKKFFKGLSDRPRFKSRRKSKPSFYNDTSKLKVKESSVLIEKVGWINIKKNSIPRHCKYANPRISFDGMYWYISIGVEKEQPIVDLTSESIGIDVGIKDLAICSNGMTFKNINKTKSVKKLEKRLRSLQRRVSRKYLKNIEGSKFVKTSNSIKIEKQIKLLHRKLANIRSNHSHQATNKIVKTKPSRVVMETLNIKGMMKNRHLSKAIAKQCLYEFKRQMQYKCKFNGIEFVEADKWYPSSKTCSECGHVKVKLPLSVRTYICEKCGCVIDRDYNASVNLSRYELVV

SEQ ID NO: 44734 - protein, 536 aa, Rhodococcus sp.
VLLDLVTAAGGELVSRLWHPATFDVLAAGRDLHDRRLPTQGHVAAARLGWNPTYPDGVYVPSRVTRVVTAQVMATLRTLAYRDTAIAALSARFDPATGAVAPATGPGDSVPPGFARGVLRQLVARSHRGGGAPAGRLRITDVQDPPRMAAMAQLSAADRQLAQITVTERELVLTVKLPTSSAPAGRAQWRWVRLTTAIPAHLHDRAVTDWHLPTLILDRRGLLWRCAATEMVPAADLTACTVAVGVDWSPCTLGAAAITADSPEGLVSDYRGWTYDDRGLGIKLARLQAEGQLLHRKAARLTRLAATAEPEVRAQLEEKIAVLNEHREAVGIKRGKINRELAFHFARQVTGYAAAAGAQVIAVEDLTTLEARGHGRVNNNRGAQSARRQAVAALAHTAAGVGIAVVSVPARGSSAWCPGCDEPLSRPGGYHTAWCPGCRVGGNRDHVAGVNLAKRVDRQTQRHPPAWAAGRGPGGRACAGAQVPRQEQYDPASATASPGPPQPAHRDTAVGGDSETACSCTTSVGVGHGQTHTTAR

SEQ ID NO: 44735 - protein, 445 aa, unknown
  TnpB Polypeptide
LLKSKGYGNFLELFTYYICIVIKIEKGVFKMYGSSKIELNDLTPNERLRLRLLSEMSRKLYNRSMQIIIDTYENQGKVLYYDSLKPLVKDTEEYKNITGYYYATICAAVADFRKYLSTDMYVLNKTDRTLKDKNLDKFYPPKLRDEPRIIEMKQPLIKDGFVILPATKQTPPVRLRIPECYRSKDIRAVTVRPLHNMTHWEMIISYPLETVHHSDLDYSHALGIDLGMVNFATCADSVSGECFIVDGKGLKSILQGYSKYLASLRRASGQNDTKRIAALKKRTYQRVNNFVGKATSYIIKYCLEHGIGKVCLGWGVHFQGQGSNLNLSLGVNNQLFYLFPFAKFKNALQAKCQLHGIHFVLVDESYTSQASALDNDTMPEHITGTKQHFSGKRIHRGLYMSADGIKTNADQNAVWNILRKGSVTLPFLQGADGRGLMPPYRVKVI

SEQ ID NO: 44736 - protein, 369 aa, unknown
  TnpB Polypeptide
MQRAIRLKIENQDVKDTVEQYFKAYCFCIDKGTEMHTANKKKIHNATYFPLRKIYPTIPSALLQTIRDVACENLKAVKLKVKPIPKNKFIRYDRRTFSYKNGIVSLSTINGRRKFQISLPKFAERYNSWDSKAGTVTLRDGQLWLNIIFNKENQIKSPDTFIGIDRGINKIAVCSDNSFYNSKQLKSVKGRYQFLKAKLQSKGTKSAKIHLKHLSGRERRFVRDVNHVISKQIVKKPYDCFVLEDLKNIPRNKGRRFNRKLGGWSYFQLGNFVDYKSEELGKTTIKENPRHTSQMCSRCGHIERLNRKGSRFKCKKCGFELDADLNASRNIANLGISRFGRLNVIQPIVSVNQNEYKPDASPHSSEVGR

SEQ ID NO: 44737 - protein, 221 aa, Peptoclostridium sp.
LGLENLCTCVTNLGDSFIIDGKRLKSVNQWANKQNDKIEALKLKKNITAITRKQFKVWNKRNNQVKDYVNKTCFYIIDYCVKNNIGNLIVGYNAKLEKSDNMERKIYRNFIRIPFGEIKGKLEYLCKIKNINFIRQEESYTSKSDFFADDFLPDINVDNIKKYDFKGERITRGQYKSSVGIIINADVNASLNILKKSQVVNLSNLQNNPQILKQPQRVRIS

SEQ ID NO: 44738 - protein, 386 aa, unknown
  TnpB Polypeptide
MTLIIRHKIELILNNSMKRYFDQCFGYSRYSWNQLLGMHNIDRTTSLNEQLKQFKADRKNWEYAMPSYIPTYEMQNLKATLKRKTHKANFKSKKNLKQSFYVRNDCFLKGSFTEFVGKHMKFGIILGKKCRIRKQDRWMKLTEIPAFFGEDDFYILSVTILKEVDRYYASFCIQIKDRSKTTGNGEVGIDPGVHTVMTLSDGTKYELPKTLKKLDQKAKYYQKRMSKRYVRNAKKQSKRYMKAKIKHQKTLRLKNRIKIDFMHKATTEIVKRNNYIAWEDCKSSRLMKNHKLARSIGESCWFTLKTMLEQKCKMHGATFDLVDPINAATQTCSGCGHRLEGNEKLNLSDRVYICPKCGLKLDRDVNAARNILKFSKRKLAGAQPSE

SEQ ID NO: 44739 - protein, 369 aa, unknown
  TnpB Polypeptide
MITYEFKLRPNKAQEAALWLQLQLTRELYNTALQDLIAHYKETGKHLNLFTQDKAHNKATHPQMPAALVDTTLKRLHLSFAHFFRRCKEGARKKGFPRFKPANRWHSLHFRDAAGNGISDCYFKAGKILGGRIRFNRHRDIKGVIKFCRVLRKPSGWILQVVCETKLEPLPKTGKSIGLDFGVRHLVTDSNGGKVGNPNHLKKSLRRLRVAQRRIARRNKGSNRRKKACRVAARIHERIGNQRRDYLHKTARHYVNGYDTICVENLNVSGMVKNHHLARAITDASWTMLRRFIEAKAASAGRTVIAVPPHWTSQKCSSCGEIVQKALSVRTHVCLHCGYSDCRDTNAAKNILRLGCSLQGEVAIATSLN

SEQ ID NO: 44740 - protein, 292 aa, Okeania sp.
MLVFEFKAYGKLNQYLAVNEAIRTAQFVRNSCIRLWMDNKRTGKNDLQKYCSVLAKQFPFANELNSMARQASAERAWSSINRFYENCKKGVAGKKGFPKFQKNCRTVEYKTTGWKLAPDRKSITFSDHKGIGRLRLKGTRDLHFFQIKQIKRVRLVKRADGVYVQFCIDSERREDITPTGNTVGLDVGLKEYYTDSNGEVAKNPTFLRKAEKVLKRAQRRVSKKEKGSNNRGKARHILGKRHLKISRQRKDHAVKLARCVVQSNDLIAYVDAERRAEGRFENQKYGEKSLSS

SEQ ID NO: 44741 - protein, 189 aa, Exiguobacterium sp.
VMGVDLGLKVPAVVSTNQNKVKFFGNGRENKYMKRKFHVTRKKLGVQKKLQAIKRLSDKEQRWMIDKDHKTSRAIVEFAKQNDISIIHLEKLTNIRKTARTSRKNNRNLHTWSFYRLSKFITYKASLEGIQVKYVDPAFTSQSCPNCGQKNKAKDRTYSCSCGFKKHRDIVGAMNVCHAPVIDGNSQSA

SEQ ID NO: 44742 - protein, 435 aa, unknown
  TnpB Polypeptide
VDKKTREKLKELGIITAKCWNEVNWLRIQQFKKGGRVDFNKTEKVVYQRYKQVLKVNAQQVARKNAEDWRGFFSLVKEKKDDKLPIWFKPRPPGYWKSEDGKYKLRIIIRNDRYEVNESERTIYLKDFKLSLKFKGKLKWHGKHGRLEVIYDEAGRSWYAFIPVEVKDVAEVKGHLRASVDLGIVNLATAYVEDGKCYIFKGGGVLSQYEHYSKRISKVQKVLAIHKQRKSRKIKLLHDKRRRYLKHALNSMVRKIMEELRQKRISEVIIGYPKEISRNHGNKLTVNFWNYSYVIKRFEDIGEELGIRIVKVDESYTSKTCSLCGEVHESGRIKRGLFKCPRMGKVINADLNGAINILHIPEFQGSGRKGQLPVRDRGNGLKTQPVVYRWTNKAGWVQKSPASYEVMKMKAVNHKPMIPLRVPLPFRVGRRSVTK

SEQ ID NO: 44743 - protein, 413 aa, unknown
  TnpB Polypeptide
MTYKAFKFLLKPNQEQREQLTRWGGSTRWLWNYCLEKNKEKYQQEKKFIFEHEMIIALPKLKQKFDFLREVPSQALQQKCMDFNTALTRVWKQGNGFPKFKSKHQNSDSLRIPLTNHQVKPTKPQIKLPKIGWVKWKRHRPLEGKLKNITIKQELGNWYVVCLCELPEIETKQVIDSIVGIDLGLKEFAVTSDNQSYHTPKLYRKKQKKLAHQQRILARRTKGSANRLKAKNKLAKTHLKIRNQRQDFTHKISTQITKDYSFVAVEDLNIKGMTKNRRLAKAISDQGWAMFLNQLDYKSKANGGKTVRIDRWAPSSKTCSNCGEKHQMPLCVRVMKCDCGHVMDRDLNAAHNIRRWGLKLLVGMGHTEPGETQNACGDTTTGVRSTDPTRYVSLKQEKFLSFGQEAATLQGSQ

SEQ ID NO: 44744 - protein, 359 aa, Kribbella sp.
MSRYRLDPTPAQEAALLAQCRQARYVWNLALEQWSMWTPDKRPTPGYVEQARQLTEARAAFGWLRAGSQTVQQQALRDFDQAVKNFYAGTHRRPTWRKAGLHEGFRIVGSQASRIVRLNRKWAKVNVPKVGWVRFRLSRAIPDAKSYRITRDRAGRWHIAFAVIPEPIPAPGTGEVVGVDRGVTVSAALSTGELLLCPGLSEGEQARLKHLQRRLARCRPRSKRRERVKAAIAKLQARAGDRRKDWVEKTSTDLARQFDVIRVEDLRVAPMTRRTKPKPDPERPGRYLPNRRRAKAGLDRGILANGWGLLVQRLEHKAAGRVEKVNPAYTSQTCSVCGHCAPDNRESCEDHGVLSRTVV

SEQ ID NO: 44745 - protein, 448 aa, Escherichia sp.
  misc_feature (365)..(415): Xaa can be any naturally occurring amino acid
VKRLQAFKFQLRPGGQQEHEMRRFAGACRFVFNRALALQNENHEAGNKYIPYGKMASWLVEWKNATETQWLKDAPSQPLQQSLKDLERAYKNFFQKRAAFPRFKKRGQNDAFRYPQGVKLDQENSRIFLPKLGWMRYRNSRQVTGVVKNVTVSQSCGKWYISIQTESEVSTPVHPSASMVGLDAGVAKLATLSDGTVFEPVNSFQKKQKTLARLQRQLSRKVKFSNNWQKQKRKIQRLHSRIANIRRDYLHKVTTTVSKKHAMIVIEDLKVSNMSKSAAGTVSQPGRNVRAKSGLNRSVLDQGWYEMRRQLEYKQLWRGGQVLAVPPAYTSQRCACCGHTAKENRLSQSQFRCQVCGYTANADVXXXXXXXXXXXXXXXXXXXXXXXXXXXXXXXXXXXXXXXXXXXXXXXXXXXVLWSYSERKSPVTKSIQMPGMWIYSERRCKWRS

SEQ ID NO: 44746 - protein, 313 aa, Caldalkalibacillus sp.
LWAGDADMANKAYKFRLYPTQEQEQLLAKTFGCVRFVYNKMLEERQHIYDTFKDDKEALKQHKFPTPAKYKRDFPWLKEVDSLALANAQLNLQKAFTNFFSGRAGFPKFKSRKAKQSYTTNIVNGNMKLADGSIKLPKLKWVKLKQHREIPADHTIKSCTITKTKTGKYFISILTEYEHQPVPKEIENVVGLDFSMNTLYVDSEGKRANYPRFYRQALEKLARPLLFGQSVHDNGWGLFTTFLQYKLAEQGKKLIKIDKWFPSSKTCSCCGRVKVSLSLSERLFRCACGFVADRDINAAINIKKEGLKQLGIA

SEQ ID NO: 44747 - protein, 340 aa, Blautia sp.
MLAEKMEYYKRTGKSLKVTPAKYKSEFPWLKDVDSLALCNAQLHLQTAYHNYFRDPSVGFPKFKSKKRPGRSYTTNCVNGNITLKDGKLKLPKAGWVRIKQHREIADALLLKGATVCMEADGKYYVSLLYDCEEQPAASGAARTAVGLDFSMKELYVASTGDRGGYPRYFRASQRKLAREQRKLSHCERGSNRYKKQQKKVARIHTHIGHQRKDYLHKQSRKITNSCDIVCIEDLDMRAMGRGLDFGKSVSDNGWGMFTNFLAYKLEREGKRLVCIGRWYPSSKTCSRCGRVKKELGLGERIYRCACGNQMDRDENAAINIRREGLRMLGIVPDIERNAS

SEQ ID NO: 44748 - protein, 362 aa, unknown
  TnpB Polypeptide
VNKSFKVRIYPSQKQQILINKTFGSTRYIYNFMLNLRQKLYKNFNMSLNYYNACKILTELKKQKPWLYEVDAVALQQCLKDLDIAYINFFNGIGYPNFKSKRGKNSYRTNNKLKLDQDNKMIRIPKVGWIKFRDKTNFSGLTKINNITISKTSSGKYFASISAEVDIKAFAKTKKSCGIDLGLKDFCILNDGIKFENPKFLVNSEKRLRLLQKSLSRKIYGSKNYEKTRIKLAKFHEHIVNCRKDYLHKISLFLVKNYDIICAETLQVKNMLKNHKLAKAISDVSWYEFCRQLDYKCLWYDKKFVKINTYFASSQLCSNCGYKNSNIKNLDIREWTYPECDVHHDRDINAATNILNKGLTLI

SEQ ID NO: 44749 - protein, 371 aa, unknown
  TnpB Polypeptide
MSRTIRTFEATIPNQQQVRDDLDQLGWAASKLWNVGRYYAEEQWDETGEIPDDGELKAELKGHERYTDLHSQSSQRVLEELAEAFNGWFSKRRNGDDRARPPGYRKHGDSHPRSTVSFKAAGFKHDAQFTRVRLSKGRNLKEHRSDFILCEYQTRPDVDLTEWDIQQVRAVYNRDEWRLQFVCRTTIDPEPPGEEVAGVDLGICNFAAVSFGGESVLYPGGTLKEDEYYFTKKKPHATILRPVRPLVSTASERVVGRTSCTHSRKQSWRSASNEVLVRLSLATSVAFERTTRAANLGIGATTAISTCTGGRSTASRRYSTTRRKSKASTWSWCRNAIRRSRVRRAATQTRISVLNVGCTCARSAVRLQTRT

SEQ ID NO: 44750 - protein, 611 aa, Streptomyces sp.
MGKRARGAKQREPRPHRALAAPFVVAPPSGCRIRTRLHLSPADAVVLRAVGKHLGALAGADLAARVRIGNVPAAHNRRAERKKALTAQSSSRWAGSITRTSEDQYQLARRALDARIGSLRRAIATISSRLAVAPGSREQRGRRWVRGYADDSERRAKQQRLQILQGQLRRAVREREGGRVRVTRGGHRLLNARHHLYDAATAEKPLTAADWQAQLEGWDATWSARRMFLTVDGEAGAPFGNYTLSIDPADGSIAMVLPDPLRVQYANAPRGRYVLDATAVFSHRGGQWADRIAAGASVRYDITYDPARGRWYLDASWSTTAKGQTAAVPALETLRRHPVLAVDLNADHLAAWILDPRGNPVGTQHTIPLQLSGLPAPTRDARLRAAISRLLHLAQRHECAALVIENLDFADARATGREKLGRGRRGRAFRRLVAGIPTGRFRDRLSGMAHHAGLSVIAVDPAYSSRWGAQHWLNPLTEQASTASTTAITGHHAAAVVVGRRGLGCTARRRKDGPRQTAATTAPRRAEAAAVRPEDRTGTTAPAALSHHSTGRTERTAPARTSRSTPVVRQTRARPPGKHPPHGPTTVRGPSIHDQLTLFGMPETANTGQST

SEQ ID NO: 44751 - protein, 547 aa, Catellatospora sp.
VSFAACLRSSCVGLRVVGVCRGCVAGCAAVARFTTFRFCLDPTVEQEVVLRRHAGAARFGYNQCLRLVKQALGGKCRGTVGQVPWSGFDLINVFNAWKRSAAAGRVLVAAADGTTTVEATGLAWRAEVCQQVFEEAAVDLGRGLAAYTASRNGERGGRRVGFPRFKSKKRAQLSFRIRSKTSATGRAGIRVGERAPRTVTLPGIGTIAVREDTRRLRRMLAKGRAKILSATVSHRAGRWAVSLTCEAADLHDATRHRPDSDTGWVGVDRGLATFVVAARADGTETARVDDWPRPSRAGMARQRRLARAVTRKPLGSNNRREAAARLGRHHARVAAIRRRFLHEVSNKLVKTHDKLAIETLTITGMLANRHLAAAVADAAWGELARQIIYKQQWRGGDLIPVDRWYPSTKTCAPCRTVAPAVPLNQRTFTCASCGYQADRDLNAAVNLAIWAEQHHAQIRDLHAGGPVTNARRGEGSGPRTRASETSPDDAGTAPTPPRGEERTPEKGAVSQLPRVMKQAVAPSGTGTVRREAGPRPTGPEPCSSCRP

SEQ ID NO: 44752 - protein, 300 aa, Haloferax sp.
  misc_feature (273)..(273): Xaa can be any naturally occurring amino acid
MLETTRTYRAKIVNHQQVSDDLDDCGHSASKLWNVARYHAQQEWDNTGEIPSEADLKRELKDHERYSDLHSQSSQRVLEELAESFNGWFKKRKNGDTDANPPGYRKRGDNHPRSTVTWKQNGIKHDSKHNQLRLSKGFNLKNHRSDFILAEYETRPDVTVENIQQVRAVWNGDCWELHLVCKVEVPVEDAPGDNTAGIDLGIKNYLAIAYDDGDAELYPGNVLKQDKHYFTRDEYDTEGENGPSRRALRARQKLSRRKDHFLHALAKHIVEQXVAPCAPCPAETLASERPLPARPRQAHR

SEQ ID NO: 44753 - protein, 343 aa, unknown
  TnpB Polypeptide
MLRLRTDAWYKDQKHVGYHETSALLTELKKQPETIWLNEVSSVPVQQSLMHLQVAFKNFFAKRAKYPTFKSKHDKQSVTYASTAFKWDGKSLKLAKMNEPLNIRWSRTLPKAAKLTTATVSKDAAGRYFVSLLCDDLVAPKPEAAGQIGIDLGLTHFAILSTGEKIAAPNTFRKNEARLATLQRRLAKKQKGSANRIKAKLKVARLHAKTADTRRDFLHKLSTRLVNENQVIAIESLAVSNMQKNHCLAKSISDASWSEFVRQLKYKSLWYGRTLIGIDRWYPSSKRCSDCGHTIPKMPLNVREWICPECGGIHDRDINAARNVLTAGLAGLALGESGIPVCI

SEQ ID NO: 44754 - protein, 414 aa, Saccharopolyspora sp.
MLTGRRYRLSLTPEQAEQCELFGGICRSVWNTALEQRRECRRRGAWINYNEQATQLADAKTEHGWLKQAPSHVLQQTLMDLDRACRAHGTFRVRWRSGRRWSPSFRFPAGKQITVERLGRKWGRAKLPKLGWVRFRWSRALDGMVRSATVSRDGADWFVSFLVEDGATTPERHAAPNSGVGVDRGVATAVATSDGDLLDREFRTKGEAKRYRRLQQKLARQQRGSTNRKKALAKARRIKRRETDRRDDFCNQTAHQLATHNVLVAIEDLRTRNMTASAKGTTEEPGKRVAQKSGLNRSILDKGWHKLQLAVENVARYTGTKIVKVPAAYTSQTCSACRVVDPKSRESQARFRCTQCGHAEHADVNAAKNILAAGRAVSACGDLGNARSVKQEPAGNREEVPRRPALELIGTPHI

SEQ ID NO: 44755 - protein, 558 aa, Saccharopolyspora sp.
VGKRRLRRIAASFTVAAPSGARIRDRLRVSPADERVLALVGRHLGRIARADLAERVRIGDVSAKESGRAWRKKALTAVSSSRWAGAITRVSEDQYRLSMRCLHAERISLKQAIRTIKRRLSAPCGQRTNGVRGYADASERWQKYRRAQVLQTRLAKVEQLIREGRPSIVVGGRRLARSRHRLDDAGLTVERWREQWDATRLFLTADGESGASFGNYTISVHPDTGVVTIVLPEPLRHLANAARGRYQLECTVTFHHRRSEWLDRITANTAVRYDIVQDPQRGRWYIDASWSTPTAAVPTPDEIAAEGGRLVSADLNADHLAATVVDPHGNPVGAPHTIPLDLTGPASRRDGRLRQAISDLIYLAREHGCVGIAIENLGFTDARTTGRETMGRGQRGKRFRRTVAGIPTARFRERLRGMVYHAGLLVIAVDPAYTSRWGEKHWKTPLQRQSKTVVTRHHAAAVAIGRRGLGHRVRRRPGVTAPDRRIGLRRATGQTAPAPRPRGRTRPPRTAGTPRRGGKTCLRRGEQLVLFPDLHDRSGDHRTVSPDCGDLANSGHSP

SEQ ID NO: 44756 - protein, 409 aa, Halorubrum sp.
MEVRRTVPVKLDVTDEQADLLHETIGEFLWAANYVVDAAWDGEWAETRSSALHEMTYDEVREQTRLHSNHVQSARNRAVDALKSVVAEWKNGEYASIPTFSSPFCEYNQRNATFHDDHAVLSTVDGRVTVEYALPDRARDTPHSKYLHSERWETTGATLHYRRGDFYLHVRTKADVDDPKPAENGTVLGVDLGIENIAVTSTGVFWSADELNHWRQEYVERRKSLQECGSRWAHENVQAVGRKETGRFEQYLHHIANDLVAEASESGCTVIAFEDLTDIRDRMPDVRKFHEWAFNRLYDFVSYKAEERGIQVEQVNPKNTSRRCSSCGFTHEDNRPSQDTFRCQSCGYENHADYNASKNIGYRLLRNQTGGEGGAPVGVRLNTGMLNANGVKPIPDSVRAGVHGEGPSL

SEQ ID NO: 44757 - protein, 407 aa, unknown
  TnpB Polypeptide
MKGEELVETLKMRALPKGSDDHDALVEFLRLYRDAVQLAVNRLWSLSEIPSITTLHKMFYSELKRYGFRAHHVKQIYIYAKTVVRASKQNGGRKPVLRRLTARIDRYDYKLDLENKTLVLKIHGGREVKLRLLTSIDRIEKFRGWGNYELAVKVVEDKVYVSIYFRKTVKSRRTKTITTIDVNFDNVTLAVFASSGKLLKLKRYKTPLRKILTHRIWIERIQRRYSKSWKFIRGVRRAIKRHGERIRSIAWDYAHKLGDRVAEIADEHSLTIVLENLNKLRSNVNRGSSFNKKLSLWFYRKIQFTILYEALERGLMVSYVNPMKTSSTCLRCRSRLKDNGGRALQCTKCGFIGDRDVVACINLFYRYTRCGVPGVTLNAPKPDENPSGMRGNRDEAMKSTNINLYQS

SEQ ID NO: 44758 - protein, 367 aa, Heliorestis sp.
MKIQITVKVKLEPTKEQSVQLLTTTREYIRLVNQIVSDYVFVDSYLKYTSKDVVADLPSAVKNQAIRDAKSVFSKYKKNVFDNSKLAPEKQKEVKVPVLKKPVAIWNNQNYSLKGNILSFPVWIDGKSKRISVKVILTDYQQNRLTGKRGSLRITQKAGKYIAQIAVDLSMEHQQTGAVMGVDLGLKIPAVAVIEGGKTKFLGNGRQNKFVKRKHRSIRRKLGKLKKLSAIRKRHDKEQRWMKDQDHKMSRQLVNFAKENGVATIRLEKLSGIRQTARTSRKNEKNLHSWSFYRLASFIEYKARLEGIKIEFVDPKHTSQKCPICGQLNKAKDRKYKCKCGFQTHRDRLGASNIITAPVADGNSRSA

SEQ ID NO: 44759 - protein, 406 aa, unknown
  TnpB Polypeptide
MTVGGKRLWRNRNNLDAVGMTEQRWREKWDAARLFLTADGESGKAGGNETIRVDEHGQLRIKVPAALAGELGTHLVIAAPVQFSHRCEEWADRVAGRRAVRYDISYDSDRGRWYLDASWTTSPGPVPQLDDLRAWPVLSVDLNADHLAACVLDASGNPIGAPISIPVDTARLPASRRDGRVRAAITSLLDHAGQLNCSLIVVENLDFADARATGRETLGRGKRGKRLRRTVAGIPTRKFRTRLTGMASRRGIAIIGVDPAYTSRWGAQHWHRPLQQQTSDPATVTAHHGAAAAIGRRGLGLAIRRRPAGPRTRQRTSTGTPPARPEYQPSTTQRRCSSSGSPPRPQRREACRSTGQHPPPAANTVRAAQDSGTVGGQSLNTHSLRPSNQERSRGGRLAVRTSTRQA

SEQ ID NO: 44760 - protein, 291 aa, Cyanobacteria sp.
VDKAFERYIQGDKNGKRSGKPRFKNDFRYRTMVFDGAKNEWLKFCTVNGKWLYLKLPKIGLVKVRTHRPLPVGFNLKQVSITKKSDGWYVNFVLDDPSVPTFKREEIVPTWDNSMGIDAVLNEDVYLATSEGEILPSLKPLRKNLDKLGKLQTKKNARKKGQGRRRKLANREGRLHQQIARSRKDFHYKTAHKLVGSGKKVFFHESLNLAGLTKRNKPKQDVSVAGRSPEGNILTNGQSAKSGLNKSWLDAAFGQFFSILGYIAEKAGAVVIEKNPAYTSVRMLESTWVWL

SEQ ID NO: 44761 - protein, 408 aa, Chloroflexi sp.
MKLVEQHIIAKVDPGYGAIDAAAFASKNLYNQATYQIRQAYIHEGKSLPYAEIFHRLKHLECYQALPRKVSNSILIQIDKNWKAFRESLKEWEEHPEKFKGKPKIPGYEHKEHGRFLLIYYIQSLGKRAYNKTGRIVPSGLPIQIKTKVAWDAIDQVRIVPRRDFYVVEVVYQKGEQQAAVDPKLVAALDLGVNTLAAMTSNKPGFVPRLISGKPIKSRNQYYNKQREHHQKKLAKQQRFTSRKLDQITTKRHRRVQHYLHTASRRIIDLLVKEGIGTLCIGKNPLWKQEVKMGKKNTQQFVQIPHARFIEMLRYKGALVGIQVITHEESYTSKASFLDLDPIPTYDASRQEPPTFSGRRSGRWYYASGKRVLHSDVNGSYNILRKVAPTAFGPGVEGAAVRPRRLAV

SEQ ID NO: 44762 - protein, 482 aa, unknown
  TnpB Polypeptide
MKRAKMPTFIVELPVSVSQETDRQLTARLLAGTRLYNSALGEALHRLSLMRQSKAWQAARTKKPKGRTQTFQALTRDFGFLSASVSAFATECKNAAGWKSRLSANETQRIAETAFAAVEQYSFGKRGRPRFKNAKRPLKSFSGKTNKAGIRYKPDLGVVEWAKLVMPVKYPPAGKDPWLEEALKAKTKFCRLLWRNVKGHRRWYVQLAQTGLPPIKEKNTTSDGQEVGLDVGPSSLAVVSESGANLLAFCPTIEHPWKQIRLLQRAMDRSRRATNPHCYNENGTWKKGAGVKVVSRKYLTLKKLAAEEERKLAAERKRSQGQLGNEVVSLGNLIKTEKLSYKAWQKLYGKSVKVKAPATFIDGLKRKAERAGGQLTELNTWSLKMSQYDHVKADYVKKTLSLRWHILGREITQDTVLVQRDMYSAFLALCVVENEHHPSQLSTRWPVVKPLLEQAGWCRKLEVAKGGAIALPAVKPSERLAC

SEQ ID NO: 44763 - protein, 419 aa, unknown
  TnpB Polypeptide
MARPRAKKKKVSSDTHTRSVFLYGQPNVEKRRILEKLQEDYTDAVNSYISILYDRKDCLLQLLKNDKKDSLLRKLEKEYRVKTLASAYSQNAFDEAVTLLHNRLDNIRKDVIAATEGSVFAVSVLLFHAVLTEQSREEMCDTLIRIRDSYKDKNKIQYYDSLCDTIRTMDKKKFHGKTAEVEMFYHIISDEYRIPAVEKAHVKMDTRLCCLERAEDVKTSHVLAVTIPGSKGKRLEIPVQASRDALRRMAQYKVSGSMRYTITAGGFLKLTCSFEKKTQTSAEHSKIIGVDVGITDAFHTSEGQAIGSFQSAIDFYQTEVEASFGKLSVLRNRKQQLRWFLKKHKDVLPEDVIRNLRKRMDHLEKDIRQSKAPYRKKRHYHQLIEQTIRCAVDTYIKSLHGDKTILTAMELLDIKEFNN

SEQ ID NO: 44764 - protein, 379 aa, unknown
  TnpB Polypeptide
MISYKYNIYYSKKTKYLDKMLCECCFVWNHALALQRRYYKLFGKYVSVGKMQKHFAKRIKRILLHSQTTQEILQRLDSAYNRFFKKLAKRPPKFKRYDCFNSFVFKQGGFTLNGNCLTINKGKKRFKFSYSRAYEGNVKQIRIVRETCTRFSLIIVTDHNPTNSYRKTYDGASVGLDFGLKTYLTKSDGSSIVSPLFFKQYQNKIRKLSKKFSKAKKGSNNRRRILFELQQAYRKINNLRSDFQWKLAHQLCKQYDYIFIEDLNIEGMKHLWGKKISDLSHSSFIDKLTYIASKYGVTIHKIDKWYPSSKTCECGCINKGLSLRDRTWVCLACGSVNDRDVLAARNILRKGISELESKSNSIDSNIGVSYVCIQESHCL

SEQ ID NO: 44765 - protein, 390 aa, Chloroflexi sp.
MLIFEYKLDGSKAQYAAIDEAVRIVQFIRNKCLRLWMDERGVSKNDLQCYCARLAKEYSFVGSLNSQARQASADRAWFAISRFYDNCKSHKPGKKGYPKFQHHNRSVEYKQTGWKLEPDGKHITLTDGCGIGRLRLVGNAKQKIEAFPVKQIKRVRIVHRADGYYVQFGVKAERVIVHIPTGKQVGIDVGLKAFYTDSEGNTVENPRHYRKVEKRLKRLHRQFSRKHKKSSNRKKARKQLAQAYLKVQRQREDFARKMASTLVSSHDLIAYEHLQIRNMVKNHHLAKSIHDAGWGTFIQWINYYGSLHGVAIVAVPPQYTSQLCSACGTMVKKSLSVRTHVCHGCGVVLDRDHNAALNILQSALDRTLGHRETGKFVLQNAWGQVASCGD

SEQ ID NO: 44766 - protein, 394 aa, Nonomuraea sp.
VRRSFRFLLRPTAKQAAALAQCLEDHRQLYNAAIEHRRTAYRKAGVTVRYGDQSGELKHIRADDPDGQGRWSFSSQQATLRRLDKAFAAFFARVKAGRTPGFPRFKGRGRFGTVEWPKDGDGCRWDSQPGHPSVTFVRLQGVGHVRVHRHRPVRGRVKTISVKREGNRWYVVLSCDDVPAEPLPAAGAVAGIDLGVAALVTTSDGVHVANPRHLAATADRLAAAQRDLARKKRGSTRRLKEVARIAALCGKVGRQRVDYAHKVANALVRGYDVIVHEELRIANMTRSASGTVEAPGRNVAAKSGLNRGILDAGWGVFLTILSHKAESAGRELIAVNPAGTSRTCARCGHCVRENRVTQAEFRCQACGHAAHADVNAAINILRAGLALRRAAEAA

SEQ ID NO: 44767 - protein, 466 aa, Salinigranum sp.
LDSIYSDWQYSPTTYTCLSRVIRNSPRTKSCNRSRDTPLAPFETSLTSVFRRCGLVRTSSLRRMRYRARPSNNTSKHRRDSRMQREVATTVRVKLHSLTERKADLLSREYDAFQTAVQGDDANLYSATKQQASKVRKQKNPRRDTEQPVVLRNDVLGVEYDEDTVLSSWWVKIPVYDPELGRGNSIWCPAIIPEKDEPLVHEGTVRDSELIRRDDGWYVHFVIKKRYEVREKYDDVLAIDMGARWIATSVALSTRETTFYGKDVRRIREHYKQLRKSIGKAKVRQGRQVLHRIGNTESRKVDDRLHKISRTIVDDAVSRNAVIAVGDLGGIREDNDKGRHFNDKLHKMPFAKLLSYIEYKAHREGVEVVLVDEAYTSQTCNRCAEKGVRYTQGQFRCPHCGLDDNADKNGATNIGKRVLGKFSKPLSDTGAVLTRPETQVVVDPENSQDSVGLTLSEGTPRLQSWE

SEQ ID NO: 44768 - protein, 465 aa, unknown
  TnpB Polypeptide
MKAYEVLNLLRISRPTLTKYVKERIIKTTILPDGCYDYDVDSVYHLLNKDVKRKPKMNETVQRVEKHLIKKQDPFFPMLMEFCHHSKNLYNHANYFIKQEYRVNGKWLRYQELDKRLKVDMKFPDYKEMPTAQSAQQTLKLLDKNWKSFYASMRDFKKHPEKYLGRPRPPKYLKKDGVYTLVLTNQNCKFDGEMIYFPKVFHGFTLKPMFVKNEKFVTFNQVRLIPHKDRIVLEVIYSVLPMPMKEENQRYVGIDLGVNNLATVANTIGKEAFLINGKPLKAINQFYNKKNSHYSKVCQCMNDKDYSSRRNRLTEKRNAKINDYMHKASKYIVNWCVNHDISAIIIGKNREWKQEVSMGKKNNQTFVEIPFARLIEMIQYKARDYGIAVITTEESYTSGTSFIDNEEPTKEQYNKARRVYRGLFKANNQTQINADLNGAYQIIKKVFPIKWDRGCALHPVVVNLG

SEQ ID NO: 44769 - protein, 435 aa, unknown
  TnpB Polypeptide
MGSYEAVKVRLDPTPKQERLMASHAGAARFAYNAGLAHVKEAIDNGESADLSHYGLRRWWNANKDQLAVNRDTGVVWWSQNSKESYNMALHGLARGFSNWAKSRKGQRKGKRVGFPKFKSKNSVASFAYSTGFTAPKSGDPYGLKLPRIGRVHCMENVYERVNGAHLVRVSVSRRAGRWYASLTVEREPAAPASPPKGGVVGVDLGVKNLATLSDGTVIPNPRALGAGLKALRKAQRALSRRVKGSVRREKAKERVARLHARVADVRADAIHKATSMIAGNYSVVCVEDLNVAGMVKNHSLARSLVDASLGEFRRKLEYKTARTGAVLCVVDRWFPSSKTCSNCGVVKAKLSLSERTFNCDACGLSIDRDLNAAINIQVAGSAPETLNARGEDVRRANDMLGNADPGEARTKRARQSAVRLGAGLGNEVIQPRIN

SEQ ID NO: 44770 - protein, 294 aa, unknown
  TnpB Polypeptide
MVKAIKVMLIPNNVQKTKMFQYAGASRFAYNWALAREKESYEKGGKFISDSELRKEFTKLRHSDEYAWLLNISNNVTKQAIKDACTAYKNFFKGLQKFPRFKSRKRSMPKFYQDNVKIQFSNTHVKLEGFSSSRKANKQKKNWVRLAEHGRIPTDVKYMNPRISFDGLNWWISVCVEFPDCKETLNDDGVGIDLGIKDLAVCSDAVKYKNINKSQKVKSKYEGGKDTLSYAESGGGQGSKGARNNQGGQKKKKITERKISRIDESLCGKFYCKMKNKNEKHFQIPLTYKNNVIK

SEQ ID NO: 44771 - protein, 459 aa, unknown
  TnpB Polypeptide
MARFEVPEGWCVQAFRFTLDPTEDQGRALARHFGARRKAYNWTVAALKTDIAQWHATGVETEKPSLQALRKRWNTVKDEVCVNAGTGAVWWPECSKEAYADGITGAVNAYWNWQSARAGKRAGKRVGFPRFKRKGRDHDRVSFTTGAMRIEPDRRHVTLPVIGTVRVHENTRRIERLIRAGRALVFAISVRRNGTRLDASVRVLVQRPQQPGVALPGSQVGVDVGVRRLATVATADGVVIEQVSNPRPLETALRELRQVSRARSRCTKGSRRYRERTTQLSRLYRRVNDVRTHHLHVLTTRLAKTHGRIVVEGLDAAGMLRQKGLPGARARRRGLSDAALGTPRRQLSYKAGWYGSALVVADRWFPSSRTCHACGHVQDIGWDEKWQCGSCSVTHQRDDNAVINLARYEEPVSVVGPVGAAVKRGADRKTGPRPAGGREARKGTSQPAGEQPRDGVRVA

SEQ ID NO: 44772 - protein, 459 aa, unknown; identical to SEQ ID NO: 44771
  TnpB Polypeptide

SEQ ID NO: 44773 - protein, 373 aa, Paenibacillus sp.
VTVKKAYKFRIYPTKEQATLIHKTIGCSRFVFNRFLAQWNETYKETGKGLTYSSCSAELTQLKKELEWLKEVDSISLQSTLKNLADAFTRFFKKQNDAPRFKSKNNKVQSYTTKQTNGNIAVLGNKIKLPKLGLVRFANSREVNGRIIHATVRRNPSGKYFVSILAETEVRPLEKTGSSVGVDVGLKDLAILSTGEIFANPKWFRKLEEKLANAQRILSRRTKGGSNWNKQRIKVARIHERITNARTDYLQKISTDIIKNHDVIGIEDLQVSNMLKNHKLAKALSKVSWSQFRTMLEYKAKWYDKQVVVVSKTFASSQLCSCCDYQNKDVKKLNIREWDCPSCGTHHDRDLNAGQNLKKEAIRLLTVGTTGIA

SEQ ID NO: 44774 - protein, 235 aa, unknown
  TnpB Polypeptide
MEGSLREEVKPMSELTVTAKVQVKVSAADEELLLRTMDTYRQACNYVAGHIFRTHDLKRASLNKALYRDLRAKFGLKSQMAQSVLKTVMASYKTILTNQKDWIQPSFKVPQIDLVWNRDYSLRQDTFSVNTLAGRVKLGYYSQGMEQYFNKDIYHFGTAKLVWKHGKFFLHIPVTLEVPEWVNKDVSNVVGVDRGINFVVATYDDAGKSTFVNGRPIKQKRAQYAATRKQLQKRH

SEQ ID NO: 44775 - protein, 527 aa, unknown
  TnpB Polypeptide
MRSQTPSFVVKVKLHLQENVKNHLNKSFHIADSAYNETLSFGLKRFSAMKKNERYQELLELRREVVKVQENIKKKIKEETKKEIKQKLREEAKQKKTELKEIDDEFGEIRMNYELTKYQLSSWILERRKQTKAYQHLNTAELQVIAENAYQTLSQVIFYKTKPEKLKFRSKYSPNHSFRNRVNTTGTILLVSEKPDIAYRLYIHKRTTFIDIPVSAFTEYQQEQLLRADKIKYVQIVSKTIRGKQVFYLYIVCQGIPVTKIQKGEDVTGIDPGVSTVAYVSKDSCELVDLVPKDFARKERLIQNLSRKIERSRRVNNPATFNEDGTRKKDVRLKPLSKRAKRLAIRRQTAYRKLTENRRKIQGKLVNYIVSQSSVIKIEDLDVKSLQKRKRETRINPKTGRPFSKKRYGKAIFKAAPGHFRTLLLQRANSTGCKVDIISPKKTKPSQYNHITGEFNKKELKTRIYNLTDEITDVQRDLYSAFLIAYIENDKYLTEQLEENFDNFYKNMKEQLRILREKPSRLSWYVA

SEQ ID NO: 44776 - protein, 425 aa, Oscillatoria sp.
  misc_feature (318)..(318): Xaa can be any naturally occurring amino acid
MLNMTWKFKLEPTAEQVSEIEHILDVCRNVWNFALRERKDWLDSRKSRVNACSLQQEFILPADAPFPNYHIQAKRLTAAKTEFPRLKTVNAQVLQQVLRKLETSWESWRLKRSGLPRFKKTNRMRSFVFPQMLKNCISDKGIKLPQLGWVRVRWSREIPEIFQVKQARIVRKASGYFVMLSLQANVDIPDVMPHGHPVGIDVGLEYFLSTSDGEPVKRPRFFNHLHRKLKSLQRRLKNKQKGSANWLKLQKKISRVHQRIADTRKDWHFKLAHHLCDGAGMVFVEDLDFRIMAKGMLGKHTLDAGLGQFTNQILPWVXFKRDVYYGKVDARGTSQECPDCGAEVRKDLSTRIHHCHNCGSIKPRDVASGQVIAARGQRVVEMACGGDAAGTELAQSSWHLLKQEIFGATHREAFGNRIGISTHNL

SEQ ID NO: 44777 - protein, 378 aa, unknown
  TnpB Polypeptide
LRTKNVSRITYKFRLVPTHKQVELLSFTLTRCRELYNAALQERRDAYRMARKSLNYYDQANQLVEVKEVRPEYKDIHSQILQDVLRRVDKTFQAFFSRVKSGEKQVGYPRFQGRDRYDSFTFPQLGWTLHNDRLTLSKIGAVKVRLHRSMQGKVKTVTVKREGEHWYVCFSVEVVDVAMPHNDKAVGIDLGLTTFAVLSTGQKIENPRCLRKSLHKLATKQQALSRCKRGSHRRAKARRAVTHVHRRIRNQRADFLHKESRKLVNEYGTIVFEKLQPKNMVRNHNLALSISDAGWGQFVSYASYKAANARRSVLTVSPAYTSQTCSSCGTIKRKELSERWHSCECGCSLDRDHNAAINILRLGTSQQASQVACRSPRL

SEQ ID NO: 44778 - protein, 566 aa, unknown
  TnpB Polypeptide
MYNPNKHTYEVDTYHVIELELSGSNQDIYHLQWISNQEHYLYNSIIGFLNKNYKQLLNIRKYHRLKLTYKNTCEKLSKLDENDLNYNLYENKKKDIGNKLNSLYKKYHLTKKDIDDFVKNLNLTNINSIFILTTKERAYKSLETVLYNNGKTFRFKSIKNDQPSICAKQINRGITIKFKNEECFIHVGQPKNGKKSITLKLKELKENDIFIKEEFSELKKYLTTKDIDKFYENEYIKTNIKQNTHRPCFLKIVFKQIRHKVRIFLQITIVGQSKSKKDKNGNPRHQFTDGIIGLDLGPQTVAVVGSDIVLNTNLAERNHKSSRDTEYKNKKLLKKMDKSRRYTNPQNYNKDNTIKKDSKNFKKVWKKSKRYKKLEYKLHEKYRKDALTRKYANQELANKIREHGSIIVTEKNNIESLKRRSKKTENSNKKILKKDKNGKIQEITKKKKKKRFGKSIQNRCPGEFLVDCNKKFKEVLTVDRMFRASQYDHTNDTYKKKELNIRQFKLSDGTIVQRDIYSAFLLYCTNKTLTTPDRNLCITYFENFYKLYKGFEKYVEDNHIKILNYK

SEQ ID NO: 44779 - protein, 412 aa, unknown
  TnpB Polypeptide
MVEDSATRTVPIKLDVDGSAADLLHQTTDYFLDAANYVVDAAWEPDWKITSKQTLHDLTYYDVRDDSPLPANLVQAARNRAAEAVKGVVERWKQGEKASKPHFTSRFASYDARTVTVNDDHCTLATIEGRVTAEFVLPDEQRDTPHSAYLFNDDYDLKGATLHYDEVEDCFYLHVRTKPTVENDDAEQGDAEHVSVLGVDLGITNIATTSTGRFWAAPNSTTGIENTKSAVAISNKLGLDGHTRTFSESVASRLGGSNKCFTRSRTKRVEEALENDCTHIVFEQLNGIRERLPYAKAVHKWAFHRLYEYVTYKAESEGLVVRQINPAYTSQRCSKCGFTHEDNRPHNNGQDEFGCLKCGYDIHADYNAAKNIGLKYLRDQQKSGRGGAPVGVRLNSGMLNVNGEYSPTVING

SEQ ID NO: 44780 - protein, 368 aa, unknown
  TnpB Polypeptide
MKQTMLLKLAPTPEQAQALLDTMHTFNAACNSIAAQAFESQVANKFELQKMTYGELRTSYHLPAQLAIRAISKTTDVYKRDKSIKPTFKPEGAIVYDERVMSFKGLTTVSLLTLQGRVLVPFRMGGYQASRLGSIKGQADLIYRKGIFSLAVTLEIPTPTPDETTETLGVDLGIINLATDSEGETFSGEQVEKNRQRHHALRQRLQQCGTKSAKRHLKNLSGREARFRKNTNHVISKRIVQKAKHQNKAIAIEELRHIRKRTERTVRHSQRARQSSWSFWQLRFFLSYKAALAGVPWHTVDPRNTSRTCSVCGHCAKENRKSQAFFVCQACGSTDHADRNAALNISRASVMVPIVSSGSRSGYTQIGA

SEQ ID NO: 44781 - protein, 380 aa, Tetragenococcus sp.
MYKGIECKIYPNQQQADIIQMTFGHTRFIWNQMLGMLNERYQNNKALKMLSYCTLSSLIPQLKREHTWLKDVDSVAIQCSVKTLSETFERFFKGFCRYPKFKSRKQHQQSYLSTIRGQNIRLNYNQRYIKLPKLGWVKCKPSVQHIENERIQSVTVKQRPSGKYTISVLVTSENQALTKTGKSVGIDLGVSDFAITSDGHKYPSQKLHLKYQRQLHYWEKRMARRRLKAKAAGIDLKDAKNYQKSRQHVARIHEKITNTRKNDIHKITTDLVENYDDIVIEDLKTSNMLKNHKLARSIASQSWHLFKTILTYKCRIYGKQLRCVNPYKTSQYCSNCGYDSGKKALAIRHWTCPSCHTNHDRDINAAQNIRNIGLEQALVK

SEQ ID NO: 44782 - protein, 156 aa, Clostridioides sp.
  misc_feature (152)..(152): Xaa can be any naturally occurring amino acid
VEKAYKFRMYPNKKQQELINKTFGCCRFVYNKYLAKRIDVYKNNKETFTYKQCSSDLTNLKKELKWLKEPDKFSLQNALKDLDNAYKKFFKEKAGFPKFKSKKINRFSYKTNFTNGNIMYFSQHIKLPKLGMVKIRDKQVPKGRILNATISXSNTT

SEQ ID NO: 44783 - protein, 380 aa, unknown
  TnpB Polypeptide
MMLSYRFRLYPTEQQDKMLSKTMETCRRLYNRLLDERINTRIDFFEQKRQLTTLRKTDKYLRTIHSQVMQDVALRLDRTFQSFFAGLGRFPKFKRKGRYYSFTYPQMGGFQINNSRMRFSMIGSIKVRFHRPIEGRMKTCTIVRDVDQWFVCITVEVQKEIPTTKAKPPVGVDLGILSLATLSDGTIIPNHKYLKRSIQTIKGLQRQQSRKAKGSHNREKAKIKLAKAWRKVRRQRNDAEHKASHYLAERYSTIVFENLSIDGMVKNHNLASAILDATWGKLRQLTAYKAERRGGWIILVEPSGSSQECSRCGMIVKKDLSIRTHHCPSCGLVLDRDVNAARNILARGLEQAPVETEPLPVLRMGKFGRGSKKPTPLTGG

SEQ ID NO: 44784 - protein, 410 aa, Calidithermus sp.
MCHTALVQTLTLRCTLKPTPEQAAALEATARRFAEGCNHALRVAKEHGEFRRFKLHRLVYRDLRAMGLSANLAVQAIARVGRKKGSRARFYQPTSCAFDQRTLSLRGEDETVSLSTVRGRLRIPLKLGNYQRGLLARARGVQGGVLTQGPRGKWYINLVLRIETPTPPGGGGTIVGLDMGQKTLAMLSSGVRFSGGPLKGVRLRYLKKRAEVRSRLDRPSQRTRGVKRLWERLTRREARFVSHALHALAKRIVDGLEPGDTLAVEDLTHLRGRTARRGSTERHLHHLWPYAKLRSLLGYKAALRGVRVVAVDPRHTSQGCPRCGHTARENRRSQALFRCTACGFQHNAGWVAAYNVALRARGCSPVPQGIVARRAGSTGEGRCKPARILRVSSVHRLLSESPNQNALAFG

SEQ ID NO: 44785 - protein, 461 aa, Calidithermus sp.
MGRHLSHKIALCPTPEQVDYFKRACGTARRVWNWALAEWHKERALGRTPNAMALKKRFNALKYRDPAWLDANGRPWLRDIHRDAHAQPFAHLAQAWQRFFDEIRAGKPAHEPRFKKKGRCRDSFYVANDKFRLQGTTIRLPKVGEVAMTEALRLQGKILGATVSRTGEGWFVSIQVEVPEAQFYRKRTGDGMVGIDLGVKAAATLSTGERVQAPMPLKKALRRLKIRSRRVSRKLEAARLAAGFAPRAPLPKGSKLAQSNNCRKSAQRLARMHARIANLRADFLHKLTTRLCRESQAVVIEDLNVGGMLKHEQLARPISDVGFGMFRQQLEYKAKRYGTRLIVADRWYPSSRLCSRCGWKNAALTLRDREWTCPQCGAQHDRDLNAALNLERLATEGTIPYRDGAPAPYTRTALPVASPSGNGGPAIAIMPIAGGKVTPVRYEPQCGSGQEEKRVRNGARF

SEQ ID NO: 44786 - protein, 541 aa, unknown
  TnpB Polypeptide
LKKRKKQKKQYRYRRNIVEKCVKLETVPANEDTFAVLDALFESYRQCKNMFLERLCGIGSLANIQSFYTLRNAIRAEQKHIQEELTPYGNQTYCEMFGIQGRFWVMALSDTCMTLKSMWTNLGNMCKIKLRDNHPDLTKEERAYCNYVLSSPEILYCILNDIEYDRKPSKTYGKILAGVKHLDRARMYYLHSLLRRIIRDNKPYPKAQRSDCMLLDEMMYEIKSEDGIDYLYLMTNKRGQKLKLKLNGRFCYSRKGNIQVILNREKRNIFIHKCIQTRQRKINSAHPVGIDKGYATLLSCNDGNGNAPEYGEEFGQLISAETERIDKKNTNKNYFYSKKTELLKKLESANSKEETRQISQKLQDLERNHLGNKKYRKQHGKAVKRMESDINYNIRQCMKEMNPSEIILEDLTFTSDRKKQNRKSFNRKMASWQKGYLDERLIYIGKLFGAETEHVNAAYTSQYCSICGSRLGPRYGKHHELVDCEICGTVNANTNAAGNILARRNDKKIMQYTPYRRVKEICEERAAALNAAVDTSNSNIW

SEQ ID NO: 44787 - protein, 447 aa, Oscillatoriales sp.
VPISPSAVHFTHKKKRRTRASQIFHQKKWVETPSFARRLYKNIQHRANITKDVLGCEDMEKAYRYRFYPTSEQENLLRRTMGCTRLVYNKALTYRTESWYERQERVGYSETSSMLTNWKKEEELDFLNEVSCVPLQQGLRHLQTAFTNFFAGRAKYPNFKKKHNGGSAEFTKSAFRWKNGQVFLAKCNEPLPIRWSKQIPQGCIPSTITVKLTPAGLWFVSILVDDYKIQPFPKTDKTIGLDVGITSLIATSDGDKIANPKHFKRLRKKLKRKQKTLARKQKGSNNREKARRQVAKVHAQIVDVRKDFLHKLTTQLVRENQTIVVEDLAVKNMVKNHKLALAISDASWGELIRQLSYKCDWYGRELIKIDRWFPSSKRCGNCGHIVEKLPLNIREWECPKCGTNHDRDINAAKNILAAGLAVSVCGATVRPEESKSRKAGAMKQKPN

SEQ ID NO: 44788 - protein, 398 aa, unknown
  TnpB Polypeptide
MMFRGFTYRLKPTPAQEEKFLQFAGVCRLVWNLALEQRRSHWRNFQARTGDNLNYVTQARELTRLRAEVDFIREVSQTAQQYVLKALDDAYRRAFNGLGGFPQPKKKGQNDAFTFNGRQLLVERLNHRWGRVRLPKIGWVKFRMTRDVRGKMTEATVSLTPLGWHISIGCKIDEDAADPGGEVGVDRGVAVPLMLSDGSMYTMPDGIKRLERKARKAQRIASRRKRGSRRWAKIIRRVAAIKAKQARIRKHWAHEMTTDICRKFGTVVIERLKIKNMTASVAGTIEAPGRNVAQKRGLNRAILNVGWHQIETMLFYKAHRVVKVDPRHTSQTCSACGAVDSRSRKNQASFVCTSCGFRSNADHNAALNILHRGNTPGVEAAVRQPVKRELPSVEIPVL

SEQ ID NO: 44789 - protein, 318 aa, Lachnospiraceae sp.
MPSYCIELKLKVKKDSDRNYLQNYFNAVAKLGNEIRRFVKGNEDSPERERLSKELSVIVGSYGLTKYGLQKSACEMRKHLKYVHSDVYQKLSDSIWRSVEKYLYGNGKQIHFKKWDDVMSFENKKNSTGIIYADGKVYINCTPKRPKGGIVLDIILPHNKESAHYMYETTCLTDRTKYCRIVRKMFPSGWRYYVQLVQEGIPPQKHETGKGRVGIDIGTSTIAVVSKDGCILEELGEPVSSPAEECRLQRKLDRSRHAMNPDNYKEDGSVKKGKKTWKKSKTYQAVQNRLKFLRRVAGSRSEQDRRNGKQGLCGNDGF

SEQ ID NO: 44790 - protein, 468 aa, Streptomyces sp.
MSRFRMYPTSEQEQQMLSHCTHARYVWNLAVEQHSHWRKGRKSAPGFAEQCRQLTEARRDNEWLGAGNADVQQQALKDFAKAKNAKFTSGFGEPTWRKKFQHEGFRVIGTDRVPEYNEDGSPKLNAKTGKQVMGRSVVVRKLNRRWAQVKVPGCGWVRFRLTRSEPPAAKTFRVTLKNGQWHIAFAVLPAPIPAPGMGEVIGIDRGVKITAALSDGRTLNCPQLTPMERAQIRKHQRRAARAPKGSDRKTAEYAKAARLKARETNRRKDWCEKTSTMLAKSYDLVRFEKLNIKNMTRSAKGTAEEPGRQVAQKSGLNRAVLAQGWGLLRQRTEQKAPGRVEDVPAPYSSLRCSTCGWIDKNSRKSQAEFECSSCGFTCNADLNAATNVAAGQGGIPRPRRTAGAGGATPRKGSSVREPQPAWVGIPLFKRGRMSNTRRPTPQTPPTPPTPVINPQPIPGLTETQQVRV

SEQ ID NO: 44791 - protein, 384 aa, Streptococcus sp.
MVIRTQKVRLYPNQTMKKVLDDLCDYRRYCWNQGLALWNDLYDASLILEDQKLLPNERKVRNELVANKEDWQYQLSARCLQLTISDLGKAWKNFFDPSLPDWGKPGFKSKKASRQGFKTDRAKIVDGKLRLDKPRGIKTWCDLKFRGAKNLNGDLKTISIYCENGKYWASLPFEVEIDKKDTTGKHTAVDLNIGHFNYTEGEISVLPSKLKKLYERIQLYQRQLARKRVVNGKKATKSKNYAKTRAKLQRDYRKVAVMQNNILHEFTTELVTDFDKIVIEDLDVKRMQMSHVASKGLHRSMLGRFRQVLTYKAVWYGKEIILADKHYPSTQRCSACGYIKTGEDKIGLAGNAKHGTRHHEYICYECGFVGDRDENAVANLLALI

SEQ ID NO: 44792 - protein, 423 aa, unknown
  TnpB Polypeptide
MDDAPRRTVPIKLDAPEERRGDLHQTKTQFLHCANRTSEWAWRYDDYCVTSKSKAENALYDELREETDLTANLVQKGIRRAIEAVDAGVEKLKDGEKTSQPEFDSWSVVYDKRSASFNDDHATLSTPNGRVTAEYVLPPEDEREETPFGRYYESDDWDASSATLQYDEQDDTFYLHVTLKNPDFVVDASERQEAGHDDDGAENGVVLGVDLNVTGAFAVTSTGEFIGSADYLTHKRNQYEQRRAKLQQAGTRSAHLTIQSIGSRFSDWSLDWLHNRANDLIAEAQDADVDGIILENLDHIRENIANGSKFQQWAYAKFVELVGYKVESTELFVDTVNPAYTSQRCSHCGFTHEDNRDDKAFECQSCGYEVNADYNAAKNIANRYCGYIHRGQKSRGGWATSQLALKSGMLNVNGDYTPAELLG

SEQ ID NO: 44793 - protein, 379 aa, unknown
  TnpB Polypeptide
MSNKAIKYRIYPTTEQGIMFSKTFGCCRKVYNLMLSDKIEGYKATGKFPTVTPAKYKKDYPYLKEVDSLALANKQMDLQAAFRNAFSKSHKKKNGFPVFKSAKHSRKSYTTNNQKGTIAILNKKYIKLPKVGKVKAVIHRIPDDTWIIKSATVSQESDGKYYISVLFWFNKAENTYIADKTNAVGLDYASDGLYVDSNGNVGTNHKYYRESHNKLTKAQRKLSRMQGSKKYEEKSNNYIKQLRKVNKIHRHIANQRLDNLHKISTEIANQYDVVCVESLNMRSLSNKGFGNGKATLDNGYGMFLSILKYKLSDRNKYLIKVDKYFPSSQICHCCSTLHTEMKNLSNRKMVCDCGLAMDRDQNAAINILNEGLRLLSEGA

SEQ ID NO: 44794 - protein, 397 aa, unknown
  TnpB Polypeptide
MTETRRKAYKFKLCPTPEQEQKLDWTLWRCRELYNAALAERKEAWSMCQVSIGYYEQKRDLPAIKALRPEYQDIHAHVLQDVMKRLDKAFAAFFRRVKAGEKPGYPRFQGRDRYHSFTYGEYGNGARLDGGILSLSKIDRVPIRLHRPIEGMPKTVTISREVDGWYACFSCADVPTQPLPLTGQETGIDVGLKSFLALADGTFVANPRYYRKAEKALKRAPRRVSRRQKGSKRRQKAVKSLAKKHQKIARQRRDFHQKIALSLVRQYDVIYREAIQSKNLSIRPKPKPDGNGGYLQNGTSRKAGLNKSINDAGWSQFLTILSCKAAYAGKRVEAIPPAYTSRDCSGCGERVPKSLSVRTHACPSCGLVLDRDTNAALNILRAGQARQGAVALAAVMN

SEQ ID NO: 44795 - protein, 401 aa, unknown
  TnpB Polypeptide
MARRPQAVLPLFNSQTEWYTVLHERRAEAMPEPTAHKTFKYKLRPTSEQVVQFEATLRLCRELYNAALQERKEAWHKCRVSVTYYQQKAQLPEIRQIREDCAAMHSQVLQDVILRVDRTFKAFFRRVKASEKPGYPRFKGRARYTSFTYPQWGNGASLVGDRLLLSKLGHIAVRWSRPLEGTPKTVTISKEADGWYACFSCAEVPIQPLPLTGQETGIDVGLESFLTLANGEQVASPRHYRQAEKALRRAQRRVSRRQKGSHRRRKAIRLLQRAHQKIARQRRDFQHKTTLPLLKRYDTVYYEALQVANMVQNHHLAKSISDAGWSQFCTILAFKAANAGKRAVAVPPSYTSQVCSGCGVVVQKGLSVRWHACPDCGTSLHRDHNAALNILRVGQTRQAST

SEQ ID NO: 44796 - protein, 396 aa, unknown
  TnpB Polypeptide
VKAIKAVSFAYTQTAATRELLETFRMMVNHAIHVCLDENIKGRLRLRDRIYREFRERYQVSSAYPYSVAEVAWSIVKKHKRWHRRPHAKRLMMKLDAQVYSLDYAILSLPFRTGQPRLLVPLHYGDYQRSFLMESSLKRGSVTITETRVAIAFSKEVEPFQPKSLLGIDLNEKSAVCSDGARINLSEVARLHTLYGVRRSSFYARHPHDRRLKKKFAGSRREKERVKQFLQKEAKRIVEKARRESNGIILERLKGIRCAHRKGNGEGANRRRRIALWPFRQFQGYIEYKARWQGVPTEYVGAAYTSQTCHHCRFVNRKLKLTDREWQCPACGAILDRDLNAAINIERRGTIRCLPIMVQAGARDKYEAMKQEPRRQETAGNPVAEVPKLSLRRMER

SEQ ID NO: 44797 - protein, 365 aa, unknown
  TnpB Polypeptide
MVQKIIKCGVVGLTNQKKECLDSEWSNFQDFLQLKNTLWWKNDWGKNIYSANKQQAERFYKSIEEGKEYPISIRKDLIQIEKRNTKLAKYWFRMRVKSRKNLWLAIKPHQPIPDDVEFQESKLLKKNGKYFIYLTIQKEIKIKKSYSNILSIDLGVKWIATVCDMKSKRPVFYGKELRGVRGKHFYLRRKIQKKKIKQMKKWLENNKEERIVNDLIHKISRDIVNKAKETNSMICWGNIKGIRKNKKGRKFNRKLNSFPFYKLKEQIRYKAEWEGIKTVKISEAWTSQICNRCGEKGTRRKGLFKCESCGYEDNSDRNGCLNIGKRVLGQVSRIGVFVNIPKTEAENIKNTKIRNSVSDFRSHLF

SEQ ID NO: 44798 - protein, 318 aa, unknown
  TnpB Polypeptide
MIRNLLKYAYNYITHFKKSRKNLYFSIGFEEIFSCLASRCIYRPTLRVVKNGSEIKDKRFGASDNKPYLHIPKFGWVMLREEIRFPGKINSVTISQYGDKFFASFSIETSEIVYEGTHKKNSQEALCGCDWGVKDLLTLSNGIKVKGSKHLKRRQRQLARQQRKLAKKQHPRTKGDKTPKSKNYIKQSRKVGVSYLTLGEATPALSGGEAQRLKLAYEMETPLQGSVFVFDEPTIGLHPQDVKKLILIFDHLIQLGATVIVIEHDLELVTNCDYIIDMGPWGGKEGGRVVVEGTPEAVAANSENITGRYLKQVLAEDK

SEQ ID NO: 44799 - protein, 370 aa, unknown
  TnpB Polypeptide
VSGCALIKGHRVFSVLKSYSLKHESGEELLPLLLAYRDAVNRVLEELWSHIEWKKRKLPGKKQYRLLPKYKVDIHSGKYRRRLRDSLLEDWDYAAHWVDSAIKTAYSILKSWRKNYVKGERKRRRPTARRLFVRAKQTLIKLEGEKLRLTVKPAEYVYLDLSARHFKLPSEVSSSALGEPVITPEKVHLPIHCEDTQSGKPAVAWDFNLLSLDGYSPETAWVRIDTKKLASVHISSFEKRRSVQRKASHSKKAKRVLSKYSKRERNRARKHQLEIARVIQSLCGSVGLEELKKHGMYTRSRVWNRMISRSDWRSIARILVGRMGEAGVKELDPYGSSFYCSRCGWENKDLNGAVFECGGCSLRIGSSMRR

SEQ ID NO: 44800 - protein, 445 aa, unknown
  TnpB Polypeptide
MLLAHRIRLDPTPDQRDYFARASGTARRVWNWALAEWQRQLSSGQRPNAMRLKKCFNAIKYTDPAWLDANGQPWLRTIHRDAHSQPFANLAKAWSRYFAAKREHRPAHPPVFKKKGRCRDSFYVANDKLRLEGMTVVLPKVGRVALREPLRWPGRILGASVSREADHWFLALRVDVPEQAARLHRTDDGITGVDLGISATATFSSGEKVSAPRPLKVTLRRLRIRSRRLSRKLKAAEASIGITGRVPKGIRLAASKNRTKGARALARLHARIVHMRADFMHKLTTRLCRENQTVVIEDLNVRGMLANARLARAIADVGFYEFRRQLQYKAKRYGSTLMLADRWYPSSKLCSACGARHDNLRLRERVWTCVTCGARHDRDINAAINLQRLATGAFAAQSALPVASPAATSGTLTGMVPVRVGKVTPVRHEYGQQDGSGQEENDAHY

SEQ ID NO: 44801 - protein, 375 aa, Bacteroidia sp.
MKILRSVKLHFTSATKKKHQKIHSIMDEYKHVVNSYIDIFWVERCREADLKKELLDRVQHPYFTQRLKQQAAREALSMVNAAIEQAKAASKEAEREIVPVKPTHYGNRMALSTAICSLTEAKQSKTFDRWLSLRSIGDKIKIDIPIKLHRQFHKWNERGRLMGSFVIFRNYVQVTFEIQTGEKKPITNCVGIDTGINALASLSTGEQIGLELKTLINIVRRRKKGSKGKTRAIKTLKDYIALNAKRIVMSDISLIVVERLKGITHGTKLKGRLSKNMSSVIGSWNVRYWLTRLEMLCEENRVSFRRVWPENTSITCRQCGYVDKKNRNGEIFLCQSCGHHDNADLNASRNILNRFFTGPYGAGYEAGPILLNTIG

SEQ ID NO: 44802 - protein, 504 aa, unknown
  TnpB Polypeptide
MHTVQLLLKTSKYERHEIDRRFHALAHLHNVCVKHARKCLIRLQHDKRYAELRQLYNELVKKEKMSKEEKSQKKKLAKQLAACRTEQGLSKASLEHYLKVCGKQFSKLLSSQQVQAEADRVWCGVERCLFGNGKELHFKKLMDFDTIGGKSNKNGARFDLDAMYVNWLGLSLKCYLPKSENSLSYVWESLKGKISYCNIKRLMFSSGWRYYAEIVVSGAAPTRVSIGTSTMGIDPGVSTIAGVSEDACVLEELAPNAIQYEKKIQKISQSMDRSRRISNPNKYNEDGTINRSNRDPWKYSKNYVKMCRLLKSLYRKKHAYIIDSHRELCNKLITIAKYFPVEKMHFQALQKKAKETRRQEKKTEVKQKDGTVKVIQKYKRKKRFGRSINRRAPARFLLELKRKAEAVGGVYAEVDTKEFKASQYNHVTDTYEKIPLSQREKEIGKRKVQRDLYSAFLIRNADLDFKHPDREKCEYEFEYFANLQDQLILKMKESGLSMRQCFGF

SEQ ID NO: 44803 - protein, 218 aa, Lachnospiraceae sp.
MESDGTILGRKFIDFPGDKDRLSHELNRLKKFQRMHGSHNSKSRWRRIRSLNEELARKIGHAIADLAAGALCDAIVFEHLDMKGKIRGRSKRQKIHLWRKNGIRHVAESRAHRFGLHVYHVNARNTSRLAHDGSGYLSRDKNNHALSVFKNGKPYNCDLSASYNIGARYFVRELLKPLPETARSQIWANVPGTEHRTSCTYHTLLQTADELCRLSVSA

SEQ ID NO: 44804 - protein, 390 aa, Lactobacillus sp.
MIKTHKTKMYPNAAMRLALQNLFSYRRYCYNQALEVWNNMYDESVLMADKSLRPNERKVRNELVNNKQDWQFEQSARVLQLAVSDLAKGWQNYFNPQMPNHAQPRFKSKKHSKNSFKTDRAKTVAGKLRLDKPRGAKDWYDIRLAERPRWIGKLKLATIVEEADGYYVSLSIDVDETVDQKNGNLVTAVDANVARFDYKDANGYQSVSTISDKLLNLYGRITKYQRLLARKRVANPTNFRSNNYRSTRAKLKRDYQKVSRIQADILHKFTAQLVRDNDVIAIEDLDNLHMRMNKHLAKNLHRSMFGQFKQIMQYKCEWNGAKLVMADRLYPSTQRCCRCGYIKTGDEKVGLSGNRKHHTGHNEYVCYKCGAKMRRDENAVENLIQYAQVN

SEQ ID NO: 44805 - protein, 186 aa, unknown
  TnpB Polypeptide
MWLHVASDEEDADYPHFLRKAEKRLAKAQRKLSKRQNGSHNRDKQRLRVAKLHEKIANQRRDFLHKKARYLVDHYDAIGIEDISVKAMAKYKKGGKFSFGKSVADNGWNMFTNMLEYKLAWQGKQLIKIDKWYPSSQLCHVCGYQNNETKDLSIREWDCPNCGSHHNRDKNAAINIREEARRISAA

SEQ ID NO: 44806 - protein, 392 aa, unknown
  TnpB Polypeptide
MAVPSIRTRRRSFKYRIYPTKIQIKTLENWFELSRQLYNMALDYRQHAWEEYSIPVAYNEQSAKLPKLKKDKPEFKEVNSQVLQQVLVRLDRSFKSFFRRIKAGEKPGYPRFKTEGWYSSLIYPQHEAGFHLVSQKRLFLSGIGEVRIKLHRDVLGKIKTCTIKRAASGQWYASFSCDEVPAVEDWPKATGEVGIDPGLTSFATISDGENETKISNPRWFRKTEEKIAEAQQGLEKKNRGSKNRAKAKANLAKLHEKVSRQRDDFHWKLAREIVKANRLIVIEDTDVKEMVEKSSRGISKSVNDAAWSGFSWKLSCKASDAGRTFLKTPAPWSSSSCSRCGEQLPEKLPLSERVFRCPKCGFKLDRDANAARNHLRAGQALWRSTFQEAAGL

SEQ ID NO: 44807 - protein, 365 aa, Cylindrospermum sp.
MLLSIKTKLKLTKTQELLMCKHAGIARFTFNWGIATWKDLYKDGLKPDKYLLKKFFNNYVKPEFTWIKEKGICQKITQYAFDNLGEAFKRFFQGLAKYPSFKKKGRNDSFTIDNSGKPIPVGGKSIKLPTIGWVKTYELLPHTTCKSITISRTADTWYLAFSYEQQHEASLKQYDVVGVDLGVKELATLSTGVVFPNPKHYQENLSKLQKLSRALAKKSKGSRNRLKSKIRLARHHGKIANLRKDTLHKITTYLCKNHAKIVVEDLNVLGMLKNEKLAQVIADCGFYEFKRQLEYKAKKFGAEIIIADRWYPSSKTCSRCGHQKEKLSLSERTYHCEHCGFEMDRDLNAAINLSRLATACKLTEG

SEQ ID NO: 44808 - protein, 243 aa, unknown
  TnpB Polypeptide
LPKWMKPKPPHKKRDDLFLLIRHDRYRIEGNEIFLMDFKMRLKFIGKLKWVGKQGTLEIFYDNARKKWYARIPMSVKVNNKPKGKMKAGIDLGIVNLATVAVEDGSWMIFKGGSVLSEFKKITKRISIEEKRLARHGLKTSRKLEMLYNKRSLLLKNAREGLAREIVETLYDKGVGEIYIGYPKGIAQDKGNERNSNFWSYSSIIKRIKNVAQEYGIKVKLVDEENTSKTCSLCGEIHEERKD

SEQ ID NO: 44809 - protein, 451 aa, unknown
  TnpB Polypeptide
MSAQCQSTIPPAASVNAVASATRSAVMTYRFRLEPTPDQVGRFWQYAGARRWAYNWSLRRREEYYHATGQTLSFADLCAELTALKSQPDTCWLKTVDSQLLQQGVKDLCRAFANFFEKRAKNPKLRKKFKHTPTFRIPQRIGLPTYGEVTLPGIGSVMMRQSRGIIGVVKGATCKWECGHWFVTLVAHQEIENTPKPVLTEENTIGLDLGLKDACVTSDGEIIPALRSYRRTQGKRRKAGRVVSRRTGAKKGGKASGRFKKAKATAAKIDRKAANQRTDFLHKLSTKLVREHDGLVIEDLAVAGLGKTNLAKSVFDAGMGAFRRMLDYKADRASKTVIVIDRWFPSSQLCSTDGCVYRNRTLALSDREWTCPQCGIIHHRDVNAARNIKTEGLRVYRTWTQDQGQSPLDGGYVAAGQVETLNDRGCRVSLPLGAVAAIPTQVGQKRESHEL

SEQ ID NO: 44810 - protein, 372 aa, Ruminococcaceae sp.
MYRAYKYRIYPDEEQKIMFSKIFGCCRFVFNYYLDKKITDYKTGGKSANKMECNNHLNRELKTEYEWLKDVDKFALTNSVYNLDRAYQNFFRRVKNGENPGFPKFKSKYNSNQSYTTNFTNGNIKVVFRETLIKLPKLTPIKAVLHRTFDGQIKSATISRICSDKYYVSVLVEEEINTLPENGVLIGIDLGLKEFAITSDGHKYENPRTLKKYEKQYKKAQRQLSRKQKKSANRNKQRKKLAKIHEKIANIRKDYLHKLSREIVNENQVIISEDLNVNGMIKNHKLAQAIADVSWSEFTQYLSYKSKWYGRTYYKIDPFYPSSQLCHICGYKNTETKNLNVREWICPECGTKHDRDINAAKNILAKGLKDLA

SEQ ID NO: 44811 - protein, 400 aa, Actinomadura sp.
MRTAYKCRAYPNPEQAAIFGRTFGCVRLVWNKTLAERHRAWHADGRRTSYKEADAALTAWKKTENLAFLNEVSSVPLQQALRHQHAAFVNFFAGRARFPRFKNRNARQSAHFTRSAFRMRDGELRVAKTSAPLVFVWSFDEVDLAALDPTMVVISREPDGRWYVTFAVDTDAPEPMAAAGHRLGVDLGVKDFAVTSDGHRIANPKHLENKQRNLARYQRRMARCQPGSNNRRKAKAKVARAHRKVRNARTDFLHRTSTNLVRHADTIVIEDLNVSGMVRNRRVARAISDCGWGEFRRQLEYKCRRAGRTLVVIDRWYPSSKICSACGHRLAELSLSTRAWTCPGCRTRHDRDLNAAKNILAAGRAVAGDTPGDVCGADVRRQGSSLPQSAVKQKRPRREP

SEQ ID NO: 44812 - protein, 389 aa, Actinomadura sp.
MPRTVKRAFKYRCYPTPQQATQLVRTFGCVRLVYNKALEEHIRVFRTEGRHLGLNEASARLTQWKRDPAFRFLAEVSSVPLQQALRHLRSAFTNFFSGRARHPSFKSRKKGKASAEYTRSAFAYRNDELTLAKMDAPLRVVWSRPLPSGATPSRGTVTRDAAGRWFVSLLCEDSVAALPPVAQRTGVDFGITALATLSTGEKVTNPRYGDRDRKRLAEAQRSLFRKRKGSANRAKARRRVARVHARIADRRRDFLHKLSTRLVRENQVVVIEDLGVGNMLKNPSLARAIADAGWRELRTMLEYKADWYGRELTVVDRWFPSSKLCSSCGRRASAMPLAVREWSCAACGARHDRDVNAAQNILAAGPAERRNACGAAVRPQRRFFPAGER

SEQ ID NO: 44813 - protein, 411 aa, unknown
  TnpB Polypeptide
MLLNQFITKCFVLDLSRKTDKTLAIIFGHLTYSASKLWNVANHEVIENGTSIYELKQKLKDSFFARNLHSQSAQAVIEKLQIAWKNTFDKHTKRPRYQPKDGHFSVIWKEQGFRLIGNKLRLSLSKQTKEYLKSKYSIESTYIWIELPKTLSFDTIQIQQVELVPYQAFGYISYSLRIIYRQPIDVLKEQEEHIYLDSNKFLAIDLGVSNFATCTDGVNSFIIDGKILLSKLRLINKTTAKLKAILDRQKLKTSKRLHKLYRYKKNYINDFVHKASKKIVEYCLSNGIGTIVIGQLNKGITNIDIGKQNNQKLHQMPYGKFIEKLKYKAKVNGITVIQVNESYTSQTCSKCGTIDKTNRVHRGLYVCSSCGTVLNADVNGALNILKKVSPSSVNGVGVGALANPMRLRLVS

SEQ ID NO: 44814 - protein, 222 aa, Streptomyces sp.
VASRGPGGANHWSQQKNTHPVALLGVDLGIVNIAATSDGERHCGRRINRKRENDSKLRRKLQQKQTKSAMRRSRKYAGKEARRNKDINHKISKRIVAGTERTGRGVALEDLRGMRQRARLGKLQRTTLHSWTFARLGAFIVYKAKKAGVPVAYVDPAYTSQECSRCHHIERGNRPSRARFACRSCGFVDHADRNSSHNIAHRGWMAWVCGVQSAAPELTLIA

SEQ ID NO: 44815 - protein, 410 aa, unknown
  TnpB Polypeptide
MSLPVRATVTAKVEAVTPKGDEGLLVEFLRVYRDSVQLVVDEIWGLSEVPSWMGLHTMFYSRLIRMGFRAHHVSEIYKRAREVVESTRKNNGSKPILRKLTARIHTLDYKLDLDKKTIKIAVLYDKWVELKLNWYSYLNKYLDGSWRPGEILLSYRCGRFYVYVTFHKDIVFKEYSTVMGVDLNFNNITYIIIDLNSNLVSIGVIPFKGLKKALHLRRLAEELQKKHPRNWRFLKWARRIRARWLNKAKNILVDTAHRVSKRLVEVAREYNAVIVFEDLEEIRGNNNSGKRLSWMKPLWCYRRIQEYTEYKALIESIKTIYVDPARTSRKPPNGKKLKFINYRFLQLGEVVTTRDVVASWNLALKALKRMKGSRVTWSPNSPRSEAVKPRAKRGNPEAKKYLKTTTAIHK

SEQ ID NO: 44816 - protein, 690 aa, Streptomyces sp.
MRGQDTELAVIRLPLDVHDPDTRHRTEQMYAAMWSVKRALQRDARAAVDAYWAGDVRRETDAKAWRLELGLSREGMERRAYQHMENSKHLAHHVTKALVMHQADEVFETSVSRHLFPNSCGRRHGRPKVGRWWDCTRIPGRARSHTTARKWETFRLHGTLAGHLAAYRHRNLAPTVTTPEQAAALPSGARVLEQPRRMPAPIRPSGRMATGEVTPKGTPKTRAATWWDHTGALAVVFTGGCDSSRGDLVLPVRLPSGSGRWQRVLHFLNNPETWHKIDLVRRRDASAPGGWAYEAHLMVLTEGYASPATKARRDTAAHLERVGGVDGNVSNLSIVSFPSTFDPAHGDVEATRITLTDDEIAALADDRRKERGRNRALDRSRRASNPGQYHLSKRQQARSERRTTASLPERAVAVPGGARAAGKAGVPRQAYRRDALSVSYRLNRARLAEAAATAAAAKDQRARRIAETIVATHGANLTVEDCDIRTWYRWWGKALQATTPGRLITAIARECEKTSGRMLRASTFTTKLSQTCFCGEKATKTLADRVHTCTGCGLVGDRDMVSAALAAHVHVADPDEPRTARLDVAQARSTPILFHEGLQEALSSQPQRGARPTRDRTHAVAHPPQHPGGRGPLPDKTPPTGTGPTPNETRPANQRHKDHVGTVGCTDQRHPCAPGPCRHRAGITALRDDS

SEQ ID NO: 44817 - protein, 130 aa, unknown
  TnpB Polypeptide
MVKGSGNWVKQKRRIAKLAAKVRNQRADFLHKTANRLAARYDCVGVEDLDMKDMSQSLALGKSTMDNGYGMFRTMLAYKLERQGKQLVTVDRFYRPVNYAPIAATTIRIRRTCISANGHAPIAGSGMTGT

SEQ ID NO: 44818 - protein, 378 aa, unknown
  TnpB Polypeptide
MLRAIKVRLYPNKAQELKLNKVFGCYRFVYNQMLALKQNTYNDNKKSLGLTELSKWFHGTLLKDEQYTWLKEQNTKVMQQAIRQMDDAYQRFFKQHNGFPKFKTKKDKQSALFPIDAISKRNNFNDRKITLTKPLKDIKFRCSDLYHKRLQTYKDKIRSATLSKTKSGNYFLSILINLPQEEIIKFEQTNKHVGIDLGIKDFVITSDGEVFENKHFFKKQEVKIAKLQKQLSKKQKDSNNRNKQCIKIAKAFEKFTNQKDAYIHSIVNELLTYYDIVFMEDLNVNGMLKNHKLAKAIQEIGFYKFKETLVNKALVNNKRVILIDRFYPSSKTCSICGYKKRDLKLSDRYWFCPNCGEYHDRDLNAAVNILHEGERIIT

SEQ ID NO: 44819 - protein, 559 aa, Dorea sp.
  misc_feature (320)..(377): Xaa can be any naturally occurring amino acid
MVKAIKVMLIPNNVQTTKMFQYAGASRFAYNWALAREKENYEKGGKFISDSELRKEFTKLRHSDEYAWLLDISNNVTKQAIKDACTAYKNFFKGLQKFPRFKSQKRSMPKFYQDNVKIQFSNTHVKFEGFSSSRKANKQKMNWVRLAEHGRIPTDVKYMNPRISFDGLNWWISVCVEFPDCKETLNDDGVGIDLGIKDLAVCSDAVKYKNINKSQKVKKLEKQKRRLQRSISRSYEKNKKGESYCKTNNVIKKKKLLLKRNHRLTNIRKNYLNQTISEIVNRKPRFICIEDLNVSGMMKNRHLSKAVREQGFWFRKQLEXXXXXXXXXXXXXXXXXXXXXXXXXXXXXXXXXXXXXXXXXXXXXXXXXXXXXXXXXXVKYKNINKSQKVKKLEKQKRRLQRSISRSYEKNKKGESYCKTNNVIKKKKLLLKRNHRLTNIRKNYLNQTISEIVNRKPRFICIEDLNVSGMMKNRHLSKAVREQGFFWFRKQLEYKCSDKGIQLIVADRFYPSSKLCSCCGNIKKDLKLSDREYRCACGNIIDRDFQASINLKAYGERFAS

SEQ ID NO: 44820 - protein, 167 aa, Raphidiopsis sp.
VRLHEALPVRAFHNCVISRQADRWFIAFKCEIEKPAVPLDRPLVGVDIGIKELAVTSDGKVYSNPKAHRKMNKKLKHQQRSVSRKVKGSQNRAKAISKLAKSHAKVSNIRKDAIHKLTYDLAKNHSVIKIEELSIKAFLKNHKLASAIADCGMYEFKRQLEYKTDNR

SEQ ID NO: 44821 - protein, 376 aa, unknown
  TnpB Polypeptide
MIKLDTSKEQHASLLETMHQFNEACNYIANIAFERKTANKMELQKIIYYEVRDKFKLSAQLTIRAIAKVSEAYKRNKTIKPEFKPIGAIVYDQRILSWRKLEAVSILTISGRQTIPIRIGEYQRVRLDRIRGQADLILRNDIFYLAVVVEVPEASKFDAVGTLGIDLGIVNLATDNDGESFSGKQIDTVREKNAVLKANLQKTGTKSSKRHLKKLSGRESRFHRDVNHVISRKIVAKAKDTKQAIALEDLKGIRKSVTVRRTQRSRIHSWAFFQLRSFIEYKAILVGVPVVLVNPRGTSHICPVCNHNERGNRPNRDNFKCVQCGFSGNADHIAAINIAARAVEVNQRIVAYNEVKANTGIETEHSYKPPISIVGN

SEQ ID NO: 44822 - protein, 372 aa, unknown
  TnpB Polypeptide
MANRAYKFRIYPNDEQRILFAKTFGCVRMVYNYWLDRKIRQYEENKTNVTYTVCAKEMAAMKKTDEYAFLKEVDSVSLQQSLRHLDAAFQNFFRQPKAGFPKFKSKKRNKNSYSTVCINSNITIGNGYLKLPKIGQVRLKQHRSIPKEYKLKSVTVSQTPGGNYYASILFEYENQVREKELQSFLGLDFSMHELYRDSNGNEPAYPGYYRKAEKKLAKEQRKLSRMQKGSKNRDKQRIRVAKLHEKVSNQRKDFLHKQSRQITNACDCVCVEDLDMKAMSQSLNFGKSVMDNGWGMFIAFLKYKLEEQGKRLVKVDRFFASSQICNICGYKNPETKNLAVRAWDCPQCGKHHDRDVNAAINIRNEGMRLVTA

SEQ ID NO: 44823 - protein, 366 aa, Exiguobacterium sp.
VIALLKAYKFRLYPTKPQQEYFVKTFGCVRFVYNKMLEERIRLYEDSKLNPNAKQKLPTPAKYKPEFPFLKEVDSLSLSNAQMDLNKAYNNFFRDPSVGFPKFKSKHNARASYTTNNLKGSIRIEDRKVKLPKIGFVKLKQHRPFDGVIKSATVSMTKTSRFFISILVDQSEEQWVPAKNKVGIDLGLEHFAIMTNDEWTSEKVANPRFLRKSEEKIKRAQRALSRKKKGSKNRDKARIILAKKHEKIVNQRQGFLHKLSKRMVDDNQVIVVETLKSKNMMKNHTIAKSIGDVSWYEFVRQLAYKCIFYGRTLIKADQWYASTQICSSCGTKGEKKTLDMREWTCTCGAHHDRDINASINLLLLAD

SEQ ID NO: 44824 - protein, 104 aa, Exiguobacterium sp.
MVDDNQVIVVETLKSNNMMKNHKIAKSIGDVSWYEFVRQLAYKCTFYGRTLIKADQWYASTQSCSSCGTKGEKKTLDVREWTCTCGAHHDRDINASINLLLLAD

SEQ ID NO: 44825 - protein, 237 aa, Exiguobacterium sp.
LYEDSKLNPDAKQKLSTPAKYKPEFPFLKEVDSLSLANAQMDLNKAYTNFFRDQSVGFPKFKSKHNDRASYTTNNLKGSIRIEDGKVKLPKIGFVKLKQHRPFDGVIKSATVSMTKTRKFFISILVNQAEAQWVPAQNKVGIDLGLEHFAIMTNDERVSEKVDNPRFLRKSEEKIKKAQRALSRKKIGSKNREKVRIILAKKHEKIANQRQDFLRKLSKRMVDDNQASSSRHLNRRI

SEQ ID NO: 44826 - protein, 438 aa, Halobacteriales sp.
MSIVVRRTNTFAVRPLSTKDEQLLHELLDASASLWNELNYERRQQFFDGESVWDTDDYRKQYVDILGSATAQQAIRKNSEAWRSFFAAQEDGEDTAPPGYWGNEDDGRELRTYIRNDQYTLETGERSRLEIPVGQDLKEEYGLGYHDRLRLEVAGDPKWDGDRGRLELHYDEVDDTFRAIQPVTVPDSRQDSLLASEEAALDVGANNLVACTTTTGQQYLYEGRDLFARFHETTEEIARLQSKLREGRYSSRRIRRLYRKRTRRRDHAQDALVRDLIERLYEEGVATVYVGDLTDILSEYWSARVNAKTHQFWAYRAFIDRLATTAEEYGIRIEIRSEAYTTAECPACAEREETERNGDVFRCPCGYEGHADLDASRTFLKQQAGENIEAGSMARPVRLKWDDHVWSEIPHSPERASPNEERTNRSTREGNLASVGTA

SEQ ID NO: 44827 - protein, 273 aa, unknown
  TnpB Polypeptide
VEIIGGIRLKIISWDRRYDEYENREARLVYREGKMILWISKRIPRPKQYKPRDAIAVDINERKMVYGDNKINKDIGTAVDRAYRWKILAENLQRKYSSPRYPAWRRRKAIHDRIRSYHRKARNILEDCARKAPLKIVRLALKLQHAVAREDLTGLINSLRKIRNKDHRTKLIIMGYSRLEKWIDWQAIKHGVLLAIVNPNGTSSECPKCGFEADRDVIGKLNIRKRALKILGIKIDFGGVLATPSATQMTDVPPNRWGEPMIRLKGMTIKMMT

SEQ ID NO: 44828 - protein, 356 aa, Streptomyces sp.
MVKRQFGHRARLAVAPALSRKVDDQAHAARAMWNLLHAWWQMMPKDKRTLADADAAIRQARADIDFLAVLPAQAAQAVLKTYFRAWKNCWEGRAGAPHFKGRFRSVMAVDIPQGRDLNIIRVHRRWGVVSIPKIGRVRFRWNRDLPVGKCADADNRVAGARLVKDALGWHIAFRVQLLEPVPESHTGPEVGIDFGVVVPLALSDGTTYGHGEWLTAREKAKLLRLEQQAAHRRTFRGVGERSSRRLQATFDQIAGLRAKAKRRAIDWQHRTTAEIARTYGTVVVEALDITNMVKSARGTVEDPGKSVAQKSGLNRSISGEAWGRTVELLSYKSAARVVFSSGSPPPIPPDAAPHAA

SEQ ID NO: 44829 - protein, 430 aa, unknown
  TnpB Polypeptide
MHQKNAVSSVPNIVVIAHRPNYDRIMQRLQAYKYEVMPDGEQERNMRCFAGSCRLVYNKALALQKENHAAGKTFIGYVAMAKLLTAWRNGTDTPWLKDAPCHPLQHALKDIEKAYKNFFAKRTDFPKFKKKGQGDSFRYPDHKQFKLDQGNSRIFLPKLGWMRYRNSRDILGDLRNITVSQTGGKWFVSIQTEREVEQPVPTATTAIGIDVGIARFATMSDGNFIAPVNSFKKHQQRMARYQRRMSRKVKFSNNWKKAKVCVQKIHTCIANARKDFLHKTTTTISKNHALVCIEDLQVRNMSRASKGNSEQHGKRVRQKSGLNRAILDQEWGEFRRQLAYKVSWNGGMLLVVPPHHTSQTCPCCGHVSKDNRQTQAKFLCVECGYESHADVVGAINVLERGYRLLACGESVQSGRSMKQEPTEATTQITA

SEQ ID NO: 44830 - protein, 250 aa, Acidimicrobiaceae sp.
VGGHQGLEAQARSAKALSLRDRRRQGQPAPRDPWHAQGHHRQARGRHWFVSTRCVGVEPTPLAPTGREIGIDLGVVNLVATSDGELVEGPRFARNAPAALAKAQRDLKLKRKGSNRRRRAVERVAEHHRKVRDQRRDLAQKVSRRLVNDHDLIVIEDLQVASMVRRPKPCPRSDGTFEPNGAKAKSGLNRSIQDAGWGELARMLAYKAADAGRELRVVAPQFTSQRCSKCEHTDEASRRSQAVFRCTACG

SEQ ID NO: 44831 - protein, 354 aa, unknown
  TnpB Polypeptide
MTTKVYRYRVKSLNGLLNQQARAVNYVWNFCNDTQKHALKWRKPWPTGFDLNKLTSGSSKELGLHSGTINAVCEQYAKSRKQFNRPYLRYRGRRTLGWVPLKGRDLKREGDAFRFAGNTFRVFNSRPLPEGKIKDGTCFSQDRRGNWFLNIVVEAADVPTRTPERGVGIDLGLKDLATLSTGEKIEHPRFFREMEAKLGKAQRARKKRQVTNLHAKIANCRMDFLHKASTDIVRRFDYIAAGNVSSSKLAKTKMAKSVYDASWHSFKQMLAYKSVANGAWYEEVNEAFSSQVCSSCGALPDSRPKGIADLGIRHWTCSACGCEHDRDVNAAKNILNKSSARSGHRAPAGGIPAL

SEQ ID NO: 44832 - protein, 388 aa, unknown
  TnpB Polypeptide
MIKAFKFKLYNSKRNKKLIQQIELASEIYNHCIRLHKLYYKIYHKYISLYTLQKHITKLKKTTKYSHWKGLDAQVVANIPERIDKGYKKFFRHENKHSPTFKSKRKYKSFTLRQTGYKFFGKNGIRISEWKFKFFKSRNIPDNIKTITIKRDKIGDLYIFVACEVDENEILPKTGKTAGFDFGLKMYLTSSDNKEIESPEFFKKSMKKIKTLNKNLSRKQKGCNSRRKARLDLARAYRKISNQRRNFHFWLARQLCLQYDVLCFENLNLNGMKKLWGRKISDLAFGDFIRILEYYAVKTGKEIVKIGRFYPSSKRCNHCGHIYKELNLEDREWVCPECKELISRDYNAACNILEEGSRVRALTRRRDRVRLSTRPGNRSSRKHLSLVS

SEQ ID NO: 44833 - protein, 304 aa, Geitlerinema sp.
CRVHRWFEGTIKTVTVSRHTDGRYHASILIDDGSDKPEPNPDGKAVGIDMGLKHFAVTSDGEKYNNPRHLNASAPLSVESSTPLGLKKHERNLKRKQRKLSRKQQGSNSRRKAKRLVARVHSKIANSRADFLHKLSRSLGARSLAPCDGAGSHRKIVNENQVIVVENLAVKNMVKNHSLAKAISDVGWGMFSTLLKYKAEGEGKVYLEVDRFFPSTHLCSETLLPLPKMGLNVRSFECPHCGQVHDRDINAATNIKNEGLRILASGTGAAASGGNVRPKGGRIRSTLPEAIPTEVGSHSSIASR

SEQ ID NO: 44834 - protein, 500 aa, Geitlerinema sp.
VATLGGDREFGDRVAIQILRSTPAKLSAMDGVLRSATEGSNLQKICYSLDMLNMTWEFKLEPSAEQVSEIEHILEVCRHVWNFALRERKDWLKSRKSPVNACSIRQEFILPADAPFPNYHIQAKRLTAAKTEFPQLKTVNAQVLQQVLRKLETSWESWRLKRSGLPRFKKTNRMRSFVFPQMLKNCVSDEGIKLSQLGWVRVRWSRKIPDLFQVKQARIVRKASGYFVMLSLQADVDIPAVAPHGHPVGIDVGLEYFLSTSDGEQVKRPRFFNNLHRKLKSLQRRLKKKQKGSANWLKLQKKIARVHQRIADTRKDWHFKLAHHLCDGAGMIFVEDLDFRIMAKGMLGKHTLDAGLGQFVNQILPWVCWKRDVYYGKVDARGTSQECPDCGAEVRKDLSTRIHHCHNCGSTKPRDVASGQVICSRGQRQIENACGVEATGDRVTDSSWLAVKQEIFGATQGISLHTRNGLLGEDVKVRSDLSTATRRLSRTRIDRRDRFT

SEQ ID NO: 44835 - protein, 416 aa, Geitlerinema sp.
  misc_feature (381)..(414): Xaa can be any naturally occurring amino acid
MLVLEFKVKGKPHQYAAIDEAIRTAQFVRNKALRYWIDNRGVNKYDLNKYCRVLAREYGFARELNSTARQASAERAWSAISRFFENCRKSVPGHKGYPRFKKNSRSVEYKTSGWKLLDPKHIVFTDKKNIGRLKLVGTWDLAFYSTEQIKRVRLVRRADGYYAQFCVSVEVRETLEPSGNTVGLDVGLKEFYTDSNGQTEPNPRFYRNAEKKLKRAHRRVGKKQKGSANRKKAVNRLGRVHLKISRQREEHAKRLARCVIQSNDLVSYEDLRIKNLVRNHCLAKSIHDAGWYQFRKWLEQFGEKFGKITVAVNPAYTYSKMFELWCDTFKNLFRREPMFVSCGFELDRDHNAAINILNAALSTVGHTGTSVRFRSPSAVEXXXXXXXXXXXXXXXXXXXXXXXXXXXXXXXXXXDD

SEQ ID NO: 44836 - protein, 414 aa, Lactobacillus sp.
MLLSLTVKAKLKLDNATDAAKFLETGEQYRLACNHVSEYIFSNDFELNTNKIQTKLYPDLRQRFGLKSQLAISAIKTTVARYKTLQTQLRRKPMAYPTGKKDKKGKEIYLIVPRDLHWLWKPICFKRPQADLVRNRDWSIVADGEKLSINTLQGRVKARFVLKTGFEQYLDGTWEFGGAKLIKSGTNWFLHIAVTKEFSECSRTDMQHIVGLDRGIRQLVTAYDDQGKTTFFNGQAINRKRRHYKNLRASLQRHNTRNSKRRIRQMGNKENRWMTDINHQLSKTLIAKYGPNTLFVLEDLVNVRFATEKTVIDKRYEKVSWAFYQLEQMLTYKAIQAGAAVITVSAAYTSQRCPHCGEIKKTNRKHQLHAYQCSNCGYQSNDDRVGAMNIQYLGIQYVDGVKKPKFKKKKSANG

SEQ ID NO: 44837 - protein, 358 aa, unknown
  TnpB Polypeptide
MKLTLQTQLLPDKAQDAKLQATVKRFNEAASWLAKRAFESKTANKVALQKLYYGELRALFGLSAQMAIRCIAQVVEAYKRDKAKCPTFRPFAAMPYDQRILSFKGPDRVSLLTLEGRVIIPTIMGRYQSERFTPAVGQSDLVRRKDGKWFLLVVVDVPDGTPIPTTDFIGVDLGIANIATDSEGESFSGGTVKGLRHRHTRLRSKLQAKGTKSAKRLLKKRRRKESLFARHVNHCISKKLVAKAQGTNRGIALEDLKGIRSRIRLRKPQRRIQHSWAFSQLRLFVEYKAKLAGVPVVLVNPRNTSRTCPQCGCVDNANRPSQASFSCVSCAFSGHADYIAAENIRRAAVNRPHADAAD

SEQ ID NO: 44838 - protein, 409 aa, Streptomyces sp.
MRVAVRAGVTVCVVAITRVRRAFRFRFYPTDAQAAELSRTFGCVRLVYNKALAARSEAWTLRRERVGYDATSAMLTEWKRTDELAILSEVSSVPLQQALRHLQGAFSNFWQKRAEYPRFKSKKKSRGSAECTRSGFRYRDGRLTLAKMADPLDIVWSRPLPVGRSPSTVTVSRDAAGRWFVSMLCEDSGIEPLPAVNAVVGIDAGISNLVTLSTGEKISNPRHGCKDRERLARAQRALSRKAKGSKNREKARGKVARVHARIADRRRDFLHKLTTRLVRENQVVVIEDLTVRNMLKNRRLSRAVSDASWSELRTMLEYKCAWYGRELVVVDRWFPSSKLCSACDTVRDELPLNVREWTCGCGAVHDRDVNAARNILAAGLAVAACGDDVGPQRGTPGGRSSMKQEVVRP

SEQ ID NO: 44839 - protein, 317 aa, Enterococcus sp.
FPFLKEIDSLALANAQLNLDKAYKNFFRDKSVGFPRFKSKKNPVQSYTTNNQNGTVALIDSKFIKVPKLKSLVRIKLHRQPKGIIKSATISRHSSGKYYISLLCKEEIIELPKTNSTIGIDLGIMDFAILSDGQKIDNNKFTSKMEKKLKREQRKLSRRALLAKNKGTNLFEAKNYQKQKRKVARLHEKVMNQRTDFLNKLSTEMIKNHDIICIEDLNTKGMLRNHKLAKSISDVSWSKFVTKLQYKADWYGRKIIKVDKWFPSSQICSECGHKDGKKSLEIREWTCPVCHTHHDRDINASINILTEGLRLHSMGLA

SEQ ID NO: 44840 - protein, 374 aa, Bacteroidales sp.
MQAFKYKIYRTKRTKHIDDMLREAAFTWNKALAMQKRYYALFGKYINKYRLQKWFDKRYKRHYLGSQVRQEIIDRLDAAYNRFFKKLAQRPPKFKKAIDFASIVYKQAGYKFYGNELILNRKFRFKFSKSREYEGNIKRVIVKRSRVGEYYLIVVTDAQPREYRKTHNGASVGIDFGLKMYLTMSDGSEYSNPLFLKQHLSEIRQKSRNLSKCKKGSNNRKKKQIELARLHEDLHNKREDYQFKLAHELCKKYDYIFIEDLRLTGMTKMWGRKMNDLAHAAFTDKLEYVASKYGVVVHKIDRWYASSKTCECGYVNKSLQLSDREWVCPKCGSINHRDLLAANNILRKGISELESMCKTSSEASYDCIQESHSL

SEQ ID NO: 44841 - protein, 452 aa, unknown
  TnpB Polypeptide
  misc_feature (447)..(450): Xaa can be any naturally occurring amino acid
VHSVSVRISADQGVTQVVKLRLNPSRAQAELLAGYCGTARAAYNTPLFHVKANIGQRAAEKTYGVAAPDLTPSLSWHKYGLEKLLRENRGAWLPWYAQVPYLVLDRQAHQLADGLAKWKDGTGKFPRYRKKRGDGAGLVPVTLKEKDYTWLSEGGRALALPISNATRYELGRARSAQLSSVSVVKDNRGRRAAKLIRDGRGQVQEVTFSFSGGYWWASLRMRVRPAAKTQPTWHPVPARTDAVGVDAGMGRHFATLDKPLPGVTDDAGHIDAPMFLRRALGDLAVAQRALQRTTAGSRRHAKALARVQKLHGRVAARRQTWQQRLAIALVEHTQVVGVETLNLRGMARRTKGFRFGKSVGDNGYGLFVEILTKQADKRGAAVVKAGRFYPSSKTCSDCGAVKTKLHLSEREYNCTTCGLIVDRDVNAARNLAALARTGLTRPEGSGXXXXAA

SEQ ID NO: 44842 - protein, 351 aa, unknown
  TnpB Polypeptide
MIIRTLKLKLTKAQEAKLSQWLWHLTGVYNWAIKKIERNAANKIYFSQKTFQNLLAEHGNRMEIPSHTLQGTLTQAYLAWQRCFKKLAKKPRLKGQRNKLNSIPFPDPLRPPKNNRISIPAIGSVKYHKQAIPEAKIKCGRIVKRASGWHLCLWLDTEHKFPVKQTEAAVGIDPGFDTLLTLSDGVKFDNPRELRKGALRLAQAQRGNNRHLTARLQERQANRRNDRNHKISRYLVENYKTIYFSDDNFKAMAKLFGKSITEASLADLLRKTDYKCHIGGRKLEPVCSVRTTMRCSACRALTGPTGLANLAVRQWVCSACGAHHDRDLNAAINVLIAGAGTAHEREIRYAT

SEQ ID NO: 44843 - protein, 386 aa, unknown
  TnpB Polypeptide
MRLSFKYRIYPTKKQQTILLQTLDTCRRVYNYFLAQRKDIWEQTGKSISSYRQMKELPQLAIKDDSLNAVYSQTLTDVARRLDKAYQAFFRRIKVGDKPGFPRFRGKGWYDSFTYPQNNGACFKLVENNTKIYLSKIGCIKIKYHRAFQGVIKTCTVKKTPTGKWFVIFSCDTVPSEQLPHSDLKVGIDAGLKTFAVLSDGAEIKRKRFFKTDEVALAKAQRKLAKQVKGSKQRRSARKVVARIHERIHNRREDFAHQESRKIVNKYGVICVEGLDIPSMLQRPTIVVDGKELSAKPIHRSIADAAWNSFHRKTAYKAENAGRLFVKSNPRGTSQDCYGCGKPVPKDLGQRVHNCLHCGLTLNRDLNAALNILRLGLQSLATGKVA

SEQ ID NO: 44844 - protein, 414 aa, unknown
  TnpB Polypeptide
VILTQSFRARQPRSILDELNKESGRVYTLTMVEHWRVKRRKDVWLSQYDAMRLNDALSVSTILHAHSRDAAQEAFYKACKTTKELKRGGVDSKYPHRRKMFRTTCWKKSGIRVKDAKLYLAKARKLEPVIVPLPKYLQGFDIIEVRLVYNLSSDHYDWHVVCDDKLEIPKASGNAVVAVDFGEIHPAAACTETEAVVFSARELRSIIQGKNKMTAEIAEKQSKCRKGSRYWKKLQRSKNKKLSKFKLKQRDICHKVSRAIVDFAEEHNASKIVMGDIRNVADEVNLGKKCNQKVSQWPHGILQKYTTYKAKRKGMETELEDESYSSQTCPSCGNRKKPNGRVYICSKCGWKGSRDGQVGAANILSRSVYGELGRVLISETKYRYPYLVRAKGKRSHAGTMQVACGVELQEAAGL

SEQ ID NO: 44845 - protein, 541 aa, Streptomyces sp.
VGGLREVAAPFVVPGPCGVAIRTRLKHLTAEDEKVLRLIGDHLSSLASRDLKARCAAGLAHDSDQWAQRKRVLTEESSSRWAGSITKATHDQWALARRGQLAHLQGLEAGVRTITHRLSLPLGEKGSKRAPGGYDTRQEWFAKSRRLRLLDDRLRAARAEWEAGVVRVVRGGKRLLNTRHHLEQAQLTEQQWRTRWQAVRRFLQADGESGKRFGNETIRVTPDGEVSIKLPAPLAHLANAAHGRYVLATRVVFAHRGEQWADRIQANRAVAYRIHEDTGRSRWYLTASWTIPPVRTVPLEAARAGGLIGVDTNADHLAAWRLDTHGNPVGAPLRFGYDLTGTTQHRDAQIRHALIRLLHFAKRHGLAIAVENLDFAAEKTREKHGRKKRFRNLICGLPAGRLRARLVSMAAELGIPVIAVDPAYTSRWGAQHWQKPLTSKTRKTTRHDAAAVAIGRRALGHPIRRRTAPPRTHQSDGYGHRTVQARPEVLGREGTRPRVPGPRTRSVPPDAASTRATRTPKTVRDVRSDQEWVQDSLLLTD

SEQ ID NO: 44846 - protein, 412 aa, unknown
  TnpB Polypeptide
MQEMRILKFYLNKSHPDFKIARHHAEQARILYNGMNALVRESQRFYIDGDLGSLPISHEIGVVPWVTEGVYPGSSYNLVPIEKAVSSFKSVDLPAKVKQGVSKSLAWSWESCISLRKKGENAGDPSYKKKYCLVQYTSQAISKRGLSRGWVVPTQWKTGFKLPQGVEVSSARLYHSHKDVFVLEVLHKVGITSHKEDGIRSSIDLGLNKVATITFSDGTQPLTVDGAYVKSLNQGANRNSAKREVKNKKAMWKKRNRRINHYFHSASSSVIKTLLERGVNELVIGWNEGFKDSPNMGRKNNQRFTSLPLARFRDMLTYKATQNGIRVAIQEESYTSKASFIDSDPLPVYSRGAKNVVKFSGKRTSRGMYKARDNTMIHADVNGSYNILRKSNPSFGWSSGMVVMPVNLKFAY

SEQ ID NO: 44847 - protein, 361 aa, unknown
  TnpB Polypeptide
VNLTAQLKLEPTAEQVLVLRATLVASNAACDYISGVAWDSKTFRQFDLHRLCYREARSRFGLSAQAAVRCISKVADAYKLDRKAKRAFRPMGSAAYDQRILSYNLEASRVSIRALEGRLNISFVCGEHQRRLLANRKGETDLTFVRGKWYVLANCSSPDPAQAAPNGFLGVDLGVAQIAADSDGNLYSGSEIKSVRHRQRRLRAKLQSKQTRSAKRRLRKLSGKERRFAKHVNHVISKQIVAAAERTGRGIAVEELTGIRDRIRATRRQRGVLHSWAFAQLRMFLEYKAKLAGVRLIAVDPRNSSRECSACGHAEKRNRSSQSNFRCAACGFAGHADTNAARVIAGRAAVSGPNVASCAPV

SEQ ID NO: 44848 - protein, 361 aa, unknown; identical to SEQ ID NO: 44847
  TnpB Polypeptide

SEQ ID NO: 44849 - protein, 398 aa, unknown
  TnpB Polypeptide
MLVDRAYKAELDLNNVQRTTCLRHAGTARFTYNWGLQRKKESYQATGRSPTAIDLHRELNRLKRTDFPWMYEVSKCAPQESLRDLDRAYRNFFEGRAKYPKFKSRKRGIGSFRLTGSIRVFENAIQIPRVGRIRLKEHSYLPTIGVHIHSATVSEHAGRWFVSLQVEKEIEVPENVGSVAGVDVGVSHLAAVSDGTLIESPRALLRCDRKLRRLQRSSSRKKLGSRNRAKANRMVARCHFRIANIRSDAMHKITTMLVKTKSVIGVEKLAVKNMLANHCIAKSLSDAGLGEFKRQLKYKAIWYGSTMVEADRFFPSTKRCSACGAVKLEMPLSERVFRCERCGFEADRDMNAALNLESVAASWVETLNACERREVHALWQVPADEAGTEHYLGDVLNG

SEQ ID NO: 44850 - protein, 459 aa, Mycobacteroides sp.
VVKFEIPEGWGVQAFRFTLDPTAEQAHALARHFGARRKAYNWTVATLKADLSAYRETGVETDKPSLRSLRKRWNQAKDEMCVDAETGAVWWPECSKEAYADGIAGAVDAYWNWRASRAGTRAGKRVGFPRFKKKGRDADRVSFTTGAMRVEPDRRHLTLPVIGCVRTQENTRRIERLIAKGRARVLAITVRRSGTRLDASVRVLVQRPQRPGVAHPDSRVGVDVGVRRLATVANEDGTVLERVPNPRPLDAALTELRQVSRARSRCTKGSRQYRERTTEMSRLHRRVNDVRAHHLHCLTTRLAQTHGRIVVEGLDAAGMLRQKGLPGARTRRRGLSDAALGTPRRHLSYKTGWYGSQLVVADRWFPSSKTCHQCEHVQDIGWAEHWQCDSCSATHQRDDCAAVNLARYEEPSSVVGPVGAAVKRGADRKTRPSRAGGCEARKGRSRKAVEQPRDGVRVA

SEQ ID NO: 44851 - protein, 417 aa, Limnoraphis sp.
MLVFEAKLEGEKQQYERLDEAIRTARFIRNSCIRYWMDNPKIGRYELSAYCAVLAKEFPWASKLNSMARQASAERAWSAIARFYDNCKKKAAKKRCDLAASQAARGSAPREGFPRFKKHQTHGSVEYKTCGWKLSEDRRTITFTDGFKAGSFKLWGTRDLHFYQLKQIKRIRVVRRADGYYVQVCLDQERIEKREPTGKTIGLDVGLTQFYTDSNGQTVDNPRYLRKSEKSLKRLQRKLSRTKKASKNRAKAQNRLGRKYLKVSRQRKDFAVKLARCVIQSNDLVVYEDLQVQNLVKNRKLSKSISDAAWSNFRSWLEYFGKVFGVATVSVPPHYTSANCSNCGEEVKKSLSTRTHRCHNCGFVLDRDWNAAINILELGLRTVGHTGTLNASGETDQYLSVETPSSKSTRGKRKPLQ

SEQ ID NO: 44852 - protein, 518 aa, unknown
  TnpB Polypeptide
MAKANKFLTFLIDMPEELVWIYDFLQEKMNMWIGNPVIRRQLFQIDLSQPRGKIWEEIRNIVGQEEITQWEIPNPAWYSRMIFENIRRLLLSKQEAIVCFEELKKNGNKVSDDLLETLKKKGIFPKRTFLFNLRRSDDPPTLARKATFVMDYSVSIDQTCIRINEMTFGFKVQKGEYLTYEVVLPLSLRKNLTGEIAKPRFFKRKRDGKYVGHCSYEVEIEPSKGQNILGVDLGKKKLFSSVVLYSDGSYSEEIVNSRLSSIVDEKLKRKKKDLNHLLHKNRVLEELINGDLNLFNSHLEEIRQQRSVQIIELRTNMLNTKRNQAKRIAGEIVSIAKENDCKEIHLENLSWLESQGGRWNHSEIQDFVTEFAELEGIKVIKVYAKHTSSAHPITGELGRESGRNIRFANGDVIDRDLLASINIAKRNKRNQKENKVNKLRKNHTSTPKKVKKPSNRKVSSAIKNKLLEKNQRGTEIVVFYPRQTCKGTWEVLDISSKPHMLSLSMCHLRHPMSICYMT

SEQ ID NO: 44853 - protein, 418 aa, unknown
  TnpB Polypeptide
MITLSLPYYTNNENTTFLENLRKQYSNIVRFSYNRFYDGDNQKQIRDKIKLLNNIGDLNSWLIQCALKDGESIFKRNDKNKVIFGGKKDFHRRIKGLISNKDLKEKRLNPLMIQGEEVKMGNRSFKLDIINNNEIIFKVSRVKHIKLKLPNLRNNYKKLLYKLEQTNDIKQGEKGLTYSIRLDSNKIYISFKEEKVKHNLLNNRYIGIDLNPNEIGISIKEEDKILELQHFVLNINKNNHNKIKHEIFEISKKIEKLFSKWNCKYIFVEDLTIKSTEHNKGKKFNRMVNNQWIRNDFINNLEKRINNLGGKIFKINPAYSSFIGNMMYNFSDPINASLEIGRRGYEIIILKNKRFYPEIISVKDQWKKHLTENIISWKEFFKEIKNLEMRYRVSLNEKFKVLSYLSKKSRICYYLYPI

SEQ ID NO: 44854 - protein, 374 aa, Acidobacteria sp.
IRKTFKYRLYPNRKQRESLLATLDVCRYLYNDALQERREAWKLCRKSIPFAMQSAQLPACKQADAPMRGVYSQVLQDVLHRVDKTYKGFFRRGNGFPRFKGKGWFDSFTYPQAGFRVEGSQVSLSKIGNVKIKWHRPLAGAVKTLTLKHENGKWYACFSCIVDVEPLPANDSVVGIDVGLECFAVTSDAEIVDNPRWFGTAQKKLRVMQRHVSRCSKRSGGWRKACMFVAQLHRHVFNQRNDFQHKLSRELVNHHGFIAVEDLHVKGLAGGMLAKSVQDAAWSSFIAKLSYKAESADRLLVKVNARGTSQQCPCGAPVPKKLWDRLHKCAACGLKTTRDHASALEILRRGLRLRTETPAIAGVALEAPSFSYGA

SEQ ID NO: 44855 - protein, 353 aa, Stenotrophomonas sp.
MTERKVTKTLKVRIRDKHAKALRDQAASVNFVWNYVNELSSRSIRERGAFLSAYDIQKYTGGAAKDLGLHSHTVQEVSREYATRRKQFRRGRLAWRKSRGVRRSLGWVPFKSGAAKWKSGQVFFNGQHFQVWDSFGLSQYKFRSGCFNEDARGRWYFNVVVEVDAQPSAGGGAVGIDLGLKDVATCSDGAKMENGRFYRDLEDKLAIAQRAGKKRRVRSIHAKISNRRKDALHKFSRHLVDRHEEIYVGDVSPSKLAKTRMAKSVMDAGWGQLKTMLEYKCDHAGIVFKEVGEAYTTQTCSACGALPPQRPKGIAGLGIREWTCECGVTHDRDINAAKNILAAGHGRPAEGIS

SEQ ID NO: 44856 - protein, 403 aa, Lactobacillus sp.
MDLGKAVKIQIKLNSNTAHDPLTTAMEQYRQACDFVSQYIFDHDFPLGVFKLQSVLYQELRSQFRLKAQMAISVLRTVTARYKAVRTQLKQKPYRYQDEQGKWQKQTKDLTWLWYPIRFRRPQLDLVRGRDWSIRQDGSISLNTLDRRITVWPVLTHWTDYFDGTWKLGTAKVLTSGGKWYLHIGATQVVADYDQAQTAHVVGVDRGLRFLAAAFDEAGTTKYLSGTRALNKRQRYKKLRTRLQFKGTKSAKRVLKRINQRENRWMSNENHRLAKTLVDRYGTNTLFVLEDLTGIRFATEQVPKDRRYEQVSWPFYQLEQFLTYNAAAVGSHVLKVAPDYTSQRCPQCGTIDKRQRDREHHEYRCVCGFVANDDQAAAMNIQQLGTRWLAGTAKPRYTRKQAG

SEQ ID NO: 44857 - protein, 457 aa, Cyanobacteria sp.
MKTTFQYRFYPDTKQKLELNEWLRISRYWYNRQLGDRFDWWEMNRTRVDACPLVSSIADLRDQPNFYAQKKQLPILKQDLVKVWHSGELLDFSRVDASVLQEVSKRGEKAFERFIVGDSNGNKSGKPRFKTVADFRTMTFADGKAVKISLVRKHWMYLRLPKLGVVKVRMHRGIPEGFTIKQVSVTKKADGWFMQIMLQDPTVPDFVLDEVIPTWENSMGIDAVLNEDVYLATSDGEKLPSLKPLRKNQAKLSRISTKRNKRKRGSKARRKHSIREAKQHQRIARSRKDFQYKTAHKLVKTGHKVFFHEDLNLKGLTKRNKAKQDETGTFLPNGQSAKSGLNKSWSDAAFGNFFKTLEYIAAKAGSVVIAKKPAYSSMVLCYRDEIIFTDCSIRDYWDEQHSLKVDRDINAAINLKRLGLDIFPSIKRRVRFVVEESRLKSVNNSTSRASPSKQFVG

SEQ ID NO: 44858 - protein, 442 aa, unknown
  TnpB Polypeptide
LLIDQLNAYYDVHGTYPDTYFDFQDSPEYSSGVLPYSADDGPTSGQAVKYQYDETTRQLTVELKTPDTLEPETYGDWTWTEYTLEGYDAFQELVEHGSLSAPSFQPNTSKRGDDYYELSFPVEVEHADTPGDVETVLAIDGGLRKDATAVVVDKDGEQLSTPYFIQNTERERMRNLNRERNQLNSKLAHLRRQGRDNTDDFKHIQSEYERVNNKIRHKREQLVHDVANQIIALALVYDADAIVHEDLRSLSPPRGEGQLSWELSSWARREIIQNIEYRADIAGIHVERVYAGNTSRSCPRCGSTGYTTKSPDHYFEVWHGGHFRCDNTRCGYQADRDYVGAVNVARVFFAESATLDSDFTSSYTGDSEIELASRSAGSRPVFGTALVAYVGQSRVTAGCGSCFIQPAVIPIGTKNAVSSKSSVSSPATHSYSLFVRDAAVCC

SEQ ID NO: 44859 - protein, 341 aa, Desulfurococcaceae sp.
VKKGKAYKDKPEVRRVAITYSDSQDWRLEGGVIELKTHRGWVELHYRNHKQLYKYLYGDWRLASELRFKILDRKVVAYLSFTRELEVGYDPKNVVAVDVNENNVTIAFFEDGALSNVYRVETGLGGVVIAYSERRKRVTLGNSTKVRGVRRKLRRLREKGRKLDVLRKTVKFVENLAIGNKAVVVVGNIDEKAKERMEEDANSKLRHRIHQWSVKRLIELLDEKPIHVVKVSERGTSSRDPFTGKRIKWFEPLVIRSAVKGLKRVKVVKVALRVAWVNGRALERDVVGAVNIGLKYLNSDGSPMALGSTGAHGVWAMLVNPHRGSTPLTGLQIFTNTIKYR

SEQ ID NO: 44860 - protein, 395 aa, unknown
  TnpB Polypeptide
VRSSLTRVEKVRIYPNPAQIRAFERILWTCCNLYNAALEERRSAYGRYKLAGKPKDFPWPTMRSQIDGYLEAREENIWLQNTYSETLRDVLKKIDVSMSAFIRRVSRGETPGYPRFRASRRYDTFSYPHGVRAIKVFEKTLKFPKEIGFVKYRKSGRDLPQDFRVVRISRSCDRWYACFEHVIEARPLVPSGREVGIDVGISNYAALSTNEFIPNGKWDRKGNSEQHHKSVSSKKKGSKRSRKAVLLLSKSKAKEKRQRDDFLHKQSRKLVNEFGLIALEDLKILNMARSAKGTIDEPGKQVSQKAGLNRSILDAAWGRFTDMIAYKAEEAGRKVVFVDPKNTSLTCFECKHVSKENRKSQSDFLCVSCGHLDHADVNAAKNILERARLGLAAAA

SEQ ID NO: 44861 - protein, 369 aa, unknown
  TnpB Polypeptide
MYYAYKYRLKPSDAHREALDRHRDICRQLYNHTLNRLNEYQDEHGELPSMTTLRSELPDLKKWWDGLSDVYSKVLQTVVERLFDNLKGLSALKKNGHGVGQLKWKPPREFRSFTYSQSGFKLDKKGGQTVLSLSKLADIPIRLHRAIPDDATLKQVTVKKEPTGEWFATFGVQMDREPPEPPENPEKCVGIDVGILKYAHDTDGTAVGSLDLTDKRERLEREQRKLSRKQHGSNNYEKQRRRVAECHANLRQKRRDFLHKLSAYYARGVRSRGGRRPEREGDDGVAGEQPQHRLRRVADVPPLLEYKCEREGHTSWRLIREGRPRSVRHVASRRRSRCGSVNTPVPPAGLRRTGTRTRRGTFFLVASEM

SEQ ID NO: 44862 - protein, 410 aa, unknown
  TnpB Polypeptide
MATMAITRSYRIRAYPNGAQRRWLNSWFGAGRWLWNTALGIRSGAYRALGLTLTGNDLSRWLTQWKRTLGHEWLSEIPATCLTQCLRDQDAAFRHFFDGRAGYPKFKRRCTGGSLRFQGVGVSWSRGVLSLPKLGPLKLAESLPEVTRPHTVTIARDAAGCYHITFHAEVNTSPPPLTHRAVGVDVGLTCLATLSTGEKISNPKRYRARLRYLRQQQRCAARRQQGSRRREKQRLRVARAHARVKRERFDALHHLTTRPVREFDVIMIEDLNLRALARGRHSCAFRDAGLGELRRQLTYKTHWQQKILVHVSRWYPSSKTCSRCQNILDGLRLDERTWTCPKCSGVHDRDVNAAQNLLAEGFRQLAGRDDRDLRVDARDACPDNLLAQVLAEEARSGQRNLVCRQQARVS

SEQ ID NO: 44863 - protein, 401 aa, Okeania sp.
MRLVDRHIINRTHNFWACCDELAFKSKNLYNLANYYCRQHFFCTGHSLDLTKLYHTTKDSDAYRALPTKVSKQIIKCLVATWRGYFQAIKEWSKHPGKFLGKPKIPKYKDKTKGRNVVIYSKESVYRASLKDGICHLSMSEIKIPVIVETVIEVRIVPATSCYIIEVVYEKALQPQIHSTYIAGIDLGIDRLVALSTNKPGVKPLLINGKPLKSVNQLYNKRKAKYQSHLKGNRKTSRKIEALSYHRNRFVENYLHNTSKLVVEYLTTNNVGTVVIGKNDNWKQGANIGKKNNQNFTQIPHYKLIQQITYKCQLVGIKVIETEESYTSKTSAIDLEKPIYHENYVGKRVKRGLFRSAKGKVINADVNGSLQIIRKKFPGAFTAEGIVSCAVQPVLVNPISR

SEQ ID NO: 44864 - protein, 417 aa, Okeania sp.
MKSIRTKLKLNNKQKTFFAQHAGYSRWCYNWGLSLWNDAYTDGYKPNPSFPSECYANGMLRKRKLREVFTNHTKPLYPWMKNLSSKVYQYAFINLGEAFKRFFSCGMLRKQGLGKRPRFKKKGRSDSFPTECYANTIDNCGKPIELNGWSHKLPFIGIVKTYEPIEATTQKITISRQAGDWYLSCSYELTPTATNKTTEVVGVDLGIKTLATLSNGEVFKSVLPYKKAQNKLAKLQRQLSKKVKHSSNWYKAVVKLAKQHRRVANIRKDALDKLTTYLAKNHSIVVIEDLNVSGMLANHKLAKSISRQCFYEFRRQLEYKCQWYGCELVVVDRFFPSSKTCSSCGHVQDMPLNIRTYDCPECGLSIDRDLNASINLRKRVCNSEETSECKTHSRDAVGLTVDACGRSAADSSGRSRK

SEQ ID NO: 44865 - protein, 410 aa, Okeania sp.
MKARFKYRIYPTLGQKHRLAKLFGCVRVVWNDSLACCQEKYKSGEKKPVNSQLQKQFITKAKKNEDREWLSEVSAIPLQQSLNDLNRRGERPFAPTNFFQSTKSNRKGKPIRPPRFKSRKSRQTARFTKGGFKIGQHKVYLAKIGKLKIVWSRELPAAPSSVTVIKDSANRYFLSFVVEIQPETLPENKNSVGIDLGIKTFATLSDGTKVDAPKPLKKRIKKYRKLSKSLSDKTLGSKRYEKARLRVAKFYAKLKDTRADFLHKLSTEIIRENQTIVLEDLNVSGMVKNRKLSRAISDLGWRQFRTLLEGKAEKYGRDFRVISRWEATSQTCSTCGFKGGKLDLSVREWECLNCGTKHDRDENAAINILVAGGQSETKNGRGGKRKTSVKVAAVCVSGSYAKQNVNPSRS

SEQ ID NO: 44866 - protein, 400 aa, Streptomyces sp.
VSVTVNHAKRAFKYRFYPTDAQAAELSRTFGCVRKVYNLALAARTQAWARQERVNYNATSAMLTAWKKTEELAFLNEVSSVPLQQTLRHLQNAFTQFFAKRAKYPRFKSRKTSRKSAEYTTSGFRFKDGRLTLAKMADPLDIVWSRPLPEGAEPSTVTVSQDAAGRWFVSMLCEDPAVKPLPASDAAIGIDVGLDHLLTLSTGEKVANPRHERRDRTRLAKAQRKLSRKAKGDGANRAKARRKVARIHARIADRRRDMLHKLTTRLVRENQTLVIEDLTVRNMVKNHTLARAISDASWSEFRSLLEYKAAWYGREVIAVDRFYPSSRLCSVCGTLQDKMPLSVRTWTCECGATHDRDVNAAKNLLAAGLAVTVCGAGVRPQRSSPGGQSATKQKTPRREP

SEQ ID NO: 44867 - protein, 311 aa, Dorea sp.
VYSKAVKKSIEDGCAAFTRFFKHQSDFPKFKKKGKSDVKMYFVKNNPKDCQCERHRLKIPTLGWVRIKEKGYIPTTKAGYMIRSGTVSVKAGRFYVSVLVEIPDVNINNNLNEGIGIDLGLKDFAIISNGKTYRNINKSAGLKKLEKQLIREQRSLSRKYENLKKGESTQRANIQKQKLKVQKLHHKMDNIRTDYINKTIAEIVKTKPSYITIEDLNVKGMMKNRCLSKAVASQKFYEFRKRLKAKCDEKGIELRIADRFYPSSKTCHHCGSIRKNLKLSDRIYRCECGYVADRDLNAALNLKDAKTYKIA

SEQ ID NO: 44868 - protein, 416 aa, Roseinatronobacter sp.
MIHRAFRYKLAPTSEQEALFRQFAGVVRLVYNLALEQRRDWWRHYQRQAEGRLNYVAQARELTALRAEFEWIAQVHVTPQQQALRDLDRAYANFFAGRAGYPSPRKKGVNDAFRFQGREVEVRRLNGKWSTVRVPKIGWIKFRDTRSLRGRLMNVTVSLSANGWHIAFACEIESGKVADNTLPAVGLDRGVANTLTLSTGVHLHMPASLAVIERKKRRAQRVASRRKRGSMRHAKARRRVARLQARAARIRQDWRHRSSLDIASRFGTVVLEHLATRNMTRSAKGTIDAPGKNVRQKAGLNRAILDQGWHGFETVLAYKLEERGGYLCKVDPRHTSQTCSACGTVDRESRESQAVFVCRTCGFRVHADHNAAINILRRNTASMLVEERHWPSGEARTIGGAMRLPENPPASAGGRC

SEQ ID NO: 44869 - protein, 424 aa, Nocardiopsis sp.
MTSKSVKRAFRYRFYPSDAQAAELSRTFGCVRLVHNRALAEHSAAWQQRRERMGYSQTSAMLTAWKRTEELSFLTEVSCVPLQQTLRHLHTAFRNFFDRRAKYPRFKSKKTSRASAEYTRSAFRYRDGHLTLAKMAEPLDIVWSRPLPKGARPSTVTVSRDAAGRWFVSLLCEDTVESAPAANDAVGVDMGVTSLVVLSTGEKVANPRHERRDRARLAKAQRALARKAKGSANRDKARRKVARVCARITDRRRDFLHKLSTRLVRENQAVVIEDLAVRNLVKNRRLARAISDVAWRELRTMLEYKCAWYGRDLVVVDRFLPSSKACSTPGCAYVHASLPLRVRTWTCPGCGVAHDRDVNAALNLEAAGLAVGAGPPLCDHGEAHTVGAGAGVRPQRESSRTGRPAMKQEGHGATRDEALASNHQ

SEQ ID NO: 44870 - protein, 276 aa, Nocardiopsis sp.
MAEPLDIMWSRPLPEDARPSTVTVSRDAAGRWFVPLLCEDNVEQAPAANGAVGIDAGITSVVTLSTGEEVANPRHERRDRAGAARAQRALARKAKGSANRDRARRKVARVHARITDRGRGFLHKLTSRLVRENPVVVIEDLTVRNLVRNRRLSRAISDVAWRELRSVLACKCAWYGRGLVVVDRFFPSSKSCPTPGCGYVHASLTLNVREWTCPQCDITHDREVNAALNLQAAGLAVVACGAGVRPQRESSRTGRPATKQEGHGATRDEAVASNHR

SEQ ID NO: 44871 - protein, 289 aa, Faecalimonas sp.
MTKYYSINEFSKIGGVSAQTLRNCEGFSMSKKKNKQKLNWIRLCEKGRIPTNCKYMNPRFTYDELHWYISVGIEVEDSTTIPLNNGIGIDLGIKDLAVCSDGNIYKNINKTTTVNKLEKRKRRLQRSISRRYEKNKKGGIYCKTCNIIKKEKELLKVTKRLTNIRQNYLHQTTSEIIKRKPSFICIEDLNVSGMMKNKHLSKAVQQQCFYEFRKQMEYKSAWNNIPVIIADRFFPSSKLCSCCESIKKDLKLSDRIYKCECGNVIDRDYQASLNLKMYGENVLKQQSVA

SEQ ID NO: 44872 - protein, 387 aa, unknown
  TnpB Polypeptide
MILTYKFRIKDATAGKHLARHAIACNQVWNFCVATQREAERRHKGGMNVRWPTAFDLINLCAGSSKELGILADSVCEICRRFVNARNASRRCPQFRSSFGSRRALGWIVFKAKRGHRVSGDRVAYCGRNYRFWKSRDLQGTPKVGAFVQDARGRWYVCIQCEVTDTLPTGSGIVGIDLGLKSLATCSDGTEIPALRHFRLYEPALAIAQRSRSRRRARAIHAKIANSRNHHLNEWSARIARENRLIVVGDVSAAKMKKTRMAKSVSDASWSMFRNQLRYKASRHGAVYIEVDERGTSQTCSACGTIPTSSPKGKGALGMRSWECSNCGASHHRDVNAARNILWIGLECQPPGEGIANLSRDDINKGVPQISIGRAALSAPSTEKGRG

SEQ ID NO: 44873 - protein, 357 aa, unknown
  TnpB Polypeptide
MILKRSATVSLKFSTEEKKQQVESLLEEYKSVSQRYIDLCWEDSSLKLNKESLASIEDTSLSERFKSNALRQALSIVINTKKSAKVLNKEATKPNFNGTALLDAKFVFINLDAPNSFDGWIRLSTLNKGERIWIPFKRTKPLNKWLNKGFKLLHSIRLRKYNGNLYADLILEKEVALKETGQSLGIDSGINKALSLSDGSYLGSNYKYYTDKINRKQRKSKAYDRALKERDNYLRQEINKIDFSSYKVIFVEDIKNIQQKTKQTKRVNKKVRKLFSVWVQGKTFGWLKNKSEENCVQFTFVPARHTSQTCSKCRHREKSNRHKELFKCKQCSFTADADYNASRNILSVGLRSLEPLS

SEQ ID NO: 44874 - protein, 377 aa, Nostoc sp.
LLAKSFGCVRWFYNFALNLTGEAYRNTGKGLSRNDIINLLPSLKKEYEWLTEPPSQCLQQVALDLSSAFLNFFEKRALYPNFKKKGQKQSIRFPQAIKLDGDYLTLPKLGKVYCKVSRLPEGKLKSATVSLAPSGEYYTACLYDDGKDKPVSSSEGKAIGVDMGITYYAITSDGTKHGNPKYYRKYEVKLAKKQKQVSRKQKGSSNCNKARIKVAIVHTKITRCREDFLHKLSCKLVDENQVIVVENLAVRNMVKNPKLAKSISDAGWGQFCTMLKYKSEWEGKIYIEVDRFFPSSKTCNHCLHQIDNLSLDIRTWQCPDCKMTHDRDINASKNIRDEGLRLLAGGHLATASGERVRPSKGTAFTRHFSVKEESPRQ

SEQ ID NO: 44875 - protein, 523 aa, unknown
  TnpB Polypeptide
MKLGMPKAKVQKLYLSIHARLVFLKEEDKQAVLDLMRRFSSATRFAYNRLLEGRDRKELKREDGPLCTLFGLNTRYADGAIEKAEALIASAKELGQEPSKVIFGGRKLFEQLKRRHLSGKALLALKRKWKEKRQGFLYSRGEAAKKGNANLRLEPRDGALWLRINLGKGGYVWALVQTSHPQLKTLLQRVYASLPYNVTLQLKEGKVYAHFSWSEEVPSPVHTKENGVLGIDVNADPYHLALAVVSPDGNLGRYLTISLEEVDRATNKGAKEIILWRIAHQVVALAEERGVAIATERLKHLRKSRRGDGSGRLFRGKQHRFAYRSLLRKIHSLARKRGVEVLEVNPQDTSTIGMLKYAPQLSLSKDVAAALVIGRRALGFEEGLPRGYEALLKDENFLRGVRGFYEVKIAQLQRKYEEEKNLYLKRRCSRELKRTQRALYYLSSLRGSSESQKGSTDGRNPSGVNPWRVLRVSLFLPLLGREVPRDLSPLKPILHFHGSWEGWKTGLGPYPGEGPGCANVHFC

SEQ ID NO: 44876 - protein, 269 aa, unknown
  TnpB Polypeptide
MGKIKEFGYIPVNSIVKSGTVSQKADRYYVSILVEERDIKISNSNIGIKISNSNTGIKISNTNNEGLGIDLGIKEFAICSNGNKFKNINKTSTIKKVEKKLKREQRKLSRKYESLKIRNKKEKGGNVTSQNIQKQVVKVQKLHQRLANIRTDYINKIVSSIIKQKPSYITIEDLNVKGMMKNKHLSKAIASQKFFEFKTKLTVKCKENHIELRIVDRFYPSSKTCSQCGKVKKDLKLSDRIYKCDCGFTIDRDLNASINLKNAKEYKIA

SEQ ID NO: 44877 - protein, 453 aa, unknown
  TnpB Polypeptide
LIFCKIQKNNQKISCFLSKNILYYKGKRAFTRSYPKIRGLYHERSFDYLLDFGRGGTMIRAHKIRLYPNNKQATYFCKACGVARFTYNWGLSEWKRRYNAGEKVNAGLLSKELNAIKRERFPWMLEVTKCASAEALRTNLNRALKNFFEKRTKFPVFHQKGCHDSFSVYNRHFSVEGMMVKIPKLGMVRIAEPLRFSGKIVGATVSKTADKWFIAINVEIPDPEPIHTGGNLAVGVDLGVKTLATLSDGTVVSGPNASRKYEQKLRRLNKELSRRNVRKKGETQSNNFEKTKRKLARLHARIANIRLDATHKLTTALVKKYDLIGIEKLNVKGMMASHRMARFIADNSFYEFRRQLEYKAPAAGTRVIAANVMYASSKTCNVCGTKRKILSLDDRKWTCECCGAVHDRDVNAAINLRNYAVGYTVKACGGLGEVTAPDETGIKRRRRKTSGKS

SEQ ID NO: 44878 - protein, 320 aa, Enterococcus sp.
MKILKGYRFKIYPNEEQKRFFIQTFGCVRFTYNYLLKAAKKPDNRSEGKVITPAMLKRDYPFLKATDSLALANAARNLNRAFKNYFSGRSGYPKLKNKKSAWQSYTTNNQNGTVAIEGNQLKLPKLKERVMICCHRPVLGTIKSVTISAKNNQEFYVSLLCVEEVDPLPKTNREIQIYFHPEKLIADDLGQLSIQHLEQTQQKINKLTQRLELKARCARKRKVRLSQAKNYQKLKMRLAKHQSLQHNQLQDYLNQLSTLLIRKYDVINFVEPSVRDQQSAANVQEAHLFSLNEWHQLMRMLKYKASWYGKEFKVVFSTQA

SEQ ID NO: 44879 - protein, 381 aa, unknown
  TnpB Polypeptide
MPVQKLNRAIMYRAYPTPEQQVLLSKTFGCVRFVWNHMLMDAQRFLEEAGAFFIPTPAKYKTEFSFLKEVDSLALANAQLDLKNANKRHREDPKAVGSPRLKSKRKSKMSYTTNNQKMRRKDGAIKNTIYVVGNLVHLPKIGDVKINKHREPEANWVLKGATVSCTRSGKYFVSLLYEFEKDIQPIKPTKETSLGLDYSSHDFYVNSNGDVANYPRFYRRSEAKLARAQRRLSRMQFGSHHYDKQIYKVRVLQEHIANQRKNYCHTVSTAIAKQYDAVFVEDINLRGLAGSLKLGKSTNDNGFGMFRTMLEYKLTSQGKTFAKIDKWYPSSKTCSVCGFIKDDLTLADHVWTCSACGTTHNRDHNAAINIRNVGLLGLYPA

SEQ ID NO: 44880 - protein, 333 aa, Ktedonobacter sp.
NDLQCQCAVLARQYPFVALLNSQARQASAERAWFAISRFYKNCKNHVKGKKGYPHFQHDNRSVEYKTTGWKLDTDGKHITFTDGCTIGRLRMVGTRDISTYPMKQIQRVRLIRRADGYYVQFAVKAERHVEHVSTDKSIGIDMGLKAFLTTSEGETVAPPRYLRKAGKRVKRVHRVHSRKQKKGKNRKKAQKKLAKAYLKVQRLREDFARKTANALIISSDMIAYEDLKIRNMVRNHSLAKSIHDASWGRFLLWLTYYGVLYHISVVKVAPNFTSQDCSTCGTRVHKTLSVRTHVCPHCGLVLDRDVNAAMNILAKATCCTVGQTGTDAPLRA

SEQ ID NO: 44881 - protein, 463 aa, Lachnospiraceae sp.
MFDYNCFLWYNLYGWEIFEMKIISTYSTKIKHYNHIFAETIKLYREAVDFYIDVCYLEWAVIDTLIGHNRLFYVEALTHRTSAHPNIRYDFDHKFYKFPCYLRRGAINEAIGKVSSYMSNLSNWETTDLKIRGQKPSYPKAGYVYPCMYRTDMYKPSGTYEARIKVFIRNTWDWITVQLRKSDVDYINRKCSTRKQCAPTLQKRGREWFLDFPFEEEIKLTDTDIRSQTVLAVDLGLNSAATVSVMQSDGTILGRHFLKLPKEYDSLKHSINRVKKVQQNGNYKTPKLWAKAKGINDDISVKTANFIIDKAVLYNADTIVFEHLDRTGKKRGSKKQKLHMWRSQYVQSMVTDKAHRLGMRISHICAWGTSRLAYDGSNRVLRGKEAELKCYSLCRFQNGKVYNCDLSASYNIGSRYFVREILKSLPVRERLALEAKVPQVAKRSTCTLSTLINLNAELSPLVA

SEQ ID NO: 44882 - protein, 405 aa, Streptomyces sp.
MQLRYSFRLYPGAGQRMALARAFGCARVVFNDALRVREEARTAGLPFVSSGELSKRLTASKKTPERAWLGEVSSVILQQSLRDLDTAYRNFFDGLEGKRPKVGPPRYKSRKDSRQTVRFTANASWRITAGGKLRLPKVGDVPVRWSRALPSVPSTVTVLMDAAGRYFASFVVETDASEVLPETTPEVGIDLGLGHFAILSDGTKVDSPRFLRRAGKRLKKAQRDLSRKQKGSANRGKARVKVARAHARVADARREFHHQLSTRLIRENQAVAVEDLAVKGLARTRLAKSVHDAGWSAFVNMLEYKAARYGRTFVRIGRFEPTSQVCSQCGVKDGPKPLRVREWTCRECGAVLDRDVNAAVNVAKAAGLAVAACGAQVRPVPVPAQRVEAGTHRGPQTRAVGIPVL

SEQ ID NO: 44883 - protein, 390 aa, unknown
  TnpB Polypeptide
MTMRKVAQRIPFTPSKTQASLLERCFGDRRFAYNQQVEAFNAYDKETNPKPAYPNVTGMKNANGWLRDSPIPSNALSNAIMDFRKAQSAYFRKAQYGKHRPRFVSRNDSIQSFRNTMPIRRMDGNRYPLSKKLGSVRIRKRDRLRYPIESLSSWTVKRENRTYYLVLLFDVDIQPKTRAEGRIGIDLGVKDFLTLSTGEKIDYPNRLRRLEEDVRWEQRKLSRRTKGSNNYRRQKAIVAKAYAKLRHYRDNFQHQLSHRLIEENQFIGMETLMVRNMTRKARKRLDADGRPMRNGQSRKRAMNRSILRDGWSGLVDKLSYKTEWYGRTLVQVDRFYPSSKLCHDCGHKYKGLRLSEREWVCERCGIPHDRDVNAALNIRDEALRLSQEQA

SEQ ID NO: 44884 - protein, 428 aa, unknown
  TnpB Polypeptide
MSMYRRYNYRAYPTRGQREALSRLYGACRYAYNWTLDQRELMRRRHGRMQSYTQLSGMFTQWKTNPGMEWLLAVSSTPLQQSIRHADMAYRNFLRLYKAGRTHIVTNHRTGKKHRTGVPRYKSRRDGEQSAEFTKSARFKVEHADGCKWAFLTLPKIGQIKLRWTRNLPSTPNTVTIMRHADGSYEASLTVQVDGEADAPEPLHEACGIDMGLDSLMSIVYTDGTREKIPHPRTLNRKTRRLRKLDKQLARKTKGSNNHAKTRLLKAKTHGRIRNQRRDMAYKLASKVAGENQAVALETLNVKGLARTRMAKSLLDANWTRIIDRIQQLGVQYGRTVKRIDRWYPSSQICSACGHRDGKKPLDVRIWECPKCGVLLDRDWNAAVNILDAAGLAESLNARGGDVRRGLAQADRNADACEAGTRRTVSLH

SEQ ID NO: 44885 - protein, 383 aa, unknown
  TnpB Polypeptide
MKTYSFKLYNSKKNKHLRKQISLACEICNHCIALHKRYYRLYKKSISIYALQKHVTKLKKQKYSHWKQLNSQAIQDITERIDRAYKLFFANCKKGITSAPPSFRKRRKYKSYTLKQTGYKLLDNNQVVIGNKVYKYFKSRSIEGNIKTLTIKRDALGDIYLIFVTDVEEARVASRTGKIVGFDFGLKTFLTASNDEDIESPLFFQQNRTLIRKANRNLSKKKHGSKNRRKAQLMLERVHKKVANKRTDFHWKLANELTDKYDTMFFETLNIKAMQRLWGKKISDLSFSGFMQKLKYLSSVKSKTLLFIDRFEPSSKTCSACGFINKGLSLKEREWCCPECQTLHERDRNASYNILRVGASTHAVDNVRPTQWQLSLIAESHEL

SEQ ID NO: 44886 - protein, 629 aa, unknown
  TnpB Polypeptide
VRPYRFYEEFIKGFGNKDPVEKMVVLEVKKRGKIQPKGSKMSTADQKCAKPLHPRHKQLKLINDKIDRTWDRKRIADQVYFVATCHQFRVKDLRQFCKFKKIKIPQARSRKEEIVKLIWENGADFQDIHDFASQADSQPSENTMLLTERVQVKTTTQLHALFQLSKNLYNKANCLVHAGFQRHVLWNAPAVQKAGCRVYYPEMDRELQGSGEYRALPAKTSQKILQQVDTAWTSYFEAIKAWKKDCLLPKTQRKFRSKPHKPGWKGEECENLLFFTNQQCKIKENYLHFPKAVGIPPVKVNATRIGPLQQVRILPRGYYSIVEIVFKKSYRGAERVAQTKNNLPQRIVAIDLGVRNLVCLVTNIPGVRPVVVKGGVVKSINQYYNKQRAHYQQQYEHLGIRGTPRRLARLTRKRNNKIEDIFHKLSQDIIEYCQALRVGTIIMGYNPRWKQNCSMGKRNNQNFVTIPFHSLVQKITYKAKLAGIKVEQVEESHTSKCSFLDDEPIAHHDTYLGQRGVYRSKKEGGNGKISYGLFKTAKGQIVNADVNGGYNILRKAFPEFTKDGIEGLGLIPVAVKFSKKDQDFTGLKQLANLASPLHALPKAGAVDGTEVGGVSTGGGSSKSIKIYTK

SEQ ID NO: 44887 - protein, 403 aa, Moorea sp.
MIILEFKAKGKKSQYSAIDEAIRTVKFIRNSCIRLWMDNKGTNKFDLSKYSKVLAHQFPFANELNSTARQTASERAWSSITRFYENCKKKVPGKKGFPRFQKHCRSVEYKQSGWKLSPDKKSIVFTDKKGIGKLKLKGTWDLWRFDKKQIKRVRIVKRADGYYVQFGVSVDCKESLKPTGNTVGLDVGLKDFYTDSNGHTESNPRFYRTGEKRLKFYQRRVSRKKKGSANRRKAINRLGRAHLKISRQREEHAKRLARCVIQSNDLVAYEDLRVKNLVKNHCLAKSINDAGWYQFRRWLEHFGQKFSRATVAVNPAYTSQNCSQCGEIVKKSLSTRTHTCKCGCQLDRDHNAAINILERALGTVGHTGTWILNPNSSGDLSSTLLGSGQVEQDGSLSEESPRL

SEQ ID NO: 44888 - protein, 417 aa, unknown
  TnpB Polypeptide
MFLAYEYKLKPTRRQREAFEIALEGQRQLYNAALQERRDAWRLAKNRITKFAQMRSLTEIRGDDPAYGALPATLSRWTLQKVDLAFAAFFQRAKAKKGRAGYPRFRGKASWRSFGLSEWSGIRLIDGRIVIKGLGAIRLHMHRPLPDGAIPRSCTITRDGRSWRIAIQIAVPDFIGPHSRAASAIGLDLNVLNRAIDSSGAAIANDRPLANALADLRVAQRAAARRKKGSAGRRKAIERARRLHAKITRSRRTAMHQASAKIARENGVIAVEKLALANMTRSARGTAKQPGRNVRAKAGLNRALLDVAPASFISMVRYKAERAGGQLIDVAPHGTSRDCSACGEPVPKTLKQRIHRCPHCGLTMDRDHNAARNILLRAQAVVGLRDANVDQSDGFPVAHRSCVVPGISFETATALSI

SEQ ID NO: 44889 - protein, 393 aa, Kribbella sp.
MCPTAEQQAALLEHCRHARHVWNLALEQWLMWTRDKPPTPGYVEQARQLTEARAVFGWLRAGSQTVQQQALRDFDQAVRYFYAGTHRRPTWRKAGRHEGFRIVGTQASRVENLNRTWARVLVPKVGWIRFRLSRAISDAKSYRITRDGAGRWHIAFAVIPAPIPAPGTGEVVGVDRGVTVSAALSTGELLSCPGLSETEQDRLKHLQRRLARCRRRSNRRQRVMAAIARLHARGADRRKNWVERTSTDLARRYDVIRVEDLRIPQMIRRPKPKPDPERSGAHLPNRRRAKAGLNRGILANGWGHLVRRLEDKATGRVQKVNPAYTSQTCSVCGHRASENRESQAVFRCVACGHQANADVNAAVNIAAGRAVSARQETPPRVSPKREPQLATSA

SEQ ID NO: 44890 - protein, 581 aa, unknown
  TnpB Polypeptide
LPDEKRERYNRLAELTKKTANTLIQQYWTPDHLSEIHHSSHQAWKYFDENEAFDEFDIYLPSRYKRCLLQKVGETLRSHADKREAVQTVKPLLPDHKIRRIHTRRIKEQLWNSDEYLSSGYVDVLIGQLNAYYDVHGEYPDTYFDFQDCPEYSSGVLPYSADDGPTSGQAVKYQYDETTQQLTIELKTPDTLEAETWGDWTWTEYTLDGYDAFHELVEHGSLSAPSFQPNTSKQGTEYYELSFPVEVEHTDTPDDVETVLAIDGGLRKDATAVVVDNKGEQLSTPYFIQNTERERMRNLNRERNQLNSKLAQLRRQGRDHTDHFKHVQSEYEQVNNKIRNKREQLVHDVANQTLALALVYDVDAIVHEDLRSLSPPRGEGQLSWELSSWARREIIGSIEYRADIVGIHVERVYAGNTSRSCPRCGSTGYTTKSPDHHFEVWHGGHFRCDNSRCDFQGDRDYVGALNVARVFFADSDSLDSNFMSSYTGDCEIELAGRSAGERRSPSRSSSELASDTGSRPTFGNALVAYVGQSRVTAGGGSCLIAPAVTPKGTKNNGSNYSVSSPATHSYSLFVRDAAVCC

SEQ ID NO: 44891 - protein, 499 aa, unknown
  TnpB Polypeptide
MAKATTTIKQVLNYRTGHAVWFAANQDLFNRVCAFYFEVIQAHVKVLELGNMDALKALEGLTHMTQSNPNPVMPLSEIAEDIPALFRRGAINAALGSARSFYSSLTKWRKHKEKAEAKGKKFHERPPVPPRTWNKSATLYMGIWRERTEKSIVLKVWTGTCWSWVKVRITGREIPAGVEMGSPQLIRHGNQWWLHTPIEKQFKSPGKIEKQVTTNPETKICAVDLNINENIAVCTVRTVEGTILATKFIGGGKEISGFRKKQLGRIARNRHKTGIIAEGEQDNGDLWRKIRNADDYIAHLISARIVQFAQKYEATVLVFEHLSNLKPTKGKYSKRGNEKRAYWMKGRIFNYSKYKAYNAGIITSRVSPWNTSRECARCHDMVARYNTGQPAEGYTYGAPLVFCPHCGMKGNADRNASLAIGDRLVTRYQQKEKPQTLRRREKSLGVVVTQEAKSVGTQPSTGGARHGDTNEHGTAQETGTGMVAPVSDIARQLRFHFEL

SEQ ID NO: 44892 - protein, 410 aa, unknown
  TnpB Polypeptide
MRKLQVMKTVYRTYKFRMYPNAEQRQVLARYFGSVRFIYNYYLAERKRQYEETGKSDSYARQAKDLVALKRTEGFDWLKEINSQTLQQTLMHLDTAYKNYFNHTADFPKFKSRKRGGSFTVPQFCHIEEGFVHIPKFKEGLKVKEHRKVRGAVRSMTIIITPTGKYYVSILTEEQYEPVQRTNASVGLDMGIKSLVTTSEGETYDNNRYTKRYEQKLAAAQKHLSRKQKDSNGWEEQRMKVAAIHEHLANSRRDWQHKVSADIVKRYDTICIEDLGVKKMEEKKKGGKENRLSKSISDAGWSSLVAMIVYKAEMNDKTVVKVDRYYPSSKTCNVCGWKNDGLALADRSWTCPQCGTKHDRDVNAAVNILGEGLRILSSKSSAGTVDYTGGGSVRPTSVGCRLRSQKPKSL

SEQ ID NO: 44893 - protein, 229 aa, unknown
  TnpB Polypeptide
LWYLHIPITKAVEDFQKENVRHVVGIDRGLRFLTVSYDEQGKTEFVSGRKIATKRHKFQEVRKQLQSKGTKSAKRRLKAISGRENRWMSDVNHRISKTLVEKYGKDTLFVLEDLTGVSFEDSNLSRIAKQNYDLRSWSFYQLEQFLTYKAHENRSEVLKVSARYTSQRCPKCGTIHKENRDHHRHLYSCQCGYRSNDDRIGAMNIQLLGTMWISGDNNPRYERISTTSE

SEQ ID NO: 44894 - protein, 393 aa, unknown
  TnpB Polypeptide
MLKAYKYRIKPTESQKELIAKHIGSARFMYNLALETKNMVYAMSRTNLSPFDLMKQMTELKKEYPWLKEINAQTLQQSIHNMDSAFKQFFKGGGFPKFKSKHRGKQSFRIPQNVTLDIEKSELIIPKFKKKGIPIILHREIKGIIRSATISRTSTGKYFASILVDTQTEVPEKAPITTSTTVGVDLGIKDFAVTSNQEVFANPKYLNQMKSRLAYTQSKYSKHKGKKKKHRLAMLHEKVANQRKDFLHKTSNQLISDNQTIALETLAVRNMMKNHFLAKAIADVSWSTFVNMMEYKAEWRGKNILRIGRFEPSSKNCSDCGYIHKELTLADREWACDGCGVTHDRDVNAAVNIKSFALKDILSGTDRKNHVELPTLVGVMTHGTHSSGSAVRG

SEQ ID NO: 44895 - protein, 622 aa, unknown
  TnpB Polypeptide
MEVNQYYKTVKTSLRSIVKDDVVCEKINNCVKTSNRIVIKTYLFLRLLTLHNYHNKIVNPIMDNDFVDYCIRTVSIRKDKRGIKDSKNLELKNMLNEFYEQEFKPLLPLNEEIETYTGMTFILPYLAEQISSVIKTNIKEHYVTRLKRYLNIIHGVKFREKLEKERDSKIRKEIRKEQWEHIHGILKDLCTNSLNNSHRIYHKWILENRDHLVPKKMEKDSLYYDIACENNTFNYVNYGYYINEQIEKLSTEEKPYKLFQPFSLRTSVTPKYIKIDNSCIVNLFATGNKSLLLKAHKKDPIQERKKNHQLNNLWNTLFKTEKKVFNSVNGFQFTRSFCTDGISVSLLFIRNDIASLSKAKRSKYQSTERDWYNLNDLNKHQLEHLKCKKVVGVDPGKSNLVYLVDGNKTLRYTAMQKRYESGNKYYNKLLKSDKEKNGVHKLENELSEYTCKTSGYDKYKDFIAKKMIINCKIRKYYERAYHRKYRFKKYIRTCKSYDKFLNKIEEVFGDDPILGYGNWSRKSQMKGHIPTIGKGLRKVISKRFTNITVDEYNTSKICYNCHCETEKLRVRNKKVHRLLSCKSKDCKTIWNRDLNGGLNIMNLMKCFLHTGNRPDAFKRTGK

SEQ ID NO: 44896 - protein, 377 aa, unknown
  TnpB Polypeptide
MKTYRFKLYNSKKNKRLHRQIGLACEIYNHCIALHRRYYRMYKKHIHVYTLQKHLTKLKKLSKYSHWYNLNSQAIQDIAERIDRGYKLFFQNLKKDIRTSPPGFKKRCKYKSFTLKQTGYKLLESNRVLIGKTVYKYFKSREIDGNVKLLTVKRDPLGDVYLFFITDTVESREAPRTGEIVGFDFGLKTFLTASNGEDIESPLFFRQNENLVRKAHRNVSSKVKGSRNRRKALDNLNRAYRKITNQRDDFHWKLANDLTDKYDAICLETLNIKAMQRLWGKKISDLSFSSFILKLKYLASAKDKTLVFINRFEPSSKTCSICGYIYRDLKLSERSWLCPECNTKHDRDRNASYNILRVGTATLGLGDVSPVTSAVSV

SEQ ID NO: 44897 - protein, 451 aa, unknown
  TnpB Polypeptide
MRRFFSQNFTFYHKFGILNINKKFKEGGIYMLLSQKTTIKLNNAESNIIGHMCYAAYKLWNVCNYERQNYKGLSLPVKYPDWYYQKSAHKDGLWFKQLPSQTAQEICKQLDKAWKSFYSLKKSGSIEDPKPPRFKHDNIAITYMQNGIVHEPGSDTIRLSIARNLRKYMSETYQINDTFLYLKNRIFKDVDMIKQIKLYPPENGVCAVIVVYEIPDMDILPDNGRYLSIDLGIHNLMTCYDSTSEKANTFIIGRKYLSICRYYDKEIARIQSQWARTQAEHGVKYPKLSKHAQRLYQSKRNHIHDYLHKVTRCMTMYCKQHDIHTVIIGDWTNIRKDKDFGDKTNQKLHSLPFKQLTNMLAYKLALEGIRLEVISEAYSSQTSPLAPDVSRRYAKKSNRVERGLYIDNDFAWNADCVGAFNILRLYLKQKEIDLTFDAKSISHPYVLKVAA

SEQ ID NO: 44898 - protein, 448 aa, unknown
  TnpB Polypeptide
MSMILTRTVRVEVCPTATQTEALRQIQPLVTAAYNDAARHAFDHPDVKGAVDLHHAVYFLLRSLYKLPSQFVCNVQRLAMGSVASARKRLQASKKASCPSSERLPIPYDIRTMSLRPDRASVSLTTLGKRIEVKVRKHQRLRHYAAWKVDSGKVSFGKDDRVWLSLTFTREVLVPETSLTSPVVGVDRGIVVPAALSDGRMLGSPSDHGTDRRYYRTQRSLQRKGTKSSKRRLKKRAGKWSRFRVWSDHNMTSQLLRSVSPGTVLVLEDLTNIRTRGQRFRRDTRRRMHAWSFRRQQEMLAYKAPEHGVRIVYVDARYTSQKCSVCSHTEKANRRSQARFCCKRCGYAENADLNAARNIAANWTTSQRTGGPPVEQHVSPPHSSDADTTAQRLVGQAKVSRGLNQGISSRRGSLTKPRPSGRGRLLVFLSSVGSCWPRSLGRPAGVDF

SEQ ID NO: 44899 - protein, 373 aa, unknown
  TnpB Polypeptide
MHRAFKYRIYPTKVQAQQLDLWLGYCRELYNAAIKEREAWKHGVRIGFFEQSKELPVVKQERPEFANIYAQVLQQVIYRVDFAFQQFFGRVKNGEKPGYPRFKGRDRYNSLTWPQDIGFRLISPKKIRLGGIGCVRIRFHRPITGKPKMLTLKRRAGKWYAIFSCADVPAKPYPEATAEIGIDMGLESFATLSTGEKIENPRWYRKTEERLSAAQRALSRKNRGSKRREKAKAYLARLYAKITNQRNDFQHKLAHRIVSENAMIVVEDLDVREMTHKSTSGLNKSKSITDAAWSRFLDILGVKAEEAGRRFVKVPPRGTSSTCSQCGLVRQKTLSERIHSCSCSLLLDRDVNAAINILRLGRSLQVNLRSPCH

SEQ ID NO: 44900 - protein, 406 aa, Streptomyces sp.
MRRAYKFLLRPTVRQETALAEMLRDHCSLYNGALQERRDAYRHVSRTSVRYREQSAQLREIRAFDPKHQGRWSFSSQQATLRRLDRAFQAFFRRVRAGLAPGYPRFRGVGHFDTVTFPKDGDGCRWDSTPQDKQTRVRLQGVGHVRVHRHRAVRGRVKTVGIKREGRRWYVVLSCDEVPVAPLPETGSIVGIDMGTVHFLTDSGGEHTENPGFLATMADELAKAQRHLSTFPRRTGQRTKKHRAAARKVAGLHAKIRRQRLDHHHKTALGLVRQHDVVGHEKLNTAGMTKAPAPRPDPGNDGAFLPNGAAAKAWLNRSILDAGWGQFLGILAQKAESAARRVIPVDARNTSRTCPLRIGGCGHVSGENRVTRAEFECVRCGLVADADRVGALNVLHRAGLALCDGA

SEQ ID NO: 44901 - protein, 412 aa, Leptolyngbya sp.
MEKAFRYRFYPTPEQETLLRQTVGCVRLVYNRALAMRTEAFYHEQKRIGYLETSAALTRWKKQDDLAFLKDVSSVPLQQTLRHLQTAFTNFFEKRAKYPNFKKKRNGGSATFTKSAFSLKDGQVFMAKSDEPLNLKWSRQLPRNAQPSSMTIRLTPSGKWFVSILCDVKILSKPKSTQQVGLDMGISSLVTTSNGEKFENPKSLRKAQKKLRRLNKSLARKQKGSNNRRKARLQLAKQHEKIANIRKDNLHKITTQLVRENQVIAVETLNVKGMLGNHKLAQAISDASWGEALRQLEYKSNWYGRDLAQIDQWFPSSKRCSSCGRILSKLPLQVREWDCPSCNAHHDRDENAGKNILAVGLTVLACGATVRPKSSKDGGKCDEAGSNSSDAVVNRRRRKSFEESPQFKTAEL

SEQ ID NO: 44902 - protein, 393 aa, Cyanothece sp.
MYAIKRELKLNNKEKSFFAGCAGFSRFVYNHGLSLLKSTWDIPEISGSDSKRLDAIKKVFTNITKKQTEYLWTNKYSSRIYQNAFRDLKKAFSRWREPKIKADLPRFKKKKDHCSFTVDSSNGKVLVKEGKKIKIPTLGTFRLKEAIPYNCVSQTFTISRSAGKWYISFAVSACKRPEMKHCHKKVGIDLGIKTFATLSDGNTLEAPSSIKKAKTKLGKIQWRNRNKVHSNRRSGISASKNAVKYYQKLRKKHKRITNIREDFLQKTTTLLAKTYQHILIEDLNIKGMMANHKLSNALSNLGLYRFRELLSYKQECFGFLLTIVDRWFPSSKTCSVCGNIQDMPLFERVYYCQNCGQVMDRDLNASKNIEGWIKNADGLSVNACGQEGAVSLG

SEQ ID NO: 44903 - protein, 349 aa, unknown
  TnpB Polypeptide
MQRGLYIITSSPKSWSNGRPPENRKLQAQLPALRKDYPWLQTATSSAMQAALLHLIRAFKFCDCRRANGLFPGTPHFKSKDSYQQSYRNSNSYTNVVVVGNRVKLPKIPDIKICRAPDICGRIVAATVTREGADSYYISFCYVPENRPLPATGRAVGVDLGIKTYAVTSDGDSMELYHPDKRQLARLQYLRDQLRRQTKGSNRWKKTSEKIRRGLNRKFANRRKDSIHKITSKLVRNYDIICIESLYHQSMMSQNEYRYRAVKYSSWGEFKRQIRYKSERYGRQLVSVSRFFASSQLCSVCGYKYPRAKRLTVRNWTCPVCGAPHDRDLNAATNILHEGLRLVNQASAA

SEQ ID NO: 44904 - protein, 530 aa, unknown
  TnpB Polypeptide
MPKARRRKNSGFQKSMTKSVFLYGSPNAEKLAALTRMQDSFTALVNRDIRLLAENTSVFLQLVKNDKKDPDMRRLEKSIRPSGLNSAFCQNAFDVAVTHLSNRLNDIRLDMLTHNGSILARSKVLFAMTVMDISKQEMIHSMRQIGQTFHLECVETLEQMSDTEFRFSRNEFMDLYATCAMEYRVPELRQVSVPLDSRLMKLEKSNTTKMPYVITITDPEQRGKRIAVPVNTSAHALHKIQSNEMAGTVMMQVRHGILRIGWSYERKFKQPGTNSVIGVDTGISDAFHTSDGRNIGSMKKVIDFYHDTVEPAFAQIADLRNKKRAIKHYIRHHTLPETVKTALIKKMDRLEQMIQTMEAPYRKKRHYYAMLDHEIRASVKAYTDMLTPGTLTVLEKLDMKEFHKSRTVNGMFSVFACGKLQKTMMDTLNWKGYDFLEVVPDYTSQICPVCSNLDAANRNQKMFFCTCCGYWDDADHVGAMNIRARAQDEEILGICRTYGFRHKDMQNAMKIVYGKRNLAYIKQQEAAASA

SEQ ID NO: 44905 - protein, 360 aa, unknown
  TnpB Polypeptide
MNKAFEFRLYPNGEQRMLIAKTFGCCRFVYNRMLEEKSRQGPDAASSPRITPAKYKVEFEWLREVDSLALANEQINLERALRNYFRGGFGYPKWKSKRDGRESYTTNFVNGNIKLGDGKLRLPKLGMVKVRQHRPIPEGYRLKSVTVSRRPSGRYFASTLYEYEANIQPVEPVNVLGLDYSMGELYVDSEGVIPKFGRPYRTAMEKLAREQKKLSGRKAGGKNYIKQKLIVARMHEHVANQRKDFLHKRSRLIAKAYDAVCVEDLDMRGMAQALRFGKSVSDNGWGMFRQMLSYKLAEGGKRLVKVDKWFPSSKKCSACGRVKESLPMAERTYSCDCGFECNRDVNAAINIRNEGVRQLA

SEQ ID NO: 44906 - protein, 304 aa, Paenibacillus sp.
MFIRTSDRAANIKVFHQGDWVWLPITFKGQDLFKRNVWSMKECSPTLVRKGKRYALHIAYEGEVKLTQAERSKQRVCAVDLGLTNSAVCSVMDASGTVLARTFINQAKEKDRMRQITGKLKQAQRQSGIGAKPNFWRRMNGLQTHIVHDTAHQIIAFAQKHRAEVIVMEYLGKMRLPKGTWGAKRLRAKLQFWARRRIQTKVTEMAHFLGMRVSMVNPANTSALAFMAVDLYNATQSVILLYSQQAKRITRTLMPRITSAHDTCCATYTKPHLKRCGCPWRQKTLHWQNERIGRWLPSFGCNRR

SEQ ID NO: 44907 - protein, 271 aa, Paenibacillus sp.
MQISTALQSALKHLADAYEQFFRKLNNAPCFKSKKNPVQSYTTQIQGKSQCPEVSIVDSRIKLPKLGWVKFAKSREVMGRIIHATIRRNPSGKYFVSVLAETEVDALPRAHSEVGIDVGLKDFAVLSNGEVFDNPKFFRTLENKLVKAQRKLSRRMKGGSNWNKQRIKVARIHEDISNARKDYLDKISTHIVKNHDMIAIEDLPVRSMLKNRKLSKAISEASWSLFHKMLEYKCAWYGRVLVSVGRTFASSQLCSCCGYRNPEVKNLNVRE

SEQ ID NO: 44908 - protein, 456 aa, Paenibacillus sp.
LICFLFDKWFVFPLPGFAKNFDSTYIDATLHVYQEALSFLITVIHEQFMNLESLSTQAVVTAVERLTHRTKHNPNPLYAEFDQRFYKFPSYFRRSAIAEAFGILKSHHSRFQLWQAERQHAQQEGKRFSKKPPTLEAQHQAFPCLYKGNMFIRTSDRAANIKVFHQGDWVWLPITFNGQDLFKRNVWSMKECNPRLVRKGKRYALHIAYEGDVKLTQVERSKQRVCAVDLGLTNSAVCSVLDASGTVLARTFINQAKEKDRMRQITGKLKQAQRQSGIGAKPNFWRRMNGLQTHIVHDTAHQIVAFAQKHHADIIVMEYLGKMRLPKGTWGAKRLRAKLQLWAKRRIQTKVTEMAHFLGMRVSMVNPANTSALAFDGSGWVQRNTKRDVAVFATGKTYHADLNASYNIGARYVLRNLQKATSEKMWLSLEAKDPSLAKRTYWTLASLIRAQQALSL

SEQ ID NO: 44909 - protein, 263 aa, Paenibacillus sp.
MKECSPTLVRKGKRYALHIAYEGDVKLTQAERSKQRVCAVDLGLTNSAVCSVMDASGTVLARTFINQAKEKDRMRQITGKLKQAQRQSGIGAKPNFWRRMNGLQTHIVHDTAHQILAFAQKHSADVIVMEYLGKMRLPKGTWGAKRLRAKVQFWAKRRIQKKVTEMAHFLGMRVSMVNPANTSALAFDGSGFVQRNTKRDVAVFQTGKTYNADLNASYNIGARYVLRNLHKATSEKMWLSLEAKDPSLAKRTYWTLASLIRVQ

SEQ ID NO: 44910 - protein, 382 aa, unknown
  TnpB Polypeptide
LHSQSSQRVLQELAEAFNGWYGNRQNGDTKANPPGYRKHGDEHPRSTVTFKQKGFKLDTQYDRVRLSKGSNLKEYWSDFVLCKYQTRPDVDLSTVENVQQVKIVWTGDEWELHFVCKVEIDVDEAPGEKTVGVDLGINNFAALAYEDGHSELYPLNCLKQDDYYFSKLIARCDNSDSEQATRLNQKKSARRTHYFHTLSKHIVQRCVDEEIGTIVVGDLSGIREDEEKGESKNWGKHGNLDLHSWAFDRFTGLLEYKAEMEGITVEQVSERDTSKSCSCCGRKHEANRVERGLYVCDECGTVANADVNGAENIRQKVSPSSPNLSVNRSNGWLAQPSTLLFDKGNWCVRTARTGNVVNHNIPTQRCSAVGILALQRGRMSTQ

SEQ ID NO: 44911 - protein, 410 aa, Halosimplex sp.
VGETITKTLEATLAPPTAHKERRLQRTTATYRRALRAAFESGAKTQSAVNDIVTEYRLTSYAKDALKSRVPQLRQTHSAAELDDDHPVRFTNRGWKLDRSKDRTHEFCWRVPQAGWGNSFWIPLRINPAQRELWDDLYQGNMTVGEFRLQECRTNWVLHVTVEYDAPEVDRETDQTPVGFDIGESKLLTGCAYQDGKPTQPMLFDGGRARQLRKEMFTTLRRLETRGADQKIDERRDYFQNALTDIVEKASRRAVEYAQQFEDPIIVLEDLTNIRESIDYGKWMNRRLHTWAFARLTGRIEDKAREEGIPVQFVNPAYTSQICHACGHLGARPSQAEFHCTNSACWVTEFQADINASANVAARVDPWGESVPWEPDRDDSPRDGSASDSAAGHREPSPRSGQMKLTAFSS

SEQ ID NO: 44912 - protein, 284 aa, Halosimplex sp.
AKLADIPIRLHRAIPDGGTLKQVTVKKEPTGEWFATFGVQMDREPPKRPENPEKCVGIDVGILKYAHDTDGTAVGSLDLSDERDRLEREQRKLSRKQHGSNNWKEQRRRVAECHADFQRKRRDFLHKLSNYYAREYDLVAVEDLNVKGMMESPSNSRNTASAAWRTFLSLLEYKCEREGTHFVAVEPAGTTKECAACGVSTDKPLWVREHSCPSCGFTVDRDWNAAWNILSRGAKQVGEGRSESTPVKTVLPTGTTTVPAKRVLEAGSPTLNDEPRQRRVSRVG

SEQ ID NO: 44913 - protein, 409 aa, Halosimplex sp.
MEKRRTVPVKLDVDSDDAALLEDTVDEFLWAANYVTRHAFEGEYVTTSKTTLHDDTYEDVRDETALHSNHVQAARNKAADACKSVVEKWKNGKKASRPYFTSPHVVYDHRTATFHDESVSLATVDGRIEADYVLPDNERETPHAEYIFSDEYETTGAELHYSNGSWMLHIHCKMEVESDTPEQDATENRTVLGVDLGVNNLAVASTGTFWTGDEFDHWRREYENRRGNLQQCGTRWAHENIQSVGRKEKGRFKITLHRISNELVAEAREYECSVIAFEDLTDIRDRTGASWGHKWAFNRLYEYVQYKAAEYGIDVEQVDPENTSRRCSTCGFTHPDNRESELFECLKCGYENHADYNAAKNIGLRYLRRTQTGSGGGAPVGVRLNSGTLNANGAYDSPADSVGQSGSPR

SEQ ID NO: 44914 - protein, 413 aa, Halosimplex sp.
MPTKTLEATLAPPTAHKERKLQELHDLYHEGLHEAFEAGADTQSAVNDIVTSYDLPYQVKDALKNYVPSLDDAQELSDGHPTRMVNRAARFDYSEDRTHSYVWEVPQPGRGTNFWIPLRINPEQEHLWADLLAGNVSPGQLQLIQNRTSWMLHVAVEYPVEEPDHDTDNDDVTHIGLDIGESSLIMGCALKDGSPTRPLVCDGSRAKHLRKEMYTTLKRLQERDAAEWRIDERFDHYQNALTDIVEKASRQAVEYARQFEKPVLVMEDLTYIRESLDCGEFMNRRLHAWAFARLQDRIEDKATEAGIPTMYVNAAYTSQMCHECGHIGYRDGGGEFHCTHDECHVTTFEGDINGAINIAQRADPWGESVPLKPAGNDSPRDGSACDSTTTHTEQSQSEQMTLSEFGSKPTASD

SEQ ID NO: 44915 - protein, 382 aa, Escherichia sp.
MRRFAGACRFVFNRALARQNENHEAGNKYIPYGKMASWLVEWKNATETQWLKDSPSQPLQQSLKDLERAYKNFFRKRAAFPRFKKRGQNDAFRYPQGVKLDQENSRIFLPKLGWMRYRNSRQVTGVVKNVTVSQSCGTWYISIQTESEVSTPAHPSASMVGLDAGVAKLATLSDGTVFEPVNSFQKNQKTLARLQRQLSRKVKFSNNWQKQKRKIQRLHSCIANIRRDYLHKVTTAVSKNHAMIVIEDLKVSNMSKSAAGTVSQPGRNVRAKSGLNRSILDQGWYEMHRQLEYKQLWRGGQVLAVPPAYTSQRCAYCGHTAKENRLSQSKFRCQVCGYTANADVNGARNILAAGHAVLACGEMVQSGRPLKQEPTEMIQATA

SEQ ID NO: 44916 - protein, 472 aa, unknown
  TnpB Polypeptide
LASASNRSNSSSLTRKLSLLCLAMSSYWLYNRKMIVTRRTTFRLYPTPAQERQLYGWRSMHQQLYNAAVANRKTQYERFGHTVDYFEQQNCLPAFKQVWPEYKVLGSQALQATLKRVDLAYQRFFNGLGGYPKFKSIRHYSGWTYPSFVGWKAHTIGDNGYLELSNLGQIQLRGKAKTWGTPTTCTIVYRHGKWYASITVNCEPVPRELGIGAIGIDLGTKTAAAISDGENGYLIENPRWFQQMLPKIKEASKEKRRKRAPNRKKKVKASRRYKKARKKVSQLYRKAANQRQNWVHHQAAQITSGNSLVATEKLEVNKMTRKAKKGSKRKRQKTGLNRSILDVGWGFLTQAIKYKLEEGGGVFVEVPTRTVKPSQRCPKCLDVKPKTLDIRIHHCQVCNYIQDRDLASAEVMLLWATNSGGFGTSLLRRGATSSTSKTKERKNCGSMKQLGALKRQKHHPTGGNSETPPSTQ

SEQ ID NO: 44917 - protein, 405 aa, unknown
  TnpB Polypeptide
LIKTYSLCHYLSLDDFFTTYKSLLNHLLAEIWGQIQWKEKPIRGKTQKRLLPTLPNYGFKRTLRTRYIATWAYAKHWVDSALKTAFAILKSWKKNYLKGNRTRTQPTVKRAFVRVKQTLMKLEGDQLRITIKPREFVYIDLSKRYFKFVGHLGEPILTPRRIHLPFQTPDPDPHPSEWMAWDSNKFSLDGFSPQRGWIKVELKPVHTLHITYDNKRRRLNRIYARNKRRGQALYRKYRTRERHRVQNYLCHLVNQLAAMPATHGFEALEKRSLNRAHRKRWNRELQHTDWRKIVTLLKGKAQVTEVSAYYTSKICARCGYLHKDLRGHAIFECPNCGLKIDRQLNACINLYLRMRGFSHQIVWFDRAVVGGFALMGAEMMSSDELARSLYELMKPQVYVHALMPI

SEQ ID NO: 44918 - protein, 482 aa, unknown
  TnpB Polypeptide
MSIKPGLPTRRQTSLSRELSPSLDSAPTQTSPHRTNTETPHADHSDTRRREAVADPSIGSEARPCSLLRLSRPVSGTAQDCESHQGTQQQCAPQGVSRPLQAPESMDAQLLLLYSGKRVERDDTQVHRGAKQEMKAKKVIKCKVFGLTSRKRRLLDAEYSGLQRYLQTGEDRGLCKTNMRQAKRFYKKILPKHEYPLTIRKDLIRFVTNDCKLSRFWVSIPLGGPTRIWVPVHPHTSVPEGASFCESKVVRGKDGGFWVHLVVEREIPSRMDYANVLAVDLGERLLAATVLYADGAFKEPCFYGREVRGIRRHYAWLRKRLGEKKALKTVRKIGHTERRKVNDACHKISHAIVTQAAEEKAAIVLGNLRGIRGRARGRRMNRIVSNMPYYRLTQQIMYKAAWLGIPVYQVSERGTSRTCHRCGSTDTSRIKQPIFQCGACGLVYNADLNAAKNLVKRFLDQDVEERGCLAQPITLHESGGPA

SEQ ID NO: 44919 - protein, 418 aa, unknown
  TnpB Polypeptide
MGEVIQTLELKLVDPNSHKRQKLRETRDAYQQALQAAFSAGCGTKSAANDVVVEYDLSGYAKNALKNYVPQLHTSYDANELHDDHSVRFTNEGLQLDHQPENAIEWYVKIPHHEDYHLWIPAQPNPDQRDWLEALNAGDAEMGESRLFERDGTWYLHVTATRDVADHSAASADERTPIGVDIGEASLVTVCHRDEHGSPVRPELWADEGKAVRRLRKTYFTSKRRLQKRGSERIAGSFGDALWDQIDDVFHRVTREVVEYAESVGNPVLVLEELTYIRENMDYGAYMNRRLHGWGFAKLHAQIRYKATKAGIPVETVNPRNTSKACHACGEHGSRPRQATFRCSNDGCWVGEYQADVNGAINIADRYRSGESHRQNDRSSRQKAGDNDSATDGATLTGPRDSHTDAETQQETCGTYAS

SEQ ID NO: 44920 - protein, 288 aa, unknown
  TnpB Polypeptide
MKRIAYKYRIYPNTEQKVFFAKCFGCVRFFYNKSLDDMNEIYKSTGKFKNITPASYKEDYSFLKEVDSLALSNAQLNRNTAFKAFFSHRSGFPKFKSKRNDQSYTTNNQGSVKMSDNHRYISIPKCPRIRIKKHRDFKGTIKSVTVSLTTDNKYYASILVEENTETIKLLDNAIGLDLGIKDLIVDSNGNKYKNHKYLSKSQEKLVREQRKLSKMVKDSSNRNKQRIKVARLHKHIQNQRNDYLHKLSKKIIDENQIICIEDLKVKNMEQNHKLARSINDASWAKFVL

SEQ ID NO: 44921 - protein, 459 aa, Fischerella sp.
MLTMNYTYRIYPNTYQSALMLEWLEVSRKVYNRALRELKDWINSRKCMVDRCSIEREYIISANTPFPSYHRQQNDLPKLKQSWTDLKKVHSQVLQTTIRRLHDTWESFQQRGFGFPRFKKFGQLTSFVFPQFKDNPINGYEITLPKIGSIPIRLSRPIPEGFSVKQVRVLSKARGTQWYVIVSISTDVSVPDIPIHGRAIGIDLGLERFITVSDGSFFERPKFLRTEHRKLKLLQRRAARKQKRSANWEKAQTKVARLHHHIADKRKDFHLKIAHKLCDQAETIFAEDLNTVGLNRGMLRKECVDASFGAFLDLLKWVCWKRGVYFMRVNPNGTSQTCPHCQATVTKPLSQREHICPECGYRTHRDHAAAEMVLLRGMNLAESRSLGRHVLQAGEPVQRSGSASSHDCDLSKTVPVGISAERRLRQRGMETVCAGELPGTQTSRQVPKSRKGVTRKPKK

SEQ ID NO: 44922 - protein, 377 aa, Cupriavidus sp.
MDIKRAHRFRFYPTPEQEVILAKTFGCARFAYNHMLRLRTDAWYQRQVRVGYHETSAALTDLKKTPEHAWLNEVSSVPVQQALRHLQTAFTNFFAKRAKYPNFRRKDSVQSAEYTTSAFKWDGTALKLAKMDKPLAIRWSRTLPKGAKVTTVTVSKDPAGRYHVSMLCDDAVAAKPESEGKVGIDLGLTHFAILSTGEKIAAPNTFRKNEARLAKLQRRLAKKQMGSANRKKAKLKVARMHAKTADSRRDFLHKLSTRLINENQVIAIESLAVSNMQKNRSLAKSISDASWSEFVRQLGYKAQWYGRTLVGIDRWYPSSKRCSNCGHTIAKMPLNVRSWTCPECGSIHDRDINAAQNVLAAGLAVSAHGESVNPMSR

SEQ ID NO: 44923 - protein, 286 aa, Anaerolineales sp.
VAAGEEKAGFPKFKSKHTARKSFYLEGSITVAAKEIRLPRIGWARLKEKGYLPCSDVRNLSCRITERAGRWFVSLFVEEEIADMTPRGEIVGIDLGINRLATCSNGAVIENPKQLKHSLKKLQRAQRALSRKQKGSKNRAKARAKVAQIHLDIRNQRLDAIHKGTSAVVAKTKPAHQRPQVIVLEDLHVKGMVKNHRLAQALHDASLGEIRRQFEYKSAWSGIEVRMAGRWYPSTKLCHRCKRKKADMALSERIYRCEHCHLTMDRDLNAALNLAQVDPLKQAEYR

SEQ ID NO: 44924 - protein, 291 aa, Campylobacter sp.
MQPKSIILFFYGYILFFRRQMRYHKDLPQNYKLNQITISKSHNKYFVSFSITYENPSVSLISSQNLDIKKAVGIDLNINEIALSSGRLIKTNSKLISKAKYDNAFKRLQRKQSRRVLRAKKEKVKLGANFFKTQIELNRIYEKASNIKKDLQHKITSQIVNDFDLIAVEALQTKNMTKRAKLKNVKVKSGLNKSILDTSFYQFLSFLEYKTSHNGKIFTKIPPQYTSKTCSKCGSIKADLRLSDRIYICKECGNEMHRDINASINILNRALESFELGINSLDYKQQALCVS

SEQ ID NO: 44925 - protein, 316 aa, Sulfobacillus sp.
VRTKRQNGDKKARYPWRFRRYFNPIFKGQALKRDGFYLLLPLGRRRPAIRVHLPQNLPMGRLVQAELGFGEIHLTITRERDEPGVPASGNAGGLDIGSIWLGMVTDGHEALAIAGRGLRSVKQGRAKALARLQKKRSRTQPGSRRRKRLHRARHRLSQKVNQISRNALHHATNQIVEFCVTHQLAVLYTGDLGTLNHKTRRRRSRRTNQTVGVLEFGRLEQYLQYKLRRYNIQLIRISEAYTSQTCPCCGHLNKVGGRTYRCRACGYRAHRDGVGAVNILNKGIHGEIRPGTMLVAQRITYRRPVPFHGTLRRRCG

SEQ ID NO: 44926 - protein, 307 aa, Natronobacterium sp.
MVYDKRSATFYRDRVSLSTVNGRIECEFELPADSPTPYEQYVLSEDYEFRASTLQYDKATDEFYFHITTRRYDSDDDEVSEDTEHHTVLGIDLGVNSLAVASTGTFWQGNDYDHWCREFEKRRGEMQQRGTQAAHNAVLRLGKREEAWRKQYIHTIANEIVSEAVENRCDVIVFEDLPDIRKRLPQAKWHHIWALRRLAEYVGYKAPEQGVSVEQVAPNHTSQRCSRTDCGFTHEDNRHGEHFECQKCGYEVNADYNAAKNIGLRYARKRKHRFRSSPTSGSGDAPVDVRVNGGLLNGESYQPIAGD

SEQ ID NO: 44927 - protein, 376 aa, unknown
  TnpB Polypeptide
MEVISGWKFRIYPNGKQRKEIQTHLWLSKNMWNDLLEYSKNKYRETGKFPTKTELQSMVKDSGLYSQTAQAVSHRLYGALLSFFRMKKDGKEKGFPRFKNMDRMKSLSYPQSGFKIMERKLNVTPFGEISIRKHREMKGTIRTLTLKRESSGKFYAIFTTKTEITPKENRGNQVGMDLGLINFATLSDETMIKNPKHLKKYGERFAKRQRKLSKKEKGSIRRKKQKRRIAALYEKVKNARRDFLHKLSLHLVNSYSFVALEELSIQKMTMERFGKSINDAGWNEFMNMLCYKAEEAGCRVVFVDPDGTTKECSSCGEVVDKELKERRHSCPSCGLSMDRDLNASINILKRATAGQAGSNARGVGQRADVEARSPAL

SEQ ID NO: 44928 - protein, 363 aa, unknown
  TnpB Polypeptide
MLKAYRYRFYPTKSQVTLLEQTLEICRWVYNDTLALRKNAWEQEQRSVSLYETNKILTQWKREQPDLKQVHSQVLQNVQMRVDLAFKAFFRRVKAGENPGYPRFKGKGRYDSFTYPQSGFDLHEARLTLSKIGDVRLVLHRPVEGSIKTVTIRRSATGKWYACFSAEYDPSSVPRKETAVGVDVGLESFATLSNGEKIENPRFFRTDEKALAKAQRRLSKAEKGTLERKKARMIVAHVHERIANRRLNFAHQTSRQLVDRFGTIVFEDLNITNMQKNHCLAKSIADVAWNMFITNTQSKAEDAGSHVILVNPRNTSQRCSRCGMIVAKTLSDRVHSCPHCGLVMDRDQNAAINIMRLGLQSLG

SEQ ID NO: 44929 - protein, 379 aa, Lactobacillus sp.
MTLKAVKTRIYPNSQQRAKIIANFGYCRFVWNQLLAMQKQRYANGGRYVNEFDMNYLIKALKQEFTFLKAAESTSLLHVSRDLHHAYQKFFKEHQGFPKFKSRKFPKQSYQCNSVNHNIQVISANRLKLPKLGNLRFKCGQVISGNITNVTIRLSATGKFYAILLVDTEIEKLPKVTSKVGIDMGIADLVITSDGVKYPTIRFDKVLAKKKHYWEKRLARRRRQAQKEIAWDQHNKVIEPRELSDFKNYLKAKRMVAKYNERIANQRNNYLHHLSKQLIAQYDVIKIEDLKTKNLLKNHKLARAIANQSWRTLRSQLEYKCAWYGKQLVTVNPRKTSQICSNCGYDDGKHTLDIREWTCPHCGISHDRDINAAKNILSA

SEQ ID NO: 44930 - protein, 434 aa, Scytonema sp.
MTFRLYPNKQIEQSLRYHRKLHKDLFNAAVYNRFTQYQKFKHSVSYIEQQNSLPPFKEVWTEYKEINSQALQATLKRVDFAFERWFKALGKRPKFKSIRHYSGWTYPAKTGYSVESNGENGYIVLSKIGRIQMRGKAKYWGTPTTCTIVYRNGKWYASITIEVLEQVLKPEILPTNAVGIDLGCKSALSITDGENHQHIDAPKFVRNAEREIKRASKHKRRKQAPNRKKKLKASRRWKKAQFKVSKLTRKVANQRQNWVHQVAAEIVSGNSFVATEKLEVVKMTSIAKKGKRKKQKAGLNKSILDVGFGMLKSTIKYKVEQIGGVFIEVPTKKVKPSQTCPKCGHQHKKTLDDRVHECQQCGYVQDRDIAAAEVMLYWAKGILPGFGTSLVDADVASSTSYTRKTAGSMKQLGRVKRQKSTLTGQDVETRSSTK

SEQ ID NO: 44931 - protein, 411 aa, Moorea sp.
MIILEFKAYGKNYQYSAIDEAIRTVRFIRNSCLRLWLDNKGTGKYDLSKYCKVLAKQFPFANELNSTARQAASERAWSSIARFYDNCQKKVPGKKGFPKFQKRGRSVEYKQSGWKLSPDRKAITFTDKNGIGKLKLKGKWDLWRFDKKQIKRVRIVRRADGYYVQFCVSVDIKEELDSTGSTIGLDVGLKEFYTDSDGNTEPNPRFYRTGEKRLKFYQRRVSRKKKGSFNRRKAVNKLGRKHLRISRQREEHAKRLARCVIRSNDLVAYEDLRVRNLVKNHCLAKSINDAGWYQFRKWLEHFGTKFGRVTVAVNPAYTSQNCSQCGEVVKKSLSTRTHVCKCGCELDRDHNAAINILKGALGTVGHTGTWIDRRSRYANIDPNASGDLTSTVLGSGQVQQVGSLSEESPRL

SEQ ID NO: 44932 - protein, 354 aa, Moorea sp.
LTLGYTIGYYSNRSKTGRQQTMIIAYQYRLKPTKEQKAQIDNWLSMLCAQYNYLLTDRFRWYEQNRCYVNACPLVCHLPELRNNPNYYSQKKSLPNLKKTHPWYKDIHSQVLQDAVKRVKLAFDKFIKGDSKGKRSGRPRFKKTHRYRTFTYPQMKEGCLEDNLITLPKIGKVKVVLHRPIPDGFKIKTATITRKCDKYYLVLSLEDKTVPVRAASASPKVKPDINPDSIIGIDVGLKEFLTTSEGETIQVPQYYRKAQKRLKVIQKRVSRRKKGGVNRLKAIKQLGRQHKKVADKRKDFHFKTANYLLSKYDVVAHEKLNVKGLAKSRLAKSVLDAGWSSFLTILTSKALNAG

SEQ ID NO: 44933 - protein, 482 aa, unknown
  TnpB Polypeptide
MSQKVVLERVTLDGAKPFIGYTDQHDPCSEKLYANTGSQAMDWLCDAWRYRFNQLRSNRCKYGKDKTLIPIGGTLDTRSVSQSRKECSWLTAVPSLILESPTRIERVEWFTAVQRRKTLLGKRLKPGRMPRFKSYKRDGQRFVCWYNGGRNAVYRRVNRNHGIITITGQNPKGMSLPGEPLRYRILLHVRVSQPIREYTAIQVDWTNCTVVFNNIPLPIRRKPTGKAIGIDRGCAHAAADSNGRFMDLPKNRLKAIDREIRKRQKSQARRVKTAGYSSEKEYANSDRTSRAYWKTRLEITKLHAKSKRILDDVYQKYTTQLVRDNDLIVLENLRLANMGRRNKPVPDPLHEGRYLPNGQAAKRGLNRSLRQASMGRLSSMLAYKTKLADGVGMILVNPAYISQTCSQCGYVAKENRESQAVFICKKCSYKTNADVNAAKNILKRGLDTLAVTSENLWGADGTPVEQGRKTNGNATRESVAVS

SEQ ID NO: 44934 - protein, 304 aa, unknown
  TnpB Polypeptide
MKTHIAVRFRAYPTEEQAWRINRTIGCARFVYNLMLETRIAHYQTTWESCRPTPALYKDTYPFLREVDGFALCNAQLALEKAYKRFFEDRKTGFPKYKSKRRGRKTYTTNLSHGNIKLDDKARRLKLPKLGWLAVRQHKRIPDDWKLKSVTVEHCPSGRYTATILFEYETQIPEKVRPVKPVGLDYASHGLYVSSDGEHAEYPGYYRKMQDKLAREQRKLSHMVKSSANWRKQCKRVARLYEKTANQRRDYQHKKAKQDCRIIRYGRRGGSEHEKHDEETRAETRPRTSGTLSSQWSQSQKRFG

SEQ ID NO: 44935 - protein, 371 aa, unknown
  TnpB Polypeptide
MSVKDNQLHFKLGKSTFGIQMKDKFQNDEVNAILKYLSESEIVNNKAIRALLDKGYCIDTYRPCYATLVPKLIRGKYRIYLHLTIEGKAKPKYDRFWNPRHKFGKGVIGADIGTQTVAYTSDTEVGLKNLSERGNSIQKSERLERLYYRAMDRSRRAMNPQNYNDDGTIKKVHKAWKYSNHYKKLKAKHAELCRINAINRQLAINEDASHLRSLGNVFITEPKNACKLMKRPKETTVNNRGKFNKKKRFGKSIKNRCPSGFLVTVANKFNVSGGTYIEVPNDYRASQYDHTADNYIKKKLSDRLYKLADGTLVQRDWYSSFLLYCYDYKTQNIDKIKCIARYEDCYDKEKVLIEKIKENKIKILNSVIKIA

SEQ ID NO: 44936 - protein, 399 aa, unknown
  TnpB Polypeptide
MIRLSYKYRLKPSPGQATVLQEQLRLCRWAYNALLEHSFSERMAGHGTPTHKALTYLLPDMKAMKPELNNVFGQVLQNVAKRVRSGFEGYWNRKRAGLKAHLPRFRGEDRYDSLTYPQFGFRVKDGCLRLSKIGDVRVVQHRPVEGKVKTLTITRSRAGKWYAVFSCEVEAKPIRNRLPVVGVDLGLNSLVALSDGTLIEAPRSYRNAESRLRRVQRSLSRKRRGSRNREKARLRVASVCERVANQRRDYAYKTARSIVDRYERVYVEDLKIANMVKDRRLGKSIGDAGWGMLRNALTYMAKMSEGVMAFVNPRNTSQLCSRCGAYVEKSLSVRVHRCPGCGLTIDRDVNAARNMLKRGLEIGLERAEYTPVGEVTATQLSEAGQVASVSQESRLFRGG

SEQ ID NO: 44937 - protein, 411 aa, unknown
  TnpB Polypeptide
MIRLSYKYRLKPSAEQVTTLEKQLRLCRWAYNTLLEHSFNERKAGRGTPTHEALTYLIPAMKAMKSELSNVFSQVLQNVAKRVRSGFEGYWARKRAGLKAHLPRFRGEDRYDSLTYPQFGFRLKDGVLCLSKIGDVRIVQHRPVEGKVKTLTVTRGRAGKWYAVFSCEVEAKPIRNRLPAVGVDFGLNSLVALSDGTLIEAPRSYRGAEERLGRAQRRLSRKKRGSRNREKARRRLASACERVANRRRDFAYKTARSIVNRYERVYVEDLNVQGMMRNRRLSKSLGDAGWGLLRNALTYMAERSEGVTAFVNPRGTSQTCSGCGAYVEKSLSVRVHRCPGCGLTIDRDVNAALNVLKRGLGIGLERAEYTPVGEVTATQLSEAGQVASVSQEDHLLEVGSSHSSFGKGENS

SEQ ID NO: 44938 - protein, 276 aa, Okeania sp.
MKSIRTKLKLNNQQKTLMAQHAGYSRWCYNWGLGLWNQAYKDGYKPNAPILREVFTNHTKPLYPWMKKLSSKVYQYAFPTECCANINLGEAFKRFFKGLGKYPKFKKKGKRDSFTIDNCGKPIELNGWNHKLPFIGMIKTYEPIEATTKKITISRQAGDWYLSCSYEWNGTTTPKKTDVIGVDLGVKTLVILSDGKVFESVRSYQKFEAKLSTEQYLNRHKEVGSANGRAAKLKIARLHRKVANIRKDALHKLTTYASLEPQPTPIPSWEGSKRGG

SEQ ID NO: 44939 - protein, 278 aa, Okeania sp.
VKDSHGGKKTVVQLTLAPRCMPIPQLRDNPDYYSQKKDLVNTKDKFPEYKLIHSQVLQDCIKRVKLAFDRWFKADKSGHKLGRPRFKKTSRYRSFTYPQIKFDCIEGNKINLPKIGKVKLIQHRPIPEGFIIKTVTISRKADGYYVTLSIEDKSVPALSCNVKPTLKNTLGIDMGLKEFLVTSEGESVPIPQYYRSSQQRLKTLQKRLSRKKKGSKRWLKGVKAVAKQHKKVADKRKDFHFKTANELLSKADVIAHVDAERRAGGKLKHKRASIDSFE

SEQ ID NO: 44940 - protein, 432 aa, Okeania sp.
VDVVNILTLRKNVWGGSAEFTKSAFKWKDGQVYLAKCSEPLPIRWSRQLPENSVPTTITVKLDPSGRWSVSLRVNDTRNLKLTHVNKQIGIDLGITSLITTSDGEKVTNPKNLNKLHKKLRLAQKSLSRKTKGSNNYQKARLKLARIHAKIKDSRLDYTHKLTTQLIRENQTIVVEDLAVKNMVKNHNPPPSPPGRGARGVGSDANWSELVRQLEYKAQWYGRELIKIDRYFPSSKRCSNCGHIVEKLPLSAREWDCPECAAHHDRDINASVNILAAGLAVSVCGATVRPSESKSQMAGAKKQKVSNSGARESRAVTQVQRREDVNPTIYKTQEEWKEVVKRSSVRVQWDSDHNPMGEKLERRAIQLGLRGEALRNYSRDWIVKIENITEFVQQQRIYREPSKWTDLITPKENVYPVENSEIIHKLGLSIRD

SEQ ID NO: 44941 - protein, 419 aa, Okeania sp.
LIFQPLITLAYQYKLNPTQQQEIEINHILDVCKSVYNYALRERKDWSSARQSPINSCSIVSEYIIPTETPYPSYNHQAKNLTIAKKTHPRLKSVNAQVLQQTLKTLDRAFCGLKSQGKGFPRFKKKLRSFVFPAMLKNSLGNNRVKLPQLGWIKIKQSRPYPDGFQAKQARIVKKATGYYLMITFTSSELVPDNPVGKKSLGIDAGIESFVATSTGKLIKSPKFLFSQLRELKLASYPAPPPGASGQTPRRLQAQGNADQERERASLLQRRLKKKKKGSNNWLKLQNKIAKLHEKITNTRRDWNFKLAHELCDNTDNIFVEDINFKSWSRGIVRKQSNDSGIGQLINEILPYICWKRGKYYGKVDKDYSSQECPKCGQIEKKKLSDRKHNCSNCGYEINRDIAAAPTPIPSREGSKRGG

SEQ ID NO: 44942 - protein, 357 aa, Okeania sp.
MKSFKTKLKLKLQQKTILAKHAGVARHAYNWGLATCIKEYEETKKRPSAITLHKRLVAEVKSINPWYYEVSKCAPQQALRDLERAFKNFLTIPKRGFPVFKKKGKKDSFYLEGSIKILKGNYIKLPRIGIVKTYEILPSVLIKNVTISKRADSWYISFKYDLEPAPNSPVKKRAVIGVDVGINTLATCSDGTTYANVKAYKQAKKRLVRHQRAVSKKVIGSKNRIKAVKRLAKAHKKVADIRADTLHKITTWLAKNHSTIVIEDLNVSGMLKNHKLASAIADCGFYEFKRQLTYKCEWYGSELVIADRFYPSSQICSHCGHQQKMSLSMRTYKCGHCGFTADRDFNAAVNLENYARQ

SEQ ID NO: 44943 - protein, 415 aa, Okeania sp.
MRTAYQYKLRPNKEQIATIEMWLELLRRQYNYRLGERFSWWSENRCPINACPLVMPIPQLRENPNYYSQKRNLVNTKDKFSGYKLIHSQVLQDCIKRVKLAFDRWFKVDKNGHKLGKPRFKGKERYRSFTYPQIKQNCIEENQINLPKIGKVKLIQHRPIPEGFIIKTVTISRKADGYYVTLSLEDKSVPDLTTEVEPTLKNTLGIDMGEKEFLVKSEGESVPIPQYYRKSQQRLKTRQKRLYRKKKGSKRWLKAILAVAKRHKKVADKRKDFHLKTANKLLSKADVIAQENLNIKGLAKTRLSKSMNDAGWSQFLSILTVKAGNAGQKTIAVNHKNTSQDCSNCGEKVPKELNIRTHSCRHCGTVIDRDFAQHDLGNAAINIKNRTVGHSVLKARGSRCNGRATKREARTIVLA

SEQ ID NO: 44944 - protein, 420 aa, Okeania sp.
MIIREAKLLNGSKAQYQALEQAIRTAQFIRNKAVRLWRDEPDVNKARLSVLCKELATEFPFAQKLNSMARQASAQRAWNSISSFYRRCREGAKNKGYPQFKKHSRSVEYKTSGWKLSKDCLTINFTDGFQAGKFSLFCNHQTREDLFRLKINRVRVVRRADGYYAQFCFDAHRKETGNYTGNVVGIDLGLTYFYKDQNDNAAIYPKYLRQAEKRIKKLQRQLSRKFVKGKKPQSNNYHKARMRLGKCHLKVTRQRKDWAVKLARCVVHSNDVIVYEDLKIQNMVKNHHLAKSISDASWYQFTQWLDYFGKVWDKTVIAVAPNYTSQDCSSCGHRVKKSLSTRTHQCPKCKIEICRDTNAAWNILNKGMKILDVECNQIKGTEGHSGTSEYSGTLEETTTSAVDGQPEIVSGVGESRITDV

SEQ ID NO: 44945 - protein, 293 aa, Halobaculum sp.
VSDDLDSLGFAASKLWNVGRWVCDRVWSEIGHIPGHNELTTYLKSHERYDDLFVCKVEIEVSEAPGEKTVGVDLGINNFAALAYEDGHSELYPLNCLKQDDYYFSKRLAQCDDSDPEQPTRLNQKNSARRTHYFHTLSKHIVQRCVDEDVGTIVVGDLSGIREDEKTDESKNWGKHGNLDLHSWAFDRFTSMLAYKAEIDGITVKQVSERDTSKSCSCCGRKRKANRVERGLYVCDECETVANADVNGAENIRQKVSPNPHGEDRSNGWLAQPSTFLFDKETGVFAPQEHVTS

SEQ ID NO: 44946 - protein, 409 aa, Streptomyces sp.
VIGMQLRYSFRLYPNGPQRTALARAFGCARVVYNDALRARETARAAGEAFPKTGDLSKLLITEAKKTGERAWLGDVSAVVLQQSLRDLDAAYRNFFDGLKGRRPRMGAPRFKSRKDNRQAVRFTANARWKITTGGGLSLPKIGDVRVKWSRSLPSVPSTVTVVKDAGGRYFASFVVETGPDETLPATDAVVGIDLGLTHFAVLSDGTKIESPRFLRRAEKKLKREQRRLSRKANGSNNRAKARIKVARAHAQVADARREFHHQLSTKIIRENQAVAVEDLAVKGLARTRLAKSVHDAGWSAFVTMLEYKAARYGRAFHRIGRFEPTSQVCSVCGVKDGPKPLHVREWTCGACGTVLDRDINAAVNIAEAAGLAVSACRAQVRRALVPAQRGEAGTHRDGQPTVVGIPGL

SEQ ID NO: 44947 - protein, 459 aa, Moorea sp.
LYKTIPVKARFSDEEDAFWVFQCQRANSLINSAIYYIKQKHYDWLKEQPEAYSPYWRGDDLRLGWKTYKCSTKYAEICKELKGNYNYKAMAAQSAQQSLKSVSESIAGYNQLVGLYYKGQVDKPRLPRYRKKGGLAAVTFPRQALIYKEGVFHPSVSKESKPELICQIALTPPDFIDPDWVKEVTIRPNLGQFWIDWVIDDGKEPIKNNPNLDYSQAWSFDHGGDNWLTGVSTQGKSLIIDGRKLKSLNQGYARLVAKYKSGKPEFYWDSNLDRVQRKRNNQMKDAINKAARFIINRCLQDRVGNLIVGWNERQKNSINIGKRGNQNFVVIPTKRLINRLEQLCAEYGIKLTVTEESYTSKASFLDEDLLPKHGEKPSEWKPSGKRVKRGLYRTSSGYLINADTNGAANIAKKVVTQLGLNLTKVSRGSMTVPHRYDVFTSLKKSYRRRSEEARFQPAS

SEQ ID NO: 44948 - protein, 324 aa, Euryarchaeota sp.
MWENPGLDWLLAEFRLLVNESIRIALREDIRSRARLARAAYKDLSARHAVYKQYIPSAFEVALAVLKAHRRRVRKRKKTSIPFIRRLLLKAENQSYRLDRETGRLRIPIRGTEGVQLHLPLSEWHRAILGDSSWGLGSLTVVPGKIIVVVRKEAPQPYEPQGAIAFDTNEDSLDGVQASGDSSRLLRAPFDGVRRVQAVHFRRRRRLARKKAFDGRVARRLLDREGRRERHRVRQRLHRVSKGLVRLATEARAVIVLEDLTLHGAGGRSRRMNRRLASWPRGELHRQIKYKAALAGVPVIKVNPQWTSSALRATGRWIARSTRA

SEQ ID NO: 44949 - protein, 410 aa, Microcoleus sp.
MLIFEFKTYGKLEQFNAVDAAIKTVQFIRNKAIRFWMDNEKVNKFDLNKYSAVLAKEFPFCDELNSMARQSSAERAWSAISRFYDNCKKKTPGKKGFPQFQKDNRSVEYKTSGWKLASDRKSITFTDKKGIGKLKLKGTRDLHFYSLTQIKRVRLVKRADGYYAQFCIQVDRSEVSEITGNTIGLDVGLKEFYTDSSGVAVENPRFLGKGERRLKKAQRQVSKRVKGSKNRMKARGILGKCHLKISRQRKDFAIKLARCVIQSNDCVAYEDLRIKNMVKNHCLAKCINDVSWYVFRVWLEYFGKVFGRITIAVPPNGTSQECSSCGTIVKKSLSTRTHVCRCGCVLDRDDNAARNILRRGLSTVGHTGTWGNTHNACGELTATDLEVILDRQVNSLKQESSCMNDSGVSI

SEQ ID NO: 44950 - protein, 269 aa, Microcoleus sp.
VPKCDSYVIEVIYNACTQPEPTVENQKELVASIDLGLNNLVALTSNQPGFVPLLINGRPLKSINQFYNKRKAQLQSQLKGNRCSSSRLGRLTRCRHQKVDNYLHHTSRQIINLLASEKIGTLVIGKNQKWKNEINLGKKTNQNFVSISHARLIEMLKYKASLVGIKVIEQEESYTSKSDFFSLDPIPVYGNIGSGDVTFSGSRIKRGLYKTSSGRLINADVNGSYNILRKAIPNAFSDGIGRGRSSAEAGQSAQSERERGGPGASHVMS

SEQ ID NO: 44951 - protein, 414 aa, unknown
  TnpB Polypeptide
MRRVEQHVIKRSHPKFHAIDEMAFASKNLWNLANYYVRQAFIFQHSYLDNTAVYHLVKDSSAYKALPAKVSNQVLIQLDQAWTAFFEAMEAWRAHPETLTGRPNLPKYKHKTHGRNLVVFELGAIWKADLAQREIAVSQLGRLVETKQHPESIEQVRIVPKADHYVVEVVYQAEAKPAQLDKRLFVALDPGVNVLAALTSNKPGFVPRLVNGRPVKATNQLYNKQRAQEQKHLARGKAPRFTSHRLNRITTKRNRRIMHYLHTASRRMIDLLVAEGIGTLIIGKNPFWKRRVELGKKHTQEFVQIPHARFIELLTYKAEQVGISVLITEESYTSRASFLDRDMLPTYDPAQGAEQEDNPHFSGRRDGRWYRVKGRAPMHSDVNGSYNIGRKVFPTAFDGRGIEATAVRPRRLAV

SEQ ID NO: 44952 - protein, 432 aa, unknown
  TnpB Polypeptide
VKTIKLPYKTNEDLTLILKQYSNVVRYSYNRFLEGKNEKDIRELSKSLNSIDLLNSWLIQCGIKDGKAIQTRFKNEKVIFGGKYNLINRLKNKITKEEYQLKRLYPINIQGEELKQGNRSFKLDIIENNQIIFKLSKNKHIELKLPNLRNNIKKDLFKLQQINEVKQNKKGYTYSVRFDLTNIYISFEEFKEEPIKLNENRYLGIDLNPDTIGISVLENEKIIHTQEFSLKPIFNKILNGKLSSNSDKMKYLQNKLNFETFEISKSISLIAKQFNCKSVFIEDLHFKVSSAIKISNRKNKNLWKRELFINNLTKRLNILGIKLYSVNPAYSSFIGNLQYDYTDAVNASIEIARRGFEYRIKKNKKGFYPTFDVKHQWKKTSTSFNDWKQFYLEVKNSKLKYRVSLDEVKHKFNGFQQNSTSKSMVLNYVFYD

SEQ ID NO: 44953 - protein, 402 aa, unknown
  TnpB Polypeptide
MKAIKIKLYLSSEQVSYINNLIGCSRFVYNNCLAYKIQKYNEEKISIGFGELGKFLTNLKSEHAWLKDVHSKVLQQSLINLEYSYKNFFKNGMGFPNFKKKNQKQSCRFPVDAIMGINGNRINLIRQLKDIHYKCSKRDEKILNKHENLIKSATLTKTKSGDYYLSILIDIESSKQLPKTDKVIGIDLGIKDFIASSDGQRFENLKLIRINQKKLSGLHRELSRKQKGSKNKNKARIKLAKYHEKLNNIKENYLHQISNQLLNENQVIVMEDLNVKGMLKNHNLAKSIQELSLNRFKSLLTYKSEWYGRDLIEIDRFYPSSRLCSNCGYKNDELTLKDREWTCFECKTNHDRDLNAAINIRNEGMRLFKIKIGLSSPELTPLDSSGYTLDKLGKKSKLVVTV

SEQ ID NO: 44954 - protein, 102 aa, unknown
  TnpB Polypeptide
VEDLNLKGIAGGLHFGKGIQDNGYGQFLSMLGYKLEERGKYLIKVDRYFASSKICSVCGHKKKELALSERIYLCECGNRMDRDVNAAVNILEEGKKIYKKCA

SEQ ID NO: 44955 - protein, 385 aa, unknown
  TnpB Polypeptide
MPLSFMRVLRLKVRRESYGWLSAAAIEVNQVFNFCNQTSWETARRTDRKRKWLSGFDLCGLTAGAAAYFERIGSDTVQRICTEYAQKRAAAKRSKLRWRVSGGPRRSLGWVPFKAESLKRKGRALRFCGKAFRVFAPERLDDVKWGQGCFAQDAVGDWWLCVPVKQKAEPCEAPEESVGIDLGLKAVAVSSEGERLDSGRFYRGLELKIARAQRRGHKRQAKRLHRRAARRRADALHKFTRMIVDRYRYIAVGDVSSQKLVRTRLAKSVLDSGWGMLRRFLKYKGESAGRTVEVVNERNTTRACSFCGSSTGPAGVSMLAVRHWECSECGAEHDRDVNAAGNIRYAGLRCRASVSGNEPLHYMIPIGQDSPVLARYGWGACYLAV

SEQ ID NO: 44956 - protein, 423 aa, unknown
  TnpB Polypeptide
LRKEEDPMYLTVKQQVKHLSKEDFLSLRQLCRAAKNLTNEALYSVRQHFFNEGEYLRYEENYKRLKTSPNYRTLNSNMAQQILKEVDGSFRSFFSLLKLSREGGYSLKDCHLPQYLPKDGYQTLIIGFVRVEGNKLRVPYSNIFRKEHKAIEIRIPPILQEKKIKEIRIIPRADARYFEIQYTYEAECIQRKVNPNHALAIDLGINNLVTAVTDEGKSFIIDGRRLKSINQWYNKENARLQRIKDKQRYGKKRTNRQKAITRDRNNKVNDYMNKAARKVINYCIEHEIGKVVIGYNESFQRNSDLGKKNNQTFVSIPYGRLREKIEYLCMLNGIEYVKQEESYTSQASFWDRDDIPVYRAGDEEEYRFSGRRIKRGSYRSREGKVLNADINGALNILRKSKVVGLETLYNRGEVDTPVRIRVA

SEQ ID NO: 44957 - protein, 364 aa, Escherichia sp.
MAIQIKTLQVRVKDRHAAVLSRMASEVNTVWNLANLICGDAWKTNCAEVGPRKREWLSAFSVQHLFAGIQKDRNWLIGSTTVQETIAVHAKSRQQFKRAELQKRFATGSRRALGWIPFKAGGAKWANGCVKFAGHCFKVWDSYGLAGYKFRAGSFAEDSRGRWYFNVAVEYECEPTKGTAAVGIDLGLKDIATTSDGEKLKAAHWYREQEEKLKVAQRAHNMKRVRAIHAKVRNRRKDAHHKFSTALVNKYAAIFVGDVSAKKLAKTKLAKSIYDAGWCQLKNQIKYKAIARGVIFEVVDEAYTTQACSCCGAISGSSPKGRAGLGIREWICGACGERHDRDVNAARNILAAGHSRLAGGIPFL

SEQ ID NO: 44958 - protein, 320 aa, unknown
  TnpB Polypeptide
LSSRVLQLAIKDLANGWSAFFDNKKPKKKDSKKKKRKVGKPSFRSKKNPKQGFKTDRASIKNGKLVLDKPHKYKDTWYGISFRGYDLPDGKIKHCAITKIGNSYQATITIDCPEQPLPKTGKKTAIDANVNHFDYTDGYFTVFPKQLERLYAQIKYYQRLLARKRHENGKNATHSKQYFKVKTKLQKCYQRVTAIQNDLLHKFTTMIYRTYDTVVIEDLDVQAMQMQKKAKNLHRSLFGRFRLYMEYKAIKFNKTLILADQYYPSTQRCSHCGHVKTDDDKIGLDGNKKHGTKHNEYICYSCGFVADRDQNAIANLLALA

SEQ ID NO: 44959 - protein, 313 aa, unknown
  TnpB Polypeptide
MAGTYRKIFNVGIDLQFYKATFNKDPKDHLISATLLHEVMKKGEKQSYPYISQVDCGVSKRAINSSNHYFQRWYSTRETRLPVYKARKDGMRFSTTSKIKVFYDHVSIPKLGDIKLYEKGYIPQGKVYKNVSFSYDGKNWWISLEACEKSEVELNLQGTLKVSVDQKGNVSVGDNAFSNIIESENYRAQKKKRAKLIKKLRRQKEANSLISRGKKVVRTSRNMVKTRKSVQIISSKMKEIKKDYFRKVASEVARTKPQELQLLSLFDVRRKYQGYLSRYLRESGTRELLSMIKRKVESIGSKVTRYSELTLIS

SEQ ID NO: 44960 - protein, 374 aa, unknown
  TnpB Polypeptide
MELLRTVKLKLEIDPSIILPTVEKYTKAFNYVCDVGWEDNDMNSVSLHHKTYKTVREYLPAQLSCSSRIKAAEALKPCLDKRLKNKKVTKPHSQQCSIRYDDCSFNVWFDRDECSMSTISGRIKSKFKVAECYREYLSWKRCSAELFIRNNSVFLNIVFKKVTDDFSIPENPVIIGIDRGINQLAVCSNNKFYTNNIRKVIRRNRRIRTKLQACGSKSAKRHLKKISVKENRFRRDMNHVISKQIVQNVPENSIIVLEDLKHIRKAIKSNKTGRRELNNWSFYQLEQFLTYKAASKRILIDYVDPRYTSQKCSCCGHVDKKNRKYTCLFKCTKCGFTLDADLNASRNVEQNYRDSNGYPEGLSVNQPIVSATIS

SEQ ID NO: 44961 - protein, 373 aa, unknown
  TnpB Polypeptide
MILRKGYKFRLEPIKTQRNLFFQFAGAGRWVFNRGLAQKKDAWKINKQTISLFAQNKELTLLKNKDETAWLKTIHSQVLQQSLQDLDSAYKNFFRGLKNKENPGFPKFKVKGFKDSFRYPQGVKVEGSLVFLPKIGWIKFRKSREIKGIIKQSTIIREGDNWFVSFNTENEIETPKPILDPEKTVGIDLGLKSFATLAIGKDNHLVTIENPKYLRKKITKLQFLSRQLSKKVKKSKNRYKAIKKLSSFHSHLKNLRLDFFHKQALTIVKSHDIINIEKMNVKGMLKGLKNLSRAINDAAWSMFVNCLKNKAIEYGKTLKEISSLMGSTKHCSKCGHKNDITLKERTYICSFCGQVIDRDLNAAINIKAAGSTV

SEQ ID NO: 44962 - protein, 407 aa, Haloquadratum sp.
LRNNNCAVVGKALHTWDSYQSLLDWWREQDDPDGGGSKPTPPSADKSGAFPLVMAHTEGYRLTVDDDTNRVQARISPKPYKKVTGYLRGEPDVMGELRDALTSEEVDVDVGQTELLSHDGVCSLHVTVTRSFDVPEPDTSDTLVGVDINERNVSLTALDRETMRTKGTLVVDYGQLKQERQRHHTITKRCQEHGKTSIHRKLGDKEERFTEWVLHRLSRAVVEFADQFSNPVIVFEDMEGIPEEMQYESYMNRRLHKLPFHNFETFVPDKAMWREIPTDTVDVYNNSKTCLCCGERGYRQGRRFRCPNEECDVVQDHADRNASGMVNIAWREKAKLDGNESNSRTHKTHPQLWLVRLSGACKPPTLIPLARRAGSVSAQLRELQKPRAAVPEAVYRYRFFLELFPRT

SEQ ID NO: 44963 - protein, 317 aa, Haloquadratum sp.
VTWKQNGIRHDTKNNRVRLSKGANHKEHPKAWEYILVEYETRPGVSVENLQQVRTVYDKAKGRWELHLVCTDEMKTPTTPGNETAGVDLGICNFAAVAYSTEQADLYPGNRLKQDGYYFPKEIAKCDDSDGERATRLHAKWSERRTHFFHSLAKHIVERCVEQEVGRINVGKLAGVREDDNDNGESKNWGRHGNLDLHGWAFNRFSNILEYKAKVEGIRVVEVPERDTSKTCCVCGREDDSQRVERGLYVCEECDAAFNADVNGAENIRLDLSKSNSESEPSLGGDRSTGWLAQPGVYLHELSCGFQPQDQVVDCKP

SEQ ID NO: 44964 - protein, 393 aa, Haloquadratum sp.
MKHTLRFRAYLPDDVASEAWHQIDILRQIRNHAVRDYYNSDYNNRPSDSDQLSKLKHWGDNWDIFAEPSQHAAQQAIRQIHSDLVTLQERRNNGYNVGRLQWQGRGEFRSVSDNQSSRFNVDHNTGDDRYVRFRLEKIGWFKVRANCDVPPADEINQVILKTETTGEWYVSLVTTVEDTPKKPPLSEMKPQNCVGIDLGITSYIHTSENMSVDTFELSDEYDRCAREQRKLDRKEHGSDNWEKQRRKVAQAKRKIKRKVCDYQHKLTTWLVQEYDVVAVEDLDVDVKPMLETSQNAKNKQDAAWSRFIELLEYKADLHGTHVEKVEPKGTTKECAVCGVETEKPIWVREHSCPACGHTEDRELNAAKNILNRGLKQLGAGRSESPSSERRSLS

SEQ ID NO: 44965 - protein, 374 aa, Haloquadratum sp.
LHSQSSQKVLEELAEAFSSWFGSDDNRDNPPGYRKTNYYDSDGNRVHEEHPRSTVTWKNKGIRHDTKHDRIRLSKGKNHKDGRDYILCEYQAPPEIEGNNIQQVRAVYNTGKGRWELHVVCKKEITAESPGENTAGVDRGICNPAAVAFPDDALLYPGNTVREDKHYFQQQEYQTERPHGPSQTAQWAREKLSRRKDHFLHALSKDIVERCVEHDVGTLVVGDPSGVDDDNWGRHGNKRLDNWAYKRLMNLLDYKARERGIEVEMPDERGTSSLCSVCGHEDDDSRVERGLWKCDRCGVVAHGDVNGADNIRQKTLPVTPPWGIAVTAAWPSLASFSSVGLTDSNREHPPSDAQTLISQRLGFLRLQAEEEVNN

SEQ ID NO: 44966 - protein, 222 aa, Haloquadratum sp.
VCKHEVETPDAPGKETAGVDLGICHFAAVAYSTKQADLYPGNRLNQDGYYFPKEIANCDHSDGEEATRLHAKWSERRTHFFHNLAKHIVQRCAEEEVGRINSGKLAGVRKDDNGNSKNWGKHGNLDLHGWAFDRFSNILEYNAKVEGTGIMEVSESNTSKTCCVCGRKDDNQRVERGLYPCEERNDAFNADVNGAEKIRLDINNTESNSESSASLDEHRSTG

SEQ ID NO: 44967 - protein, 258 aa, Haloquadratum sp.
  misc_feature (245)..(252): Xaa can be any naturally occurring amino acid
MLEVHRTHQAKICNHAQVADSLDSHGWSASKLWNVANYHSRQQWEATGEIPDHGDLKTELKTHNNYKGLHSQSSQRVLEELAEAFNSWYSSDDDRDNPPGYRKRNYYDQDGRRVHEEHPRSTVTWKQNGIKHDTKNNRVRLSKGANHKQHPKAWEYILIEYETRPGVTVENLQQVRAVYDKAKQRWELHLVCKDEIKTPTAPGTETAGIDLGICNFAAVAVAYSTEEADLYPGNRLKQDGYYSRXXXXXXXXRSLTNR

SEQ ID NO: 44968 - protein, 240 aa, Haloquadratum sp.
MGIYPCRIRDAPRRYRREPATGQSSLQQQKGTMGTTPRLQRRNRDTHRTRHRDGWHRPRFGICNFAAVAVAYSTEQADLYPGNRLKQDGYCFPKEIANCDDSGGERATRLHAKWSERRTHFFHSLATHIVERCIENGVGRINIGKLADVREDNNGNGESKNWGRNGNLDLHGWAFNRFTNILEYKAKVEGIEVGEVSERDTSKTCCVCGREDDSQRVERGLYVCEEHGTATATGMRSTLT

SEQ ID NO: 44969 - protein, 359 aa, Haloquadratum sp.
MCEKPLVVSTVDWCKPPGTRAAEACKSVVERWKNGKKASKPRFSSPHVVYDKRTATFHDDYVSLATTEGRVEADYVLPDEDSGTPHSEYLFSNKYETTGAELHYQDGDWVLHVHCKQDVGSDTSDKATPENETVLGVDLGVNNLAVTSTGTFWTGDEFDHWRREYKKRRGSLQQCGTRWAHQNIRSVGRKEDGRFKQMLHRISNEIVAEARENECSVIAFEDLTDTREQTGASWGHKWAFDRLYEYVEYKAEEYGISVEQVGPENTSRRCSHCGFTHPDNRDGEAFACLKCGYENHADYNAAKNIGLQYLRRNQTGGDGDAPLGVRLNSGTVNVNGGYSPASSEARTGVHAESHRFSGG

SEQ ID NO: 44970 - protein, 447 aa, Haloquadratum sp.
MVQTLQQNLTNLDADEYEVMRSLCHLSKNLYNKTLYEVRQHYFDNGDGEYLNYYDAYDQLKSNWNYEVLPSQLAQQTMKQVDRGFKSFFNLVEKKRDNKYDADISPPSYLDKDGFYTLEFPSQSFQVKEDHIRLGIPYSYRNEFDCELTEIQIPFTYDEVKEANIKRIQILPQADAQYFEYRVLYEQDVEEIETVEGSWLGIDLGVDNLATCCDWRGCSFIVDGRHLKSLNRRHNQKIAHYQSIKDKQGIDGTTQRIERLYQNRRYGINDYLNKAVRLITDYCIEHQIDTVYVGDGKGWKQNVNLGDKTNQNFVQIPFDKLKQKLKHKLEARGITFDLVPESHTSKCSFYDEEPVEHHEEYVGERVERGLFESSDGTRYNADVNGAVNMARKNTCKPNSELFNSEEGVERVVDAPQRISLPNLESGQTLKETSLEAPPSRKPSQTAE

SEQ ID NO: 44971 - protein, 216 aa, Haloquadratum sp.
LSTKPAPGVTVENLQQVRAVYDKAKQRWELHLVCKHEIETPDAPGTETAGIDLGICNFAAVAVAYSTEEADLYPGNRLKQDGYYFPKEIAKCDDSSGEEATRLHAKWSERRTHFFHSLATHIVERCIENGVGRINIGKLAGVREDDNGESKNWGKHGNLDLHGWAFDRFSNILEYKAKVKGIEVVEVSERDTSKTCCVCGRKDESQRVERGLYVCV

SEQ ID NO: 44972 - protein, 349 aa, Haloquadratum sp.
LHSQSSQRVLEELAEAFNSWEETRKSDSRANPPGYRKQNYSDQQGRRVHEEHPRSTVTWKQNGIKHDIKNNRVRLSKGANHKQHPKVGIHPCRIRNPAWRHRREPPTGQSSLRQGQTAVGTSPRLQARNRNSRPTRHRDCWYRSRFGICNFAAIAYSTEEADLYPGNRLKQDGYYFPKEIANCDDSGGDRATRLHAKWSERRTHFFHSLATHIVQRCIENGVGRINIGNLAGVREDNNNGESKNWGKHGNLDLHGWAFDRFSNILEYKAKVDGIEIVEVSERDTSKTCCVCGRTDESQRVERGLYVCEEHDDAFNADVNGAENIRLDINDESNSESAPDLGGDRSTGCG

SEQ ID NO: 44973 - protein, 448 aa, Haloquadratum sp.
MALLDIPHSVVTPTMQFLITGYEHSLMLETTRTYRAKIANHSQVSDDLDQCGFSASKLWNVARYYTQGWWDEDGEILDDGELKSELKEHERYSDLHSQSTQRVLEELAESFTSWYKARQRGDEDANPPGYRKHGDEHPRSTVTWKQKGIKHDSKHNKLRLSKGFNLKNHRSDFILCEYETRPDVTVENIHQVRAVWNGDNWELHLVCKVEIPVEDVPGEKTAGIDLGIKNYLAIAYDDGEPELYPGNMLKQDKYCFTRDEYDTEGENGPSRRALRARQKLSRRKDHFLHSLAKHVVERCIDHEVGRIAIGELSKIREDENGESRNWGRSGTKKLHGWEFDHFTTVLEYKAEEHGILVDRKSERDTSKTCSCCGRKCDSNRVERGLYVCKSCGTTMNADVNGAVNIRRKITQNPPTGDMSNGRLARPVAYLFNQTSGSFHPREQVGCKS

SEQ ID NO: 44974 - protein, 374 aa, unknown
  TnpB Polypeptide
MITFQYRLYPTKDQQVKLWQHANKLNWLYNYFLNQRIENYKNGIKIGRKEQQAELVNLKANDLILNEMHSQVLQQVPLRLDRSYQAFFRRVKSKETAGFPRFRSCKNFFGICYPQSGFKIENGILTTKVYGKMSFVQHRDLKGQIKQVSISNKNNRFYLNIITDHIESKQSSGCIGIDIGLKHLVVATDGTKIKNRTDSKYFDKQISKLQSRADHLKKGSNQYKFLKKVANRLYDAKVRKINDYQHKVSKRLGSTYDTIYAEDLSVKLMSEGKWTNLNRSIRNAKLAQFLSFLGYKTNHLVLVNPKNTSKTCNKCGKIHLDLKLSDRTITCSCGSVYDRDENAADNVFCLGQAMMAQTSYVGSMTIQEAIAFRR

SEQ ID NO: 44975 - protein, 442 aa, unknown
  TnpB Polypeptide
MKITSSYGVELRKQNIPIRQTLDVYRSAVSYLTEIYEQVWEELERIPETKKRFNEAEHLIHTTKKNQARFDFDIRFPKMPSYLRRAAIQHALGSISSYKTRMGMWEKLGQIGGKPKLVHENHAMPVFYRDVMYRENENGKDAAYLKLYDGHDWKWFHVRLSHTDMEYLRKNWSGKKASAPTLERRYRKYFLRFSYTEDVILTKVPIREQIICSVDLGINTDAVCTIMQSDGTVLGRKFINFSSEKDRMYRVLGRISRFQRKHGSVQVKSRWAYAKRLNTELGRKIAGAVTGYAEENHADVIVFEYLEIKGKISGRKKQKLHLWKKRDIQKRCEHQAHRRGMRISRICAWNTSRLAYDGSGTVVRDLGNHSLCTFQNGKRYNCDLSASYNIGARYFIRELLKPLPATERSLLEAKVPSVKRRISCVYADLRELFSEMELLKTA

SEQ ID NO: 44976 - protein, 391 aa, unknown
  TnpB Polypeptide
VIKAYSIPIKDAPVDLIDAYMEIRRKALDYMLSKVEFKESKAKFTLLKEDRKRLRDSLLEDWKFSKHYVDSAINTIIGLVKGWVRLHNRGKAKRKPRITRRTVYVKRTLITYRDGVLKISVEPRRRYLVINLKEHPWIPEEFDDVGGCLLTDERLIVVVRRETRPVNPEGWASFDVNLTNITALIGGELRRYDLRALYHIHRVYEEKRRRIQRMMKHKPKTAKRLLEKYSRRERNRARDFLQKLTTKIARELQEKKLGAILENLKGIKERTLNKGRRLNRRLSKWNARQFQFMLSYKLTWVGLPVKLVNPAYSSRTCPRCSGRLAASEGRLMKCRECGFEADRDVVAVLNLHMWGVWVSPEGLRDPHTRADVEEGVDGLLWTSTPKPIQRL

SEQ ID NO: 44977 - protein, 183 aa, unknown
  TnpB Polypeptide
MELFVRRRMEDIYHKVANEVVRQALKGDVSIIVMEELTNIRRRIRYSKEMNGRLHRWSFRRLQGIIEYKAKLRGLNVVYISARGTSSLCPICGERLRRSPNGHRLMRCPSCGLEADRDLIGAWNLLQRYVGSSVPPESPQMKPPADEGRFSANKSYKIYQKKSGESERIRELQGSPQYHTKTF

SEQ ID NO: 44978 - protein, 461 aa, unknown
  TnpB Polypeptide
VHPVTTVRISANQGVTQVVKLRLNPSRAQIELLLGYCGTARAAYNTLLFHVKANIGQRAAEKTYDVAEPDLTPALSWHKYGLEKLLRENRGTWLPWYAQVPALVLDRQAHQLATGLAKWKTGTAKFPRFRKKRGDGAGLVPVTLKEKDYTWLTGGGRALALPISTVTRRELGRARSAQLSSVPVIKDNRGRRASKLIADGRGQVQEVTFSFSGGYWWASLRMRVLPAAKTQPTRHPVLVRAGAVGVDAGMGRHFATLGKPLPGVTDLAGHIDAPMFLRRALGDLAVAQRALEGTTAGSGRHARALARVQKLHGRVASRRQTWQQRLAIALVEHAHVVGVETLNLRGMARRKKGYQFGRSVADNGYGLFVQILTRQADKRACTVVKAGRFYPSSKTCSGCGAVKTKLHLSEREYNCTTCGLIMDRDVNAARNLAALARGGLTRPAGSSAPPGPTASDLVLTA

SEQ ID NO: 44979 - protein, 506 aa, unknown
  TnpB Polypeptide
MMQTIKFRLHPTLLQEKQLREIFTIYNRTKRIGYKLLFQLKDTDFTKTEKRKIVQPRLMELCDNNPYINSILIHNETKLSQQRAWYEKRKKYLNQKFKTINEKIERILPKDKRDRRLKGLYSRLSSVQNRLNTLEIPPVVFGTKQLFRERICRKIDRAEFRIRRDASFCCVGKKQGVNLNLKVLPDMTLKVRRFSKEKGKKWLRIPFILNYKQEKWFRELLTAEKYTVEIVRRFIKGKLRYFAHISYETPEADITYGFGKGAIGLDFNYNFVTLSNVDKNGTFKSYCKISFRNLHTLRKHSKENYISYKLNKVINYCMNKNKGVVIEDLSLDSKFSYNKMLNRKLSDFRSTALDLLVRKCLRKGIDVRKVYPAYTSIIGKYKYSRSYNLSTHVLASYVIARRGLGFKEAIPAVYMRLLAQVGDMIEPRLKPSSPYYEWSRIHDLFKHSGITSFKTSEIARKALLVKDVLNSATSTQSDNLRAGLSACGKIEDYYKFWNFIKISNVL

SEQ ID NO: 44980 - protein, 402 aa, Escherichia sp.
VKRLQAFKFQLRPGGQQEREMRRFAGACRFVFNRALALQNENHEAGNKYIPYGKMASWLVEWKNATETQWLKDSPSQPLQQSLKGLERAYKNFFQKRAAFPRFKKRGQNDAFRYPQGVKLDQENSRIFLPKLGWMRYRNSRQVTGVVKNVTVSQSCGKWYISIQTESEVSTPVHPSASMIGLDAGVAKLATLSDGTVFEPVNSFQKNQKTLARLQRQLSRKVKFSNSWQKQKRKIQRLHSCIANIRRDYLHKVTTTVSKNHAMIVIEDLKVSNMSKSAAGTVSLPGRNVRAKSGLNRSILDQGWYEIRRQLAYKQLWRGGQVLAVPPAYTSQRCVCCGHTAKENRLSQSKFRCQVCGYTANADVNGARNILAAGHAVLACGEMVQSGRSLKQEPTEMIQATA

SEQ ID NO: 44981 - protein, 454 aa, Nitriliruptoraceae sp.
MIAARRQSVKHEPGRLVVDGRDQTVVRKAKFSFRPSPKHEVALHGLLRISREVYNVALQERRDAYRLAGKTIRWQEQFNQIKHLKGVRDDALVYGVQPLRGAIMRVDEAMQAFFDRIKRGETPGYPRFKGASRFNTAMWDEPKSWELLDDRRTLRIQGVGDIRLPKSATRQVGRMLAKGGRPVTLTVTRRRSGPKHLNRWVWRASVAFNDVAVEPTTPTEGEGSLVGVDRGIKVTAAISSGQMHVMPRYVAAQRDYLVELERAQARCVKFSREWKRLARHIARGRRKAANQTDNWARDQASQLVDQHGILAVEDLKLKSMTRSARGTVEEPGSNVAAKQGLNRELQDAALGKLATRICVKAESAGRRVWMVRPENTSRACPWCGHTSKDNRPSQAVFACTACGHTANADINAAINIASRGQDAEDAWKRAGAPSLPRRKSRRRPRKDPEFTQAA

SEQ ID NO: 44982 - protein, 516 aa, Mastigocoleus sp.
MAKATTPSFITEIPLKVDSKLGSNLDARFQAGRQLLNACLNEALIRMELVRKSEPYQQAKRLNRQKQKKQRKDLFKKAREQYRFSEYDLHSFATITAKSSVWIAKNVDSNTQQKLATRAFKAVEKILFGQAKHARFKVSSRFKSVERKSNKQGLRWLKDKVVWCGLTIEPIIDWNNPVMVHGVNSPVKYCRLLWRNLNGKKRWYIQLINKGTPYQKPQNYSIKGTVGLDVNISNVAFVADNQSGLLPFADKVPTYQREIQALQRKMQRSQRINNPDNFEPNFDKKVGNKVVRKKGKVKKGRRQWIKSSNYRKAARKKAELERRKASYAKFQNRRLVNEILRHGNQIKTEKVSIKGWQKRYGKAISAKSPGFFQSELKRKAENANGSFLEFSTQKTALSQTHLDGSRIKKTLSMRIHRDVTGFEMHRDLFSAFLSRHVCDDKLSLLDAQSEYPRAEPLLMDAWKQYQQTANRVSEPVRPSGRVVESRKCYNSSERLSIQVLASDQIVIKDDKSESHA

SEQ ID NO: 44983 - protein, 376 aa, unknown
  TnpB Polypeptide
MKTVLQIKLLPDAAQYAALKDTMRVFNEACNCIAEVAFREQCASKFVLQKQMYDPVRKQFGLSAQLTIRAIAKVVDAYKRDKSKQCFFKPAGAVVYDQRILSFKGLEAVSILTVQGRLTVAMQMGDYQRLHMGRGHGQADLVLVDGVFYVLVVIETPTAPSIDPNGFIGVDLGIVQIASDSDGESFSGEAVENTRRRYHELRKALQANGSRSARRHLQRIRRNESRFRRNQNHVISRKLVEKAKDTGRGIKLEQLKYIRERTTVRKSDRAKHSGWSFFQLQSFIEYKAKREGVAVQYVNPRNTSRQCAACGHTEKANRKTQSRFQCVACGRVANADQNAAINIAARAHVNKPIVACNDDNGLSEHSRKPRRLRQGN

SEQ ID NO: 44984 - protein, 370 aa, unknown
  TnpB Polypeptide
MLFYKSYKYRLKPTKEQAAMIESAFSARRFIWNAFLERISKAYKRRGETLSMFDCTKLLTEMKQYCPWLKQYDVHMLRFAIKDLIAARKKFFENCKKGIRPAGYPRFKNKKNLKQSFTTDGTIHVTADYIQIPKIGRIRYRCSRPCEGIPKAVTISRDGRGRYWISVCCAVDIQPLPVSPNQIGLDVGLAEFATDSNGVVYDNPKFLKKSEKKLIREQRKLSRKMEGSASWKKQKTKVAKVHEKIRNQRNTFQHQLSRKLVDENQVIAVEDLAVKNMLKNRHLAKAVADAGWSGFIEKLAYKSLWAGRDFIKIPRYYASSQICSCCGHQHTAVKNLAVRQWICPVCGAFHQRDINAAINILAKGQELLSA

SEQ ID NO: 44985 - protein, 387 aa, unknown
  TnpB Polypeptide
MRRAYTFRLWTNANQERELEIALESHRRLYNACLDQRKRAWEEDRRSVSYPDQSAWFKAERAVNPYFARLNYSSAQATMRRLDLAYRAFFRRVKAGETPGYPRLKARDRFESVTFPSHGDGIRLSGNRLRVQHVGVIRVCLHRETEGAIKTLTLRREAGKWYVVVSCDLGERVIPPSANPPVGVDLGLEAFLTTSEGERVENPRVLKAALPALRRLGRAHARKKRGGQNRRRAQQKLARAHARVRNLRREHHLKVARSMTHRYGLIAVERLTVRNMVKNRRLSRAISDAGWSGFVSTLRCKAEDAGAVVVEVDPAYTSQTCPACGTVQAKTLAERRHACACGLTLHRDEAAARVILARGLQARTGPAGRNVDVSLHAPRSRRLQPAE

SEQ ID NO: 44986 - protein, 381 aa, unknown
  TnpB Polypeptide
LYPTKTQESRLNDAIDSCRLLYNDFIFESRLAHKEGYKLTFDELQRMIPYMIPKDKVYSKAAQMVLWQFYNNLKVLSFLSKKGKRIGKLRFKPKSRYNSINYNQSGFKLLPDNIIKLSKIGKIKCVIHRKILGKIKEIHVKREITGVWHAIAICENECKKSCSLLRKKIVGIDVGIHNYCYDSNGNVIKNPQILRKFEEKLKISQRKLSKKVKGSSNQFKQKLRLAKIHQKIKYQRNDFLHKVSKYYVDNYDTIFVEELKIQNMVKNHHLAKSIYDSSWNSFFQKLEYKAANAGILFRKISASGTSQSCSGCGKTVKKSLAIRTHHCPYCGLVIDRDYNASLNIKQRGIDNLPTGCREVTPLERTPLTVACMIYGHVISMN

SEQ ID NO: 44987 - protein, 429 aa, Moorea sp.
MFYARKLHQLLYNAGIADRRYEWKANKKTIGYLYQQNCLPAFKECWPEYKELYSTSLQATLKRVDLAYNRFLKGLSEIPRYKSIKKYSGWTYPSKAGWKANTDGKNGTLVLNDLGLVIKMRGQAKFWGTPTTLTIAYKPSINAWFASITVKVDTQQTRYGSESDLVYEKIVAYDLGTETAITAFNGAEFEEIANQRFTKTLEPKVKAAGKEKRRKQAPDFKKGIKASNRWKKANKRESQLKIKAGLQRKDWQHKVTSDLASRYDIGVTEKLNTKGLTRKAKKGSKRKKQKAGLNKAILDVGFGTLNKMLTYKIELKGGIVLQLPTRQLKPSQRCPECGKVHKNWAELSNRYHVCDACSFEFDRDKTSAMVMFNAALGKQPGYGADLDKRGFSSSTSKTRKHTGSMKQLGKLKRQKSRSSDGSADTPSWP

SEQ ID NO: 44988 - protein, 370 aa, Paenibacillus sp.
MFSFGGMHVQMTFQFRLDPTPEQEQLMNRTLELCRKLYNRAKEQRETAYKQEGKTITYAMQQKELPAFKKEFPEYKNVHSQVLQDGLQRLDDAYQRFFRGEAGYPRYKSADRYISFTYPQPGAVEKTFAKPGYVYLSKIGVVKMKAHRPFDPANVTQINVKRYVDSWMVNISVKVSDAEAAQTAESAVGIDVGLNTFAALSDETKVDNPRYLRKAEKRLKRKQQLLSRKQPASRNRKKAKLKVAKAHRKVARQRKDFLHKQSYRIVRDHDLIAVEELKVRNMVRNRRLAKSISDAGWRRFITYLCYKAKRQGKRFAQVPAHGTSQTCLCGAPVPKTLSIRIHECESCGLIQDRDIVSAKVILQRALDIPA

SEQ ID NO: 44989 - protein, 377 aa, Acidimicrobiaceae sp.
MQGMKIRSPWRKKNYRPLSFSKNSGWRISKGQLHLSLGRGRPRIDLSIPTVLDSATGEEVDPGLWGEIQLCWDRDKRRFSLHIPYETLREVSVGDALSAIDEGIINSMALATWVDAKIIDVTIINGREARAIKRQRNKAVGQLQHKISKCKNGSKKHKRLVTAKKKINSKTKSSLCDFDHQVSNKAANHVISHNTARVIVGDVRGIEKETKSKRRMGRHGRQQLSQWSRGRQERYLKDKTGLDLDFLNESGSTKTCPACLTRNRPSGRPYRCKNPICGFTCHRDAVGAINILQKALCGEYTPIGPDIKVRVTYLRAVERWSLDQREAHPKVQCRKARARSSAQNRALSEATQISKPKLANSSTSTDSSVPDQLVVVA

SEQ ID NO: 44990 - protein, 416 aa, Oscillatoriales sp.
MPIVINNIVLKAVKVRIYPSVEQQSHLAQAFGCVRWVWNQSLATMSQTYKETGKGISAFTMKKQIPVWKTEFEWLKDCYSQCLQSSVLNLSQAFINFFDGRAAYPTFKKRHGKQSIQFPQNVKVLGNDEIKFPGNLGVVKAKIHRELVGSLKTVTVSKMPDGRYYASLLMEDGIDKPATNKDGKAIGIDLGLLDFVVTSDGSKYQNPRHLRKHERNLKRKQRKLCRKRDKTTNKRRKAKLAVAKVHARISRVREDFRHKLSRKIVDKNQVIVVENLAVKNMVKNHNLALSISDAGWGMFCTMLKYKAEAEGKVYLEVGRFFPSSHLCSETLLLLPKMDLSVREFNCPHCSKRHDRDINAAVNIRNEGLRILTLGTSVTALGGNVRPKRYGQKSTVAEAVAIELGSPQHIGTPIAGG

SEQ ID NO: 44991 - protein, 419 aa, unknown
  TnpB Polypeptide
MRVRAYRFRAYCSNTTARVLKTQLEVACKLYNTLLHAEQEEYERNKHTMNKTELRQLALDLRKQNKEFQVLHSQVAQQVAERFYEARQRFFDGLANKPKKKKPHRYLSLVYPQSGWKLSNWREVGQGKNKKKKARLYLSKIGFFNLIIHRVLPLEQVSQVCVKLYPSGRIYVIFTVEEPESQEQHSSEEGEPVKAVGVDLGIARLATLSDGRYLENPKPLERSLDRIRVLQRSLSRKRFLSKNWLKTKIRLAKQHEHVRDFRRDLFFKLGFLLAQEYDLLVLEDLDTEGLIQKGVTRTRRMRLYDSSFSELRRCLEWVFQKQGKTVLAVSAYNTSRECFLCGGINKGLTLEDRVFHCPFCGFTLDRDLNASLVLLKRAGWVPPAVPVELRPIPPLPSLGLKKRRQGGAMKQEAPPFRAG

SEQ ID NO: 44992 - protein, 375 aa, unknown
  TnpB Polypeptide
MQLSETIKLYMTREQKSLIVMAMNEYISTVNSLVSVATNGTSISKYTTADVDAALPSALTNQCIRDARSIVNKYNKDCRKVSAKNKKLAKQKSAVTIKEPAIPVLKRPCCYINNQNFKIKDNYIDFPVLIDGKSKRISVRTSMTGKQKMIFANAKLGTMRIVCKGNKIVAQVVYEAAELQYSDDGNVMGVDLGIKCPAVSYCSDGSVKFYGNGRRNKYMRRHYKYLRKKLQKAKKPAAVIKINNKEQRIMKDIDHKLSHDIVATAAAHNVSVIKMEQLQNIRSTTRTSRKNNHSLHTWPFYRLAQYIEYKAKLAGIQVEYVNPAYTSQRCPICGNIHHANDRNYICKCGFHTHRDLLGARNICNSTEYVGNRHTA

SEQ ID NO: 44993 - protein, 410 aa, unknown
  TnpB Polypeptide
MSVIQRAYKTELDLNNEQITACRMHAGAARWAYSWGLARKQEAYRQTGRMPSAIDLHRELNALKKTDLPWMCEVSKCAPQEALRNLDTAFAHFFRRAALKQQGKLHGKVGYPTFKNSKRGLGSLRLTGSIVVFPDAIQLPRLGRLQLKERGYLQTSAKVLSATVIERAGRWYVSVLVEQEHHVPTNTGPVVGVDLGVKSLATLSDGTVEPNPRHLRSSLGKLKRLQHAVSHKQKGSGNRKKAVGSLATLHCRVANQRANTLHRFTSRLAKTKAVVVIEDLNVAGMLKNHHLAQAIGDVGLAEFRRQLTYKAAWYGCHLVVVSRWEPTSNACYECGWVNEQLTLADRTFYCQACGLALDRDLNAAINLAKLAGSSSESRNACGEESAGQGLAALVKLSSLKQEPNTDYASA

SEQ ID NO: 44994 - protein, 368 aa, unknown
  TnpB Polypeptide
MLKAYQYRLYPTKAQITRLNQTLEICRKVYNNTLVLRRNSWKYDQKSLSLFDTNKELTQWKKKFPELKTVFSQVLMNVQVRVDLAYKAFFRRVKSGENPGYPRFKSVGRYDSITYSQFGFKIEDKTIYASKIGDIKIIFHRPFEGNVKTLGIRKTSTQKWYASIVCEDVPRHILPDSGEHVGIDVGLKTFATMSNGQVIENPQFYQTEEENLAIVSRKMSRYKTGSVEFKKTRKAVVRVHEKILNRREDFTQKLSRSLVNRYGVICFEDLSISELLEVSRCAKGIMDASWSKLIQYTTYKAEDAGRSVVLVNPRNTSQMCSRCGQIVKKDLSVRVHDCPHCGLVLDRDLNAAINILRLGLQSHIKAHG

SEQ ID NO: 44995 - protein, 320 aa, unknown
  TnpB Polypeptide
LKGLDIAFHSFFALNKKFKEGKYPNKPNIPHYKDKVKGRFEVTYTNQCFSKPLLRKGIVKPSGTNLQIVTKCIPETINQVKLVKVNRDVAKIVVIYTIPDPTSKEDNKRYASLDLGVNNLATVSSNVIKPYIINGRPIKSINQFFNKTLANLQSKGLVRCQYKKDSLSRWRMNHLNDYLHKASRYIVNQLVSNNINTFIIGYNKSWKQDTNIGKVNNQKFVQIPHLKFVEMLEYKCKLVGITVIRQQEAYTSKCSFMDNEQIKKHKEYVGKRVKRGLFKTRNGKLINADVNGSLNILKKAVGEFQYPIEVCSTPCVITLR

SEQ ID NO: 44996 - protein, 466 aa, Streptomyces sp.
MDEPVEKPEPVRGEEARRVKREILGIADRRKHRTREMTPLRAHVKEPDARHRVYRFRFYPDAEQVEQLSRTFGACRWVFNEGLALRSQGWEQHRVRVGFAETCRALTGWKRAEETTWLKEVSSTVLQQSLRHLDQAFSRFLRGEVNLPQQKRKGRSRDTATYVRTGFSWVEDGERAGTGLLKLAKQARPLAVRWSRALPAGTEPVRLSVVRDRAGRYFVSVLVEERVGPLPPAFVRGSQEPTAVGLDLGLASLVTLDDGTKVGHPKLLKRYADKLARLQRELHRKVKGSRNREKSRQKIACLYARIRDVRKDMLDQLTTRLVRENQVLVVEDLSVSTLMRGAPNKGRRRKAGLITAIRDAAWGELLRQLTYKCEWYGRTLVIVDRFFPSTRRCSACHVKGPALHLSIRKWSCTGCSTVHDRDVNAAVNLRDEGMRLYWLVAASLPPDRAMPRLIRASALEEAMPTA

SEQ ID NO: 44997 - protein, 425 aa, Haloparvum sp.
MTDKQALVKTLDFQLDIQSDNESLLYDAALEARSVYNEAIRLAKRGVDWDVIHDRVADDANLVKNTTQRVVAKALGAMENYYEYDDFNQPSHTKDGTYPLRANYEEGYNLSLTDDGDVAFRISTKPYKHVKGILNGDDVHLDVLKTALTSDEWRLGTAEALFHDGTAELHVNVTNTEQAVRDKQNSQTVVGVDLNEDNVALTALSKDGVEDTLVIEFPEIKFERHRYFTIRKRVHNAEKWSVLNTVEGQEERFVRDRLHKVSRHVVEWSQQFENPCIVFEDLKEMRDNIDYGARMNRRLHHLPFRTLQHYTSYKAAFEEIPTAWINPEFTSQRCPLCGHTERGNRHKKRFKCRSCSHQDHSDRSASVNIAVKGIEKHQEWTVPALNSLPTVRTVRRQASGAVDAPTVTHDTATGYHTDGVEGVSD

SEQ ID NO: 44998 - protein, 141 aa, unknown
  TnpB Polypeptide
VKLKIQRLYLKIRNARKHMIYKLANNILKENDVVAVESLDVKSMYQVHKIAKHLKNLPISEFIRVLKYKSNWLGKKVIEINKYYPSSQCCNRCDYKNEEVKDLSVRKWTCPECGLIHDRDINASINIMFEGLKIYMKSYLI

SEQ ID NO: 44999 - protein, 421 aa, unknown
  TnpB Polypeptide
LRGAGHNSLPRLNQASGKSNQFSAVDEAIRTVQFIRNKAIRLWMDGQAKSCYDLNKYCAVLAQEFPFANQLNSMARQAAAERAWASIQRFYDNCKGKVAGKKGFPQFQKDCRSVEYKTSGWALSDDRKSITFTDKKGIGKLKLKGTRDLNFYQPDQIKRVRLVKRSDGYFVQFCISVDRTEILLATGNTIGLDVGLASFYTDSNGLEVENPKFYRAIEVKMKRAQRLVSRKVKGSKNRIKSRIKLGLIHLKISRQRKDHAVKLARCVIRSNDLVAYEDLRVRNMVKNHCLAKSISDAGWYQFRVWLETFGRIFGRVTVAVNPAYTSQECSSCGTVVKKSLSTRTHSCQCGCSLGRDHNAALNILTKAIGTTGHVGTSVLDTVNAWGDTPSTSVGENLSGQGMSRSQESSDLANRTACGETA

SEQ ID NO: 45000 - protein, 371 aa, unknown
  TnpB Polypeptide
MERTVKLRLGYDERLVDTIRCYNEACNYVLKMAFKAKTFNKLKVHHLTYKKVRKKFPRLQSSLVCAARDQASDMLKRERLKRLPIKKPCSGIRYNARTFTPKLEKGTVSLSTVDGRVKFPVNIPVYFKRYVGWHISGATLSYKNAQIFLHLNAKNESPHTVEPNNILGIDRGVTNPVVTSNGQFFNSRRIRRVKGKYQWLKSRLQSKGTRSAKRHLKRLSGRENRFVRDTNHCLSKRIVESDADTFALEDLKIKRTKTNGRRFNRLLGSWSFGQFQRFLAYKAEALGKNIVFVNPKHTSQKCSVCGHIEKGNRHGSVFKCKKCVFSLNADLNAARNIAQLGKALLDRRPVNPPIVACVKHSYKPPNLLRGS

SEQ ID NO: 45001 - protein, 588 aa, Lactobacillus sp.
  misc_feature (249)..(249): Xaa can be any naturally occurring amino acid
  misc_feature (391)..(391): Xaa can be any naturally occurring amino acid
VSKVIKGIKLRLYPNQSQREQLWQMFGNDRFVWNQMLGMAKERYQNNPNSLFVNEYGMNYLLKQLKCEYAFLRESDSTSFLVVNHNLAQAFKMLFRHRGGYPHFKNRHSLRQSYTGRSTCKVLARRRMQLPKLGSIRTSRTGLVGDAKIKRYTVSYEPTGRYYLSLQVETEVNQLPEMHQSVGLDMGLADLVISSDGVKYGTFNAEWLEKQAVRWQRKYARRRYLAQCEVWKWNHNRSDHLEELDDYSXTGLVGDAKIKRYTVSYEPTGRYYLSLQVETEVNQLPEMHQSVGLDMGLADLVISSDGVKYGTFNAEWLKKQAVRWQRKYARRRYLAQCQVWKWNHNRFDHLEELDDYSNWQRARVNKARCQKRIANKRRDYLHKLTTDLVRXGVKYGTFNAEWLEKQAVRWQRKYARRRYLAQCEVWKWNHNRSDHLEELDDYSNWQRARVNKARCQKRIANKRRDYLHKLTTDLVRNYDVIVIEDLKTKNLQKNHHLARSIANASWYQFRAMLEYKCAWYGRQLVVVKPDYTSQICSNCGFNSGKKPLEVREWTCPKCGIHHDRDVNAAVNILHKGLKAIGQGLALVK

SEQ ID NO: 45002 - protein, 363 aa, unknown
  TnpB Polypeptide
LNKSFKIRIYPNKEQQILIDKTFGCTRFIYNFMLNLKQKLYKNFNINLSYNNMSKILTELKRHKLWLCEVDAVALQQCLKNLDNAFKMFFNGNGYPKFKSKRDKNSYRTNGKTISLDQDNYKIKIPKVGWIKFRDKNKFNNLTKIYNITISKTSSGKYFANISAEVDIKTFAKTKKNCGIDLGLKDFCILNDGTKFNNPKFLVNNQKRLRLLQQSLSRKIKGSKNYLKAKVKLAKFHEHIANCRKDFLHKISIFLVKNYDIICAETLQIKNMLKNHKLAKSIQDVSWYEFCQQLEYKCLWYDKKFVKIDTYFASSQICSNCGFKNSDVKDISIREWICPECGEHHDRDINAAKNILNQGLILI

SEQ ID NO: 45003 - protein, 383 aa, unknown
  TnpB Polypeptide
MTKQILKAYKCRLYPTDEQQIFFAKSFGCTRFIWNRMLNDKIEYYKATKTELKNTPAQYKTEFEWLKEVDSLALANVQQNLRSTYNKFFKQGSGFPKFKKKGLKDSYTTNNQKGTVAVTNNTVKLPKIGHIKAKIHRSINGLIKSATISKSPSGKYYVSLLVETVVDDMPKTQSNIGIDLGVTDFIVLSDGSKVANPKFLSRLQDKLGREQKILAKRRLVAKTQQRKLSESRNYQKQRLKVAKVYEKITNTRKDFLHKLSFNIIKNHDVIAIEDLNVKGMVKNRKLAKAILDSSWSTFTTMLAYKAEWYGKELVKIDRWYPSSKTCSGCGHLLSKDELPLSLRSWVCPCCLRNNDRDINASINILNQGLTLVTLKTVGATGLA

SEQ ID NO: 45004 - protein, 232 aa, Brasilonema sp.
VLVLEYKVKGKQQQYRAIDEAIRTTQFIRNKAIRYWIDAPREAKINRIALNNYSTALRKEFKFVKELNSMACQAATERAWSAIDRFYGNCKSKKIGKKGFPRFQKDNRSVEYKTSGWSLHPTKRRISFTDDKGISEVRLLGKWDIHTYPVKSIKRVRLVLKADGYYCQFAVDIEVKPESRTADGELGLDVGLEFFYSDSNGHHEENPRFLRKADKAIKHAQRQIYKKGAIRC

SEQ ID NO: 45005 - protein, 443 aa, unknown
  TnpB Polypeptide
LFDWLAAHAPLWNQITYRRRQAYFSDDGDVWDAEYTDLYDDYAPILGKATCQQIARKNSEAWRSHFRLLDQYHDNSNTAVTEKPSPPGYWGNREEGYELHGLVRNDLYTIDWGEDWSTFEFGVGDVLKDRYDFGHNERITLEVKGNPQWNGDDSRLELIYDEHADQLRVQHPVRIQPDQIREQREDAFTHTLNPENTMQAAAIDVGANNTLAVVTKDGDTAVYHARPEFDRFQSYSERIATLQSKLSEDGYTSDRIQRLYDKRSRKRDHSRDAAVKDVAEWLLERNVDTVYVGDLTDVLDTHWSADVNEKNHAFWSHRQLLERIQLTLGDVGITVQEVSEVDSSSECPECGSTDVTRNGDSFRCHDCELEAHSDVAGAWNILQQEVGPMARPAALSAERDRDAPIEGAYWQWNEHDWRPTDFGEQSRSLDQPSLSEPVSSQPG

SEQ ID NO: 45006 - protein, 547 aa, unknown
  TnpB Polypeptide
MRTWKITISPKRKKDAVLCNYMADTTTDARCMYNAANFYIRNTMTGIKKSPELRTSNETEVLHYVFTGIQKANEEADARYARQLGRCREAGGMSGAVKASRLYVKRFSYPTTDHWFLSYETLDAIFKYTDHPVYKRMNSQVNQNAIRKAVKTWKSYFALSKDYAVSPQKYKARPHLPGYIKTQGTTAWFTSQTARLVVCNGMAYLNFVNCSKPLCIGKASLYSGMKYVKTEVKPQYGKYWILVTFDDGTRLPSVPEHPCRILGIDIGTGNFAAAAGNFGQTPFLVRGGAVKSMNQWFNKKRAQLLSDLARGSNSTCSKKTSRRLDAISRRRDDFLRDFFYKVSWHICRYAEENHVDVIVAGHNADQKQNINIGRGNNQNFVSIPFCRFEEILINTAAKCGIPVVIREESYTSQASLPDLDDIPVYRKDDPVKYAFSGRRVHRGLYRTGKGVIINADVNGAGNIIRKEYPHAYDGQDMSYLYTSTNTVSYTDLYPGAKSAVKASYNQKKHRAGTGSAVRHAYRKNTRLGYRMLWGKSKYVWEPDTKTA

SEQ ID NO: 45007 - protein, 346 aa, unknown
  TnpB Polypeptide
MKQTMLLKLIPTTEQHQALLETMHAFNEAANSVAQVAFADKTANKFELQRLVYGELRTTYHLPAQLAIRAISKASEAYKRDKSIQPHFRPEGAIVYDQRIMAFKGLDTVSLVTLSGRVLVPFLVGGYQQARMERIKGQADLLYRNGQFYLAVTLEVPESAPTPTDGTLGIDLGIVNLATDSEGEIFSGQAVEHNRKRHHALRQRLQKRGTPSAKRHLKKLSGKEARFRRNTNHVISKRIVQKAKANGQGIAIEELRHIRKRTDRTVRYSQRSRHSSWAFGQLRFFLQYKAALTGVPLHTVNPRNTSRTCQAVFCCVQCSLTMNADIVGAINISRAPVNVPIVAGRA

SEQ ID NO: 45008 - protein, 274 aa, Thiorhodospira sp.
MKVTRILCAKRPNQGKVGALREQAQRLGQVRSEVLVDSDGDHHGQELGAILTDTSDKLKIKYPRRAKLRALANNTRNPRKRQHIRQFNLGRKKLNRQMSKTHARIRDIVFQSVHKVVDKAAVIAAEDLTAPMASKSFGKNANRRLASWTKGVIAQALDSVSSRRGSTVVLVNPAYTSQMDSRTGCLDGKRQGDQFYCSDGVVLQADQNAARNVLTRLSDPDIERFTPFKRVKAILLERTERHWLGLLNQDSSCSPFGALSTESEMPKNRISNFA

SEQ ID NO: 45009 - protein, 431 aa, Planktothrix sp.
MCFFFYIDFLSLSIHTIHQPYVIMDDMTKITRTIKLKFVDLNRCKAQVFEQMTAENTRVANKLLSLPIKERRKMTTAKIMSELKSALVNQVIRHTTSPTGRKTKQYKVLPVEVNNQNWKLTLKGNTYSISFPTLKGEKRIPIEVASPHWQPVLDGLLEGTIQGGSFKLIKHRNKWYAYLSITEDVPEVKTEKRLGCDRGQNNLAVVAPKQGFGKFFNGQSVKHRRRYFQQRRKQLQEAKKFRALKKWDKKERRWMDAINHTISRRIVRFAEYHNADVVIEDLEGCRSTMKQSQKSRSDSGESRHNWSYYSLEQKLNYKLALKGLKLIKRPAPYTSKSCSTCGFIGKRNRHDFNCPNGHYHNSDLNAAKNLAQWDGFSCQLDLQRDASVMDSSGLTDGVLGTPLNSVNTVKQEYIQLSLLDWTRYENPTPLA

SEQ ID NO: 45010 - protein, 441 aa, unknown
  TnpB Polypeptide
MNATALIHLSGLKPFLAIDSATGNLLTERELASAVKPLIQYCQQEVSEIFKQNAKRLLLEIVDYTKYPDSFARNKGYVSTYDSLPYKIRARSSINKIILHKLISETARFTRSSSSKKKSPHFSSSINLGAVGQSMVKMGRDGDEITMLWKCWETELILVFKLPGYILNRNINKVTLPIVGFTNDGMIQFKFSLEERLVMRTSGTQSAGVDIGIKEPYTLALTNEKGKRIAHYATSPRIKILVDKRSRLWQEKAALQKKITSYKALALDFSKLEEARKSVVKAASALTKQIAFQIGAEISQKISKHEVQVLNLEDLFWVKSKIGPSKWAYRRDQTSISNAVLRQGISTRYINPKNTSQNCHRCSQTIKHRSKRVVWCSTCKIKMDRDFNAAINIANDVNKKIRFPSTSRSTGNDCSPIGQVMAQDEPNSVLKDELTYQVIQT

SEQ ID NO: 45011 - protein, 243 aa, unknown
  TnpB Polypeptide
VRLRLGSTVIFVISQSETTSIFITTTCQKTIRVADTTVRIVASFRRDDVRIRGAIASKYGQRRIARNGHLLHNVTKTIVTLAVKRRETIVLEDIRGIRCLYRKGNGQTRKYRSRMNGWSFGEAQRQIEYKARWSGLPITRLSRRETRGSSVTCPRCGERLQSDKRLERKLWCGKCRIVMDRDMVAAVSLARRGRVRFARSRPPILLEAQGGAVEAVKTFKKMEARRCSGTWTIRQSAKGGAVG

SEQ ID NO: 45012 - protein, 237 aa, unknown
  TnpB Polypeptide
MHFHSRRRPNLRNLTVGNDEETRHHDLSETVRIASASMRILASFKRDDSRIRRVIASKYGERRTARTGHLLHTTTKTIVAAAVQQRQAIVLEDIRGIRCLYRKGNGQTRKYRGRMNGWSFNEAQRQLEYKARWVGLPVLRLSRRETRGSSMTCPRCGERLQSDKRLERKLWCGKCRVVMDRDRVAAVILARRGRVRFARSRPLIEAQGGAVEAVKGNPTTTVIPGVDAPKLTHPTRS

SEQ ID NO: 45013 - protein, 337 aa, unknown
  TnpB Polypeptide
MSSSKFRVWLNHEYLPQHPEYLWIKEAYSKAVTQAVNHGQTAFKKFFDHESAFPKFKKKGRSDVKMYFVKNNPKDCRCERHRVNIPSLGWVRIKEKGYIPTTKEGYIIKSGHVSMKAGRYYVSALIEIPDNKTADPSNEGIGIDLGLKDFAIVSNGKTYKNINKSARLKKLEKRLVREQRCLSRKYENLKKGESTQRANIQKQKLKVQKLHHKIDNIRTDYINKTIAEIVKTKPSYITIEDLNVSGMMKNKHLSRAVASQKFYEFRIKLKAKSKENGIELRVADRWYPSSKICHCCGMIKKDLKLSDRIFRCHCGYVEDRDFNAALNLRDVKTYKIA

SEQ ID NO: 45014 - protein, 387 aa, unknown
  TnpB Polypeptide
VRKSFQFKLFNNRRKYKKLNDELYVFCTIYNHSLALIKKHYKLFGKNPSKYTLQKHLKRLMDRGLRPKWRSLGYSQAIQDVTDRLYKSYQAFFSWCKKRSSGKKSPPKFKAFRKYKSFTLKQAGWKLDQERGVVTIGKNQYRYNNSRNIEGEVKTVTIKRDNIGHWHVILSCDLGESYKPEKVAPMTGKSAGFDFGLSCFLTSSENEQIKSPEFLKQSLEQLKAKSKQLSAKIKGSKNRYRARKIVARLHQKISNQRQDFHFKLANNLIHKYDHLFFEDLNLDAIKRLWGRKVSDLGLYQLLQRIEFKAEEHGKIIRKIDRFYPSSKTCSKCTRIKEDLALKDRRFECQCGHQLDRDLNAAINILTVGASTAGLDRVTRELALASVA

SEQ ID NO: 45015 - protein, 393 aa, Methanosarcina sp.
MVFVFIPYIYRNLYKLIKHIIVCMMKAYRFRLYPTVEQSIQLDQHIGSCRFVYNWALDQKIKTYEQTKKSISRFDLNKLMPSLKTENPWLADVNSQSLQGMTKQVESAFTRFFREKKGFPKFKSKKNPVQAFPIPQHYSVNFETGVVKLPKIGEIKAVFHRNFVGELKTATVSKTCTGKYYISILVENNEELPSRQSFTEVTTIGIDVGIKDFVVLSNGEKIENPKYLKNSLQRLKILQKRVSRKQIGSKNREKAKQLLAKLYEKITNQRNDFQNKLSFKLVSENQAIALETLNVKGMVKNHHLAQAIGDSAWSSFVTKLEYKAEWYGKTILRIGQFEPSSKLCSVCGYHNSNLTLKDREWVCPDCKTKHDRDLNAAINIKKFALMDQNLIGI

SEQ ID NO: 45016 - protein, 385 aa, unknown
  TnpB Polypeptide
MILRKGYRFLLNPTAEQAEMFCRFAGSSRFVWNKALECQKNCVENGKGVFSYAEICGRLVKWKDEFHFLKEVHSQPLQQSVKDLSLALKNCFDGTKGFPKFKKKGEDDAFRFPQGTKLENKKVYLPKIGWVKFRKSQEIEGMIKNVTVSRSIGKWFVSIQVEMEVQDPVHPSRNEVGIDMGVTRFATLSDGTFVAPINSLGKVKEKLARAQRKLFKKQKYSNNWRKQKRKVQLIHSKIAHFRKDFLHKLTSSISKNHAIIVLEDLKVKNMSASAKGTIEEPGKNVKAKSGLNRSILDQGWYEFRRQLEYKQQWRGGQVILINPSYTSLQCSKCHHRAKENRASQADFKCVMCHHQEHADLNAAKNILAAGRAVQACGDIIKQIAA

SEQ ID NO: 45017 - protein, 364 aa, unknown
  TnpB Polypeptide
VINKTFKYRLYPSKSQLVFLDRTLETCRYWYNDCLAERKDAWENEKKSIGKFKQLARVKDYRKENPYAAQVHSHIMQVVVQDLDKAFQAFFRRVKSGETPGYPRFKGRNRFDSFGLKEYGNGFKVDGRRLRVAGIGRLRVRWHREMEGKVKTVRILKQAGEWTACFSCEVEEKILPAMGKQVGIDVGIHHLLATSDGDVVDNPQWYRLAQNKLRIIQRTVSRRTMGGANRRKSVLALQRQHETLSNSRKDFLNKLAFQLITNYDLIALEKLNINGMVRNRRLSKSIMDSGWGYLSKRISDKAVEAGRHVVQVNPAYTSKTCSSCGTLFENLTLADRWVDCSCGLSIDRDVNAAINILNRAGHAR

SEQ ID NO: 45018 - protein, 394 aa, unknown
  TnpB Polypeptide
MSRFRLIPTPEQEEALLAHCRDARYVWNLAVEQQRHWQPGRKAPDYGKQCAQLTEARAEYEWLRAGSQTVQQQALRDFAQAMSNLFNGTHRRPTWRKAGVHEGFRQVAVKPHHIERLNRRSARVWVPKVGWVRFRLSRPVPDGVKSYRVTRDRSNRWHVAFVRIPDPIPGPDDGSVVGIDRGVTVSAALSTGELLHAPGLTPGESKRLKVLQQRLVRCQRGSGRRARTKQAIAKLKARDADRRKDWVEKVSTDIARRFDTIRIEALDVRAMTRTARGTADLPGVRVSQKRGVNRAIRRSGWGFLAARLQHKACGRVEQIPAAYTSQRCSVCGHVASGNRKSQAVFECEACAAGQCNADVNAARNIAAGRAVTARGDFAGRRSGNREPQLASPAA

SEQ ID NO: 45019 - protein, 373 aa, unknown
  TnpB Polypeptide
MLKSYRYRLRPTKSQAHILERQLELCRWVYNDTLAYRKNAWEKDQRIVKRFETQDRLPQLKMDKHELKEVYSHVLQNVTLRVELAFKAFFRRVKAGEEPGYPRFKGKGRYDSITYPQFGFGLVSGKLHLSKIGDIKIKLHRPIEGKLKTCTVRKMPTGKWFACFSVEIEDIPLPPRKDGSVVGIDVGLESFATLSNGEKIANPRFFREEEKALAKAQSKRDKLPKGSLSRRKATKVVERIHERITNRRNDFANQVSRQLVNRFGVIVFEDLDILNMLKNHCLAKSISDVAWNMLVKATESKAAYAGSKVVLVDPRNTSQMCSRCGLIVKKDLSERVHSCSECGLSMDRDLNAAITILRLGMQSLRKSDRSPFL

SEQ ID NO: 45020 - protein, 318 aa, unknown
  TnpB Polypeptide
MLRRAVAVELEVPREVSKLLYSVESVYLGIVREVVEYAVTNNVTNPTQLQRLFYSKYRQEYPSLNSHLIIQAIRQASEIVKSFIGRRRKGLASKPYPEIRAVSIRFDETTWNYEQFAKSIAPVRIVISPISTGKRGRGGRRFEVWLRLHKHFRVYWWKVLNGEAELASTLIIRRRLNKWYAVFVFEPKPKDAKPQLITAFDINENTVAVDRIDIIATIDKIASWNRQYLTPQLYLIKTDFGRLARRYEAIRSAIIERLKPHFALPDGKYLNVTNTREFRKQVRKLRERDRKVGRVRQIANELTKNPSIIITEELSEKP

SEQ ID NO: 45021 - protein, 300 aa, Shigella sp.
VKRLQAFKFQLRPGGQQEREMRRFAGACRFVFNRALALQNENHEAGNKYIPYGKMASWLVEWKNATETQWLKDSPSQPLQQSLKDLERAYKNFFQKRAAFPRFKKRGQNAAFRYPQDVKLDQENSRIFLPKLGWMRYRNSRQVTGVVKNVTVSQSCGTWYISIQTESEVSTPVHPSASMIGLDAGVAKLATLSDGTVFEPVNSFQKNQKTLARLQRQLSRKVKFSNNWQKQKRKIQRLHSCIANIRRDYLHKVTTTVSKNHAMIVIEDLKVSNMSKSAAGTVSQPGRNVRAKSGLNRSIL

SEQ ID NO: 45022 - protein, 361 aa, unknown
  TnpB Polypeptide
MHRAHKIRIDCTREQHSLLMQTAGCARYAYNWGLEKWGKMYEAWKADSSLEEPDWVNISRQWTQEKPEWANKTSRSAVTCSLSNLGTAFNNFIRRKAKYPKKHKRSQGISFQLGNDTCSIKGNRLRLPIIDYVKLRETPRFQGKITGYTVRLIGSHWYVTIAFDCPDAPKEAPESVVGIDVGLQHPAVASDGTVLQLSLEKLQKLEAKKRKAQRALSRSKRNSNARKRKRTKLQRIQQRITNIRQDAAHKFTTTVCKNHATVVTEDLNINELRSKAPARSVRRAYNSSLMGTILWQISYKAVHHIKAPKYFPSTKRCSTCGHIKEAMPPNVRTYRCDHCGAHLDRDENAARNLMLQPWVTR

SEQ ID NO: 45023 - protein, 434 aa, unknown
  TnpB Polypeptide
MGSYEAVKVQLDPTTRQERLMASHAGAARFAYNAGLAHVKETLDSGELADWSHYALRRWWNANKDVLAVNRTTGEVWWSQNSKEAYSGGLRSLAQGFSNWSKSRKGQRKGKRVGFPKFKSKNTTMRFAYSTAFTAPTASDPYGLKLPRIGRVHCMENVHERISGARLIRISVSRRAGRWYASLTVEREPSVTTAPKVGAVGVDLGVKSLATLSDGSVIPNPRALNTGLRALRKAQQALSRKVKGSARREKAKERVARLHARVADVRADAINKATTMIANTYSVVCVEGLHVAGMVKNHSLARNLSDAALGEFRRQLEYKTARSGAALRVVDRWFPSSKTCSNCGTVKAKLSLSERVFNCNACGLSIDRDLNAAINIEVAGSAPETVNARGEDVRRADLVSGDADLGEARTKQAKKSAVRLGAGLGNEAMQPRIN

SEQ ID NO: 45024 - protein, 317 aa, unknown
  TnpB Polypeptide
LEKDLEIKLPQQLVGQFIKQIEIIPKPRAFHAVFVYEEDLNHFKQVPQNDKVMSIDLGLNNLATCVTNGIVKPFIIDGRRLKSANAYYNKRKAKMQSKLEKQRGKKWSKKLQSLTNWRNAFVNDYMHRASHVVVKTCVDNGISKVVVGDVAKSLDHISLGKKTNQNFVNLSLGQFVDKLGYKLGSHGIELIVANESYTSKASFVDGDKMPKRYYNPDTKKKHTFSGKRIKRGLYKTGNGTLLNADANGAYNILRKTDASFSFSMLAKKVGSKVKEWLHPTKRFSFLNKKNPQKSNFRRIKKQTDSTSPVLDQQLSLF

SEQ ID NO: 45025 - protein, 413 aa, unknown
  TnpB Polypeptide
MKQGWITITYQFLLFQKSNVCIDTTRELYNQVLKFYYILLSEHNELLKLSDHLLLRELEILTIGTKEQKSAKINPKIPLEGFPKLPIYFRRAAISAAIGMMRSYKKRIESWEYSKEIQEKKCPSSPTRFLAAPVFYKGMYRNFNQKEIELKVFTGKRWEWIYSKLKGRKLPDNGKACSPILKQKGKQIFLYVPVKLPVSDIRTIRERMNIQENFLALAVPNGDCMAVGVVFEMTNVIATRFFYGGKEMKAYCERVLYRLRKSWKSRGETQNLQKQNEKFINSRWYKKIAAIHENYTHQISHQIIEYCKQQQISMIVVPKYQEMTDILNRRYYGWLGRSLISKLKYKAFRQGIIVSSIRPYHMTNQCSNCGAKIKRNKDHPLLFECPNGHNGNFARNTAINLGFRFLKYNLDDL

SEQ ID NO: 45026 - protein, 264 aa, Brasilonema sp.
GTIKTVTVSKTPSGKYFASILTEVEGDNPSTCEGKIYGIDFGLKHFAVVTDGEKVSKYDNPRNLAKHEKNLKRKQQKLARKQKGSSSRFKYKKVVAKVYERVSNSRQDFLHKLSYKLVSDSQAVIVENLHLLGMVRNHKLAKAISDLGWGTFTNFLAYKLERKGAKLVEIDRWFPSSKLCSNCFYQIGEMPLDVRDWTCPHCGTHHDRDGNAAINIRAEGIRMLKAEGSAVSAVGGEVRPKLGRKSNLRHSPTSTEAPSAYAAG

SEQ ID NO: 45027 - protein, 404 aa, Thermococcus sp.
VNYLRRQEFFEGKPVDFLKTEKTVYEEFKKEIGSATVQQICRKNAEAWRSFFALAMKKKTKELPKWLKPKPPSYLKEGGKRRPLIVLRNDQYKIEGNKLILKGLGRFKKLEIQFKGRIHLKGKQGRLEIQYDPIRRKWYAHVSFTVEEKLIGNEWVEVPRNPLGSLSAGIDLGVNNLMAVYVENGESFLVNGRPLKSIAFYWQKRIAEYQSRLNKSGAKKSRNLKGMHEKAKLQAKHYINTAVRQTVERLHQLGVNRIVVGYPKGIARNSDKGRKQNFLLSHVWRFNCVIKRLIEVAEEYGIRVLVVNEAFTSKRCPVCGKPHEGARFVRGLFKCPVTGLIFNADLVGAFNILKKVVKTITPNLSGLYAQRRGNGGKTLPEGSKTCFNLGLNETLQTSPPLARG

SEQ ID NO: 45028 - protein, 202 aa, Campylobacter sp.
MNIINEFLVSFILIKLYFKFKVCRKIKFPLLWKFYFSKWKFYFSADKLNKIYEKSSNIKKDSYHKITSKLIQEFDLLAVEDLQIKNMSKRAKLKNIKAKSGLNKSILNISFYQFSQYLEYKAKHNGKFFIKVNPQYTSKTCSVCGNIKKNLMFKDRVYLCEKCGNTLHRDINAANNILKRGLKSFGLGISLEDYKLKAFRIS

SEQ ID NO: 45029 - protein, 600 aa, Rhodococcus sp.
MTGPGSTVPRQFAFTTRAHVAVDAVTGEPIGLDDVDIRVGWLLDLIAAAGAELVSRLWKPATFDVLAAGRDRQDRRLPAQGHVAAARLGWNPTYPDGVYVPSRVTRVVTAQVMATLRTLTHRDTAITALSHRFDPATGAVAWPTEPGDHVSAGFLRGVRRQLAARARGGGAPAGRLRISDVQGLPQTSAMAWLSAADRQLAQIAVTDRDLVLTVKLPTSPAPSGRAQWRRVRLTAAIPAHLHGRAVIDWHLPTLVLDRRGLLWRCAATEPVPADDLDSATVAVGVDWSPSTLGAAALTADNPDGLVSDYRGFTYDDRGLGIKLARLQAEGQQLHRKAARLTQLAATAPPEVRAQLEEKIAVLDAHRKAVGIKRGKINRELAFHFARQVTDYAATAQAQLIAVEDLTTLETRGHGRVNNNRAAQSARRQAVAALAHTAAGAGITVVSVPARGSSAQCPGCDEPLARPGGYHTAWCPRCRVGGNRDHVAGVNLAKRALLGKGKATRRRGQLPAVRVAKHAPVRPSRDKHGPTPSRPRHRRVRRSLPTAPRRLGVNPKQYVPASQASVWDTVEPAPPHGDAGSRDTRPSLTPATPVAKDMRST

SEQ ID NO: 45030 - protein, 408 aa, unknown
  TnpB Polypeptide
MSANITYNIKLQTPSIEEHSLLLSTLLEHQKVWNYMSQNTFQTKQIDKKLIHDSNYHKCRKLFPNCPSQVIIRAKDSVYATYKALKTAKHLDSLKEPCEQTNLSIRLDKRLYTFLEGNRIKLTTTGKRIICSYKPYPKFAELFSKYSVCDPLIFHKNNQFWLVVSFEVPTPTHVEGACLGVDLGIRRFAVTSEGLALTDKDFLKQKRQLRFLKRVLNSKKKTTNSCSSRRKLKKLKRKERNKNKNLCHHLANKILETSASTIVLEDLSSLKKKNLNKDNHKKSKSSKNRLSQVPFGMLLSILTYKAPLTGKKVVTVNPAYTSQKDHRGLSGGERKGCRFYTSDGLVFDADWNASINIAKKYVNKLSEKHPLSLKAPPLDGELDLRGRVLSTTQSFSCFEQTQPSLVVG

SEQ ID NO: 45031 - protein, 224 aa, Microcystis sp.
MKARYQYRIYPTDQQKRLLSQLFGCVRVVWNDTLAYCQELYQQGEKKPKYTELSKRLTQIKKTKEKQWLTEVSSIPLQQSLRDLETAYSNFFASCKGERKGKKVKPPKFKKRKSKQSARFTDNGFTINQHHVTLAKIGDLKVVWSRPLPSKPSSVTVIKDAADRYFLSFVVEIRPETLPNNDQTVGIDLGIATFATLSTGEKIDAPKPLKKRLKRLKRASEKPF

SEQ ID NO: 45032 - protein, 340 aa, Acaryochloridaceae sp.
MFGCQQVLIHPSDEIKIILEYICEESTKLSNCGKYYARQLFFKTGKIPSKFDLHREMSRNPHFQSLHSQVAQQCLTTVAESFQSFMGLLKAVKNGIVEQRPKLPGYRKGGLSLVTFPGQAVKLKPEGLRFPLGSKVKAWFGLDAFYLPMPSNLKHKAIREYRILPRNGCFYLELVYKVPEQKADVDLDKALMIDHGMDNWLTCVSNVGGSFIIDGKHLKSINQGYNKRVAFLMEGQANGYWSKRLARLTEKRNRVMRDAINKAARRVIDHCIENRIGTVIFGWNKGQKDGADMGPKTNQKFVQIPTGKLKDRVKQLCQQYGMRFVETEESYSSKASVCRS

SEQ ID NO: 45033 - protein, 362 aa, Acidimicrobiaceae sp.
  misc_feature (3)..(13): Xaa can be any naturally occurring amino acid
  misc_feature (250)..(250): Xaa can be any naturally occurring amino acid
MSXXXXXXXXXXXRDNWDENRAKKDAGLEVTKEDYVSTSHFGLLYLWAEHRDELAPWWAQNGSSTYNDAAQRLSKAFTNFHKGRAKFSHFKRKGHGGSVRIVGPAVRLADSHHVTISRIGAVKTYESTRKLYRHLERGTGRIVAATLAQRNGRWSVSFTAQVTRQLPATRTPERIIGVDLGITTLYSGATPDGEHVLEVDNPRHLVKAQRSLAHAQRVASRRQGPRKGVEPSNRWRRANARVQRVHAHVXDAGFSEFVRQLEYKTQWYGSTLVKADRFYPSSKTCGRCGTVRATLSLAMRTYACESCGHQVDRDLNAATNLARLGLPGTHSGTGRGGKGKTGSVRPAHPREASTEARTPVGV

SEQ ID NO: 45034 - protein, 402 aa, Escherichia sp.
VERLQAFKFQLRPGGQQEREMRRFAGACRFVFNRALARQNENHEAGNKYIPYGKMASWLVEWKNATETQWLKDSPSQPLQQSLKDLERAYKNFFQNRAAFPRFKKRGQNDAFRYPQGVKLDQENSRIFLPKLGWMRYRNSRQVTGVVKNVTVSQSCGKWYISIQTESEVSTPVHPSASMVGLDAGVAKLATLSDGTVFEPVNSFQKNQKTLARLQRQLSRRVKFSNNWQKQKRKIQRLHSRIANIRRDYLHKVTTTVSKNHAMIVIEDLKVSNMSKSAAGTVSQPGRNVRAKSGLNRSILDQGWYEMHRQLEYKQLWRGGQVLAVPPAYTSQRCAYCGHTAKENRLSQSKFRCQVCGYTANADVNGARNILAAGHAVLACGEMVQSGRPLKQEPTEMIQATA

SEQ ID NO: 45035 - protein, 235 aa, Salinibacter sp.
MRPVKNAAGQYHVCFVCTEEVRRLPRVNGEGGDLEFVGVDLGIESLVTLSTGEKVGNPRWFENAYERLRREQQKLSRKEKGSNNWERQRKRVAKVHQRIQDRRKDFIEKLTTRLIENFDVIVVEDLSVKNMQQNGNLARHIGGAGWNQIVRRLRDKCKWYGRRLVIADNQRCSECGHVDGKKSLDVRDWTCDECGTCHDRDINAAKNLSRVGQTRIQAPGDLGKPDAFEVVGSGR

SEQ ID NO: 45036 - protein, 162 aa, Salinibacter sp.
MAVVDSVMKHEIKRTYRYRIYPNSEQRQELARTFGCSRWVYNWALETKTKAYYQDEESLSFTDLSGRLTDKKRKEETEWLSEVSAVTLQQSLRNLNQAFTNFFEGRAEYPSFKSKKGDQTARYVGTAFDIREENGKRKLRLSKMPGLINIRWSRELPSEPSS

SEQ ID NO: 45037 - protein, 396 aa, Salinibacter sp.
MYLTRKFHIEGTEQLERLSRSSADLWNSICKWYWRTVDRQDQWLSKTAMRRWHCKGHDVLPSQTAQEVAEQFYEAVGSWHDNDRKGNPPKRSDKTYNVLRWTYQGVTLRDDGVLRLSTKRGDDSILIDWPAREEPRTVEIGKTSNGFVVRAQYDTEPVDRTTGNKVAGIDLGEKHLAAVFTGGDAFTVNGGELRALRHYQNSLKAKLNAKIDRKERGSNRWNKLVETKQEQLDHIDNKITDLLHKLSRKTVEMLLERGVSAVAIGDVRGIRDRIDYGKKMNQRLHQWAYGEFARMIEYKAKLAGITVERIDEAYTSQECPHCGHRKKSSGRSYTCSECGFHGHRDVVGAANIRRKYVGSDDQTRLPGVMASPSGVRFRPHLSCSSRSRRRTSRQPV

SEQ ID NO: 45038 - protein, 405 aa, Salinibacter sp.
MYLTRKFHIEGNQQLERLSRSSADLWNSICKWYWRTVDRQDHWLSKTAMRRWHCKGHDVLPSQTAQEVAEQFYEAIDSWHNNDRKGDPPKRCDKSYNVLRWTYQGVTLRDDGVLRLSTKRGDDSILIDWPAREEPRTVEIGKTSDDFVVRAQYDTEPVDRTTGNKVAGIDLGEKHLAAVFTGDDAFTINGGELRALRHYQNSLKAKLDAKIDRKERGSNRWKKLIQTKNEQLQHIDNKITDLLHKLSRKVVEMLLERRVSAVGIGDVRGIRDRMGYGTKMNQRLHQWVYGEFARMIEQKAELAGITVERIDEAYTSQDCPQCGHRKKPSGRNYTCSGCGFHGHRDVVGAANIRRREVAERKYVGQEPTGSKTRLPGVMASPSGVRFHPHLACSSRSGRKTSRQSV

SEQ ID NO: 45039 - protein, 187 aa, Salinibacter sp.
MTHEIKRTYRYRLYPNEAQKAELARTFGCSRWVYNWALETKTKAYYQDGESLSFTDLSGRLTDKKREEETEWLSEVSAVTLQQSLRNLNQAFTNFFEGRAEYPSFKSKKGDQTARYVGTAFDIREENGKRKLRLSKMPGLINIRWSRELPSEPSSWPDSTTSASSVQRKSASSRESTEKTATSNLSE

SEQ ID NO: 45040 - protein, 379 aa, Salinibacter sp.
MYCKGFDGLHSQSAQAVADSFYDSLQSWREKRESGNYEGLRPPYKQKRHFKVQWKSAAIRLRDDGVLRLSNGRGNDPVLIDWPSDRQPKRVEIGWDGDQYELRCQYKIEEDEKPKGTKTAGIDIGEIHLAAVRSGDESWTVNGRELRSLRRQQNRTKARLDSKIDRKERGSRRWKRLARAKDRQLQKIRNQIKDLLHKQSTRLVKTLHERRVGTVVVGDLKGIRESIGYGSKANQKLHQWAYGEFARMIEYKARLCGMTVERVGEAYTSQTCPSCGSRQKPHGREYVCGCGFEGHRDLVGATNIRKRYLGQDEPQGSSLRVAGEGPKRSVMASPTGVRYRPHMRTEPPGSEPQRCNPATAGKTSTEPKGSCGQAGRPVG

SEQ ID NO: 45041 - protein, 471 aa, unknown
  TnpB Polypeptide
MLQAYRFALDPAPAQARVLASHCGAARKAFNEGLAQVRRCLDQRGAERSYGVPDGLLTEVPWTLPALRRWWNASKEVLAPWWAQNSKEAYNSGLDALARGLQQYSASRSGQRRGPKTGFPRFKSRHRSRVSCRFTTGAIRVDDGMHVVLPRIGRVKTHERTTALLARIDAGTARILAATVSFDGRRWHCAFTVEADRELSRPAHGGRDRVHPVAGVDLGVRDLLVAAAPDGTEVARVPAPRSLARAQGRLRALQRRAARQAGPDRRTGRRPSHRWRRTQDRIGRVHARAANIRRDVLHKATTALAQRHQVIVAEDLVVANMCRRKPRAGRGGRGLNRALADAAPGELRRQLGYKTTWYGSALVVADRWYPSSKTCSACGTVKAKLTLAERTYHCYACGAVIDRDRNAAINLARLSEHAASVEGRPAGSGPVAGRGATHKTPPAGAGGKETSTRHQPALDKTGTAPPQGEAA

SEQ ID NO: 45042 - protein, 264 aa, Okeania sp.
MKSIRTKLKLNNKQKTLMAQHAGYSRWVYNWGLSLWNAAHRDGYKPNASCGMLRKRKLREVFTNHTKPLYPWMKNLSSRVYQYAFRNLGEAFKRFFQGLGKRPRFKKKGKSDSFPTECYANTIDNCGKPIELNGWNHKLPFIGIVKTYEPIEATTQKITISRQAGDWYLSCRGERPFAPTNEFTPTTKPKKTEVVGVDLGIKTLATLSTGEVFPSIKPYREAQKKLTKLQRQLSKKVQHSSNWHKAVFKLAKQNRRVANIRKDA

SEQ ID NO: 45043 - protein, 393 aa, unknown
  TnpB Polypeptide
MRTHKVKIRYSPQLDKINAASASVWNECLKLKEVWDYTHGYRTGVDLEKPCELWMDKHLSKTQPLHSQSIQAVRARYFKNRKGYRELRKNGNTKAKPPHKQKKYQTTTWKKSAISIKNGMLVLSNGKGVEPLDVPLPKKFNKDYKPAIVNLVYNYGEYELHFVYHTEKPDKITSEDVVGVDIGEIHPMVSFDGDQTMIFNGRYIRSLYRLRNKVLASFDSKIDKCLKHSKRWWWLVRRKWRRIRKVDNQIMDCLHKQTTKFVEVCQEKNIGTIVLGSLTGIRDTIDYGKRANQKLHQWAFGKITFLIEYKAKHAGIAVKKINESYTSQTCPNCGNRKKPTNRTYTCPCGFTYHRDGVGAMNIRQKYLGHLGVPVVAAMAPPIGIRLEPRCCSA

SEQ ID NO: 45044 - protein, 305 aa, Gloeocapsopsis sp.
VPYQIKSIAIKDACKAVSNAKKKYKQGCGISKMRFRSRKDPIQSCYIPKSAVSRKGVYHTILGELSFKERLPENFGDCRLVFAYGDYYLSVPEDAPRQIAENQGRVVALDPGVRTFQTFFSETSFGWLGEQANIKLQKLCFKLDAIISKLSKAKCRQKKRLKFAVMRLRGKIKNLVDELHKKTARFLVDNFDVMLLPTFETSQMSLKAKRRIRSSSVRQMLTLSHYKFQQFLKHKAFENSKVVLDVNEAFTSKTVSWTGEIVAALGGAKVIQSKLTGQLMNRDLNGARGIFLRAVVDTPLKECIC

SEQ ID NO: 45045 - protein, 216 aa, Gloeocapsopsis sp.
MIVLEFKAKGKTTQYAKINEAIRTAQFVRNKVLRFWMDNRGVGQKELYRYNTALRAEFPFVKALNSHACQVAVERASSAIARFYSNCKKSVSGKKGYPTFKKNCRSLEYKTSGWSLCETRKQITFTDKKGIGKLKLKGTWDLNYYQLEQIKRVRVVRRADGYYVQFLVDAKNKVDMELTGKMVGLDVGLKEFYTDSNGHTEPNPKFYRMGEKRLNY

SEQ ID NO: 45046 - protein, 388 aa, unknown
  TnpB Polypeptide
LRLRLKDKHASALRAMAADVNFVWNYCNELSFKVLERERRFISGFDLQSYLNGASKEGLRVGSAVFQQVAEEFAQKRKQFRKAKLRWRVSNRRRANYSLGWIPFKARSLTYRGGQVAFQGLKLSLWDSYGLADYELGAGNVSEDSRGRWYLNVTVKVKKQAKSTASEPSGEALGIDLGLKAHMTDSEGVAVEAQQFYRDLEPQLAAAQRAGKKKRVRALHAKVSNRRKDFLHKLSTRQVRDNAALFVGDVNASALAQTRMAKSVLDAGWSAYRTMLQYKSDDAGVWFKVVDEKFSTQDCSACGARTGPKGREGLSVRRWVCSCCGLEHDRDTNAARNIRLKGLAWLESEFAKAAEARADDAILNESAGLRPPALAPGHGRPDVGIPVL

SEQ ID NO: 45047 - protein, 483 aa, unknown
  TnpB Polypeptide
MLMAGHQRFAIPEGWVARGFRFEVEPTTREQPARIDQHFGARRFAHNWALALVKANLDARAADPAVPPLRWSLYDLRREWNQAKQQVAPWWRECSKESFSSGIADLVAALRNWSESKHGRRVGPRVGFPRFKARHRDRGRVRFTTGAMRLEPDRRHLVLPVIGRLRSKENTRRLQRLVAKGRARVLSMTLSGQGGRLYVSVQAIVAHTPRTPREPAGRCGIDLGIGWEWAVIAHHDGTIQRVAHPAPWAQAQKQRHRVARQLSRRLIGSRAHRQARAKLAALDRRAANLRTHQTHTLTITLARRYGTIVVEDLDVAAMGRGMGRRAFRRSVYQAGIGKVRPTLAYKCAQEGGRLLVADRWLASSKTHHGCGGYLADLRLGDRTWVCPRCGRLADRNANAARNLRDWTGPVGDRIVQRGGVAAPAPSVGDHGGQAHAERGRARPQKTTLVVAGADDARTDPRVGGRNPEQGYQSASSHRRSMTW

SEQ ID NO: 45048 - protein, 362 aa, unknown
  TnpB Polypeptide
MIKITTCIQCKLYPTKYQEKVLATNSKEYIRAVNDVVRSNLDTDEWKKFTSRHIKANLSGNLRDSVKQDMKSILTTYHKRIKKNMNPTLPLLKKPILKWSYVGYGVKPNSTLRLQCWDGKAVKILVKTDILPEQYEQINSGKIGGLRITQKNGKWIAQIAITSPDKPMLESGGTMGVDLGIKVPAVAYTSDNKVKFFGNGRMNKYYRRKMLVAKQKMGRSKKLNALRNIKDKERRWMTYQDHCISKAIVDFAMENNISLIRMEKLSGIRATTSTSRKNKGYIHKWSFYRLQNFIEYKAKREGIAVEYINPYKTSQICPICGRINKAEDRHYVCECGYKAHRDIVGAINIMRVPVIDGNSQSA

SEQ ID NO: 45049 - protein, 378 aa, Lactobacillus sp.
MTLRAIKTRIYPNLDQQDKIIANFGYCRFVWNQLLDMQIKRRENGGSYLNEFGMNYLIKQLKQEYPFLKQAESTSLLHVSRDLNHAYQKLFKEHKGFPKFKSRKFPKQSYQSNSVNKNIQHVGNQLRLPKLGLMKFRCGRKIEGKMKNVTIRLSATGKFYAIILVDTEVKELPKTENSVGIDMGVADLMITSDGVKYPTIRFDKILAKKKHYWEKRLARRRLQVQKEIAWDKHNKVLVPREISDFKNYLKAKRMVAKYNEKIANQRNNYLHNLTKSLVETYDAIKIEDLKAKNLLKNHKLARAIANQSWRELRSQLEYKCAWYGKQLVTVNPRKTSQICSNCGYDDGKHTLGIRQWTCPKCGVNHDRDVNAAVNILNA

SEQ ID NO: 45050 - protein, 446 aa, unknown
  TnpB Polypeptide
VRVVPLNAWARLLVGLGDPRCYGGGVSGVQVERCDVVRLRPTAEQEELLRRVGDQCARLVNMENYRRRQLFFAGRGIDKGVEIARELAKSSPEYQEVKKVLGSMNFDEVLRKISEAWRSFAELLRERKRGELPPWMNPRPPGYRKRNGERLPIVIVRADNYRVDAERRVIRLGYWNVEVRFTGKLRWLSKPGAKRGRMEIVYDPVRRRWYAHVSVRVLLERKSIGGGFMGIDLGREVLVAAVTSDGTALLYKGSALKSDYFYFERRIAAIDRALSDPRADEARRSALQEERRRLFEKRKKRRDQAFANAASHVKRFACERDVGIVFIGYPWYISHEKPGKGNTNMWGQRKLLLRLATTLENAGIPAFAVSEDGTSKICAYHNVEVRREPRGLVTCPHGHTLHADINGGLGIMAKGLKALGIKAELPRQIKVLSFLATPGGVKPINP

SEQ ID NO: 45051 - protein, 336 aa, unknown
  TnpB Polypeptide
LIGEEWRSFAELLKAARKGRLPPWQRVHPPGYRKREGQRTPVMIVRFDNYRVDLGKRVLHLGYWDMDIPFKGKPRWLIKPNAKQGRLTITYDPIKKRWYARISVEVLLERRSVGGGFMGIDLGREVLVAAVTSSGEALLYKGSALKSDYFYFERRIAEIDRALSDPGMEEADRAVLQEERRRLFEKRKKRRDQAFANTASHVGNEAVRRGVGVVFIGYPWGISQEKPGKGNVNMWGQRRLMLRLATTLENAGIPAFAVSEDGTSRECAYHKVEVQRSPRGLVACPHGHTMHSDVNAAMNIMLRGLAALGIEARLPSTIHVKSFLPTPSRVKPITLR

SEQ ID NO: 45052 - protein, 479 aa, unknown
  TnpB Polypeptide
MEDKDNLNRKEDSQMTILSGVKLKLYPNKKQKQTIEQTFGNSRFVWNQFKNMQENRYAAMIDDYNSYKEQAKKNGDKIINPIYIGDYDMQKLLTELKKENSWLHLSDATVLQKTLSTLDKAYKNFFTKPNQFEKPKFKSCKQRSQSFTGRTNKLKSGEASVYVTGPRYVYVPKLGFIKTSKTTRINGKIKEYTIIRESFGDYYISFQIEEPNRELLVKTKQLMGGDLGLTHLLTLSNSFKFPKFSPGQALTFSLKAQSKASKSMNRNSKILNTKELIYLIEKGIFDEDKYDASNLFDFKNHEKRMKKSAKAQRKVANKRHDYLHKLTTKLVKAYDVIVLEDLKVKNMLKNHKLAKAISNASWAAFVRFLRYKCEWYGKLFILVPPHYTSRICHKCGRDSGKKPLDIREWTCPHCHKTHDRDINAAINILYRGLEIYLQSQLMLLSEQAKNSYFSTIFFQVASQWLTQTITYFNQALNIA

SEQ ID NO: 45053 - protein, 409 aa, unknown
  TnpB Polypeptide
MNSSKKLYVEKQIIKPTHKYYNQLDELCLLSKNLYNTTLYRARQYYFENNSRFSAYDFIREFTKENQKDFRALPAIVSRYVIQLVEKNMNSYFKLVKLKQEGKFTNKVKLPNYLNKKTGRQIVHYHKKALSLQKVGKVKLSKSDIVLNTAVPPKDIQYLQVVPCGNHIKVLISYYKTKPAQKKSGKRFASIDVGVNNLMTVTSNVFHPIIYNGKPMKSANQFFNKTKAKEVARLKKANGVTNSKKLDKLSLWRENQISNYFHKVTSDFVRICKENKIDTVVIGRNKGWKTDLNLGSRNNQQFKMIPFLLMYDMLSYKLEMAGINYIETEESYTSKCSFIDKEELKHHNSYAGRRIKRGLFKSKDGHKYNADINGSLNILRKYLTNQNAYSDKLHKELVAHMTNPKRITV

SEQ ID NO: 45054 - protein, 414 aa, unknown
  TnpB Polypeptide
MLYPNKTMTKVLDDLCDYRRYCWNQGLNLWNELYKQRVKNVPANLRKKSQLAINDKTIVFSEKEQELLATFPSPSHRVIRNKLVANKEDWQYKLSSRVLQWAIRDLAQSWSTFFESKKPKKKGSKKKKRKVGKPSFRSKKNPKQGFKTDRARIKNGKLVLDKPRAYKDNWYGISFRGYDLPDGKIKHCAITKIGNSYQATITIDCPEQPLPKTGKKTAIDANVNHFDYTDGSFAVCPKRLDVLYAQIKHYQRLLARKRHVNGKNATHSKQYFEVKTKLQKCYQRVTAIQNDLLHKFTTMIYQTYDTVVIEDLNVKAMQMQKKAKNLHRSLFGRFRLYMEYKAIKFNKKLILADQYYPSTQRCSNCGYVKTGDDKIGLDGNKKHGTKHNEYICYECGFKTDRDKNAVLNLLALAN

SEQ ID NO: 45055 - protein, 283 aa, Frankia sp.
MAQGAAVRRTFKFQLRPTVRQAAAFTAMLNSHRALYNAALQERRDAYRHPSRTTVRYGGQSAQLKEIRGVGHVKVNQHRPVLGTVKTISVKREGCRWYVVLSCDDVPAAPLPVTGAVVGVDLEVASLATTSDGRHIGNPRYLAAVADRLARAQRRLARKKRGSARRRKAVARVAALHGTVRRQRLDLAHKTALGLVREHDLIAVEALRVGNMTRRAAPRPDPDRPGAFLPNGQAAETGLNTSILGARWGVFLCVACEYTAHADVNAAVNILRAGLARQATQAA

SEQ ID NO: 45056 - protein, 418 aa, Kouleothrix sp.
MIDTSLAMRLVEHHRIDRHDPRFAAIDAAAFASKNLYNAANYVVRQAYIFRAERIHYPALAHQMRQTEPYRALPAKVAQWVLKQVRVAWESYFAAVSAWKADPSRFLGRPRLPKYLGKQGRNVLTYTIQAISRPLLRQGIIQPSGLPIQVQTRQTAVQQVRIVPHGTHYTIEVVYQQPITPAPLDPALVAAIDIGVNNLAALTASLPGFVPRLINGRPLKALNQFYNKRRAQLQARLQQNRHTSRRLDAITDKRNRRITDYLHNASRAIINLLVQHRIGTLVIGHNPNWKQRVRLGRRTNQTFVFIPHARFIAMLTYKAEIVGICVLVHEEAHTSKVSFLDNEPVQHHAHYAGKRIARGLFRASDGRLINADVNGSYNIGRKAAPDAFGPGGRGWVVQPVPLVLPNRQRQRTNPALVS

SEQ ID NO: 45057 - protein, 485 aa, unknown
  TnpB Polypeptide
MTSASPLDHNPSWANLTSSTWFTTKLWVPANDCSTFTNQWLNLPRPPPSPLPPDLTSKNPRKRGPTTNKNGKDPKDTAARMMKTQIYPTPEQSKVLGQWCGVVRWTYNQCISYGKKNSTNPTPKELRDEFVCQEVIEDKPWLKVVPALIRNEGVRDYIKAVTSNEAKKLNPKNNLKHYEISFRSKKKLHQETLSIPGRYPYIYDSNPNEVHIDWPLFPGPLRLAESLPLQYFTPEQRRGNKKRCFYAVSIIREKTGKWFLALPLQLDHVFPQTLPVSHYRPPATPTNRRVVALDPGIKPFIACYSPQGEAFHIGTPDDSAKLEKIAWQVDSIQSRWTKEQAKKKRKLKKAARKRRRRHRNLQQEIHRKAAKLLVANYDDILIPSFETSKMTQHDERVLKSRSVRQLLTWSHYRFRQVLTAKARERPGVRVLVVSEAYTSKSCGQCGHIHDRLGGNKIFKCPECQFTIDRDLHGARNIFLRNMGYL

SEQ ID NO: 45058 - protein, 394 aa, unknown
  TnpB Polypeptide
MLLTEIFLSCLSFLILNKAVYKDYLSKNLYFEIIIKIKSINNLENYMNNMLVAKTIKCQVMNLTKRKLNMLNIEWNNYQDFIELEKNDLDWLADKILIYSSYKNQARWYWNKFKKQNFPIFIPNDRLEIRETDNKFSKYWVKIPVKSKRGGIWLPIKLLGNLPNDFKLGESKIIKRNNEFYINITIRKEIEIKKSYSSILAIDIGEKVLATVLLNGKPIFMGREIRGIRRHYAWLRKRLGNKKLLKVIKRISNKEKRIVNLKLHEISKTIVGLATSTDSLIVLGNLKKIRKSAKGKRFNRIVSNMPCLKLTQYITYKANWEGIQVIKIDEKGTSKTCSKCGYEDKSNRKNQGLFICKNCGLQANADFNGVKNIEKRSLEYISKDGATLRPKILQ

SEQ ID NO: 45059 - protein, 562 aa, Microcoleus sp.
LRLAGIQTKWYLISVTDVIFSLYLSCILIVVKSSTSTITSYNNLRRWCNLLLSFKYKLRPNQQQSQKLIQWLDMLRANYNWCLRDRIDGWHQQFICGDYCDLRTQVEITPLTCGITKGTQLANPWKEGGGKAQKEGYKDTSPKRSASLMQDANLEELKEARPWYQSIDIGVLQSIPARVNESFNKFFKGAGFPKFKRRHDFKSFSYKPGRIKIKGNKVYLPKIGWLRFYNSRVIPEGFEIKTVTIRQKVDGWYISVRIENKDIPGFPVIPDSEIKTITGCDMGLGKLVYLSDGSAIDNPRFATHKKAKRLMRIRQRRVSRKQKGSKNRSKAQLRVSKLHNKIQQRRESYQWDVANRIIKRSDAVVVEDLQIQNMMKRCKPVKSESGRFLPNGQSAKRGLNSSIADASWYALTQKLEYLAVKSGKKLYRVNPRHTSQTCSKCKHIDKDSRNGEKFICTNCGHIDDANLQAARNVKVKAIETYKLKKLGVCIAATKTVGTSQQYMIATTYTVVALNSLSVIPATINPGYYLHNADTGKPPMPLGFPQNVPAENPLKPNDANRQQ

SEQ ID NO: 45060 - protein, 432 aa, Microcoleus sp.
LLLSFKYKLRPNQQQSQKLIQWLDMLRANYNWCLRDRIDGWHQQFICGDYCDLRTQVEITPLTCGITKGTQLANPWKEGGGKAQKEGYKDTSPKRSASLMQDANLEELKEARPWYQSIDIGVLQSIPARVNESFNKFFKGAGFPKFKRRHDFKSFSYKPGRIKIKGNKVYLPKIGWLRFYNSRVIPEGFEIKTVTIRQKVDGWYISVRIENKDIPGFPVIPDSEIKTITGCDMGLGKLVYLSDGSAIDNPRFATHKKAKRLMRIRQRRVSRKQKGSKNRSKAQLRVSKLHNKIQQRRESYQWDVANRIIKRSDAVVVEDLQIQNMMKRCKPVKSESGRFLPNGQSAKRGLNSSIADASWYALTQKLEYLAVKSGKKLYRVNPRHTSQTCSKCKHIDKDSRNGEKFICTNCGHIDDANLQAARNVKVKAIETY

SEQ ID NO: 45061 - protein, 370 aa, unknown
  TnpB Polypeptide
MRLTAQLKLQPTPEQADALLRTLVRANEACDYISQVAWETKTFRQFPIHRLTYTAVRETFGLAAQLTVRCIAKVADAYKLDTKAQRTFASHGAIAYDDRILSFALPNAHVSIWTLDGRQRIPFVCGARQRQLLAAQHGETDLALVNGAWYLFAVCEAETPELIDVEGVLGIDMGVTNIAVDNDGETHSGKAIKNIRYRHRSLRNKLQRKRTHGARRRLRKLAGQERRFATWVNHNLSKRVVAKAERTKRAIALEDLTHIRTRVRARRSQRATLHSWAFAQLRAFIAYKAALAGVPVHAVDPRNTSRTCPACGCIDKANRKTQASFLCTSCGFAGPADVIAAVTISRRAPVSAPHYPVADSSVVQGKAHQL

SEQ ID NO: 45062 - protein, 408 aa, Cyanobacterium sp.
MLKVIKIRIYPDSSQKLALAKAFGSCRWLWNHFLNLMNETYKQTGKGLSGYDVKKLIPELKKQEETSWLSETYSQCLQQVCLNLGVAFNNFFEKRAKYPNFKSKHGKQSLQYPSNVSIKGNGLNVPKIGLIYAKIHRPINGKIKTVTITKNCCNQYYASVLVDDGKDKPEVSSEGKAIGIDLGLNHFAITSDGSKFDNPKILKKNEVNLKRKQQQLSRKQKGSNNRNKARLKVAKVHKKITNCREDFLHKLSRRIVNENQVIVLEDLNVKGMIKNHCLAKAIQQVGWGQFCTMLKYKAEQEGKIYMEVDRFFPSSKTCHVCLKRVDSLPLDIRHWECPKCKTKHDRDINAAINIRDEGLRILKTGLTRSGNKFRTQPLTSGTGDKAYCPDVRRGRGGRKKSTTPLSVG

SEQ ID NO: 45063 - protein, 273 aa, Cyanobacterium sp.
VTIEPYPLSYYELQKQYHKKTITDKPRPPKYRKKGGFCGLTYPKQALKLRGNQIRLPLGKTVTRWFGLSEFFLPMPTNLSFSTIKELRIVPRNRLFYVEYVYEKKIVMQKNDPEKVLAIDHGIGNALSCVTNIGKSVIIDGKKAKSLNQWYNKKIAKLKEGKPQGFWSDDLARTTEIRNRQMRDFVNKSARYIVNFCRHHRIGTIVFGWNQGQKQSVNIGKKNNQSFVQIPMGKIKDRIHQLCDEHGLKFVELAEAYTSKSSFLDNDLIPKFR

SEQ ID NO: 45064 - protein, 570 aa, unknown
  TnpB Polypeptide
MAKTIDIRKTASPICEYYESVADSIPITFTGRLKGITPEGHSMLLLRKPFCRLLRTLVKQIQSGKVPHKPTLCQAFGLPARIYNTAKLAAEGIILSAIESQKVALEDVEIDINRQVVEAFNGPHQEQPGRVRKLMRLYEKQKKLLAQRNHPHIHFGGRYYHEQQTAGWKKAYDDARNDRIGCLGSADETAGNSTFQLKPVFIGGKLIFNLFHAGKVLGHIALKPKEREQLESIQAINCEPFTFSKVVSKQWKNKGQLVSRKVSTGRVPLTIWLIHEENGHWYVHISFFKNKTKADYTPVGAIGVDLNCDSIADTQVQIADGEPLVLHHGKRMFDPAWSKEKKEAWIHEQIRGIVSEAKARNCTVVLEYLEFEHCKRWLRTKLGAMLRVMPYRKIRKAFERKCLERGVVLRYVKSNYTSLLGAVLTSYPNLGRDQAAAAIIGLRASEGGNAWLEKQCKILATQERTRLRINRKRKFGCTVTTEGVMTDRQLENRPANGGSPLDRSADVHRFQSCAGRAISDLSKAMGAHLYKEKVLPVCWKRSGMGTNPWHPVVPDGEAPRQKIECSSLSR

SEQ ID NO: 45065 - protein, 570 aa, unknown; identical to SEQ ID NO: 45064
  TnpB Polypeptide

SEQ ID NO: 45066 - protein, 360 aa, unknown
  TnpB Polypeptide
MRRKPTLKAYKYRIYPKEFPFLKEVDCFVLVAVQNHIEDAFRNHFKNRKQFKLPKFKKKRDKQSYTTNNVHNSIRIDFERRLLYLPKIREGVKIELHRRFDGKIKSVTISRTNEGKYYASILVETANPRNKVVEPKSKACGVDLGLEHFATITNDFGSYKVEHPQYLRRGEDRLRRLQKSFSKKQKGSKNSEKARLRLARQYAYIVNARNDFLQKLSKAIIDENQVVVVEDINVKGLLKTRLAKSISDSGWSKFLVYLKYKAEWYGRTFIQVDRFFPSSKLCHRCGYKNEDLALHDRTWCCLSCGETHDRDVNASINLYFVGLGRPEVTPVKQALVDDRSPYGLPKKPPCVEAGSSTAKG

SEQ ID NO: 45067 - protein, 395 aa, Streptomyces sp.
MSRYRLRPTPDQARRLSEHCAHARYLWNLAVEQHAWWTPRRGPAPNYVAQARQLTEARRAFGWLRAGSQMVQQQALRDFGQAVSNFFAGTHRRPTWRKAGRHEGFRIVAVRPEHIERLSRNAARVWVPKAGWVRFRLSRPLPDGVKSYRITLDSAGRWHIAFAVVPAPVSAPGNGQVVGVDRGVTVSAALSTGELLHASRLTASEQRRLVRLQRKLSRARRGSSRRARVNSAIAVLKARETDRRRDWIEKSSTSLARRFDVIGVEDLNIRGMTRSAKGTVEEPGRNVGAKASLNRGILASGRGLLVTRLEHKAPGRVVRIDPAYSSQTCSVCGITDREARESQARFSCRACGHVGNADVNAARNIKTAAGRAVAAREEPADTRLTHREPQLLLLA

SEQ ID NO: 45068 - protein, 459 aa, Symploca sp.
MPLRRVTFRLYPNKATEQTLRYHRKLHKELYNAAVYNRFTQYQKFGHKVEYFEQQNSLPGFKEVWPEYKQCNCMTLQATLKRVDYAFRRWLNGLAKRPKYKSIRFYSGWTYPSKTGWKVTTGGENGYLDLAKIGSIQMRGKARIWGVPTTCTIVYRNGKWYASITVNLTQLQAARRQTDFGSVGIDFGCKSALAITDGDTHTFVEAPKFLRKAEAQIKHLSKGKRRKVSPNRRKKQKASSRWKKVQAKIRKVTRKVANQRQNWVHQVASDIVRCNSFVATEKLEVKNMTRKAKKEVQPNRRFPAGGKRACGKRKKQKAGLNKSILDVGMGMLRQAIEYKVTEAGGLFVEVPTRKVKPSQTCPNCGHQHKKTLDERTHQCQKCDFTMDRDLAAALVMLLWAQGKLPGLGTNLVDADVTSATSETTKRKFSGSMKQLGQRKRQKRSFSVDGSGAETPPSTK

SEQ ID NO: 45069 - protein, 413 aa, unknown
  TnpB Polypeptide
MEYSHRYRAYPTQEVAERLDHHLDVHRQLYNHIRWDYENSPEDDKPSEYDQNNKLPDWKQRWPIFGDLHSKAAQATVARFHHNLTVLSELKEKGYGVGQLKRQAPTEYRSVTYNQSGFDLDEKRGHDKYAYVRFSKIGWVKIRYSRPIPDHATIKEVTFKKETTGEWFVSFGLETDEADLLEKPDVDSLDTSNSIGIDLGIQNYIHTSDGKTVDWLNLEDEYDRLRREHRKLSRKEKGSNNYEEQRREVATVKRHIKRKVLDYQHKLTTWLVREYDAVFVEDLNVKGMLEQSHNARNKQDAAWRQFITLLEYKGDLYGCHVKQVEARGTTKECASCGVATAKPIWVREHSCPSCGFETDRDANAAMNVLQRGFSELGLGWPEDTPVETVTATDTADFQRVSASHVVETGSLGA

SEQ ID NO: 45070 - protein, 604 aa, unknown
  TnpB Polypeptide
MGKALRAIAAPFVVAAPAGARVRTRLLVSVQDEAVLWAVGKHLGTLASRDLAARCAQGHLDTKGRNDSRAVRKRALTAECSSRWAGAITRTSEDQYQRSEKNLRDERASLRARISRIEARLAVQVGGRVGRMPGYPTSAERHAKAIRLKILRARLVYVERRLDSGVLSVARGGRDLLRKRNNLAAAGLTEDQWRREWESARLFLTADGERDAPWGNYTIAWNPDERWLEVNLPASLAHLANQSHGRYRLSCPVGFSYRGDEVAAQADGGAVRYDISYDPARSRWYIDASWKINPRTAPPLEELRRHPVVAVDINVGHLAVAAVVGDGNVIDAPVTIGLDLAGLPSATRDGRLRAAVSTLIATAKRYGARAIVIEDLDFAEARAEGRERHGSRPSRGKRGRNFRRSVSGIPSARFRNRLTQMACNAGLAVIAIDAAYTSRWAAEHWLGSLREHHPKTTGHHAAALVIGRRGLGHRARRRATRNQPAPARRHGQPRRDPGPNRRPDPHSGSPRPTRPPAAARHQDRKTSPDHGRQPGSPRPYGAAHRARTHCRSVLRNGRSRSRQRAVQWWVLLGPRPSQLWVIPDASLIRARRAGTPLLYSVCYS

SEQ ID NO: 45071 - protein, 281 aa, Escherichia sp.
VKRLQAFKFQLRPGGQQEREMRRFAGACRFVFNRALALQNENHEAGNKYIPYGKMASWLVEWKNATETQWLKDSPSQPLQQSLKGLERAYKNFFQKRAAFPRFKKRGQNDAFRYPQGVKLDQENSRIFLPKLGWMRYRNSRQVTGVVKNVTVSQSCGKWYISIQTESEVSTPVHPSASMIGLDAGVAKLATLSDGTVFEPVNSFQKNQKTLARLQRQLSRKVKFSNNWQKQKRKIQRLHSCIANIRRDYLHKVSSGYGQPAGAQCPGKIRFKPFDTGSGLV

SEQ ID NO: 45072 - protein, 542 aa, unknown
  TnpB Polypeptide
MSKEVLKIPTKKKSDNNFITIECLLAFNKDEDKEKVSNLMHRFSSMVRFAYKRLMERVERKELNKILSQKYRINTRYSDAAILLAQQTLKSCIERGQNPKKLVFGSRKLFEQLKKKHLTGKRQEWLRQKWEARRYGVLYSRGDKSQQGNVNLRLVNLNNQWHLRINLGDGEYVWAMVIRSAKRKTDKWIRFISDIEQAEKTGEWFPYTVRLKLRNGKIYAQFSMEYKCPEVTIAKNNGVIGIDINAYPFHLALVHTAKDGNLQKHEQISLDKLLDGSSDKREYLSWQAAHQVVEIAKRERKAVVIENLEKLPKGKRGDGLPKLRQKLQKWTYKALLQKIEIVARRNGVQIIKVNPAYTSIIGKLKYAPLYNIDKDTAGAYVIARRGLGFKERLPKNYRELLEDKEFLSYSVARVDDRIAKLRKEIGEEKNEYKRNKLRSDLKRLKGKLKLLLKSLLDSGESESAAQQTVNRKMERVRGLNHVRQKSWQVLSVALAFSCLESFRDFSPLKRVILLRDWVGVAKRASPSLPGQGTTAQDTCSFV

SEQ ID NO: 45073 - protein, 446 aa, unknown
  TnpB Polypeptide
VPWSGFDLINAFNRWKISEDAGRLFVVAPSGIIDKQVTGLPWRRGVSAQVFEEAAVDCGRALAAFRDSRSGARKGPRVRFPKHKRKGRCRESFRIRNKRHKHGGCLIRVGEGHPRSVTLPTIGQIRVHDDTRKLRRLLRPGKTSDVSTDGGIGAARARILFATVTRHGGRWYVSLNLQACDFHPARRHQLGPLEDGDRFIGVDRGLTVFAVAATAEGTEVGRFHALKPLNRQLSRLRRRSRNLSRASRGSNNRIRAARLLALQHAHIANARRSFLHEVSSQLTKTHGRLAIEDLAVLNLAANRRLARAISDAAWAEFARQLTYKALWLGGELVVCDRWFPSTRTCSRCGRLKEQMKPTERVLCCDGCGLVIDRDRNAAANLAAWAERFHSQAPARQAGGREPMPLEGKALAIALMMAKLAPMKGEPTLRLRPEPRTPEEGGVRTAH

SEQ ID NO: 45074 - protein, 443 aa, unknown
  TnpB Polypeptide
MVVYQAFRFELDPNDVARSALASHAGAARFAYNWGLATVTDRLDARRALRVLALRQGASTDEAGAWATELVGPVPWNLPGLRRAWNQAKAEVAPWWAENSKEAYNSGLDALARALDGWSKSRRGQRKGRRVGFPRYHKRGSRRSWRVTTGALSFGCQVDRKQRPAPSGPPVGVDAGVKSLAVLSSGEVVPNPKHLSKWARRQARLQRQCARRAGPAKGRAPSKRWWRSKARLARTHAKVATARSDGLHKLTTRLATTNATVVVEDLGLAGMTATAKGSGHWRGKAGLNRAILDAAPGELRRQLSYKTTWYGSRLVVADRWYPSSKTCSRCKAVKAKLALSERTFWCERCGLVIDRDLNAATNLASLVEAYSITGTASGAGTSTPLPPAGAVCANAQGEEMSMAPARCSSTNREAGTGAGRSDKTVTATRQRVAPKPVLVQSDR

SEQ ID NO: 45075 - protein, 311 aa, Enterococcus sp.
LKAYKFRIYPTLEQQQFFIETFGCVRFTYNVLLKNREHQELREYPEEALTPAKLKQDYPFLKKTDSLALANAQRNLERAFRNYYAGRCSHPKLKTKKAMWQSYTTNNQQGTIRIENSQLKLPKIKSLVPLHQHREIKGTIKSATISAKNLEEFYVSLLCEEQVRHLPKTKQKLTIHYSPGQLLTTDQQLDLTAFDQEQLKQKIAKEERRLEVRGISARRRLVKLKDAKNYQKQKKRVLALHRHKRARQEAYMDELSLLLVKEFDTIHILATPPQSTGNFSYSDWQKFLQKLTYKAHWYGKTLHHEATAKQG

SEQ ID NO: 45076 - protein, 331 aa, unknown
  TnpB Polypeptide
VKIIDYNKHFGSKINAFVSLSGLGRKSFDIPVKFNKDWYGNIKQYAKSNPDYEYTLTFNEKEHQVNIHICKDGYRYIPDAGNNVVGIDVNCKHNLFSLSDGTTFDYNRKLVNDFCKLSLEIDELKQDKNYTVGKRKQRKLDTLKGKMIKSEQQIIAEMCKELQTNGVNHIVMEDLDNSFGKSHVKDVENERVNYNRKVKCIGLSSLKQEVEHIARKYDIAVSTVQASYTSKMCPVCGCIEDENRPNQETFECVECGHKDNADFNSSVNIRNRVTITVLRDSLLKQLGNGAYEPRKLKREKLKEVLLSFRRNLQESVGSECAESGSTIFGYV

SEQ ID NO: 45077 - protein, 376 aa, unknown
  TnpB Polypeptide
MKKEVKIILKAYKYRIYPNKQQIELINKTIGCCRFVFNHYLAKRIELYKTEKKSLTYNQCTNNLTNLKKEKEWLKEVDSISLQQTLKDLDQAYQNFFRRVKQGRNPGFPKFKSKKNNKQSFRSQCVNNNIRIENNRIKFPKLDLVKFANSQQFEGKIKSATISKTPTNKYYISILVDTEINQLPKINKSIGIDLGLKDFAITSDSIVYKNPKFLRSLEYKLKFQQRKLSKMKLGSGKWRKQKLRIARIYEKITNKRKDFLQKLSSQLINENQVICLEDLQVSNMLKNHNLAKAISDVSWYEFRRILEYKANWYGRIISIIDKFFPSSQLCSDCGYQNKDVKNLGLREWICPNCGEKHNRDINAAINILNEGLRLLG

SEQ ID NO: 45078 - protein, 405 aa, unknown
  TnpB Polypeptide
MTHNLAHTIRLYPTESQETFFKKACGCARVSYNYGLAEYQKQRKNGLKPKITEIKKQFNQEKKTLFPWMYETNKDANQQPFANLQTAFTRFFNHQSRYPKFKKKGVKDSFYISNDKFSVDGKKFNIPKLGWVKGAEELRFKGKIASATVKRKADYWFVVISVETDKTFTTCENQAVVGVDLGIKTLATLSDGKVLEAVKPLRARLDRLKLLQRWASRKVKGSSNRHKANRKVAKVHYQVACLRKDILDKLTTCLCENYQVIVIEDLNVAGMVKNHCLALSLVDCGFGEFRRQLDYKSLLHGNTIIVADKWYPSSKKCSGCGHVKETLSLSEREYVCEHCGLVIDRDLNAAINLKNYALNQLGMACPEVTPVDTGALAHSSKIGVSETAVVETGISVSTHKCSHRK

SEQ ID NO: 45079 - protein, 280 aa, unknown
  TnpB Polypeptide
MENAHKRVNGARLIRVSVSHRAGCWYASLTVERESTPTSAPKGHTVGVDLGVKNLATLSDGTVIPNPRALNTRLQALRKAQQALSRKTKGSARRRKAQERVARLHARIANVRADAINKATTMIARTYSTVCIEDLNVAGMVKNRRLARSVSDASLGEFRCQLEYKTARTGAALRVIDRWYPSSKTCSACGAVKAKLSLSERVYRCDVCGLSIDRDLNAAINIEVAGSALETLNARGGDISRADTTSGNADPSETRTKPAQSKPRRLGADGRKPVLQAKSN

SEQ ID NO: 45080 - protein, 418 aa, Lactobacillus sp.
MKIRMTRIVTRTYRLYPDKTMKIVLDQLCDYRRCCWNQALELWNDLYDDRRILPFYAYRFVPNKNGIKEEKINLKTMPNWRLVRNMMVEQKQDWQYQYSAHLLQLAVQDLGKAWQAFFDKSQARQGKPGFKSKKLPKQGFKSDQAKLKDGLLYLEKSREYKGEWHPIKFKGRILSDKFGVLSITRKNDKYYLSIPFKVEDAKPWPKSGKYTAVDVNVGHFNYTEGKQLVLPKSLTKSYKKIAFYQRMLAKKRTVNGLIKGTQSNRYAKARAKLQREYEKCANIQKDLMHKFTIKLVKDYDKIVIEELSVKDMLMSHAASKGVHRSMFGTFRQLLAYKCEWYGKELIVANKLYPSTQRCANCGFVKKGDEKITLKGNQKHGTKHNEYVCYKCGYKNDRDQNAVKNLYALIEHPELNKAA

SEQ ID NO: 45081 - protein, 393 aa, unknown
  TnpB Polypeptide
VRFRLDPTPAQDVLLSTHCGQARFLWNLCLEQWRLWQPGKRAPGYAELNRQLTELRAAEPWLASGSVTAQQQVLRDLDQAKRNFFGGTHRRPTWRKKDRDEGFRTVAVLPEHVRRLNRRWSAVFVPKVGWVRFRCTRVVPDSVKSYRVTWDASGRWHIAFAHIPAAIAGPGTGEVVGLDRGVAVSVMSSEGEAFHAPSLRPKQAERLLRLRRRLAVAQRGSNRRGRLKRAIARLRARETDQRKDWVEQTTTDLARRYDVVKVEDLDVRAMTRSAKGTKERPGRRVRQKAGLNRAILAQGWGLFLARLEHKARGRVRRVDPKQTSQRCSACGHVATENRESQAAFRCVACGFACNADLNAARNIAVGQTVTARGALGKSSRAVNREPQCLAFVA

SEQ ID NO: 45082 - protein, 337 aa, Streptomyces sp.
MEVAVACVVVVLRSDVMKLVVQVKLLPTSEQASVLEATLHACNRAATYASQVAFAKESKDRNGPQKEVYTDLKAMFGLSAQPAVRAVKKVVDAYATLRANLRAGNLGLPTSKRYRKAVGAPIGFRPEAAQPFDDRCPSWQYDARTVSIWTVAGRMRGIRFACSSEQLKTLVAHRKGESDLVRRGGKWFLIATCDLPDPEVYEPVDWIGVDRGIVNLATTSDGTNYQRRRLSRYRRWQARKRAELQRRKSRSARRRLARRKLRWTRPTLHSAVRAAGIPGGPTGPPGIIFAVVGAGSLAQPMSSPGSTYAIAHARRGCLSPHPHLPSDISRGLGGCDP

SEQ ID NO: 45083 - protein, 404 aa, Trichormus sp.
MLIFEFKTYGKPKQFTAVDDAIRTAQFVRNSCIRLWMDNQNTGKNDLQKYCAILAKTFSFADELNSMARQASAERAWSSISRFYDNCKKKIPGLKGFPQFQKDCRSVEYKTSGWQLAQDRKSITFTDKKGIGKLKLKGTRDLHFYQINQIKRVRLVKRADGVYIQFCINVDRSENIQSSGNSIGLDVGLKDFYTDSDGNTLSNPRFLRKGKKVLKRSQKRVSRKVKGSKNRGKARHILGKRHLKISRQRKDHAVKLARCVVQSNDLIAYEDLRVKNMVRNHCLAKSINDASWYQFRVWLEYFGKVFQKVTVAVNPQYTSQECSSCGEIVKKTLSTRTHTCRCGCVMDRDENAARNILSRGLSTVGHTGTFALDASNALGDKSSTQVGEILSEQVMSLIKESQSL

SEQ ID NO: 45084 - protein, 258 aa, Escherichia sp.
MMLILKAYKFRLEPTHEQSQRLRQLCGCARFVWNLGLAETKRILGSGEKLPSAFELNRMITVWKKMPEYIFLQDAYTDNLQQKLKDLHTAWKRCFDKKLAAKAPVWKRKNEGRDSIRFVNFEKYCCLENRRVKLPSGLGWVKFRQSQRVNGKIKNATISQLAGQWYISFQVEIETAEPNHTSTTIVGLDAGVAKLATLSDGTVFEPVNSFQKNQKKLARLQRQLSRKVKFSNNWQKQKRKIQRLHSRIANIRRDYLHK

SEQ ID NO: 45085 - protein, 459 aa, Mycobacterium sp.
MARLKVPEGWCVQAFRFTLNPTQTQAASLARHFGARRKAFNWTVTALKADIKAWRADGTESAKPSLRVLRKRWNTVKDQVCVNAQTGQVWWPECSKEAYADGIAGAVDAYWNWQSCRAGKRAGKTVGVPRFKKKGRDADRVCFTIGAMRVEPDRRHLTLPVIGTIRTYENTRRVERLIAKGRARVLAITVRRNGTRLDASVRVLVQRPQQRRVALPDSRVGVDVGVRRLATVADAEGTVLEQVPNPRPLDAALRGLRRVSRARSRCTKGSRRYCERTTELSRLHRRVNDVRTHHLHVLTTRLAKTHGRIVVEGLDAAGMLRQKGLPGARARRRALSDAALATPRRHLSYKTGWYGSSLVVADRWFPSSKTCHACRHVQDIGWDEIWQCDGCSITHQRDDNAAINLARYEEPPSVVGPVGAAVKRGADRKTGPGPAGGREARKATGHPAGEQPRDGVQVK

SEQ ID NO: 45086 - protein, 532 aa, Hydrogenophaga sp.
MQATFQTRVQLGGHDMAVLNRFAGLYALVEHELFAAYSRTGEVRAMDKLKSTICAKHRITARQFNAVSVFLKGKISSRQEVNKSALAQVREDLKAVRRSLAKLLKCAGPLDATQRRSWAAKKRRLARLEAKELELSTGRVALCFGSRKLFRAQFDLAASGFRDHAEWLSAWRDARSSQFCLVGSKDEASGNQSCTAAVAENGTFSLRLRLPDALIEHPGEKYLMLHNVWFEHGQWELLAALDEKQAISYRFLRDDKGWRVFASTARADYRSKPDLQLGTVGVDINAEHLAVSEVDRFGNLVHRFSVPCVTHGKTARQRQEVVRSAAKAVVGYAAKVGKPLVHEKLDFSRRKQELAGDRRNAQLSRALSSFAYSGFIQSLQSNALLMRVASLEVNPAYTSVIGRVKYAKPLGVSVHQAAAMAIARRGMGFGEAAPRRPVIPDGRGDHLIIELPARNRSMHEWSHWAKVRSKVQGTLAGWHRLRRIAALEAVQVVNAARVASRGQSDAGAVRARPPNRQLHRLAGVRGTNVHGI

SEQ ID NO: 45087 - protein, 327 aa, Hydrogenophaga sp.
MPKRSCLPSSEASHTTRVLHLRLKDRHAPTLLTMAADVNFVWNYCNELSFKVWERERRFMSGFDFSPYTRGASKEGLSIGSAVFQEVSEEFAKKRRAAKRVKLRWRVSRGTRRSLGWIPFKARSLSYKAGQVSFQGMKLSLWDSYGLADYELGAGNLCEDSRGRWYLNVCVKVRKETLLRPAAEVKVDAVGIDLGLKDLLTTSEGEFVPAQGFYRGLEPRLAVAQRAGRKCRVRAINVKISNRRKDHLHKLSTDLVRTHQAVFVGNVNAQALTRPSPSWTPGGASFEPCCSTSAMTQACGSRRLTRSSPPRSAAPVARAPDRRAWQA

SEQ ID NO: 45088 - protein, 396 aa, Hydrogenophaga sp.
VLHLRLKDRHTAQLLKMAADVNFVWNYCNELSFKVWERERRFMSGFDFSPYTRGASKEGLSIGSAVFQEVSEEFAKKRRAAKRVKLRWRVSRGSRRSLGWIPFKARSLSYKAGQVSFQGMKLSLWDSYGLADYELGAGNLCEDSRGRWYLNVCVKVKKETLPRPAAEVKVDAVGIDLGLKDLLTTSEGERVPAQRFYRDLEPRLAVAQRAGRKQRVKAIHAKIANRRRDHLHKLSTDLVRMHQAVFVGNVNAQALTQTRMAKSVLDAGWSAFRTMLQYKCDDAGVWFKEVDEKFSTQECSACGARTGPKGLAGLSERSWACGACGAHHHRDVNSALVIRARGLAWLENEFSTVGEARAEEPVVNEHGPSGLCAVGHDRPVVGIPVLQGGEDVNKVQ

SEQ ID NO: 45089 - protein, 406 aa, Actinomadura sp.
VRRAFKFLLRPTARQQQALSEMLRDHCSLYNAALQERRDAFAHPSMTRVRYGDQSAQLKDIRAFDPERQGRWSFSSQQATLRRLNNAFEAFFRRVKVGQTPGYPRFKGAGHFDTVTFPKDGDGCRWDSTPTDTQTRVRLQGVGHVRVHRHRPVRGRVKTISIKREGRRWFVILACEAVPADPLPATGAQVGIDMGVTHLLTTSDGEHVLNPRFAETTAEELAEAQRHLATFPKRTRQRTKRHRAAARKVAQLYAKVRRTRLDLHHKTARALIRDYDVIAHERLNTAGMTKSPAPRPDPEQTGAFLPNGAAAKAGLNRSILDAGWGEFLAILANKAESAGRLVIPVDPRNTSRTCPPSLGGCGHIAKDNRLTQAKFECVKCGLVENADRVGALNVLHRAGLALCDAA

SEQ ID NO: 45090 - protein, 384 aa, Trichococcus sp.
MILKGVKVRLYPTAAQQEAIENNFRLNRFLWNQLLGMQIARHENGGSFVNKFGMNYLIKAMKIEFPFLKEAESTSLLYTSADLADSYDRFFKKQNGFPGFKSRRHPKNSYKSNCVNGNIQVADNHCLKLPKLGLVKANGLQRVKDRIKSVVVRKKADGTFEATLLVAFEAKTFASTGKAVGIDLGLTDLASQSDGFKLRNKQFERSLAKRKRQWQRKFARRRLLALKKIEVRKQATGENLELSTFKNVQKAKEQVARINKKIANQRNDYLQKYTTRLVKKYDLIAMEDLKTKNFLQNHHLSRSISDAAWARIKSMLAYKCEWYGKELVLVNPAYTSQICAHCGENTGKKPLCIRTFDCPHCHTTGIDRDVNAAINILNKALAQR

SEQ ID NO: 45091 - protein, 359 aa, Trichococcus sp.
MLKAYKFRLYPTDSQQVYFANCFGCVRFVYNKMLNDKIEHYKETKQMLKNTPAQYKEAFPFLKEVDSLALANTQQNLEKAYKNFFRDKSVGFPKFKSKHKSNASYTTNNQGGNIRIEGKKIKLPKIGFVRIRQHREFEGVIKSCTVSMSRTGKYFISILVEREVPEWVPAEHKIGIDLGLSDFAATTNDAGESVKHGNPRCLRKTEKQIKKAQRALSRKQKGSKNWEKARLVLAKKHEKIANQRKHFLHDLSNKLTDENQVLVIETLRSSNLMKNHRLAKSIADVSWFEFGRQLAYKAEWKGRTLIKADKFYPSSQICSACGHRDGKKALHIREWTCPACGATHDRDINASKNLLALAK

SEQ ID NO: 45092 - protein, 379 aa, unknown
  TnpB Polypeptide
MNIAYKYRIYPNKKQEELFMKTFGCCRKVWNLMLNDKIENYKQTNTFGMFTPAMYKKDYPFLKEVDSLALANVQLNLQGAFRNCFDKNRKTKNSFPKYKSSKYSRKAYTTNNQKGTVAIIDDKYIKLPKIGKVKAVIHRLPEADWLIKSATVSQASDGNFYVSILFEYEKDVIQSNKLDNVIGLDYASDGLYVDSNGNKGTNHKFYKESHKKLAKEQRKLSRKIGSKKGETKSKNYLKQLNKVNKIHKHITNQRNDNLHKISTEIANQVDVVCVEDLNMKAMSNKGFGNGKATLDNGYGLFMNMLEYKLKSRGKYFIKIDKWYPSSQVCSCCGVTHKEMKDLSIRTMKCSCGFVIDRDYNAAINIKNEGLRLLEASKPL

SEQ ID NO: 45093 - protein, 401 aa, Escherichia sp.
MRRLQAFKYELRPDGQQERQMRCFAGSCRFVFNKALALQKERYEQGDRKLGYAQLCKQLTQWKLDSSTAWLVDTPSQALQQTLKDLERAYSNFFAKRADFPRFKKKGCSDSFRYPQGCKLDQTNSRLFLPKLGWLRYRNSRDVLGVIKNVTVSRSNGKWYVAIQTEREVEVPVHQGTAVGLDMGIKRFFTLSDGSFKDPLDSFKRHETALRKAQQAMSRKTKFSNNWFKAKARVQRIHAHIGNARRDYLHKASTPISKNHALVCIEDLQVRNMSKSAAGTTETPGRNVRAKSGLNKAILDQGWFEFRRQLDYKLAWNGGHLIAVPPKNTSRTCPCCGHISADNRKTQAQFLCVACGFEEHADLVGAINVLRAGYARLACEVSGAIMPPAAGTHRSEYGASA

SEQ ID NO: 45094 - protein, 373 aa, unknown
  TnpB Polypeptide
MTKIRQKSYKFRLYPTEEQKVIFAKTFGCSRFIWNQMLADKIAYYEKTGKTLKNTPAQYKKDYPWLKEVDSLALCNVQLNLQQAYKNFFQSKFGFPRFKSKKKAYKESYKTNNNNGNIEVCNNKVKLPKIGWVRLKQHRKMTGLIKGATISKTTTGKYFISILCETDIPSYPKTNLSVGIDLGLSHFAILSTGEKIGNPRFLISSSKKLRREQKILSRRALVAKQSGKKLSESMNYQKQRLKVARLHEKISNQRRDFLHKLSTSIIKNHDRICMEDLASKNLMRNHHLARAIGDASWSEFCRMLEYKAEWYGKQIISISRWFPSSQLCSNCGFNSGKKPLRIREWTCENCNCHHDRDLNASVNILHEGLKLLA

SEQ ID NO: 45095 - protein, 162 aa, unknown
  TnpB Polypeptide
MAKQNFTETVVKASRNAVSLLQSAKKLGKAKKLKAIKKSRNKEQRWMIDQDHKISRAIVNDAVANGVKIIKLEELSGIRQSARTSRKNNHSLHNWSFYRLAKFIEYKAALAGIEVVYVNPAYTSQTCPCCGKRNHANDRNYVCSCGYHTHRDRLGAVNILTA

SEQ ID NO: 45096 - protein, 470 aa, unknown
  TnpB Polypeptide
MGQATRTTKLLDLGRRDQGGANLQKRAALDATAEVLTAACAFYIDFFLAHAGKFSEQVSYYSEEHLELRERLISAHELLSWAEACTVETAAHPHPWAGWNFKQRFPGMPFTYRRSVIKDAIGKVRSYLSNRASWEKSGKQKGKPGRPAATDHPTLYQGCIQIQLEALDLKAAFVRINFYTGEGWRWMHYPVTSSHYSVERLQETGWQRQSPTLVLRAHSAELHNPQVKKIAARKVMERKQDPDLATVGVDLNVKNLAVITVRQHGRIIKTVFVTDHGLDAHRYRHLKKIAKKQWQSGQPVKGERSNRQLRRHVDRLNADAAHKVARRIAQVCAHYPGCILLFECLRKIKPGKGSKSRRMNRRRANQLRGKINQQAKDKAYLHGVVSVEVNAHGTSQYCSRCGAKGEGFSYKSGRRFPVKWGKLFICPMCHYEANAYFNASVNVHHSFYREWHWQPRTARVPPPSPEENGT

SEQ ID NO: 45097 - protein, 421 aa, unknown
  TnpB Polypeptide
MIRSTSHSLKFSNAEKRKEISLFVDEYRQLLQSIINYAWLHGIPEFDFDQSKNKLDMKSLLPTTFLKQIDTNLSARLKQSAGKQAIMMLKAACKKRQKQLWMLNKLQRKGELTGKLQSKIDRQALIKPNAINANLELDSRFVDLSDTAKTFDFIRISSIGDKRSIKMPIKHTKPFKKWSSRGTLKNSVRLSKDNLWLMFDVKETKQSGTETVGADQGILTTLTLSNGSITKPCNHGHTLKQIQHKLSLRKKGSNGFAEAQEHRKNYINWSLNQLSFAGIKEVRLEKIKNIRFKNKNTRYLSHWKYTLIKDKLVRLGEEKGFQLSEIPNEFRSQRCSFCGWVRKANRKGKTFCCNRCGNTMDADLNAASNLKLDLFLVPYWVRQQQINRKGFLWKSDGLFYADGKPIVSHAQKATDGNKKPC

SEQ ID NO: 45098 - protein, 611 aa, Natronolimnobius sp.
MEKSLTKTLVFQLQSDNERLLSEAYHEARWVYNRTIRLAKDGMDWDDISPRLEDDADLVKNTTQRIVAKALDALQQSYDRDEYNTPSHEKAGAYPLRMNFTEGYNLSLEDGEIHYRVSAKPYNPVKGTLRGAPDNLELLEQALKSDEWKVGTAEAMKRNGNYELHVNVTHLEATVQDKTDAQTVVGVDINEDCVALAALREDDIDDSVVIDYPEIKQERHRYFTMRKRMQNAGQTAFDRVFEDKEERYVHDQLHQVSRRIVEWVQQFESPLVVFEDLKHMRDSIDYGTRMNRRLHSLPFHKLRSFVAYKAAFEGIPNDNIDPAYTSQTCSFSKCEHMARSNRRKKRFKCKACGRQDHADRNAAVNIAKKGLEKLNRNVPALNTLPTVRKLRRQASGCVNQPTVTHATVRATKPMVAWECPIKPREASGSFGRSSIFRDDETPRRLEPLDPEAVHGTSLGVDTESLEHPRTGHKHHIYTISEIVRLGGIAEAVAEDVVDEGVMYECVTNDVPFVLAGSIRDDGPLPDTITDALEAQDAIREQAQEADLVLMLSTLLHSVAVGNCLPSTTKTVCVDINPATVTQLLDRGSAQAIGLVTDIGTFLPMLRDELLE

SEQ ID NO: 45099 - protein, 447 aa, Halobacteriales sp.
MKRTNTFAVRPLSDGGEQVLRDLLDASAALWNEVNFQRLMRYNDKDGFKGDVWGADTGRLEGQYKGTLGASTAQQVIGKNSEAWRSFFRLKDQYHDESNTSVTEHPEPPGFRGNDDDGRVLKGVVRKDAYIVKWGERSRLEIVVGETLRDRHSSPGSRLRLEIVGDPNWPDYEGQGRLELWYDETDNTFRASQPVTVSDDARATPLADETAALDIGANNLVACTTTTGKQYLYDGRELFQRFRETTREIARLQSKLREGRYSSHRIRRLYRMRTRRRDHAQEALCRDLLERLYAEGVDTVYIGGLTDVLETHWSIETNTKTHNFWAFKKFTERLVCTAEEYGISVEVRSEAWTSQACPQCGSTGRTTRHQDTLTCPCGFEGHADLTASETFLKRHIEEAVRPMARPVRFEWDDHEWSGTPHPHESPKEQRTDPSTVHRDGNVASGES

SEQ ID NO: 45100 - protein, 400 aa, Cenarchaeum sp.
MWLNAGIEARRAGLSVFDTNKVATICQTIPQAWVRGAIQEGYKMEGCAHVKYGRKIYPLYSAVPLGKKSKGNTVYFPKCDKPFKLQKDTLPKSSQSYKIVDVTNHDDKERQFELHVTIREHVPDRVCTGIHAGIDMGGKHTLIVGKSDGGIAMLTLREKDTMRNIARIQKKMARCKLHSHKWRNLHAQLQSVYKKMGNKQMDDLRKFSKKLMLQCDKIIMEGMNLRTMTTKGKGQKAKNKLMRQSKCGEARNLLAQQSLKYNTEYAEIDQKGTSQQCCVCGNTNTWRKSSQFRCYDCGVLMHVDVNAAFNILFTFYTVQWSKRAQAVYALQDKAGMVLRGKIHLGTCMPPPSVNDVMAGTGCPKVGRQSPANKERLNVAPLDGGPPPTSAARQAGNLRDV

SEQ ID NO: 45101 - protein, 422 aa, Okeania sp.
MIIYEFKVKAKPEQYQAINEAIKTSQFIQNKCLRYWMDNQNVSKYDLNKYCKVLAQEFKFANELNSMARQSASERAWSAISRFYDNCQKKVKGKKAVRPRDDDNRKGTRTKRGYPKFKKHSRSVEYKTSGWKLSENRKAITFRDKKGIGKLKLKGTYDLNYYQIDQIKRVRLVRRADGYYCQFAIKVDLKVETESTGKAIGLDLGIKYFLADSNGQTIENPQFYRKSEKQLNRANRQKSKKYKKGAKPQSRNYHKARCRYAKKHLKVSRQRKEYCCGVAYSVIHSNDVVAYEDLNVKGMVRNRHLAKSISDVSWSTFRQWLEYFGRKYGKLTIAVLPHNTSQNCSNCGQKVQKSLSTRTHVCNHCGYIEDRDVNAAKNILKKALSTLGHRGTNTLVGDLPSGLVGEILSSDGELMNQESPSL

SEQ ID NO: 45102 - protein, 438 aa, Caldilineales sp.
VICAHRIALDPNAKQASLLAQHCGYARVAGNWARDEFRASWFTGDGMSGEWLSDMDLRKRFNAVKFDLFPWCRCLSQAAAKNAIIHMGKGLDGWGDYCKARKHGEQPRKVGFPQLRKKHRKMAYTASNGRNTVQVDGRKIRLPVVGWVRMREELRFEGDIGEVTVSKSGKRWFASIQVHTANEPAPPRPGPTVGIDMGVKTLAVVWDGDATTEVANPQALASKLKSLRRLDKAIARSIHTHGRHNPSKRRDGLYAQRRQLHIDIANLRADHHHKATTQIAKRGGTVKVETLNVDGMKHNRRLARALSDAGMSEFVRQLEYKCLWYGTEFRRVDRWYPSSKTCSRCAAVKQSLLLSERTYRCHRCGFECDRDENAARNLQAYTGHTEPARTLNALPRPARSAGEERDVETRKTHCREARARSVKRLPDSQPSWFDYPGP

SEQ ID NO: 45103 - protein, 427 aa, Streptomyces sp.
MKADMGRKYRAYPTEEQDKILTGWGHTVRALWNVALEQRVYLYEQRRYTLRSAEQCKQLAIGRGEIDWLADLPSECGQMVLSHLDRAYDNFWNPDHPAAFPARKRRGHRLSIPFKGQRVEVRKLNRHWAEVRLPKLGWMRFRLSRAIGGTIRNATVSRDGNGWHVSFGVHTGIKPEPPNEMPSCGVDFGVAASAYVSTEASPRLMPPSLTETEKSRLKHLEQKKARQVTYAKKHNGGKYGARLRRTISQIAKLRTRQANRRLDHTHKLTTGLAKSHGMVGIEDLRVKNMTKSARGTVEHPGKRVRQKAGLNRSILDNIPGERRRQLEYKTRLYGSALVAVPPFHTSQTCAACGKVDPASRQGCGRLFACVHCGHEDDADHNASVEIEARARRTGGTVTNSTRSVPRTRVPATGRRRMREARKPAHAS

SEQ ID NO: 45104 - protein, 403 aa, Massilia sp.
  misc_feature (375)..(375): Xaa can be any naturally occurring amino acid
VLAAHRIRLAPNNAQATHLARAAGTARFAYNWALAEWQKQFLARQNNPALPAPSQLSLRRQLNAVKRDQFPWMLEVTKNAPQMAIIQLGQAFENFFSKRASYPRFRRKGRDDRFTLSNDQFAVEGQRIRIPKLGWVRMREALRFTGRIVSATIARRAGHWYASLTVDTLEDQPLPTAENQGAVGVDLGISTLATLSTGEKWPGPKALRALLARLRRLSRALSRKVKGASNRRKAKDRLANLHARIANVRADFLHKLTTSITRRFHTIGIEDLNVKGMLANRHLARAVADMGFSELRRQLEYKADWRGGQVVVADRWYPSSKLCSCCGRLLEALALGTRRWSCAGCGTQHDRDVNAAINLKSVAVSSTVSACGGDXTGPARQRGTKPAPAKQESNSMAALNNKG

SEQ ID NO: 45105 - protein, 473 aa, unknown
  TnpB Polypeptide
MKNNTTSYVVQYELLTTTRDRKSLEKKFNSAKSIYNTCLNECLKRLKKLRNSEEYNSLLKEKSSKERNRKLKEIELSLSYSEYDMHKYVKDIRKLYSKHIGSLEAQKLATRSFQTVEKIHYHVADKVNFKNRFSDMSVENKSNNTGLRLKDDVVIWNDLRLRIKEKRNDIYNLQSKNDRTKYIRILKRKIRRKTRYFVQIIKEGVPPKKRHFGNESIGIDIGTSSVAIVSDSCVKLDKLSNTDNEYKKLRRLDRKLERSKRINNPNNYRKDGTVIKGSKNWIYSNRYIKLKQKRKDLYRKLAVKRKEYQEILANKIIKLGVDIKVETMRFNALQKRAKNTTINKKNGKINKKKRFGRSLSNNSPSQLLTILDRKLHYVGCFLKKIDTFEVKASQFNHKTKECVKKKLSQRWNVIDNIKIQRDLYSAFLIQNVSDDLKSVDTDLCDKKYDKFVNLHNIEINRLKETKEMCWLIA

SEQ ID NO: 45106 - protein, 433 aa, unknown
  TnpB Polypeptide
MYYAYKYRLKPSDAHREELDRHRDICRQLYNHTRYRLNEYQDEHDELPSMTTLRSELPALKQWWDDLSDVYSKVLQTVVERLFDNLNGLSKLKENGYGVGQLKWKPPREFRSFTYSQSGFKLDKKGGQTVLSLSKLADIPIRLHRPIPDVHKSDSSCAAHQKSPISEDDAKLKQVTLKKEPTGEWFATFGVQMDREPPEPPENPEKCVGIDVGILKYAHDTDGNAVESLDLSDERERLEREQRKLSRKQHGSSNYEKQRRRVAECHADLRRKRRDFLHKLSAYYAREYDVVAVEDLDAKGLVELPGNSRNRAGAAWGTFLRMLEYKCEREGAHFVAVEPAGTTKECAACGVSTDKPLWVREHSCPSCGFTADRDANAAWNILSRGIEQVGEGRSESTPVETALPTGTTTVPAKRVVEAGSPTLKERAASAASE

SEQ ID NO: 45107 - protein, 409 aa, unknown
  TnpB Polypeptide
MNLITRSYRLRVYPNGGQRRLLHRWFGATRWLWNTALEIRSEAYRARGLSLTRNGLSQWLTQWKRTAGHEWLAEVPATALTQCLRHQDRAFRLFFAKRARYPRFKAKRSRQSLRFQGVSTVWRSGVLRLPKLGVLKLAEGLPEVERPVVVSLSRDASGAYYVSFCAEVACPLLPGTGKLVGVDLGLTHLATLSTGEKIPNPRHYQRRLRYLRQQQRCLARRQKGSHRREKQRVRVARAHARVREARLYALHALTTRLIREFSVIAIEDLNVKGLVRGRGARAIQDAAFGELRRQLRYKSEWYDRLLLEVDRWYASSKHCSVCRFRLEELRLDQRQWRCPKCGTCHDRDINAAENLLTQGVRQLAGCDDRDLCVDAGDSCPEEHILVQVLAEEARSGHGNAAGLEPARLR

SEQ ID NO: 45108 - protein, 383 aa, unknown
  TnpB Polypeptide
MIKMRIYRFRIYPSKAQETHMRQHLWLAKNLWNDLLEHSKSTYLNFDKFPTRNSLQLMVKNSGLFSQTSQEIAHRVENSIWRYVKLRKKGNVKAGFPRFKSIDRMRSLHYPQFGFSLGKKLKVTPFGEISIVQHREIKGEIKTLALKREASGKWFACFTVEETPFIKPSNGGSIIGIDLGLKTLATLSNGSKISNPRHMRKHQEKIASLQRVSDKKMKGSKNREKAKLKVAIEFEKIKNTRRDFLHRLSHNLVNSYSFIALEDLTPQELAEQNFGKQINDAGWGELAGMLRYKAESAGCEVVFVNPKDTTKTCCICGNKKDMPLSERTYLCHMCGNHMDRDLNAAYNILKRATAGTAGSNACGDVSRKTSVKQEAMTLPLGAL

SEQ ID NO: 45109 - protein, 263 aa, unknown
  TnpB Polypeptide
VSKRKSVENATTLQIRLHPTHEQTALLRAHCAEYISTVNVLVAALDADLLPDDVSTKDFTCALPSAVKNQALRDAQSVFKRSLDLGVIPMLKKPLAQWNNQNWSLTDTTLTLPLSINGKTQQAHISCDGIVYVGKPGLLQIKQKRGKWCADIALTLPLVCPVESELSMGIDLGMKVLAVSYTTGQGAHFYGNGRYQRMMRRRFYARRKSLQKARKMREVRRSKGKEQRWMKDINHQLSRRIVNQAQAQGVGTIKVESLSGIRW

SEQ ID NO: 45110 - protein, 431 aa, Nonomuraea sp.
MLTGRKYLLDLTAEQTAFAERIGGACRAVWNTALEQRRTYRRRGAFIAYHDQAGQLVEAKGEPGLEWLAGVPGHCLQQTLIDLDQACARHGTFKVRWKSKTRTRPSFRFPEGGKIAVERLNRRWARAKLPKLGWVRFRWTRPLGGAVKNATVSREGRRWYISFLVDDGAQTPARHAKPDAGIGVDRGVVKIVTTSEGRFHHKVFATGREVEHAAKLQQDLARATKGSNRRKRAARRMGAVSAKIRRRRADFAAKTAHVLTRDHNLIVFEALKTKNMTSSVAPKPDPDRPGAFLPNGAAAKSGLNRAILDKGWHRIELAVRSKARYTGSCVIAVNPANTSITCHECKNVDTRSRKSQAVFVCTSCGHRDHADVNAAKNILTAGRAELAQARPAARAGARKPRNRVGRKANRQATAAQDLATTSPGPAGIPRP

SEQ ID NO: 45111 - protein, 379 aa, unknown
  TnpB Polypeptide
MANRAIKYRIHPTTEQRILFAKTFGCCRKVYNLMLSDKIKGYQATGEFPSVTPARYKKNFPFLKEVDSLALANAQLHLQAAFRNCFSKSRKKNNGFPKYKSSKHSRKSYTTNNQNGTVSIIDNKYIRLPKTGRVKAVIHRIPDSDWRIKSATISREADGNYYASILFEFDRPANTYVVDRSNAIGLDYASDGLFVDSNGNVGSRHKFYRESQKKLARAQRKLSRRVGSKKGEPKSRNYQKQLARVGKLHRHIANQRRDNLHKRSTEIANQYDVVCVENLNMRSLSNKGFGNGKATLDNGYGMFLSMLEYKLSDRNKYLVKVSKWFPSSQICSCCGTLHPEMKDLRIRVLQCDCGITISRDQNAAANVLREGLRLLQEAA

SEQ ID NO: 45112 - protein, 374 aa, unknown
  TnpB Polypeptide
MLNVVKVRIYPNTKQTIMIHRTFGSCRLVHNLLLDAKIKAYECGDKLSSFDLIKRLVPMKKVEGGEFLKEVDSTALQQSVKNIDVSYRNFFRGAGFPSFKSKHNSRQSYKSTTSKIKENRLYLPKVGLLKMKGFRKFNGKIISCVVSFEAGQYHASLSFDDKIECFKPSHNGKSVGIDVGVTLFATLSSGEMIKPLDLKKEIIDMKKAQTNLSRKIKGSKNRQKAKSKLARKHLKIRNKRKNFLHQISNKITNENQVIVVEDLKIKNMSKKAKGSVENPNMRASAKSGLNRSITQQSWGMFFTMLEYKAIKKGGEVIKIDPKYTSQKCSKCGHISEENRLKQAQFICTKCKFSINADVNASINIVGAGYALKAS

SEQ ID NO: 45113 - protein, 416 aa, unknown
  TnpB Polypeptide
MYLTVKQQVKHLSKEDYKSIKELCHIAKNLANEAIYNVRQYYFNEGEYLNYEKNYSLLKNSINYTMLNSNMAQQIIKEVDGSFKSFFRLLKLAKKGKYFFKDCKLPSYLSKDGFTTLVIGFVRLNKNKLILPFSNSFRKNHSNVEITIPPILKDKKIKEIRIIPKSKARFFEIQYTYEKDIIQRNLNTDNALVLDLGINNLVTAVSTDGKSFIIDGRKLKSINQWFNKENARLQSIKDKQKYGNKPTERQKNIVRNRNNKVNDYMNKVAKIIINYCINNNIGILVCGYNETFQRNSNIGKENNQNFINIPYGKLRNKLEYLCKLNNIQFVKQEEAYTSKASFWDNDEIPVYNCDNPKEYEFSGLRIHRGLYQCKNGMRLNADVNGALNILKKSNVVSLKRLYSRGEVDTPIRIRVA

SEQ ID NO: 45114 - protein, 389 aa, unknown
  TnpB Polypeptide
MPTSGQEVALLRHCSDARFVWNLCVEQQSWWRPGRKSAPCYMERSRQLTAARAENPWLREGSYVVQQQAIRDFEQAMRKFFDRTHGYPTWRKARHNEGFRIVGQLGNHWDVRRLNRNSGEVRIPRVGWVRFRWSRAVPLDAKSFRVTCDRAGRWHVAFAVAPEPITAPGNGEVVGVDRGVKVSAALSTGEMLMIPGLSVRETSRYKRLQRKLNRAKPGSNRRREVRLAAAKLRARETDRRKDWCEKTSTDLARRFDFIRVEDLKIKSMIRSAKGTSEQPGRNVAQKAVLNGAIRRSGWGLLAERLEDKAPGRVEKINPRFTSQRCSACGHVDRESRESQADFRCTACGYADNADVNAAKNIAAGHAVTARGGLGVTRPMNREPQLALPA

SEQ ID NO: 45115 - protein, 402 aa, Escherichia sp.
  misc_feature (313)..(368): Xaa can be any naturally occurring amino acid
VKRLQAFKFQLRPGGQQECEMRRFAGACRFVFNRALARQNENHEAGNKYIPYGKMASWLVEWKNATETQWLKDSPSQPLQQSLKDLERAYKNFFRKRAAFPRFKKRGQNDAFRYPQGVKLDQENSRIFLPKLGWMRYRNSRQVTGVVKNVTVSQSCGKWYISIQTESEVSTPVHPSASMVGLDAGVAKLATLSDGTVFEPVNSFQKNQKKLARLQRQLSRKVKFSNNWQKQKRKIQRLHSCIANIRRDYLHKVTTAVSKNHAMIVIEDLKVSNMSKSAAGTVSQPGRNVRAKSGLNRSILDQGWYEMRRQLAXXXXXXXXXXXXXXXXXXXXXXXXXXXXXXXXXXXXXXXXXXXXXXXXXXXXXXXXNILAAGHAVLACGEMVQSGRPLKQEPTEMIQATA

SEQ ID NO: 45116 - protein, 408 aa, unknown
  TnpB Polypeptide
MARTKTDSFILELKLKTSPADDAYLEKCFSAGCSICNTLVRHCRRQIASLRQDKDYRKLLAEYCSLKKGKERSAVAKRVNTIVASYGLTEYSLHDFVKVQQKKHKKYINSHVAQKVASSVWRGVEKVLYGEGKYLHFRKWKDFLSLEGKNNTTGLVFQDGILKVNQRPVHARRQKRDGSPARRYEEEALTRRVKYCRLVRKPVGRRYHYYVQLVLEGKPPGKRRTLGEGTGGLDIGTSTAAVVTDTECILTVWATALNPLKRNSGTPAEDGPFQAGNEPAELQSGRYGQKGRKKWTNSSHYRRMQMEYASLCRRREAAMKQWQEVMANRIVSQCDTIYVEQMNFKALQRKAKTSVVKENGKTQQEETVRQKPAEPGAGAVLLHPGAEDHRPGRPVPGSGHKVVPRQPV

SEQ ID NO: 45117 - protein, 474 aa, Eubacterium sp.
MSAGYAITTYKIQLNYKHLDWFKQTQSLFDDVLAFYYKLLEKQPEALSLSNQNLLRHLELQTIKQRDGTPPETPLPFEKIPLYFRRAAINAAISMYRSYVGKLKAWQESQEKQMENEELRIENSRTESQSDSDINQSGDADLYQHSPLSILNSPLKKGRPSRPCRLHMSMLYYKGMYKDFADGHVLLKLYTGKTWAWVKHRYTGRPFPENAELMSPTIVIKKKKVMLHIPVKEIVEDSRTAKERVQQNEKFVAVALTGSDSLAVCTTIEADGRATAPYFIKGGKELAHRRKLLLGYTKRGAPKNESSYGQTVGNDALVIPQEHRPNKKFYDKITRLTDHYAHEVSRKIVDYAIKQGAKLIVLPELKESFNQTKKAYLGKTPYDFIGRRIARYVQYKAWQQGLVAMTSKPYYASTRCYHCDAPIAKHNTEYQNPSPNFYGGKNFVCKEGHRGSTALNSARNLGKGFYERFYAGAA

SEQ ID NO: 45118 - protein, 384 aa, unknown
  TnpB Polypeptide
MAFASTKLWNIANWERRQVWEGTGKIPNYYEQEAVLKNNPWHKRLPHHSAQAVLQKLDHSYRSWFKLRKTDQTARPPGFRPKESLSIITFKESAFRVEGDKIRLTIPQKVKEELYYIESFLILPFQSYKSLEGKPKLIEVMYSGEAWFAHIVQEVQAPELLPDTNAMGIDLGIVNMAACVTEEGKAEIIDGGQIASVWRYFNKQIGKIQKRVMGRGKRWSEGLTEISKKRSIQTKHILHAATNRILEYAINENINTIVIGDLKNILKKKNGDSRNFGIANQKLHSWNFNQFTQMLSYKAQRAGISVKKVSERNSSRTCSVCGIVDKKSRMHRGLYRCRHCGTELNADVNGARNILKTYLESVSRPVVAELAQPSVRKWNSQKFC

SEQ ID NO: 45119 - protein, 396 aa, Oscillatoriales sp.
MLVFEFKTYGKSSQFTAVDEAIRTAQFVRNSCLRYWMDNKKVDKYDLNKYCAVLAGDFPFADELNSQARQASAERTWSAISRFYENCKKGIPGKKGYPQFQKDCRSVEYKSTGWKLASDRKSIKFTDKKGIGKLKLKGTRDLHFYQISQIKRVRLVKRADGVYVQFCIDVDRKENIEPSGNTIGLDVGLKEYYTDSNGVMVENPKFLLRSEKVLKRSQRRISRKVKGSKNRGKARQVLGKRHLKISRQRKDHAIKLARCVVQSNDLIAYEDLRIKNMVRNHCLAKSINDASWYQFRIWIEYFGKVFEKVTVAVNPAYTSQECSSCGKVVKKTLSTRTHVCQCGCVMDRDENAARNILSRGLGTVGHTETFALNASNTLGELTSTLIGEILSLQVGS

SEQ ID NO: 45120 - protein, 390 aa, Acidimicrobiaceae sp.
VSSSRTYKFVLQPTSRQLAAFECLLGLQRELYNAALEERRGCWKWNQRSVSYFDQTKELTQLRSARPDVLSFGVTVCRGTLLRLDRAFNGFFRRCKAGEKPGFPRFKGPGSFVSLQWVDRSGWALNQDTGRLRLYGIGHIRVRLHRSIKGIPKTITIRREGRRYWVSVQCVDVPAEPLPKTAKSIGIDLGVGSLVATSDGELIQGPRFGKRGHAGLEKAQRDLATKVPGSKNREKAKQRVAAHHRKIANRRRDFAHQTSRRLVNGHDLIVYEDLKITNMTRRPKPRPDQQGGYEPNGAKAKTGLNRSIHDAGWGQFISMTIYKAESAGREVIAVDPRNTSRTCSGCGHVSAGNRHGAVFRCQSCGHEAHADVNAAGNILRAGRARQLIAA

SEQ ID NO: 45121 - protein, 264 aa, Psychrobacter sp.
LGWIPFKKTAIKHLATRQSGKKSLKSTIQLSLAKGKKLTIDLWDSYNLALYSINTLELVQDNRGHWYACITVKDFPKVKGGDGKVGVDLGCKDAATSSQGDKLTIKQTQKWAKKLTIAQRANHKKRVKAIHAKIKNTRQDLIHKFTTSLIKDNALIVVGKLQSSSFTSSKLAKSVYDAGWFEMKRQLDYKCKYAGCHYIEVNESYTTQTCSCCGSRQNSPKGRADLGIREWICECGVTHDRDINAAKNILAVGLDRLVEGIPSV

SEQ ID NO: 45122 - protein, 371 aa, Frankia sp.
  misc_feature (66)..(66): Xaa can be any naturally occurring amino acid
VVVSRFRLYPDAAEEEALLVHCGHARYVWNLACEQGSWWNPRRGPAPGYVEQNRQLTDARGDNPWXAAGSVIVQQQALRDYTTAMAHFFRGSRRRPSFRRRGRAEGFRIVAVKPADVRRVNGRWSQVRVPKVGWVRFRRSRPVPAARSYRVTQDRVGRWHVAFAAVPDPIPVPDTGGVVGVDRGVAVSAALSTGELLSCPGLRPKETERLRRLQRRFARSRRGSNRRARLRARIARVRTREADRRKDWVEKTSTDLARRFVLIRVEDLRIGAMTRSARGTPAAPGRNVAQKAGLNRGILAQGWGLLVRRVEQKAPGRVERVPAAFTSQRCFACGYVVAGSRESQARFCCVACGYQSNADVNAACNIAEGRR

SEQ ID NO: 45123 - protein, 329 aa, unknown
  TnpB Polypeptide
MNTGKGLSRFALDKDLPKLKAENPWLSEVPSQVLQQSLVDLDKAFTNFFRKTTKFPNFKKKRTDASCRFPQGIKVDFETNIISLPKLGKVKIKLSRKFVGTIKSCTVSRGSTGKFYVSILVDDGVGEIPKLPIHQDRAIGVDVGLIDFITTSKGEKVKAPKFYRGLETKLKEAQRFESRKKKGSNNRKKARQRVNLIHEKIKNLRSDFLHKTSTRLVNENQVICIEDLNVKGMMKNRKLSKSIGDVGWSEFFRMLEYKSEKVGKTVLKINRFQPSSKICSCGEVNKILTLSDRKWTCSNCNLTHDRDVLAAQNILKFAFLENLTRRDTA

SEQ ID NO: 45124 - protein, 394 aa, unknown
  TnpB Polypeptide
MLNRRSIKTRLNLNTTEKIKLSRFGGLSRFIYNWGLERRVEYYREAKKTLSYPAQNLELTKLKKDNLWMGEISKWVGQDALRRLDVAYNNYFKSLKNKLVSKKKKKRKKKKKYTENQIKLRQHVESFPKLKKKRDNSDSFTFPASANLVEVKGDRVKLPKLGWLKTFETIEDKIKGRLLSATVSQEGEFWNISLNYEFEQEPEKHKGESVGIDLGIKTLATLSNGATVENPKFLKNSEKKLKREQRWLSRKKKGSKNFLKQKTKLQRVHRTIRNQRLDNLHKTTSYLTKKFYVICLEDLNIKGMLSNHKLAKHIQDCSFYEFKRQLIYKSELTGSYISLISRWFPSSKLCFSCGVVNDKLTLKDRTWLCDCGIKHDRDLNASRNIEREGLRLLV

SEQ ID NO: 45125 - protein, 386 aa, unknown
  TnpB Polypeptide
MLKAYRYRIFPTKEQQITLSKFFGCSRFVSNWALETKLKFQTEKSDGISRFNLLNLLPALKKEHGFLGDCHSQVLQNGVDRVHVAFGEFLKGKRGCPNWKSKKNPVCSVSFPQSVKLEGKRIKLPKIGSVKIVVHREFEGQIKTVTVSRVASGKYFASILVEDGKELPDTEKVETQSAVGLDFGIKDLCVASDGRTWNYGDNLKEAEKSVIRYQKKLSRKVKGSKNFLKAKTKLARKWEKVANIRNDVLHKISHEVLSENQTVVIEDLAVKNMVKNRKLARAISRQGWSTLRNYLTYKAAFRGKNLLVIDRFEPSSKLCHACGVVNKELKLSQREWTCVCGSKHDRDKNAAVNIRNMGLNKHSLASGIGAAAFRGNVSLASASVSR

SEQ ID NO: 45126 - protein, 396 aa, Micromonospora sp.
VQVRYRYRLNPTLGQRAALAKAFGCARVVFNDGLRLRERARLAGGGYVSNGDVQKTVVTEAKKTPEREWLGEVSSVVLVQAVNDLHRAYRNFFDSLTGRRKGRRVGAPRFRSKRGTQSIRLTRNGFTLRGSGRLYVAKVGDIPVVWSRDLPSQPSSATVMLDAAGRYWVSFVVEVPEAPLPDNGREVGVDLGLTHFAITSDGVKVDNPRWLRIKARHLARAQRALCRKKKGSANRRKAARKTAKLHARVADTRRDWLHKLSTTLIRDNQAVYVEDLAVSGMARTRLAKSVHDAGWSTFVRMLEYKAVLNGRTFGKIDRWHPSTRTCSTCGLLGDKVSLAVRSWTCQCGAAHDRDVNAAKNILTAGRAERLNACGGDVRPLRAVAVAGEAGTHRSAA

SEQ ID NO: 45127 - protein, 399 aa, Kribbella sp.
MSRYRLDPTPAQQAALLAQCGHARYVWNLALEQWSMWTPDKGPTPGYVEQARQLTEARGAFGWLRAGSQTVQQQALRDFDQAVRNFYAGTHRRPTWRRAGVHEGFRIVGSQASRIVKLNRKWAAVNVPKVGRVQFRLSRAVPDAKSYRITRDRVGRWHIAFAAIPEPIPAPGTGEVVGVDRGVTVSAALSTGELLTCTGLSDREQERLKHLQRRLARAHPGSKRRQRVRAAIAKLHARAGDRRKDWVEKTSTDLARRFDVIRVEDLRVAPMTRRPKPKPDPEQPGGYLPNRRRAKAGLNRGILANGWGLLVQRLEHKAAGRVERVNPAYTSQTCSACGHCAPENRENQAVFRCAACGHQANADVNAAVNIAAGRAVSARRETPPVRVSPKREPQLATSA

SEQ ID NO: 45128 - protein, 407 aa, unknown
  TnpB Polypeptide
MVVRGITFRLDAPLPSEAGFLLQDFRVAVNEAIRAGLQSGVTSRYALTKQVYRDLRTNHPGVYSKHLVSVFEVAAGILKNHRRRMHAGKARRIPFVKRLMMKAENQAYILDRKNGVIDLPVRAGLHVRLSLIVSQYHMKYLKDESLRLGSLTILSDRVIIVFRKQTPKPFVPRSVLILDTNERSLDGVLTEAESTVPVVASFPEVAAIQHRHHERRKMLGKKKAYDRRTSGMLCKREGTREHNRVHSRLHLVADSILSFAENERSAIVLEDLAGTRLKTYKVLNRRLSVWPRRKLHQIIEYKAAWRGIPVMKVDPRYSSRKCPICGRIQDSRMGAVFRCECGWKLDRHINASLNLLQTAISKGLEVAGGLRFNPGAFQHDVMMILYDPEKGARSEPNGTSCSRVVTH

SEQ ID NO: 45129 - protein, 554 aa, unknown
  TnpB Polypeptide
MKFNKRKGTVLRMYKTKGPDLLLPIYNILQGELNRILSTPTYVEALSKIEFKYKNEKGEEQSKLNGMLWKEIHEIIGDSLKGKVPDAWYIRILYHNIISLLKSRQEQIKIYEILKSNQYKIDNTLRDKLSQEKLYPTNSYLETLANAKDMSVLPKRKTFILDFSVSDKQMFRVGKNSNIYEIKIHSKKEVKDYNLETGWISFEMYLPTYIRESFTGKTAKPQFYWDHNKEEFVCAIPCEIKKLPNEYENVMGVDLGKIKVYSASVLREDGSISDEYIPTEELQNLVDKLKRMNQHIKSVYEKMKRSSKYGNFTERQIRRKLDYKCSRNKRTKLQFAIARLVAVEVINIAIKEQCKEIHLENLSWVKSSGGKWNFTEVQDCIEEVAELFSIEVVKVSAYNSSKTNPVTLEVGKISNRDVTFKDGQKINRDQLAGLNLALREPKKVKQRKIKTLNVRNSVVIQRQSRRFNNYLMKKSIMPEIKSNRKIHKEFLRVTAASSKPDLIKKEDKKIVMFSHDKAKSNFAIMSVYKSSNFKLEYYFTNNLQFKHIYSNLLQ

SEQ ID NO: 45130 - protein, 396 aa, unknown
  TnpB Polypeptide
LIKTYKFRLYPNGKQNEHMWNHVHACRFIYNWALEEKIKSYEIKKEKLTCFDLNNKLVNLKKSKPWLKEINAQTLQGCVRILDNDFTKFFRKKGEFPKFKTKKGFSKSFPIPQNYKISYEEKKVFLPKIGNVKAIFDRKIEGDLKSSVVFITKTNKWFIGIFVDDGKQIPDTKKPSEESLIGIDVGIRTFATLSNGEKIENPRFLTNNKKRLKVLEKRMKRKKEGSHNREKSYHKYVKLHEKIKNQRNDFLNKVSTKIVSENQAIAVETLDIIGMCTSKKIEDLLTDVSWGKFFRMLEYKCLWNEKPFIKIGRFKPSSKICNNCGSINHKLKLSDVEWICEHCGCFHDRDVNAAINIKKFAIQEQNLVGLRSGLERSGELEDLFEKKRMNQEIHEG

SEQ ID NO: 45131 - protein, 324 aa, unknown
  TnpB Polypeptide
VASVGLVQACNDARKAYRNWFESLAGRRKGRRVGHPRPRRKHGRQSARLTRNGFALHGERLYIAKVGDLRVAWSRSLPSPPSSVTVIREADGRYYASFVVGREVTPLPPCDREVGIDLGLASLIATSGGQLIANPRFLRARERKLVRAQRALSRKQKGSASRAKARHQVAVVHRKVREMRLDHAHKLALRLVRDNQAVYAEDLCVAGLVRTRLARSVCDAGWSQLLRLIEEKAAQYGRTFAKIGRFEPTTQVCSACGVNGGPKPLAIRSWQCQTCGAVHDRDINAAINILAAGRADRLNACGGGVSPGPALAVAGEAGTHRSAA

SEQ ID NO: 45132 - protein, 356 aa, Microcystis sp.
MYKAYKFRLKPNTEQEIALTKSFGCCRWFWNYSLNLCQETYKTTGKGLTRNYIQGLLPSLKKEYEWLTDAYSQCLQVVALNLSQAYQNFFEKRARLPRFKSNKVGLVYCVRHREFAGTIKTVTISKNPDGKYYASILVDDGQSPPDQGEQGGAEGGGIDGKAIGIDLGLTHFCITSNGSKYDNPRHLAKHQRNLKRKQQRLSRKKKGSNNRQKARCKVAKVHSKISRCREDFLHKLSRKIVNENQVIAVENLNVKGMVRNHNLAKAISDCGWGMFSTMLKYKAEWEGKTYIEVDRFFPSSKTCHVCLNQVGSLPIEVRNWTCVHCKTTHDRDINAAINIRDEALRILSLGKARYCL

SEQ ID NO: 45133 - protein, 417 aa, Paraburkholderia sp.
MPTGEQVRRMRQFAGACRFVYNRALAFQKENHAAGQKFVGYVGMAKHLTQWRNSTDTPWLKDGPVHTQQHAPKHLEVAFRNFFEGRASFPQFKRKGAGDSFLFPDKNQISVDAGNGRIKVPKLGWLRYRKSRDVPGEVRSATVSLRAGKWHVSILTKREAGQPVPRGPAIGIDVGVARFATMSDGSFIAPLASFRKHEQRLAKYQRRMARKVRGSSNWKKAKGIQRIHARIANARSDFLHKASTTISKNHAMVAVEDLKISNMSRSAKGTAEAPGRNVRAKSGLNRSILDQGWGEFRRQLEYKTAWRGGFFVAVDPKNTSRTCPCCGHVSKDNRRTQALFACVSCGHQANADHVGALNVLAAGHAAIACGGMARSGHPAKQEPTEGAVEPVGIPVLRARRMSTTTTWPEPPRRKCRR

SEQ ID NO: 45134 - protein, 380 aa, Nocardia sp.
MGSKVVKRAYKYRFYPTIEQEQYLARTFGCVRYVYNRALAERSRAWSHEQRRISYAESDKMLTAWKRDPETAWLTEPSKGPLQATLRHLQGAFDAFWRKHASYPKFKKKGRSKDSATYFSNCFSYRDGRLTLAKQSDPLNIQWSRPLPDRTRPSQVTVSKDAAGRYHISILVEDAITEHAPTDATVGVDAGITSLYTFSTGEKVSNPRHEKRDRARLAKAQRVVAKKEKGSKNRAKARLRVARVYARIADRRRDHLHKLSTRLVRENQVIAIEDLSVRNMVRNRSLARAISDASWSQFRAMLEYKADWYGRTVIAVDRFYPSSKTCSVCGRIADSLPLHKREWVCLCGAVHDRDINAAENILAAGLAVLACGDGVRPSRS

SEQ ID NO: 45135 - protein, 366 aa, Micromonospora sp.
VKRAYKYRFYPSPEQTEQLNRTFGCVRLVYNRALAARTRAWANDRQRTSYVQSSAWLTEWKRTDDLAFLNEVSSVPLQQTLRHLQSAFAAFWDKRARYPRFKSKRKSRASAEYTRSAFRWRDGQLTLAKMHAPLAVVWSRPLPEGANPSTVTVSRDTAGRWFVSLLVEDPTVVPLPPSSSVVGVDAGLTSLVTLSTGDKVTNPRHERVERRKLAIAQRDLSRKEKGSANRAKARVKVARIHARIADRRRDHLHKLSTRLIRENQTVMIEDLSVRNILRNHRLARAISDAAWSELRNMLEYKAAWYGRTVIAVDRFYPSSKTCSACGRINTKLTLGVRVWTCPSCGTTYDRDVNAANNILAAGLAER

SEQ ID NO: 45136 - protein, 238 aa, Nodularia sp.
MLTQMIVLEFKLRGKTTQYAAIDEAIRTAQFVRNKAIRFWMDNKGVGQKELYRLSKAIRQEFSFANCLNSSACQAAIERAYSSISRFYDNCKKGIPGKKGYPKFQKNNRSVEYKTSGWKLSETRKQITFTDKKGIGKLKLKGTWDLNFYPIEQVKRVRLVRRADGYYTQFLISVENKVETDPTGKIIGLDMGLKEFYTDSNGHSEPNPRFYRTGEKRLKFYQRRVSRKRKALLTGKSH

SEQ ID NO: 45137 - protein, 308 aa, Crocosphaera sp.
VYPQPYIKKGAIQFSVSNQFRKNYREGTGKAFKAFKFSIPHILKGKKIHEFRIIPKYNGRYFLAQFVYEIKEERVENLDKAQCLSLDLGLNNLVAAIDTNGSSFLVDGRKLKSRNQWYNKQLSKLQSLKDLHGIKRLTNKMAKLILKRTNQVNDYLKKTARLVINYCLEHKLGTLIVGVNEGWKTSINIGQVNNQNFVQIPFHALRQQLAYLCKRSGINYIEQEESYTSLASALDLDNLPEYNADNPQTYEFSGKRIKRGLYRTKDKKLVNSDINGSANIGRKSKADLFEKREVLEGLLDAPMRYFIV

SEQ ID NO: 45138 - protein, 440 aa, Haloterrigena sp.
MEQILSLTFQLAVEEGEELLKPATLEARRLRNEITRLHYEGWNWSDIEDAVIGKADLVNNTCQQILDKAHQELDNYYEADDQDWGAPSPIIHRPYAVKMNHGEGYRITEDNGEHRFRISTKPYNHVKGVLKGSPDHHDLLTTALNNPAWRVGTAELLQHRGEWELHVTVTNTAADVRSPAESNTVVGVDINEDCVALAAMNREDGDMIDSLVLDYPDIKRRRHEYFTKRKRMQKAGQTAFETVVQQEERDFVHDQLHKVSRDVVRWVSQFENPVIVFEDLKDMRDGLDYGTRMNRRLHSLPFRKLRRLVTYKAARDGVPSVDVDPEYTSQRCPRTTCLHVERGNRRGKRFKCKRCEFQDHADRKAAVCVCQEWFTTTDENVPSLNTLPRVWKVRRTASGLGEGADSHGHVLCSGVTDRGGRRDPVGGAREELNSVAPGSG

SEQ ID NO: 45139 - protein, 181 aa, Haloterrigena sp.
MRNLTWQFTVQSLFPHDVLHGGSLLVELPIWKRGSTTPGRELRTPPVPPSNKPHVTFRIEETEKFITYKAAFQGVPSDEINPEYTSQACSLTECEQTTRANRNKKRFKCVDCGRQDHADRNAAINIAKKGLAKLERHVPALKTLPDVRKLRRQASGCVNQPTVTHDTARGHHADGVAGVSD

SEQ ID NO: 45140 - protein, 422 aa, Haloterrigena sp.
MVDDAPRRTVPIKLNMPSDCEADFHHTKDQFLNCANQTSDWAWRYDDYCITSKAKAEKALYDDLKAEHDLTANLVQKGIRRAIEAVDAGVEKLKKGEKTSQPVFDSWSVVYDKRSATFNADHATLSTVNGRVKVDYVLPREDEREETPFGRYYESDEWDASSATLQYDEHSEDFYLHVTLKNPNYKVDGIERQEATSREEGIENGVVLGVDLNVTGAFAVTSTGKFIGSADYLTHKRSEFEKRRGRLQQTGTRSSHLTIQRIGSRFSDWSLDWLHNRVNELLEEAERVTADGVIFENLKHIRENIANGSKFQQWAYAKFVEIAEYKVEDRDLFVDFVSPAYTSQRCSCCGFTHEDNRDDKTFACQKCGYEVNADYNAAKNIAVRYCGYIHRGQKSRGGWAGCQSALKSGTLTVNGEFNASAV

SEQ ID NO: 45141 - protein, 424 aa, Haloterrigena sp.
MTDAQALVKTLDFQLDIQSDNESLLRDATLESRSVYNETIRLAKQGVDWNVIPDRVADDADLVKNTTQRVVSKALGAMENYYEYDDFGQPSHTKDGAYPLRANYEEGYNLSLTDDGDVAFRISSKPYKHVKGVLEGDDAHLDILKTALTSDEWKIGTAKALFHDDTAELHINVTNTEKTVRDKQDSRTVVGVDVNENNVALAALSEDGVEDTLVIDFPEVKFERHRYFTMRKRVQNAGKDSIHDTLEGREERFVRDRLHKVSRHIVEWSQRFEEPCIVFEDLKEMRDSIDYGTRMNRRLHHLPFRALQFYTSYKASFEGIPTAWINPEYTSQRCPMCGHTERANRNKKRFKCRSCSHQDHSDRGASVNIAVKGVKKLNWNVPALNSLPQVRKVRRQASGAVDAPTVTHDTATGHLVDGVVGVSD

SEQ ID NO: 45142 - protein, 312 aa, Streptomyces sp.
MATHVKRAYRYRFYPTGAQAVELSRTFGCVRKVYNMALAARTEAWTLRQERVSYNATSAMLTAWRKTGELAFLNDVSSVPLQQALRHLRAAFTAFFAQRSKYPLFTSRKRSRKSAEYTSSAFRFREGKLTLAKMDQPLDVARVYARIADRRRDHLHKLTTRLVRENQTLVIEDLAVRNMLSNGKLSRAISDAAWSQFRSMPEYKAAWYGREVIAVDRWFPSSKLCSVCGTLQGKMPLGVRTWTCDCGTTHDRDVNAARNPLAAGLAVSACGAGVRPQRESSRTGQSVTKQEALRREPQESPSFRLREGGSQR

SEQ ID NO: 45143 - protein, 491 aa, Lactobacillus sp.
MKEIMAHLATLVDTYYIYGNTKLENLLKWSNNCYNEANYLYRQRHFKNMRQYKYDLHLYKVGKLKEKPKYGKDYTATELTRLLKKQSLEGQNTLYRNCINIKISNSVVKDVRRNWSNYYKSLSDYKKHPYKYLGKPKFPKYLRKGKRHSTELDTQTIKLKGNYLVYDKADLKVRISPYLQQALDDTKQSNDEWLDQLTRRQRIRTYWLKPIVGGVKLCVTYVVSQKKLDKYKGKDVPQRKAGIVVAGDPGVDNLMTLATNNWQVNPLIINGKGIKSVNHFYNKRKAKLQELATKYKQKGVIIHKKDGTTQVVYHTGRAYSRLTQWRNQKILSAIHKATDRIIAYAISCGAERIIIGRNKYWKQRSNMSKKNNQNFIGIPHYRVVQILTYKANRYGIEVVSQPESYTSQTSFLDNEKPCWNNGNSSRKKQGKSPINRRIKRGLFRSNEGYLINADVNGALQIMTKNKVFCDRSNSQQIIGCVLHPRKWSPHF

SEQ ID NO: 45144 - protein, 412 aa, Tolypothrix sp.
MIVREAKLKNGTKEQYLALDEAIRTTQFIRNKAVRFWMDNKGVSKAILYNLCKDLAAEFPFAKKLNSAARQASAERAWAAISTFYSRCKKGSGKKGYPKFKKHCRSVEYKVSGWKLSSDCKSITFTDGFEAGTFSIFCNNETQEDLHRLKINRVRVIRKADGYYAQFCFDADRKETGKYTGNVVGLDLGLKFFTKDQHDNAVIYPQFLRSSEKRLKKAQRRLSKKFVKGAKPQSKNYHRQRKRLGKIHLKIQRQRQDWAIKQARCVVHSNDVVVYEDLKIANMVKNHQLAKSISDAGWYQFTQWLDYYGKIWDKAVVAVSPNYTSQDCSNCGHRVKKSLSTRTHSCPKCKIELCRDTNAALNILQKGMKILGTEWQLNGTSGQEESASCEGKHGEKTASTIEGKLDIASGLL

SEQ ID NO: 45145 - protein, 369 aa, unknown
  TnpB Polypeptide
MLKAYKYRLYPNKEQEILIQKTFGCCRFVYNQTLAHRKEMYEDKKESMSKIDCNNWKNKTLKVNYEWLKEVDKFALDNAIINMDAAYQKFFKEHAGYPKFKSKRDNRKLYKTNYTNGNIEVYFEKNKIKLPKLKWVKAKIHREFIGKIKSAAISQVPSGKYFVSVLVETEQIPMKYTDSKVGIDLGIKDLLITSDGEKIDNLKITKKYEKKLAKEQRRLSHKAKGSKNRNKQRIKVARIHEKIHNTRIDHLHKISHQLISENQVIVSEDLAVSNMVKNHNLAKAISDCGWYELTRQLTYKAEWNGRTYIKIGRYVPSSQTCNICGYVNKDTKNLSVREWICHECGTKHDRDINAAINILNEGLRMLKTA

SEQ ID NO: 45146 - protein, 529 aa, unknown
  TnpB Polypeptide
MAKARRRKESSFEPEQTKSVFLFGHPNKEKLAVLQRMQATFVMLANSDIQKLSKEPEIFLQLVLNDKKGMRPLEKSMRLPDVNSAFCQNAFDVAVTHLSNYLDTIRLDLYAQEQTIFTQSKILFGHSIMGDSVELMINHLKELNSGKSANSFYTECICKLETMSPDEFRFQMKELQDQYQAARLEYRLPTVRNVSVPLDSRLMKLEESHDIKAPYAITITNAFEKNCRFCVPIDTSRHSLHKIRSNKMAGTVVYLIKDGVLRIGWSYKKHLKQPKTSEIIGVDVGISDTLHTSDHHAIGSMKDVIDFYHKEVETAFAELSKLRNKKRSIHHYLHKHDLPEDVGRSLIQKMDRLEQMIQTMEAPYRKKRHYCALLDQEIKTSVSAYLYEISEETLTVLEKLDMKEFKKSRRVNGMFSVFARGKLQEKLIRELNWHGYDFMEVVPDYTSQVCPVCSHLQAENRNGKEFHCLCCGYTEDADYVGSQNIRNRATDQEVLAACDTYKYNHRALQKHLKLIYRSRNEQYLQSRTI

SEQ ID NO: 45147 - protein, 345 aa, unknown
  TnpB Polypeptide
VALCRRYYAIYGKYPGKKVLMRHLTKLKRLPRFAHWNQLPSQSLQDVIDRLDKAYSKLFTDRKSGKRSGRPRFKRRKLYKSYTLKQAGWKLLQDNYIRIGKRIYRYFKSREVLGMPRRCTIKRDSVGDVWLIILTDYVDTDLESPTTGNNAGFDFGLKRYLTGSDFNDYDSPQFFKRGLNTIKRANRNHSRKVKGSKNRERARINLARKHRKIANQRQDFHYELAHDLTDRYDWISLETLNLKGMKSLWGRKVSDLGFYDFVQKLNYIHSKKQNREVRFIDKWYPSSRTCHVCGAINQELNLRDRTWRCPSCHTKLDRDRNAALNIHRVGASTLSEEVVSPSSPG

SEQ ID NO: 45148 - protein, 722 aa, Halobacteriales sp.
MAAQSEEERTRTNTFHLAPRENWKRVCLIELLDSAAALVNIVTYHRRQAYFAPERTRNDIWNAVTRTEIRNRFQPVLGRAITDKLLDKCDETWDAFFAQLDDYYDGDREDRPGVPSYWKEDGNRVLKAVVRNDAYTVKWGKRSRIELALGSELKEKYGIPLNQRIRVPIRGNPQYEGHGGRLELVYDRDAESFTAHQPVTFLHDTTRVTPSSDGDAVAAVDVGANNFVAVTTTNGHQRVFHARPLFDRFHDYTERIADLQSQLSSDEYSSRLIEQLYDKRRRHRNHAQDALVRHLAGLFAEWGVGTVYVGKLDDVRETHWSAQVNEKTDLFWAHGRFRRRMQTVLADECGIVVRERSEAGTSSRCSRCGESDHVGRSGDVFQCGSCGFEGHSDVVGSENFLQDMIDDHVDIAGPMARPANTGVTRPKRSPQTGVPERGILPPGYRHSRITHGGIPPLQGWEEVNPEPRTHALCPPGRTTGMSLEADLERARGLSVGELADAIETVGFECTRCGACCKAVEGDDGREPHTATVFPDEVRDLQDAGDEPYDWRDVARPMPYGLAEGDDGPEGETFEWALQTDACGDCTFYRERESRSDSEGTCGDEPKDDDGTGVCTVHDDRPLICRTYPFSVVLDGETAAARPTGEAVDREGPVRAHECEGLGRDIAREDAEELAAALKERAVRELEEAIAVREGYEPTDAEGVVVHDSEGQKRPDGTPLDGR

SEQ ID NO: 45149 - protein, 419 aa, unknown
  TnpB Polypeptide
MLKAIKIRLYPNKTQEEYIGKLLGSYRYVYNNCLDKKIKSYEKDKSSESLTTLGKYLHNVLLKDEDIKWLKEHNTKVLKQSIINMLEAYKHFFKSGSGYPKFKSKHDSKLSCRFPLEAISNRNDYSTNKLTITSNIKEIKFKCSKDYKDILVMYKSGIKSGTLSKTKSGKYFLSMLMEIPNTKQLKKTNNIVGIDLGIKDFVITSDGEIFDNIKIKRNNQYKLSKLHGELSRKKKGSNNRNKSKIKLVKLYEKLNNKKENYLHYVSNSLLNENQVIVMEDLNVKGMMKNHCLARSIQELSLNKFKEIIKYKAEWYNRDVIEVDRFFPSSKNCNNCGNKKNDLKLSDRIYKCVPCGYENDRDLNAALNILDEGLRIMNNKMDESLDSHIKIPTRSGELTPLESSGYTLGELGNKNLVNFS

SEQ ID NO: 45150 - protein, 453 aa, unknown
  TnpB Polypeptide
MQHIITAKLKLLTTPEQFALLRETQLAYRDALNAVSVYAFEHGKTSSADKLQKGMYAEIRMSYKLPAQMACNVPRQVGATYKGLWTKLKQNVEHWRSKRTKKRFKGLDKPPKYVSPTLTYNYGRDYGFKAEQRVSVLTLHGRIILDYKGYAPHVALIQQGATIGAAKLWYDKPHKQFYVLVALELEVAEPTPMMQQQVVGVDVGQRYLAATATLSGESQFFSGKAVRAKADHYARTRKRLQQKGTRSATRRMMALSKRERRFKLNTNHVIAKQIVTTHTHTLIGLEDLTGIRERTKRRKRRKKGTQVHSLTSKQRRANRHASKWAFAELHGILTYKAALSGSSFVVKVDADYTSKACPLCGYTDKRNRPGNGLIFVCQNGMCPYHVRTGHAYHLHADLVGARNIAMRTLLIRQDWVRTGQLSVVPDVSDHEAKAARLSRYAELRWSPDANFLL

SEQ ID NO: 45151 - protein, 473 aa, unknown
  TnpB Polypeptide
MDIYNIGGVKMSTIIKTVKQYSYELDEEMLKELLFIANQYKNVKNYVYSRYSGINSILLLSKDRKIRDEWIKTKFYEQWKLPARYWKLALSEAFSNIKTNWSNTKNKVKDQVNRNSNLSNEDRHYINYILKFDNYYFKVLTNKELKTPKIFEDKNLNYKYLNNLIKRYTRRYKEKIPYAKTGRTFSIDTGLYSYTADGINITSTTKGKRLSIKLSDKNRYDHTMKVKIVAEKIQIHCPLRVKTKTNQNENILGIDKGYKYLFATSSEKLYGENLNQYLSKETERLTKVNSNRNKLYAKYLMHLENGNYEKAKLIKENNLGKKKYSKAKHRHDENVKSYINCCLNNLLEQEKPKEIVMEQLDFVSWDDRFPKSVKRKLSRWIKGYIRKRLEYKCSLNNIKCNYINPAYTSKVCNICGCFGTRNGDTFTCPKCGKLHSDINASKNILNRKTDKEISLYTPYKKVKEILLNREKIS

SEQ ID NO: 45152 - protein, 372 aa, Spirosoma sp.
VKLTAKIKLLPNPEQAQTLLATLMRANEACNFVSEGAWGTKQFKQFGLHKLVYYSTKERFELSAQVVVRCIAKVVDAYKLDKKVQRVFRPTGAIVYDSRILSFKPTKKTISIWTLGGRETIPYVGGQHHEDLLQYQKGEADLFYRKGSFYLLATCEIPDEETSEINGMLGIDMGIVNLATDSEGEVFSGAGVEVTRQWYQKRRAVLQSVSTRSAKRRLKKLSGKQAKFQANSNHCISKSIVLKAKAQGLAIAIEDLSGISMNVRKEKKRLRQTQRGKHSNWSYYQLRSFLEYKSVLYGVTLITIDPAYTSRTCSQCGHCEKANRKSQAEFKCKSCGHSALADENASQNIKKLGLRQVAYGAELSGSGASPLL

SEQ ID NO: 45153 - protein, 373 aa, Spirosoma sp.
MKVRYTFRAYPTDSQTQELSRVFGHSRFVYNWSLRLRTDAWANGEKVNYNQSSAALTALKKTPEHAWLNEVSCVPLQQGLRNLQTAFGNFFAGRAKYPRFKSRRDKQSAEYTTSAFKYENGVLSLAKLGKLKIKWSRPFTSQPTTVTISKTPSGRYYVSLVLDEVPLSYPKTGESIGVDLGISRLATLSNGERIPNLRFTRTYEKRLAKAQKSLSRKTKGSGRWNRQRAKVARVHEKIADARKDHLNKVTTDLVKRFDVIAVEDLNVRGMVRNHKLAKHLSDASFGRFVSMLEYKAIWRGKQVVKVDRFFPSSKRCSCCGYVSQKMALNIREWECPACHTKHDRDENAAVNIRNFALGQSVNAHGADVRPSVA

SEQ ID NO: 45154 - protein, 397 aa, Streptomyces sp.
MSRYRLCPTPEQVEILRRHCAHARFVWNLAVEQHSWWTPRRGPAPGYVAQARQLTEARAVNPWLAGGSQTVQQQALRDFAQAMAHFFAGRHRRPSYRKAGCHEGFRIVAVKPSDVRRLSRSTGEVRVPKVGWVRFRWSRAVPGGIKSYRVTCDRAGRWHVAFAAVPDAIPAPGNGAVVGVDRGVAVSAALSTGELLHAPRLRESEGRRLLLLQRRLARCQRGSNRGRRVRSTLARLKAREADRRRDWVEKTTTRLAAGFDVIGIEALDVRGMTASAKGTVEAPGSRVRQKAGLNRGILRSAWGAFAARLEDKAPGRVIRVDPAYTSQCCSACGIVDREARESQAVFRCRACGHTDNADVNAARNVKTAAGRAVAAREGPCASGPVHREPQSDLLLSA

SEQ ID NO: 45155 - protein, 357 aa, Acinetobacter sp.
MKTLKLRIKDKHCKLLTQLATEVNFVWNYVNALCFKHLQRTGQFFSAFDIAQYTKGASKECGLHSQTIQAVTEEYVTRRKQFKKSKLRWRVSNPKSSRKSLGWVPFKKSAIKYQNGQIKYGNQWFSLWDSYGLSRYQVRTGSFVQDARGRWYACLVVDSEKTQSTATQDIGIDLGLKDVATCSDGVLVENPKYYRQYQKKLGIAQRARNKKRVRAIHAKIRNSRLNHLHTESSKLVENNIFIVVGKLSAAKLVKTKMAKSVLDTGFAAFKTMLKYKCENATCAAVLLMFEEVNESYTTQICSHCKRISSSSPKGRTDLGIREWQCIECGTLHDRDINAAKNILALRHERLAGGISVL

SEQ ID NO: 45156 - protein, 347 aa, unknown
  TnpB Polypeptide
VVNFFIEYFWSDLDNIPSKSKLLKPIVDLPLNITWLSARLRKVAAREAIDMVLSTKERWKNKPKKMVKPQHKGNRMYVSCTIADLIPSKSSTSYDAWLHLASIGNKMILDLPIKYHKHFNKYNELGKRLNSYIITKDYVQLSFEIETGGKKEGLKCVGVDTGINALASTSSTNQYGQDIKDCIDRVKRCKQGSNGQKQARRALKQRIDEIVIELFNKENPDLIVVERLKNMGNKSKVKRLLTKNIRRSIGIWNWKYWLKRLEEHCELNRVSFRSVSPYYTSQTCPRCNHVDRGNRNGEIFMCLKCGYTNNADINAGINILNRFLTGVYGVRYKQANLIGFPSFSKFN

SEQ ID NO: 45157 - protein, 392 aa, unknown
  TnpB Polypeptide
MIVYEFKLKGKEFQFRIVDEIIRTAQFVRNMALRYWVDNRNIKLYDLNKYCAVLAKQFEWAKKLNSQARQASAERVAFAIQRFFANCKANKPGKKGYPQFQKNNRSVEYKTTGWKLAEDRKHITLTDGFGAGEFKLIGTWDLHFYQTEQIKRVRVIRRADGYYAQFCIDAERRIESVPVKHNVGIDVGLTDFYTDSDGNKVDNPRHLRKSEKALKRHQRRVSKKKKGSINRKKAIKRLARKHLKVSRQRQDFAVKLARCVVHSNDVVAYEDLRVQNMVKNRRLAKSISDAGWSQFFEWLQYFGLVFGKIVIAVPPHYTSQECSQCGKIVKKALSERTHVCQCGCILDRDENAAINILAKGLKQYPGALENLNASGQTNLCLASESLLSKLTG

SEQ ID NO: 45158 - protein, 380 aa, Bacterium sp.
MNTYKAYKLRIYLTDLQRELIEKTFGCTRYIYNNFLAERKNKYEESKTKVHVYEQLKKLTDLKREKEWLREIDSCALQASVYNLDNAFQGFFHGKGYPKFRAKGVHESFRTNNTLSTYKNKKYETIRIDFNKRIITLPKLKGVKFRGYRTTKEMVGKIKSATISKDANKYFVSVLVEVPFIKPIINPTSVIGLDFGIKDFIVTSNGEKLKNEVRVNEKRLKGLQKGLARCKPGSKNRYKMKLKIQRLYLKIKNARKHMIFKLANKILKESDIVAVETLDVKSMYQVHSIAKHLNKVPIGDFLSVLKYKADWLGKKVININKYFPSSQCCNRCDYKNEEVKDLSVRKWICPKCGFEHDRDINASVNIMFEGLKIYMKESII

SEQ ID NO: 45159 - protein, 401 aa, unknown
  TnpB Polypeptide
MERVYTYKFRLYPNREQQVYLANVFGCCRLVYNHFLDEKKNQYNESKTSDSYNVQQSKLTLLRKTEGFEFLNAVPLQSLQCSLRNMHTAYENFYKHRSSYPKFKNRRDKQSFKLPQEQCFKIKDGKLYIPKLKSGIDIVMERVVVGKICFATISKNKAGRYHITITVKQDYEPCKKTNRSAGLDIGIKDFVITSDGVKYKNHRSIIRALKRKLKHNQRHLSRKIHGSKRYENQVLKCNRIYQKITDVKTDYIHKITNELVRNYDVIKVEDLNIRGMMRNHKLSEAISECNWYQFIQTLEYKCLWNDKTLIKIDRFYPSSQMCSDCGYVEKRVKNLNVREWTCCNCGCHHDRDINAARNILKYDSARSAENSRGVVCKPFARPKKTGERTDNCEATIELLQE

SEQ ID NO: 45160 - protein, 463 aa, unknown
  TnpB Polypeptide
MITLKLKYEASDEAKAFIRECRRQYSSALRFAYNRVIGGWNGKRIRDAIKFELNNVGLMDSYMASCAEQEASAIFKSIKSSDNPDAKYIFGGRGNFIRRCKGLITKEAFDDKRLSPLLVVGEANCFANRKFRINNDFQSITFQINKNSHYTLNLIGIYGKRRRTLEKLYELQCAKATPITYKLDSEYVYLSFDETQVEHYRRDNAIQNRVMAIDMNPNYIGWSVVDWKGEADYNVIRQGVFSVKPINDIAQQLSKSKTDSSDPKKIYVADKRLHEAYEVSKKLIRICLHYRCEMFATEDLDIRGKDCGHGKKYNRLVNNNWCRNSLELNLQKRCNIFDIKFLKVKPNYSSFVGNFVFRHLNLPDMVLASIEIGRRGYEFNQQYIEKKKDIKRNIVFPDYEAYRASISKSLEEFGLDDGTSLLEAYDALKKSGVRYRLSFDRCGTRFSRCFSKASLILKSLNGF

SEQ ID NO: 45161 - protein, 466 aa, unknown
  TnpB Polypeptide
MDNAKHKNINNMWTQVQMCPKAIIKTFGGFHPQRLSALYAERTVLRFLLDEMLRALKIRLYPNKEQQTKINKVLGCYRFVYNQCLERKMKAYKDECTSLGLTDLSKWFHGVLIKDERYAWLKQQNTKVMKQSIRQMLTAYTNFFKLHRGFPKFKSKHDTVLSALFPIEAISSRNTFDDRKITLTKDLKDIRFRCSKLYYARLKAYKDNIRSATLSRTKTGKYFLSILMDIPDDELIRFKRTGNSVGIDLGVKDFVITSDGEVFENRHFLKKTEHRIKVLQKQLYRKVKGSNNRMKQRIRLATAYERLANQREAYIHYVVNSLLKDYDTVFMEDLNVRGMLKNHRLAKAIAEVGLYRFRSILTDKAMVNGKQVVFVDRFYPSSKTCSVCEYIKRDLTLADREWTCPECGTHHDRDVNASINILNEGKRIIGSRTAEFKPVDCPTMDDRSAMNLKSSGRAKQERETDE

SEQ ID NO: 45162 - protein, 463 aa, unknown
  TnpB Polypeptide
MITLKLKYEASDEAKAFIRECRRQYSSALRFAYNRAIDGWNGKQIRDAIKFELNNVGLMDSYMAACVEQDATSKCKSVKESDNPDAKYIFGGRKNFIRRCKGLITKEAFDDKRLSPLLVVGEANLKANRKFAINEDLRSILFKINKNSHYQLNLIGVYGKRKQILSKLYELQCAKATPITYKLDSEYVYLSFDETKVEHYKRDNAIKNRVMAIDMNPNYIGWSIVDWKGENEFSIVKQGVFSIKQINDIAQQLSKSKTDSSDPKKTYIENKRVHETYEVSKKLIRICLHYRCEMFAIEDLDIRGKDSGRGHGYNRLVNNNWCRNSLELNLQKRCNIFDIKFLKVKPNYSSFVGNFVFRRLNLPDMVLASIEIGRRGYEYNLQYIEKKKDIKRNIMFPDSEAYRASISKSLEEFGLDDGVSLLEAYDALKKSGTRYRLSFDQCGTRFSRCFSKASLILKSLNGF

SEQ ID NO: 45163 - protein, 414 aa, unknown
  TnpB Polypeptide
MMLRALKIRLYPNGEQQTKMNKVLGCYRFVYNQCLERKISAYKDEGASLGLTDLSKWFHGTLLKDDNYIWLREQNTKVMKQAIRQMLTAYTNFFKLHRGFPKFKSKHDTILSALFPLEAISSRNTFDDRKITLTKDLSNIRFRCSKLYHNRLKAYKGNIRIATLSRTKTGKYFLFVLMDIPDDELIRFRKTGNAVGIDLGVKDFVITSDGEVFENRHFFNRTEHRIKVLQKQLCRKVKGSNNRMKQRIRLATAYERLANQREAYIHYVVNSLLKDYDTICMEDLNVRGMLRNHKLAKAIAEVGLYRFRTVLTDKAVLNGKSVVFVDRFYPSSKTCSVCGYVKKDLTLKDREWTCPECGTHHDRDVNASVNILNEGKRIIGSRTAEYKPVDCPTMDDRSAMNLKSSGRAKQEGDA

SEQ ID NO: 45164 - protein, 244 aa, unknown
  TnpB Polypeptide
MVGWYVSIVIEDASVPSSIPIDTVKTAVGIDVGLKEFLVDSEGQAVPIQQYYRKAQAKLALAQRRLAHKIKGSANYQKLANHIACLHQHVARVRKDFHYQIAYKLCKTYDLIGLEDLNIKGLAKTRLAKSILDAAWGSFAQILGAVAVKCGNWIVKVNPYGTSQRCSGCDKNVPKALSVRTHECPHCGTLLDRDHNAAINIKNLALNTVGLTVSACGDFEVTRSVNQELSTAKKRSSRYTARLA

SEQ ID NO: 45165 - protein, 474 aa, unknown
  TnpB Polypeptide
VSHGAVRVRLDVTDVQAGMLLRAAGARRFAWNWAVAKIKANADQWAAEATYGIERDDRVRPLSFFTLAKLWTHEKPTAAPWAGEHSTWTFRYALRDAANAHQAFLTGKRRFPRFKARHRDRARFTVRDGLALECGRVRLAKYGWVRIAAACPQQAKLRRLLRRGHAVLQHITVTRHSDGHWYATVNYERQARTPAKHVAPVGPVVGVDRGVKTAAVVATADGRVIAQSPASRALRDRLRQVKHLQRTVSRSQKGSANRRRAVARLGRAHATAAAVRADALNAFTAALARAHGVVVVEDLATANLMANRSLAAAIGDQGWGELARQLGYKTARHGGRLIVADRWFASSKTCSACGAVRPKLTLAERTYRCGNDACGHVADRDVNAAANLAAWGEHTLGLCPCVTRAGDRHPGGPSAEPVRHACGGWVSATVGQVAAVPPDEAGTSQPRLDVAQALDAPDRGAHDGAMASAISPQS

SEQ ID NO: 45166 - protein, 417 aa, Xanthomonas sp.
VSGASKNFIHYDIIRTNVPVWTEVKVMLVNKAYKFRIYPNKKQIELINKTIGCSRFVFNFFLGKQKEKDAYWYIAEEMKQNGQLPTNNWKGEYFNKYETVKSLPELKKHYEFLKEVDSIALQKSVENLADSYGRYYKRQNKQPRFKSKKNPVQSYTTKHTNGNICVVNRHIKLPKLGNVRFAKSREVEGRIISATIRRNPSGKYFVSLATETEVTELPKTNSVVGIDVGIKDFATLSTGTIYPNPQFFRTLEEKIAKAQQIMSRRTIGGANWYKAKIKVARIHEKITNARKDYLDKISTDIVKNHDIIGREDLSVSNMLKNPNLSKAISEVSWAYFNSMIEYKAKWYGKHVVTVAKNFASSQLCSNCGHKNKDVKNLALRGWSCPSCGSIHQRDINASINLKKEALRLLTVGTTGIA

SEQ ID NO: 45167 - protein, 462 aa, Mycobacterium sp.
  misc_feature (436)..(436): Xaa can be any naturally occurring amino acid
MARLKVPEGWCVQAFRFTLNPTQTQAASLARHFGARRKAFNWTVTALKADIKAWRADGTESAKPSLRVLRKRWNTVKDQVCVNAQTGQVWWPECSKEAYADGIAGAVDAYWNWQSCRAGKRAGKTVGVPRFKKKGRDADRVCFTTGAMRVEPDRRHLTLPVIGTIRTYENTRRVERLIAKGRARVLAITVRRNGTRLDASVRVLVQRPQQRRVALPDSRVGVDVGVRRLATVADAEGTVLEQVPNPRPLDAALRGLRRVSRARSRCTKGSRRYCERTTELSRLHRRVNDVRTHHLHVLTTRLAKTHGRIVVEGLDAAGMLRQKGLPGARARRRALSDAALATPRRHLSYKTGWYGSSLVVADRWFPSSKTCHACRHVQDIGWDEKWQCDGCSITHQSDDNAAINLARYEEPPSVVGPVGAAVKRGADRKTGPGPAXRPGGREARKATGHPAGEQPRDGVQVK

SEQ ID NO: 45168 - protein, 419 aa, unknown
  TnpB Polypeptide
VRKCIVLNNLELTRNKSNIFNSFFSEYLKVLDQHCLDLPLALSATHLHHLTYSNIRQTSFLPSDIVQEARKDIWKSRKDILSKGCKFTKCSIRLNKRWFKFIETERGNPCFKVTYSPKKTFVLPVKTDKQFQRFQMFLKDGWSFDNISLLMDGRISVVLEKEFAKKTIDQKYVVGVDIGSSTLAAVSVFDIENSKVVKQLYFGRDVAFRQRKYTKRRDYLKSLADKGSDRAKKSLRRLKHKQFNFVKTRSGQIAKEIINLAKSYNAYISVEKLKNLKGRRGQFNKKANKKINIIPYGKFTEFLKSNSEMFQVPVHEVDPYHTSKWCYKCGEINNGHSSVNYVLYKCRKCGQVVNSDRKASLAIAIKSVLERNITHSLTNLSSIQGSKTGAKVNLLFRPDAVGFKIAVQHFESPMESLRF

SEQ ID NO: 45169 - protein, 273 aa, unknown
  TnpB Polypeptide
MICLAHKIELKPKNKQKTYFKKACGVSRFAWNWGLAAWEKSYQENKNLPKEERSPINGMALKKEFNKIKKEQFPWTFEVTKYASQQPFIHLNTAYGRFFKGISGKPKFKKRNKSVDSFYVGGDQIKIQNKKIRVPNLGLVRLKELPRFEGPIRSATFSRKADRWFVSLQIDTIISPKSPSKEAVGVDLGINSLVHTSDGVSIPSPKPLRKGLRALRRASRRLSHKQKGSKAWGKQMLKVQKIHMRISNIRKDTLQGESDFFKNANNFVVLIGD

SEQ ID NO: 45170 - protein, 406 aa, unknown
  TnpB Polypeptide
MDKVIYRGYKFKIIPTKEQKEFFLQSFGCARKIYNHYVDELYNQLEKSCYENGLIKRENIKISNYTEFKRNYDYMKNVDAQCLASAKIDFNNAITKFNKEYDKKTYTKKSRNREKTLGIKPTFKDLKGMPSFRSIKKNDFSYRTYNSYYNGKWSNIILENQLLKLPKLKTVVKVKQHRSLPTNSIIKNCTISMDNKGVFYASLCVEYVIDIVPKQINKAKILGLDYSQKNFYVDSEGKKSNYPHYYRKSEDKLKRLQRNLSRKTLKSKNWYKQRQKITTLQKHIANQRMDWIHKESRNIADKYDAVIVEDINLCNMAQCLKLGKNIHDNGFGMFRVFIKYKLEEQGKQFVKVDKWFPSSKLCNCCGTIKEDLQLSDRWYKCECGYENDRDYNAALNIRDCGTRLIA

SEQ ID NO: 45171 - protein, 432 aa, unknown
  TnpB Polypeptide
LYGCQQNLINPTPELKAILEFICSESHKLTNCGIYYARQLFFKSQKIIGKYDLEKEYKTNKHYQVMHSQAAQQILRSVAESFKSFKELDKKYSKGELHFKPRLPHYRQGAGFALVTYPKQALRLVNDQLKIPLGTTVKRWFKLDSFTIPMPSNLEFEDIKELRILPRNQCFYSEFVYKQKSVPEYNLYQNNALAIDPGINNWLSCVSNVGTSFIIDGRKVKSLNQWYNKRVATLKEGQPQGYWDEQLAQSTEKRNRQMRDGVNKAAKLVVNHCIEHQIGTVVFGWNDGQRQEAKLGRTTQAFVQIPTAKLKERVKQLCGCYGIKFVETEESYTSKASFLDDDILPTYGEKPETWKPSGKRVKRGMYQTTQGILINADLNGAANIMRKVETQLGLNLVKVCRQALTLATRFRIWETKTKKRSGTDLSCHVATV

SEQ ID NO: 45172 - protein, 357 aa, unknown
  TnpB Polypeptide
MSGMILVYRYRVKSLNGLLNQQSRACNFVWNFCNDRQKDALRFGRRWHTGFDLNKLTAGSSKELGLHSGTVNAVCEQYAKSRSQKKRPFLRYRGQKSLGWVPFKGRELKREGDAFRFAGNTFRVFHSRALPEGKIKDGSNFSRDSRGNWFLNIVIDVAGAAEVRQPLNGVGIDLGLKDFATLSTGEKIGAQRIYRGAETALAVAQRAGKKKRVKAIHAQIGNRRSDFHHKLSTRLVKEFDYIAVGNVNAAGLAKTSMAKSVLDAGWSSFRTQLAYKAVKHGAWFEEVNEAFSTQVCSNCGALPDSRPKGIADLGIRNWICSDCGCVHDRDVNAAKNILNKSGFRAGHGTPAVGIPAL

SEQ ID NO: 45173 - protein, 416 aa, Natronorubrum sp.
MAIEVTRTYVGSIQNQRQVCDDLDLLGHSASKIWNVARWTAGRIWDEVGEIPAEEVLKAYMKNQSCWKDLNAQSSQKVIEELSDAFQSWFDLRQNNETANPPGYRKHDDERPRSTITFKVDGFKHDPANNRVRLSKGSNLKENWSDFILCEYQTRPDVDLSEVNRVQNVRAVWNGDEWELHFVCKVELETNDSAGDEVAGIDLGIKNTATVAFPNEYVLYPGNSLKQNKHYFTRAEYDTEGENGPSEKSMWARRKLADRETHFYHVLTDTIITECVERGVGTVAVSWPEDVRDSDWGKTGNKKLHTWAFDRIYQYLAYKGEIRGVEVLKENEWDTSKTCSACGDDTTSNRVERGLYVCSSCELVANADCNGAENMRQKITPSPHGEDRSNGCVAQPSVHLFDRESGTFRTREQVVS

SEQ ID NO: 45174 - protein, 402 aa, Escherichia sp.
VKRLQAFKFQLRPGGQQECEMRRFAGACRFVFNRALALQNENHEAGNKYIPYGKMASWLVEWKNATEMQWLKDSPSQPLQQSLKDLERAYKNFFQNRAAFPRFKKRGQNDAFRYPQGVKLDQENSRIFLPKLGWMRYRNSRQVTGVVKNVTVSQSCGKWYISIQTESEVSTPVHPSASMVGLDAGVAKLATLSDGTVFEPVNSFQKNQKKLARLQRQLSRRVKFSNNWQKQKRKIQRLHSRIANIRRDYLHKVTTTVSKNHAMIVIEDLKVSNMSKSAAGTLSQPGRNVRAKSGLNRSILDQGWYEMRRQLEYKQLWSGGQLLAVPPAYTSQRCACCGHTAKENRLSQSQFRCQVCGYTANADVNGARNILAAGHAVLACGEMVQSGRSLKQEPTEMIQATA

SEQ ID NO: 45175 - protein, 228 aa, Cyanobacteria sp.
IDKGSAKLIKHRNNWYAYISVTLEVPEVKTTNYIGCDRGQNNLAVVAPAIGFGKFFKGKEVKHRRRYFQKRRHSLQSAKKFRALKKWNKKERRWMDAVNHTISRRIVRFAEYLNANLVVEDLEDCRSTMKQSRKNRADSGESRHSWAYYSLKQLLDYKLALLGLKLIKRPAPYTSKSCSTCGTLGQRKKHDFNCPHDRYHNADLNAARNLALRGWFLMFFRPTPEMLL

SEQ ID NO: 45176 - protein, 381 aa, unknown
  TnpB Polypeptide
MKAYKFRIYPNKEQTEKLDFALDTCRQAYNMMLGELNEQVIIDKAQIQAMLPDMKICEPKFKEVYSKTLQYECYRLFSNLSALRVLKGNHKKVGRLRFKGKGWFKTINYNQSGFSLDSDDKKLNLSKIGSIKIKLHREVEGNIKQITIKKSIDKWYATIITDAIIKTKCGKGIIGIDLGIMDYLVDSEGDKIENPRILNQYKKELRIKNKDLSKKKKGSNNRKKARKGVAKLYEKITNVRRDFLHKLTTKLVKENKFIAMEKLDIKQMSQQKFFNARNMLDCSWGEFGSLLNYKAENAGCLVVKVNPRNTSKMCSRCGNLQDMPLYKRTYKCAGCGLVLDRDHNSAINILNLGQELSYVENNSSVPLAQGLSMKQEATSFR

SEQ ID NO: 45177 - protein, 386 aa, unknown
  TnpB Polypeptide
MDEPTVRKTFKYKLQPTSKQEQAMEFVVRRCRELYNAGLQERRDAWRMRGVSLTAASQSAQLPEIKEVRPEYHDLHSQVLQDVLTRLDRAFQAFFRRVKAGETPGYPRFQGRDRCKSFTYKQFGNGATLDNGYLVLSKIGRLAVRWSRPLEGTPKTVTISREADGWYVSFSCAEVPIKPLPLTGQETSIDLGLESFATLADSSPIANPRIFRVAELNLKRAQRRVSRRQKGSHRRRKAVHLLAKAHQRVRRARADFHHKTALALVHRYDTIYHEALQTANMVRNHALAKSISDAGWSQFCTILAAKAAYAGKRAVAVPPAFTTQACSGCGVIVQKGLSIRWHMCPDCGMSLHRDHNAALNILRLGQQSAAGQAVQAPTWPIGASVA

SEQ ID NO: 45178 - protein, 187 aa, Crocosphaera sp.
LVINYCFSHRIGNIVFGWNTGQKDGIDIGKKNNQNFVQIPTARLKKRIEELCFYYGIVFTETEESYTSRSSFLDNDLLPKFGEKPASVKFSGKRIKRGLYQIKNGQTVNADTHGSANILKKVKTQLNLDLTKVRRGALTLPKRYDLYKNLNKLYRKRCEGAFLTTFTTSALDSFVFQPKEMSTKTIW

SEQ ID NO: 45179 - protein, 424 aa, Nocardia sp.
MSWILPDGAAVLSREARRLRPGRCPDPAKRFEHAFGTVACVKLVVQIKLLPTPAQAAALRSTLRACNDAAGDVSQVGFETGVLREYALRKLTYAALRARGLGAQAAQHVIKKVADAYATLHANIRGGNLGSTGSGRRAKAESTPITFRHDAAQPFDDRCLSWQHDRRTVSIWTVTGRMKNVRFTGSPDQLAILRAHRRGESDLVSRDGMWFLIATCDIEEKPEFEPVDWIGVDRGIVNLATTSDLDNFQGRGLRRYRRWHARKRAELQAKQTKSARRRLKRRAKRESRHATHVNHGVAKQVVAVAERTGRGIALEDLGGIRDRVTVSRHQRATLASWPFHQLERHIRYKARRAGVPVLTVDARYTSQMCPRCRHSERANRPSRDNFHCRRCGLAGPADVVAAVNVRNRARSVWVHVNVPDLVPA

SEQ ID NO: 45180 - protein, 417 aa, unknown
  TnpB Polypeptide
MKTAYKFRLYPKKQQEAKLSLTLETCRHFYNDALAARKTAWETGEGILSLPYKQQLTLANCRTQIHSQVLQNVLRRLDKPILAAFGRIKANTTRSKKAKKIKPGFPRFKSKNRYKSFTYPQSGFKIEGTRLVLSKIGPIRIFKHREIEGKIKTCTLKRDSTGCWYAILVTETPDISREPPNQRLVVGVDLGTKREKDSTTGKSTGRLATLSNGKQILYPRYFAEGEERLKVAQTVLSRKKEGSKNREKARIKLAKLHKKILNQRDDFLHKNSRKLVDLADLIIFEKLQIEGLSRGKNRSKDMHDHALRKFTEFTIYKAERAGSAVEFVNPRDTTKECSLCHLPIKMGPGDRVHKCPCGLSLDRDHVASINILYKGLAKLDIPTENNFDLYQMEDGTLGLRGSACIDLVDYYWNAGSL

SEQ ID NO: 45181 - protein, 404 aa, unknown
  TnpB Polypeptide
MRENNYISYAENDEIAKVNWHAEYLHAHNRQQLLRKLDKYWKSYFKGIKDYNQNPKKCTGKPNKPGFKNINNKPGEVIFTKAGITQTHTKKNNPKNNLLILSLSKEIQAKYQIKNIKLKLKAKVLKLIGDLKNINQVTIKKDYYSCEYYLNIVYIKDEKEIETYTNIMSIDLGLDNLATIVFLENEKTYIIDGKKLKSRRKYFDKEINYYQSIRMKQTSSKEFKDTKRIKKLRKKNRDYQLNYLHHAAKQIIEYAKKHEVRTIVVGDIKNIKKSMKNNKSFVKSPIQNFKKLIEYKGLLCGINYVEQNEAYTSGCSALDLESINKKSYNKKRRITRGLFQTNKGLLVNADVNGSLNILRKYLKLKCIPKLIKLATDKVNCVARDSALGYNGFVDGPKRISVACY

SEQ ID NO: 45182 - protein, 408 aa, unknown
  TnpB Polypeptide
MKRSNLFSLAPTWEQHRILQGLAVNCAKLWNEINYIHRQQYSDYLKLDWNPQAYKKYVPLVGSATAQQIVRKNNEAWRAFLALNRMEKNGKLPSMIKRVKPPGYWKRDGRYVLRILFRCDSYHIREGRVDLPRHLSIPFKGKPKWTGKQGRLEVAWDTLSKKWRVFQAVHVKPIITPLGSKTCYIDMGVRNLATIWLPEWRQPIAYQSGRLLADWWYWTNRIARHQQRLLTVNGKKKSKQLARLYRIRKKRFRHAVATFARQLAKDLYRQGVSTIVIGELTGIRNGNVHGRQGNAMVHNYWSHKHVADRLRWTAEEYGIKIETVSEAYTSQTCPRCHSRHSVRVLRGFQCLDCGLEAHRDAVGVLNMAARCGGYAVRPMAWPMLLRWDGCGWNRNNGMPTLERIIVEA

SEQ ID NO: 45183 - protein, 419 aa, Mastigocoleus sp.
MRIFEFKLKGKEKQFCRVDNAIRTSQFVRNKCLRYWIDNKDKKVNKYALNKYCVVLAAKFPFADELNSMARQSAAERAWSAISRFYDNCKKKIKGKKGFPKFKKHSRSVEYKTSGWKLSDNRKYLTITDNKGIGTFKLVGTHDLHFYNIKQIKRVRLVRRADGYYAQFAIDVDVKIETEPNKKMIGIDLGLKYFIADSNGNVEASPNFYRKSEKQLNRANRKKSKKYSKTRKQAKKPQSNNYHKARNRYARKHLRVSRQRKEYCKRLAYYVIQSNDLVAYEDLNVKGMVRNRHLAKSISDAGWSTFRDWVEYFGLKYGKVTIAVPPHNTSQDCSNCGEKVKKSLSTRTHVCPHCGFVEDRDVNAGINILKRGLSTVGHTGTYAWGDLPSWDVGVNLHSNGESVNQESPDLLDKPSISTV

SEQ ID NO: 45184 - protein, 449 aa, Lentzea sp.
VKVPALEQGRDPVSVRRLRTEPRRPSRTPRRPPAHCLARHCAPGMLCCMRTAYKCRAYPTPDQAAALNRVFGCVRLAWNKTLSERQLRYRTEGVRTSYRETDCALTAWKRTEELAFLSEVSSVPLQQTLRHQHTAFVNFFAGRTRYPRFKSRVGRQSAHYTRSAFRMRDGVLTLARTSSPLRFVWSFDLDAATPDPTMVVISREPDGRWYVTFTVDAATVAPTAPTGHAVGVDLGLTSFLVTSDGERVANPAHLARKARKLARYQRRLARCREGSRNRRKAKLKVARAHRKVRHAREDFLHRTTTGLVRSADMIAIEDLAVRNMIRNRSLARAISDAGWGEFRRQLQYKCARAGRTLVVIDRWYPSSKTCSTCGHRLAELKLSTRHWTCPDCRTRHDRDLNAAKNILAAGRAVARGNSGDACGADVRRQGSSFPRSAVKQEARAVRRSP

SEQ ID NO: 45185 - protein, 442 aa, Lactobacillus sp.
MAKRKQMLRNQADYDCLSSEYFVKGNPLLDQYSHKAHDLYNRALYDLRQGLFKRKYIKGYGQLDSMFKRRYLSRESMLYHALGYVQSAQQTLKEVNTVWNAWLSALKAYCKNPKKFTGKPRIPRYLRKNQRHTFFVTNQSAKIKDGYLVIPKFKFKLKLAPQITVLQRVAFKSCYGGYKVIVQYRINKEVQYLPDNGKYMGIDPGIDNAFACATNTEKLPLLINGHNLKSVNQYYNKEHSRLKALQAKYHQLETKIMTKQGIKPIYQETKAMQRITEWHNRKIYQFAHKASKRIVEYALSCGVNTIVIGNNKSWKRSSNMGQKNNQNFIGIPHKTMIEMIQYKANLVGLTVIRTNESYTSQTSSLDHEKPCWANGNQSRKKQGKSPINRRIHRGLFKANDDRLINADVNGALQIIRKVFPKYSLNDGIAGVALRPVKWTPLI

SEQ ID NO: 45186 - protein, 374 aa, unknown
  TnpB Polypeptide
MHECTTGGLMVKGVKFRAYPTKEQQKLINRTLGCSRLIYNKGLDMRDAAYKAGEKIGYNQTSAMLTGLKRQEDYAFLKEVDSIALQQSLRDLDRGFKNFFAKRAAHPQFKSKHDHHQSYRTMNQANGIRISGRYIKLPKLGYVKIRQSMEIGQINHATVERTASGKYFVVLNVDFEPEPRPNAGGQVGLDVGIKAFYSDNNGNTVSNPKYLEKSARKLVREQRKLSRKQKGSGNHNKQRIKVALVHEKITNQRNDFLQKQSTMLVRDNQTICIEDLRIKGMLRNHKLARALSSVSWASFFSMLEYKASWYGSEIIKVPTMYPSSQTCSCCGYQNPLVKNLAVRRWECPVCHAVHDRDINAGLNILNKGLQMQSA

SEQ ID NO: 45187 - protein, 389 aa, unknown
  TnpB Polypeptide
MVKIYNAKIMFDKPEDKVLLSQSLSLANEAFNIVSEERFKMKSCNGSKPLHERTYYKVKKIFPNIPSQYIIKVIKDVIAKYETIRKNHQQIEEAPQKRNLQLQLDKRLFTWKGEKELSITTIDGRIRIKFEIYPLLDEAFKNGKKCDVSIFGRDNEFYLSIPFKFEIEPQSKKETALGIDLGETRIVATNHGHIVKGLSFKKRKRQIRHQKDTLKSKTTNSARRKLKSLKRKERNHTRNYIHCLTKHILVNNNENVIVLEDLTGIKKKNNRRYRNRKSRQVPFYQFRTILTYKAPFYKKRVETVNPHYTSQMDSRGLENGKRVTGTCRYYGIDNKILDADINAANNIRNRYLQLPSSKCKNLMEGQAIVNEPCAGNLPGKHRPFRVVCS

SEQ ID NO: 45188 - protein, 389 aa, unknown; identical to SEQ ID NO: 45187
  TnpB Polypeptide

SEQ ID NO: 45189 - protein, 361 aa, Methylocystaceae sp.
MKLVAAIKLKPTREQAATLRATLIRCNEACTSIAAKGFAAGVFRQFDLQKLVYVKTRSEFELTAQAAVRSISKVADAFKVNRKSAPVFRPLAAQPYDGRILSFKGADAVSIWTIEGRMKVNFVAGQKQRDLLAFRKGEVDLCFVRGKWFLACTCDIPETEGFKPSDWLGVDLGIVSLAADSDGVVYTGEEIEHTRRKSAKRRAGLQSCGTKAAKRRLKKLSGKQARFQKHTNHVISKAIVIDAERTLRGIALEELTHIRTRVTARRKDRNRLHNWSFGQLRAFVAYKAARAGVPVVYVDPRYTSQGCSCCGTIDKRNRPNQATFSCVSCGHSEPADLNAARNIRARATVTTPESSQAAQAA

SEQ ID NO: 45190 - protein, 378 aa, Clostridium sp.
MSLNETPTLSNRAYKFRIYPTGSQKRLISKTFGCVRFIYNKMLEDKIKYYKNTGELVRLTPACYKNDFPFLKEVDSLALANAQLQLESAYNNFFRNKGTGFPKFKSKKKETCAYTTNVVKRNIYLKDQYIVLPKLRDVKIKCHRIIPNHYKLKAVTISKAASGKYFASLLYEFKKSILNIIPKKILGLDFSLPKLFVASDPSLKNDDTKLHCYKRLEDKLKIQQRKLSHMRKNSNNFLKQKRKLATIHEKIKNRRKDYLHKMSCRIANCYDMVCIEDLDMVEMSHVLNWAKSVNDASWGMFTTFLNYKLKERGKYLQKVSRMYASSKTCHICGFVNRTLTLQDRVWTCPHCGIIHNRDRNASINIEKEGFRLFNEIHG

SEQ ID NO: 45191 - protein, 366 aa, unknown
  TnpB Polypeptide
MLKAYKYRIYPNKEQEKQIAKTFGCCRFVYNNILAYKKEVYEKGQTVSKIDCNNYCNRELKKRYEWLKEVDKYALTNAIYNMNSAYQKFFKEHAGYPKFKRKHDKYKSYTTNFTNGNISIDFDRNRIKLPKLKYVKAKIHRHFTGKIKSVTISQVPSGKYYVSVLVETEHIKIPKRTGQIGLDLGIKDLCITSDGKKYENPKIIKKYEKKLAKLQRQLAHKLKKSRNYQKKRKQIALCHEKITNTRKDYLHKLSNEIISENQVIVSETLQIRNMVKNHNLAKSINDVSWYELTRQLDYKAKWNDRVYIKIDTFYASSQLCSCCGYKNKEIKNLEIRQWKCPSCGKIHDRDINAANNILAEGLRKIA

SEQ ID NO: 45192 - protein, 567 aa, unknown
  TnpB Polypeptide
MAIRKTHIRELNDEKSIRTKRISSHSLTNQQKLHRIKQHFNIVIDVKNNISQFLFDNIESFLYQDEKDNLRKQYQQFKNDELSAWELQQIYQDFFDKYDEAFKRYKKNHKFRLQKSFKLEYYKKQTIFHNIGDIKSFTIKFKNTPLSNLINWLVYVPYDDLDKVLKRYKENATDKVINDTKAFNKYLRKIRKGNKWERIKKLVFAKQQFLIKKIRLIETQSGAYRKAYKENPTVASVGSEVFIDHSNTQFKHFYKFKIVKKEILYLPLAYNQDFHNHFKNINFNANHYVSLNNKGQINIGLKETFIQTFEETISVEQIAGIDLNIKHNFCVINIDEDYIEFDYDREFFKKQVNDLKAIDAIGYNKLSIENKRKLQKIVKRTESYFQYLVSEILDSLQNKAITEIVLEDLNLQKTGFKTFSEEFGVSYNRLVKILRLNQVKHWFKNQGNKRGIKVHFTSPCATSIECSKCHTIEKDNRRNQEEFKCIECGHTINADNQASFNIGNRIKLDVLRDRLHNYDEFGQCTPKIMKRDNIKSTIENYYLKQSTLNVDPHNSRLLRETNSKSLI

SEQ ID NO: 45193 - protein, 439 aa, Lactobacillus sp.
MNKEKGGEIMSNYYIKTRSYEVFASKAMKNILDRNCDYRRYCWNQALALWNDLYSAHQIYDKICYTTFTPKKNKRSNKLKIIQKDVHLNPSPNWRLVRDRLVEEKEDWQFAYSAHLLQLTVQDLGKAWKSFFDKAQPDWGKPHFKSKRAPRQGFKSDQAKLIDGRLFLEKPQGLKKDWEPLILSEKPMNYPTGVMSFYRENGRYFVSIPYKIPKQKIDRKADTGKATGVDLNVGHFNYLGGNKSILPKKLEQTYEKIKHYQRLLARKREVNGKEQAMQSKKYLKTKTKLQAAYQRASNIQNDLMQKFTTMLVDNYDSIVIEDLDVKKMMMSHVASKGMHRSMFGKFRQVLSYKCEWYGKKLIVANKLYPSTQRCAVCGLVKKGDEKVTLYGNKKHGTKHNEFICYNPACSNYNKKVDRDENAMLNLTILIKHPELNRAL

SEQ ID NO: 45194 - protein, 543 aa, unknown
  TnpB Polypeptide
MNKDVLKMPTEKKIDSNFITVECLLAFDKDENKGRVLTLMRKFSAMVRFAYKRLMEGAERKELKKLLSQKYGINTRYSDDAILLAKQTLESCIEREQNPKKIVFGSRELFEQLKKKHLTGKRRETLRQKWEERRYGVLYSRGEKSKEGNLNLRLVNLNNQWHLRINLGNGEYVWTRVIRSAKRKTDKWISFISDIEHAEKTGDWFPYTVRLKLRNGKIYAQFSKEEKLPEVAITRDNGVIGIDINAYPFHLSLVHAAKDGNLEKYERISLDSLLEGSSDRREYLSWQVVHQVVGIAKRERKAIVVENLEKLPKGRRGDGLPKLRQKLQKWIYKGVMQKIEIVARQNGIQVIKVNPAYTSIIGKLKYAPLYNIDKDTAGAYVIARRGLGFKERLPKNYKALLRDSEFLSYAITKVEDKIAKLKQEIRNERNEYKRNRLKSVLWKTRKELDLLLRYLRESGESESAAQQTVNRQMERVRGSTQVEQKRWQVLSVALAFSCLESLRDFSPLKRVILTRDWVGAAKRASPSPWSGDECTKYVQFCTV

SEQ ID NO: 45195 - protein, 372 aa, unknown
  TnpB Polypeptide
VEKAFKYRIYPNKKQQELIQKTFGCTRFVYNYYLNKRKELYENDKTIFTYNMCSKDLTKLKKELEWLKEPDKDSLQKTLKDLDMAYQKFFKEHTGYPKFKSKKNRYQSYRTSYTKTTAGGNIMFINKHIKLPKLGLVKTKDKQIPQGRILNATISQEPNGHYYCSLCCTDVEFEQLSETNQNIGIDLGLVDFAIMSDGTKIENPRFYEKSEKRLAKLQCELSRKTIGSNRWNKARIKVTNLQKHVANQRKDFLQKLTTDIIKKYDVICIEDLDVKSIKETNSTIRNKRVGDVSWSEFRRLLTYKSQWYGRTLSVIDRYYPSSQICHCCGNRDGKKSEDIRCWICPNCNSELDRDINAAINILNEGLRQLNFK

SEQ ID NO: 45196 - protein, 375 aa, unknown
  TnpB Polypeptide
VKILNKAYKFRLYPNQEQSTLISKTFGCVRFVYNKMLAERKDTYNKYKDNKTELKKQKLPTPAKYKDEFLWLKEVDSLALANAQLNLQSAYNKFFREHKGFPKFKSKKHPIQSYTTNNQGGNIRIKDNKIKLPKIGWVRCKVHRQIAENEIIKSCTISRTPTGKYYVSILVEYDKEIQPIQVDKNNILGLDMDMKNLYTDSQGIKAEYPRFYRKMLDKLVVEERKLSRCKLGSNNRNKQRIKVAKLHEKVANQRKDFLHKLSKQLADNYDAVVIEDLNMQGMSQTLNLGKSVADNGWGMFTTMLKYKLEWQGKQLVKVDKWFPSSQLCSDCGFQNPETKDLSVREWICPNCGEKHNRDHNAAINIKNEGIRMLFA

SEQ ID NO: 45197 - protein, 294 aa, Neobacillus sp.
VRKVIRGNVRFFADLIIAGFPPPKDRKLGKGGVGLDIGTATLAVSSLKKVALFNLAEEVKDLAKVIRLAQRRMDRSKRAMTPGNYHENGTVKKGRKEWQFSNRYRKQRAKLRELNRKQAAIRKLSHRRLANTLLPLGDAYFIETMYFKALQKKAKETKISEKTGKVARKKRFGKTIGHRAPSMFVSILEKKAKSLGGSFKRVNTQTFKASQYCHVRDDFTKKPLSERWHVIDADTMVQRDLYSAFLLMNANSLGTKAKRDTCVKIFPLFKSLHDQEINTIKKEKRKILNSGITL

SEQ ID NO: 45198 - protein, 534 aa, unknown
  TnpB Polypeptide
MVKPVGLPSCHYRLRLKMDSISQVLTYKYRLNPRRSQHAALNEILEQQRQLFNAALQERDDFYRTHREAFLNARVYREQLTLYKKRIRAWITTARRSGQENHRDAAIRLFHEYRLFRRHKPAMPQGPNELSQSRALTQIRAADPAWAQVQRRIQRATLKRVERAFAAFFRRAKAGETPGYPKYKGREFFDGFEFDAFQQITLIPQKNRQPLPDEGSEQKQRRGSYPRLRFAGMPGGLRVFLDRELPGDPKKVWFKREGRRWYVGFQVERECAAPRQAGKDIGLDWGTSALAVLSSGEVIQNPRHREALADRLRIEERAIARKKRGSKRRLKARRHKQAIERKIRNRRKNTLNKLSKRLATQFRTVATEEFSVKAMMAQGTEQEPLRARRRNREALDAAPYMLRQMIAYKATLYGANHGMGGAPDYDQRSSTHICSGPIDDPVFPYCWQTVSKELSAEWHHCPYCGYAAKRKHNAARVILIRALYGGGPVPAGAKRGNSPVCPVNTAGLSAQTGRRPSGLHPTRSDRPLEAVPSG

SEQ ID NO: 45199 - protein, 361 aa, Natrinema sp.
MQRNVSTTVRVKLHSLTNRKTDLLAREHEAFQTAVHGGDADLYSATDQQASKVQRQKDPNPDTEQPVVLRNDVFNVSHDEDTVLSSWWVKVPVYDPEQGRGNSIWCPAHVPYKDEQLVREGDIRDSELVRRDGDWYVHLVVKRSVTVQDEYDDVLAIDMGARWVATSAFLTDRKTTFYGEEVRRIREHYKQLRKSIGKAKPRQGQQVVERIGDAEARKVDGRLHKIARQIVEDAEERNAVIVVGDLGRIRKDNDKGRYVNDKTTRCRSPACSTTSNTKPTTRVSTCNWSMNTTRRRRAIGAPARASVRRRDASSVPNVAGRQRRQEWCAEYRQTSLGQVLETAVRGGGCTGTARNAGHRPP

SEQ ID NO: 45200 - protein, 395 aa, unknown
  TnpB Polypeptide
MKRAILLQTVATNSKNNRLKEFMNKAVNEYNRLLSEKWDCDSFMEFHNKTLSVSKKNTSFNVQVRCSLIRDAWKKKSNKIKGLTVKFNIPRNCKIFNTKSNFFIRLGLYPKDRIAIPIKQNRNYQRFQSLVQSDWTCKTFGLTKDLQIVAFLSKEKEILQKKNIMGIDVNAKHFAISIISPEGKVLYQTYLGKNIWIKRMRFMKRRALFQSLNAKKKLKVLQHKEKDFIKTNLGQIIKEIINLAIKYDADISIENLKRFKPKGRRFNKIVMKIPFYKFKQILEQRCFDNDIRLNIVDSWHTSKWCSHCGALANGHSSNYSLFKCKCGQIVNSDRKASLAIAVKSLLERNSHILEPDISIQISKRRVDVTQLLRPDAVDNLCSVNYDYQHMESSRN

SEQ ID NO: 45201 - protein, 418 aa, unknown
  TnpB Polypeptide
MFAVHSGLLVSRLQRAILLQTDATLTKQKILSNFQQAATVEVNRLLSERGRYKRFNDFWHGVGSESKRLTGFNVQAVCDLARGAWRKQKGCTSVGGVTVKFNVPRNCKTFQTRAFNFVDLGLYPKKRLAVPIRKNQNWSRFSELLGSGWTCKTFGLTPNLQIVAYMSKPDADLPRRKNMLGVDVNSKGFAVSILSPEGKVLRQLYLGKDIWQKRKKIFERKSLLCSYADGGSCVAQKKLDATKHKEHNFVKNRIGEVVRDVTTLALKYDADVAIENLKRFSSKGKRFNRQVMRIPFYSFRKNLEQRCFDKGIALSIVDGWHTSKWCSRCGAVGKGHDAANYSLFRCGCGLVVNSDRKASLAVAVKSLLERNKPTDHSEFQFSSRRVRVSGLVRPMKTSQLEAVLPPLVRGKPIGFSHG

SEQ ID NO: 45202 - protein, 443 aa, unknown
  TnpB Polypeptide
MQSRKFTVVTQLHEKNNRDLIEYIESSRMDYGKALRETFYAIKHGGFNKSQHRAYLQYKYRVVSRTANSIIYDAHGRFNALKELKEYERKQLERKIKHLEDTVIPKLVEKRKQNSTKLRDGVYVLLVQQRNLRLRVVSKKAKLNRLKQKLKVLEYQLKSGRLKFCFGTKRLLKQDHDKFIEHRDSQMSFVGAKEETACNQNLQLTYNRRSNQFLVRLRKDFGGYKSVKGEDRYAYGKVYFNHHKGQLVSILRSKASPLSYKIVKRNGRYYLYCVFEFQVGNSGIVTRSSYGTIGLDFNKGFVTLSETNQYGHLVRTQLIPYRFKSGNKTKTDLQRIASYVAVLALRRGKDVCIEALDFRATKSKTESKIGKKYNEMLHSLAYREFSEAMESVAYRNGVELHKVNPAWTSWLAERLYCKSMKLNIHVGASYVIARRGQGYKDAV

SEQ ID NO: 45203 - protein, 309 aa, Moorea sp.
YSQVLQDTVKRVKLAFDRFIKGDSSGKRSGRPRFKKLHRYRTFTYPQMKEGCLERNLINLPKIGKVKVVLHRTIPSGFNIKTASITKKCDGYYLVLSLEDKTIPEIKPNINPDSIVGIDVGLKDFFTTSEGEVVEIPQYYRKAQKRLRVIQKRVSRRKKGGNNRLKAIKQLGKQHKKGSDKRKDFHFKTANHLLSKYDVIAHEKLNVKGLAKSRLAKSVLDAGWSSFLTILASKAVRVAWPTALNAGLLTVPVSPKNTSQNCSNCGNKVPKKLHVRWHDCPHCGCSLDRDHNAAINIRNRAAGFEVTVR

SEQ ID NO: 45204 - protein, 280 aa, unknown
  TnpB Polypeptide
MQIISSYGVELRKQNIPIRQTLEIYRSAVSYLIGIYVQVWEELAEIPDAKRRFNAAEHLVHTTKKNHACFDFDIRFPKMPSYLRRSAIQHALGTVSSYKTRLDLWEKTDGKSGKPKLVYENHAMPVFYRDVMYREGAEGKDEAYLKLYDGHDWKWSCVRLDHTDMEYLRKCWSGKKASAPTLEKRHRKYFLRFSYKEEVTLTKTPVKEQIICSVDLGINTDAVCTIMRADGTVLGRRFIDHPSEKDRMYRTLGRIRRFQREHGSAQTQGRWAYTSEHRTG

SEQ ID NO: 45205 - protein, 508 aa, unknown
  TnpB Polypeptide
MRASTPSFVVSVKVHLPGQMENHLEKSFNIANSAYNEALGLGLRRLKAMRNNPRYKELLEARRSLTESIQRLKKSKGLAWQLKLYDKALSNLRLEYGLSEFSLSKHLTNRRNEPKSPYQYLSSSELQVITKEVYQALEKVIFYKVKPYRVKFRSKYNLNASFRNKMNSTGTRIVPSEKTGVAYTLFIHKKSTFVDISTKAFSEYQQESLLRAEKIKYVQIVRKTIRGKRMYYLQIVCQGYPLAKTTKGKNNVGIDPGVSTVAYASKENVELVDLVPENVTSREKLIKSLDRRIERSRRVNNPDCYRSDGRARRGVRFKHPTNRAKRLMTRRQRAYRNLTEERLKIQGELVNKIVSQASIIRMEDLNVKGLQKRSKDIRINPKTNRPYSKKRFGRVILKAAPSYFREALKTRANTLGIDFEIINPQKVKPSQYNHLTKSFEKKALSTRMFDLSEEWAGIQRDLYSAFLIGHIENGQYDQTIHQEFPSFYKQMKEFLAKQKPSRLDWYIK

SEQ ID NO: 45206 - protein, 370 aa, unknown
  TnpB Polypeptide
MRKTFKYRIYPTGKQKRALGNSLEACRLVYNQTLAIRRESWERHQKSLSLYDTSNFLPQWKKEKPGLADAFSQCLQNAQLRVDLAFKAFFRRVKSGETPGFPRFRSFHRYDSFTFPQSGFNLIDDRLKLSKVGSIKIRKHRNIEGTVKTLTIRRDAVGKWWASFSCEVTPTPLPKINAVVGIDVGLKSFATLSTGKKIANPRFFRTEEKKLVKAQQKLSKAEKGTPIRHKRRKAVAHIHSHITNKRKDFAHKLSRNLVNEFQFIAFEKLNVKDMMGNHTKTFGYKLNKSIGDVAWTQFMQFTAYKAEYAGRTVAWVNPRNTSKRCSRCGQLVEKKLSDRVHRCSCGLVLDRDVNASINILALGMKSLASA

SEQ ID NO: 45207 - protein, 389 aa, Lactobacillus sp.
MALKGIKLRIYPDDYQKELIEYNFGANRFVWNNMLDMMIKRHENNPDLKSLKAFDLNYILTVFKKEHSWLKKAESTSLQVSNKDLFEAYKGFFSKKRKFPRFKSKKYPKQSYQSKFVNNNVEIFDDSYIKLPKLGVMKYKNKKAIPSTIKYVTIRKSSTNKYYAILTVNENIAHLSKTNKAVGLDMGVSDLVICSDGNKYKTIRFDKKLAKKKHYWEKRLARRRAQALKDIQYKKKFGLIDSKSLEQYSNYMKAKLMVAKYSEKIANQRKDYLHKITRKLVEDNDLIVIEDLKTKNLLGNHKLSRAIANQSWRALRLMLEYKCEWYGKRLLIVNPFKTSQICSNCGYDDGKHELDIREWDCPNCDIHHDRDINASKNILNNGLEQALVK

SEQ ID NO: 45208 - protein, 317 aa, Halogranum sp.
MPWLDIPRSTVTWKQNGIKHDSKHNQLRLSKGFNLKNHRSDFILAEYETRPDVTVENIQQVRAVWNGDRWQLHLVCEVEIPVEDAPGDNTAGIDLGIKNYLAIAYDDGDTQLYPGNALKQDKHYFTRDEYDTEGENGPSRRVLRARQKLSRRKDHFLHALAKHIVEQCIDHEVGRIAIGDLSRIREDEDGESRNWGRGGNKKLHGWEFDRFTTLLEYKAQEDGILVDRKSERDTSKTCSCCGRKRDANRVERGLYVCELCGVTMNADVNGAVNIRRKITQNPPTGDMSNGRLARPVAYLFNQTSGRFAPRDQAGCEP

SEQ ID NO: 45209 - protein, 222 aa, Halogranum sp.
VDAPDHSENGTVLGVDLGVENIAVASTGVFWSANELTHWRTEYVERRQSLQECGTRWAHENVQSVGETETGRFTQELHHIANEIIEEAVENDCSHIAFENLTHIRERMPNARKFHEWAFRRLFENVEYKAEERGISVEQVNPAYTSQRCSTCGFTHDGNRRLESFACQQCGYENHADYNASKNIGLKLLRNQTGGERGAPVGVRLNSGMLNTNGVTSVPDLA

SEQ ID NO: 45210 - protein, 326 aa, Halogranum sp.
LFRSASELDIRNRCATLYDIRQKPETCQALSILKRNHVESSSRISTQEHNYHRTKCVRAWNHYRNDASRPTGACRCRRSYLCSCGAPVGSLDLSNEREQRTLSRKQHGLNNYEKQRRRVAECHADLRRKRRDFLHNLSAYYAREYDLVAVEDLNVKGMMESPSNSRNTALAAWRTFLSLLEYKCEREGTHFVAVNPVGTTKECAACGVSTDKPLWIREHSCPSCSFTVDRDWNAAWIILSRGIKQLGAGRSESTSPEIKDFWCANESRRDSLTPVETALPTGTTSVPAKRVIEAGSPITRSQRLLVSSQNSSSSDDTLKCEPKGER

SEQ ID NO: 45211 - protein, 440 aa, unknown
  TnpB Polypeptide
MMDKKAPNTQSKVLKVRVFHTETQKKVIHQTFGACRFIYNNYLQERCEFYIKQILPVKRTSTKQELQEIYKTFKRTSDKEYGQLYPWMKETSSTARHEATRHLDAAYSRFFDNCKKHRKVGRKHNPYGFPQFKSKKDSHQSYSDRITNFDWSHRTITIPKCGKLRFRNAALPKWFNGNTTSMNGSATISKSTSGRYYASILFTVCDYKYSHNERKQAVGLDFSPKLCYVDSDGNTGKDFGYVAQKQKASKQLKRLGRAYARKIYVTNPDSPEKKLPSKNKEKARVKLARLEERISDKRKDWIEKETLRLVRTYDKVVVEDLNLKGISSFLRNAKNMNDTSWATFVSRLEAKGKDYDCLVVKADRYFASSRICSKCGYQNHALTLRDRTWTCPDCGSNHSRDLNAAINLKNYVPLGRGEFTPMDTGKEGYVALLAAQALTV

SEQ ID NO: 45212 - protein, 410 aa, unknown
  TnpB Polypeptide
MSDMPTRGVTLRIKAEFPPEAKFLLEEFRLAVNSAVRAGLQARVTSRNALTKLTYKDFRKAHPSIYSQHIVSAFEVAASVLKSHRKRLRRSGAIHVPYVRRLMMKAENQAYKLDREHGIVDLPIRAGCHVKLELQVSDYHRRYLDDPSLTLGSLTLLPDRVIIAFRKEAPRPYVPESAISLDTNERSLDGVFVKDDEAKAVKAEFPDIAMIQQRHHDRRKRLQKKKAHDRRTSRRLCRREGAREHNRIEYRLHQVANAVLSFAENRKSAVVLEDLKGFKPGWNKELNRRLSLWPRRKLHQIIEYKAQWRGIPVVKVDPRYSSRKCPICGRIQDSRMGPEFKCECGWRLDRHINAGLNLLQTAVSKGLEVAGGLRFDPGAFQHDVMMTLYEPAMAARSEPNGTSCVGAVTS

SEQ ID NO: 45213 - protein, 389 aa, Escherichia sp.
  misc_feature (60)..(63): Xaa can be any naturally occurring amino acid
VRYLWEELGQNGKRLGGICNNLTVCENQTGPKKNRTRASLIADITLFSPYLHRVHQQIAXXXXQPLQQSLKDLERAYKNFFQKRAAFPRFKKRGQNDAFRYPQGVKLDQENSRIFLPKLGWMRYRNSRQVTGVVKNVTVSQSCGKWYISIQTESEVSTPVHPSASMVGLDAGVAKLATLSDGTVFEPVNSFQKNQKTLARLQRQLSRKVKFSNNWQKQKRKIQRLHSCIANIRRDYLHKVTTTVSKNHAMIVIEDLKVSNMSKSAAGTVSQPGRNVRAKSGLNRSILDQGWYEMRRQLEHKQLWSGGQVLAVPPAYTSQRCACCGHTAKENRLSQSKFRCQVCGYTANADVNGARNILAAGHAVLACGEMVQSGRPLKQEPTEMIQATA

SEQ ID NO: 45214 - protein, 404 aa, Streptomyces sp.
VLRAYKFLMRPTVGQQAALGAMLADHCSLYNGALQERRDAYKHASRTSVKYGQQSAQLKEIRAFDPERQGRWSFSSQQATLRRLDKAFAGFFRRVKSGDTPGYPRFRGVNWFDTVDFPKDGDGCRWDSTPHDPVTRVRFQGVGHVRVNQHRPVVGRVKTVSVKREGRKWYVVLTAEQAQPVPLPKSGSVVGIDLGIANFLADSNGEFVPNPRHGRKAAAKLEAAQQALSRFPRVRRDKRTANHRRAVEKVADLHRTVRRQRLDHAHKTALGLVRAHDFIAHEDLKIRNMSKTPKPKPDPETPGSFLPNGAAAKAGLNKSINDAGWGVFLTILHAKAESAGREVIAVDPRNTSRECPECGHVAKENRPTQEKFHCVSCGHTAHADTVGARNVLRAGLVRREAPPA

SEQ ID NO: 45215 - protein, 477 aa, Kyrpidia sp.
VRQTIRQKSLPLNREKWRQIVEVAEAYSRQKDAFLVEYTQVRSLKDLGYKRRIRDERVAAGFVSPFGLQARQWKLALEDALWTLERQWEAAIAEVRDRLHRNEGLTPKERDYAFWLLDKFGDRPRDWRKIEAVFWDEDLAGKKTELEPAGRKKVRHGLKRLFRRVLGKRPRIKKARSFVVDQQMYRVFMVGNRQYVAVMGLSPGKRIVIPLSGIHKLRGNLRVVLLPDEQAVEIHMSREPKTYPAGEEEAGIDLGVTEVLTDDSGKKYRPEYGQALQEMSDHVLDKGRERQKLWALYRKNRERDPGKARRIRRHNLGLVKQHKRHRRYRAWCENEINRAFRAFFRERRPRVIACEDLSHLRGKARNKGLSRKVSQWQRQAIRERLEYLCHVYSITDPGPVNAAYTSQTCPCPGCGWVDGKNRNGDSFRCQKCGYEGDADHVAATNVKGRLRDQEITKYTPHKEVKRILLKRYWENHA

SEQ ID NO: 45216 - protein, 433 aa, Kyrpidia sp.
MKALQAYRFALDPSPHQERMLASHSGARRFAFNWGLALVKERLEARGRGEDVEVPWTLAALRREWNRQKEQVAPWWRENSKEAYSAGLDGLARGLKAFFDSRSGKRKGRRVGFPKFRKKGRGRESVRFTTGAIRVDDKSHVVLPRIGRVRTHEMTTALLERVQSDRARILSATVSREGGRWFVSFTCEVERDAGRPKRPRDVVGVDAGLKHLAVLSTGEKVPNPQPLRKALRKIARLNRELVRRKRRSRHWEDTRRRLNRAHARVARIRLDAMHKLTHRLATTFGTVVVEDLNVAGMGRNRRLSRAIYDAGLAELRRQLQYKCEWYGSRLVQAPRMYPSSKTCSRCGAIKEVLPLWERVYRCEECGTVMDRDENAARNLAALAAAVAGSGPETKNARGEDVRPDLAGRSSMKREASTRQLGKTGAPVPQGTGT

SEQ ID NO: 45217 - protein, 501 aa, Kyrpidia sp.
VRALAAVIKTIRIGIHREVHRCKREALERTKDIYNQVIAFYMDFFAAHLNVLDEPVQVRKKDGSIKERTRTNQELLTFAEFHTLATKAHPNPGWPLDEHVPAAEGMPTELRRAAINQAIGKVRSWWSRLKTWEETAPDQRGREPQLGAPNEPVTFYAGMVEHPEYDLNPQKKKRHTFISLKLHTGQKWEKVSLPVVVHAQAEALLAGSALEKERIARGRKRSKTGQTGSGEEKGGSGAGTWVAKSLTVYGKRDKRYPGGVRYALHIPMEKSVDKPRKAEEQRRADPQMPVVAVDLGVGRLAVMGAFVEGRLAATRFVDGRALNHRRHRLLTVIHRKREQSGRLQPGVQDNANLWNKIRNLDENAAKQTAVTIVRFAREHGARVIVFEHLRRYRPPKEKMSRSGRKNHKRAYWLRGQIMKWVRDLAFREGILTVERNPAYTSQVCPHCKVLGQRGGSRFTCKNPNHRYNADADFVGMMNLYRKWTKTFVYPRKGDDPKPEVA

SEQ ID NO: 45218 - protein, 260 aa, Kyrpidia sp.
VAKSLTVYGKRDKRYPGGVRYALHIPMEKSVDKPRKAEEQRRANPQMPVVTVDLGVGRLAVMGAFVEGKLAATRFVDGRALNHRRHRLLTAIHRKREQSGRLQPAVQDNANLWNKIRNLDENAAKQTAVTIVRFAREHGARVIVFEHLRRYRPPKEKMSRSGRKNHKRAYWLRGQIMEWVRDLAFREGILTVERNPAYTSQVCPHCQALGERNGSRFTCKNPNHRYSADADFVGMMNLYRKWTKTFVYPRKGDDPKPEVA

SEQ ID NO: 45219 - protein, 207 aa, Kyrpidia sp.
LRKALRKIARLNRELVRRKRRSRHWEDTRRRLNRAHARVARIRLDAMHKLTHRLATTFGTVVVEDLNVAGMGRNRRLSRAIYDAGLAELRRQLRYKCEWYGSRLVQAPRMYPSSKTCSRCGAIKEILPLWERVYRCDVCGTVMDRDENAARNLAALAVAVAGSGPETKNARGEDVRPDLAGRSSMKREAGTRQLGKTGAPAPQGTGT

SEQ ID NO: 45220 - protein, 330 aa, Kyrpidia sp.
MKILKSFRFRLEPTTEQSQCLTRYRGCARLVWNKALALQKGRLEAGYPLLSYEELARLLTLWRHSEEYGFLANAPIHPLQWTLKFLDRAIRAAFDKSNPARFPTFKKKNRDEAGLRFPDPKQIKLNLSTKDADGRCVLPKVCLPKIGWVKFRKSRTIDGTIRNATVTWQAGHWYISFQTEIDVPEPVHPSESAVGIDRGIVHFAALSDGTFVDAPGWFRRHEKKLAWEMRKLSRKKRFSRNWQKQKARLQRLHAHIANARRDFLHKTSTAISKTHAMVFVEDLRIQNMSRSAKGTRENPGKNVRAKSGLNKAILDQGWFMFQTFLGYKLH

SEQ ID NO: 45221 - protein, 389 aa, Mastigocladopsis sp.
MLTLTYEYKLKPTKQQIEDIENILTVCRKVWNYALRERKDWVNSRKCKVNACSLEYEYIIKADEPFPNYHVQAKRLTEAKKNNPELKSVNAQVLQQVLRTLDRAWEEMKSRNFGFPRFKKHFKMKSFVFPQLKGEIVKACRVKLPQLGWIKFHQSRAIPEGFVVCRARVVRRASGYFVMLSLQLDVNVPDISFHGHPIGIDIGLESFLATSEGMLIARPKFFNSLQRKLQLLQRRLRNKKLGSNNRQKLNAKIARLHQKISDTRKDFHLKTAHKICDQGDSIFVEDIDFITWAKGMFCKHTLDAGFGQFFTILSYVTWKRGKYFGKVNKDGTSQTCPNCDAYTGKKTLDVRIHSCPECGYTTNRDVAASQVIRNRGVNAVGQTVLEKVC

SEQ ID NO: 45222 - protein, 246 aa, Mastigocladopsis sp.
LHRLARFGVDRGQNILAVASLPSGMPKFWKFARIRKIRKHYAAKRRRLQKAKKMRVIKRLEQKERRMIKHINHIISKEIVQLAVDFKCGIRLEDLSNIRQTTKQKKKQKSDASQNRDYWSYFQLEQFIFYKAQIAGIVVEKVPAPYTTKSCPKCGAINERNKHDYTCHRCRYRGHADYGASRNIGNWVGLSCPIELQQPLAVMVNGVQSGEVNGTPLSKVSGSNSRMGLVKPEQESPAFNERNEVN

SEQ ID NO: 45223 - protein, 394 aa, unknown
  TnpB Polypeptide
VTDKSEVESALYHDLREETDGLHANLVQKSIKDVINSMDSVKKAWKRGERISKPTWETSESWVLTYDTRAGTFSKHDATFATTGATVELDYQTPSHLDGTVYEKYVLSSGWELTTSKLVYRHGQYWLHLGLKQDLSDRHWTARADEEVSNAPQEDTSRVLGVDLNVTGWTAVTSAGGFHGNADYLNHRRTQYEKLRGELQQTGTRSAYLRLHERAGTESAWVDEYAHLISNSILQDALDTRSTHIAFEKLNGIRKRLSNLPQYQQWMFGRVQEYTEYKAAEHGISVGYVNPKNTSKGCSHTECQTVSDSNRREKQFECVACGRSWNAEYNAARNIGLRQMFKTLLPTSQTRSSGTATCQLALMSGVLSVEESDVTHLSTDWMSTDKPTASAVGS

SEQ ID NO: 45224 - protein, 272 aa, Escherichia sp.
VKRLQAFKFQLRPGGQQECEMRRFAGACRFVFNRALARQNENHEAGNKYIPYGKMASWLVEWKNATETQWLKDSPSQPLQQSLKDLERAYKNFFRKRAAFPRFKKRGQNDAFRYPQGVKLDQENSRIFLPKLGWMRYRNSRQVTGVVKNVTVSQPGRNVRAKSGLNRSILDQGWYEMRRQLEYKQLWSGGQVLAVPPAYTSQRCACCGHTAKENRLSQSQFRCQVCGYTANADVNGARNILAAGHAVLACGEMVQSGRPLKQEPTEMIQATA

SEQ ID NO: 45225 - protein, 490 aa, Boseongicola sp.
MPEDGQHFDGLETGMLPVALDPVAIAGDDVLSPYWNAGCAEMESKWWLPHRTASPGPAARPSGTSSNFREEASSFWKRTIFPTSSTCDASLRISLPSATPVTASVLVKATRKIRAYPKNPDLLHEMVHQQRRAYNLAVACFREADDGHVNPRGPDLKRTALRATIRECVRDEVGERGGTFRSADCDEAVNAAFRTRDAVIRKRKAGRKARLDFRSRKHVRQRMMVQKMSGAFVDRNFGLAEPMPDEAWKKLTTIVLERGRWFICAQLHMVTVGQDEIQVRSAVALDPGVRPFMTECSMDHAASYGDRFHSDKVFPLLLRLDRLIGQRAKAKHDEWKRHFQKRIDKLFIRVRNLVDDLHRRVAYDLVQTFDVILLPSFETKRMSAKDDRKIRSKTVRSMLGLAHCRFRQKLEWMCRKHGKRLVTCNEAYTSRTRSWDGFVNEHLGGAKTVSDGRIVVDRDMNGARGIMLRALYGNLGRFRAAGADVALVAE

SEQ ID NO: 45226 - protein, 166 aa, Okeania sp.
LRLKPTNKQMGIDLGITSLLTTSDGEKVANPKNLQKLHKKLRLTQKSLFRKTKGSNNYQKARLKVAKIHAKIKDSRLDYTHKLTYVANPTAPLRLIRENQTIVVEDLAVNNMVKNHKLARAISDANWSELVRQLEYKAQWYGRELIKIDRYFPSASFRGAASYRGA

SEQ ID NO: 45227 - protein, 338 aa, Thermoplasmatales sp.
MILTYKIKHGSDFSKELERAKQIAEFAIKTKSISSKDVRQFGLKSVISNQILRKYSRSQRAKDVRSVKLTLPNQGIHFNHEDRTITIPSLKLTLSYYFRNDFVKINQIELDGEFAYISVTVPENALIEPKGYLGVDRNTTAHIAVVANPLNGKVMKIGKKAEHTHRKYKNVRKNLQKKGKYRKVKETKDRERKIERDINHKVSKKIVQEAKQNGMGIKLEYLKGIRNAKSGRNFRYSLNSWSFYRLEQMIEYKARLLGVPVEHVDPYNTSKECSRCGLIGHRSGKSFKCPDCGHVDHADANASFNIALRPIFEEGMDRLHADRDACKGSTDTHREATL

SEQ ID NO: 45228 - protein, 516 aa, unknown
  TnpB Polypeptide
LDGGVLDTELIMAQLAPEVRSLSAYATYTVRNDTKLKDELSRATAPAEAGRQAGITMPDFLVPDKKDEDGNPLTDKNGEPIKLKTGRSRKERLFRHRVVTEYRSWQERIAAANGESDKYVSQGWKRTVDASAPSYGEGTINLGAVDRSYAAVENNPFKDGEIILKLVVKGNWYRLIFPFDNTRFHEGKVTLPLIKIQDNQPVFIFTVVTDNPVVQFSGDYTVGVDVGINNYATVVVRNSHTGRVVHETTLSQRVHSLWKSIKASERQVRALNKKADKLLYQRQAHMCAIDEAQLHREAASRKKRELAIVAAQEIAYLSHQYDNAVVAVEDLGWIRNTMQNGRWNRGAFVQWLAHYVGQNGGWVVAVNAANTSQVCHLCNEQVVHPEHKVSLCSKHGAMDRDVNASANIAARAVSRVEKARKTHAKNHKIQRQTALRTPVARETLKYPGRDRAKNVPTPKRKNHPRVVREVNLPFSPARVVMTSVLADCGTCGVVETDMAAINQSNVTCKCKLCSLN

SEQ ID NO: 45229 - protein, 522 aa, unknown
  TnpB Polypeptide
MPEGGALARSQTYRAFVARPTHILDLNGELLDSMPVMVQLASEVQGISAYATYVVRNDVTLADALAQVTAVQPATAGRRAGVTMPEFLANGRTGRSRKEALIQHNVVTAFRSWQERIAAAEGTSSKYVSQGWKRTVDASAPSYGEDYINLGAVNKQYAEIENNPFTDGEIVLKLVIQGVWYRLIFPFDNARFTEGKVTLPVIKVENNQPVFIFTVVTDNPVAQFSGNYVIGVDVGINDYATVIVRNSATGQVVHKTTLSQRVHSLWNSVRASEQQVKQLNKKAEKLLYDRQAHMSAIDEAQLHREAASRKKKELAILAAQEIAYLSHSYGNAVVAVEDLSWVSNTMQNGRWNRGTFTQWLTHYVGQNGGWVVAVNPANTSQVCHVCGEKVAHPKHKVSICPQHGVMDRDANAAANIAARAVPKVEKARKTRAKNRKLQPQARLKTPVARETLKYPGCDRTKNAPTPKRKKRIARGVNLLISPARVNVTTVLADCGAYGVVETSKAAINQGNVAYGCRLCTLN

SEQ ID NO: 45230 - protein, 549 aa, unknown
  TnpB Polypeptide
MARGKRKSDKRWMWVAKPGDKIVVSRTAVIPSKKLSRREFRALEEIVNIYSRMLGDVLPHASRNIIENYYRLKNEKYRELRSMYPNIPSHYIHGLCRDAVERVSSLRRNKAGQYSREIFDELVKYLDLGKRDLRSMRIVRYLWRKSREIARHQVDLEMMEGKLVPRINSASLWLVDDHVWKPVSPTKIRINGFENIFFTSVAINTHRGWVYLDLEPSKEFYKLLARGFRPTSHAKIKLDRRNRRVFFHLSLEKEIEIYKPEDIKPVDVNENSVATIHKAFTVILETDLAKTTLGYSYRKESIQRRNGSSGKEARKAMKKLREGKKKRDYRMKTANMIVRDAMRVRGVIVIERISGEDIRVMIARYRDRQLRHRIYQSALKGELNAIIDKAREYGVPVLMVDPRNTSKICPIHKATIEYGEDRIGICSKGGEKWHREVVALINIYFKALEALYEGYAQKGFEVSILDGSPIPLGSTATHEPIEIPRSLWGRWKSLDDHRDVITSLWVKKQSNTNKLISMTINNHRGTSGKNWEPQYISSSGAPQKGLRGI

SEQ ID NO: 45231 - protein, 439 aa, Moorea sp.
MLTMTYEYKLQPTPEQTAIIEQTLDVCRCVWNFALRQRKDWCNSRKSAINACSIHSEYIISADEPFPNYHKQAKQLTEAKKQYPQLKMVHSQVLQQTLRTLDRAWDDMKARGFGFPRFKNKYRMRSFVFPQLGLDPIRNDAIKFPKLGWVQWRQSRPIPHGFEVRQARIVSKASGYFVMLSLQLNVDVPNPIPHGHPRGLDLGFDKFVATSDGEEIKRPLFLKTLQSQLKLLQRRLKNKQKGSNNRHKLNQKIARLHQRISDTRKDWHFKLAHHLCDGAGMIFVEDINFVSWQRGILSKHSADAGFGQFVNILEWVCFLRNVYFAKVNKDGTSQTCPNCGAHTGKKTLDVRSHHCNECGYRTTRDVAASQVLRNRGISALGHSVLENVCGLRATGSIGHDALVGGERSRKPASRGSGIPFLKATEHSEVARGRGGCQHL

SEQ ID NO: 45232 - protein, 422 aa, Selenomonadaceae sp.
MKKLKDLPYCFGLKMQAYPSSTQKRIIDKNINFSRFYWNQLVSANKKAAGLKHAKSFSWPWADNQLAHLRELANPNCKLLKQLNPFLNDAELDSDVPMQVKANYQAAWNLCKKVKSVQPPKFHKKHENGSYQTSNHYNGKKIAVASPYNGNIKFLDEHHIFLSKVGRIRTAFSPKLYFRIAQMVQNGGEVRLTKAKVSRDACGDYFVSFQFASDVPYAATFAKTGSSIGIDLNLDNFLTDSNGDVIDNPRFYRQARTQLAKAQRKLGKRCARAKKEHRTLRLANNYQKQRKLVSRIHRRILRRRDSFLNELSTTLIKNHDLVAAEELRSKNLLKNHALAMSISDAGWRTFLSMLEYKAEMHGKTFRAVDPKNTTQTCSHCGHVLDKEHKLTLKDREWKCPVCGTFHIRDHNAAKNILAKALA

SEQ ID NO: 45233 - protein, 541 aa, Mycobacterium sp.
  misc_feature (300)..(359): Xaa can be any naturally occurring amino acid
MIVRMRSCAQAAKVAEATGGVQLAGKPKPDGTPTFSRYVEIGVDFEAHRPVVESVSVLFELYDGDANSYAATGGPGAQLPSGWMVTAAKFEVECPADPQRAGLVRSHFGARRKAFNWGLAQVKADLDAKAADPAHESVDWDLKSLRWAWNRAKDDVAPWWAENSKECYSSGLADLAQGLANWKAGKNGTRKGRRVGFPRFKSGRRDPGRVRFTTGTMRIEDDRRTITVPVIGPLRAKENTRRVQRHLVSGRAQILNMTLSQRWGRLFVAVCYALRTPTTRSPLTQPTVRAGMDLGVRTLXXXXXXXXXXXXXXXXXXXXXXXXXXXXXXXXXXXXXXXXXXXXXXXXXXXXXXXXXXXXAHQLTTELAGTYGQVVIEDLDVAAMKRSMRRRAFRRSVSDAAMGLVAPQLAYKTAKCSGVLTVADRWFASSQIHHGCTSPDGTPCRLQGKGRIDKHLLCPVTGEVVDRDRNAALNLRDWPDNASRGPVGTTAPSAPGPTTTVGTGHGADTGSSGAGGASVRPRPRRAGRGEAKTQTPQGDAA

SEQ ID NO: 45234 - protein, 426 aa, Streptomyces sp.
MHLRYSFRIEPTPGQRIALARTFGCARVVFNDALAARKAAWKADRSRIATGALAKRVITEAKRTPERAWLAEVSVDALQSCLRDLDAAYANFFASVSGKRRGRSMGLPVFKSKKDNRQSVRFSKNGFRLRDNGRLNLAKIGDVRVRWSRPLPSPPSSVTVIKDPSGRYFASFAVETGSEPLGPVTAEVGIDLGLTRYAVLSDGRVIDNPRFLRRAERKLRKAQQDLSRKVKGSANRAKARLRVARVHARVADARRDWCHQRASRLIRDNQAVYLEDLAISGLARTRLAKSVHDAAWGMFRRVLEDKAARAGRYVGVVSRWLPSSQTCSVCWVVDGKKPLRVRTWRCGGCGTEHDRDLNASRVVLAAGQAERLNAPGGPASPGVEIPRQARPVERGTHPKAQPMHRQPDGNRRPWGGADVKCAPDQR

SEQ ID NO: 45235 - protein, 544 aa, unknown
  TnpB Polypeptide
MLVRSVLLFDVLPQGADGRSADCPGEVGPRPELVRLVVVPDEVRELLAEPAGRHALEAVHQARERDLGWEVDQQVDMVVLAVELDQLALEVIADRAHDLLAPSQVPVTEHLVPVLGDENQMNMKHERTVSASANVAVAGHKPSILRGMQLRYNYRLYPSTGQRDALARAFGCARVVFNDGLHARLAAYEAGEPYISDGALSKMLTQSKQTPERAWLTEVSSVVLQHALADLNIAYRNFFASVTGKRKGRKLGPPRFRSRKDNRQAIRFTANAHWKITTGGKLRLPKIGDVPVRWSRSLPAEPSSVTVVKDAAGRYFASFVVETDASPLPAVEAVVGIDLGLTHFAILSDGTKISSPRFLRRAEKTLKRRQRELSRKQKGSANRAKARLKVARAHARVGDARREFHHQLSTAIIRENQAVAVEDLPVAGLARTRLAKSVHDAGWSSFVAMLEYKAARYGREFHRIGRFAPTSQVCSACGVKDGPKPLHIREWTCAGCGAVLDRDINAAVNVAKAAGLAVSACGAQVRPQLAVAQRVEAGTLQGAA

SEQ ID NO: 45236 - protein, 343 aa, Paenibacillus sp.
MNRGGLAMFIQKAYKFRIYPTPEQATLINKTIGCSRFVYNRFLAWWREAFQKTGKGLTYGACSTELTGLKRELSWLSEVDSTALQSALKHLADAYKQFFTKRNNAPCFKSKKNPAQSYTTQIQGKSQSPEVSIVERCIKLPKLGWVKFAQSREVTGRIIHATLRRHPSGKYFVSVLAETEAEALPKTRSEVGIDLGLKELAVLSNEEGFGNPQFFRTLENKLAEAQRKLSRRKKGGSNWNKQRIKVARIHEDIRNARKDYLDKVSTHIVKNHAIIAVEDLSVRNLLTNRKLSKAISEASCPCFARCWNISVHGMAEYWLQLVAPLPPPNYVLAADTGTGKSRI

SEQ ID NO: 45237 - protein, 238 aa, unknown
  TnpB Polypeptide
MQIISSYGVELRKQNIPIRQTLEIYRSAVSYLIGIYVQVWEELAEIPDAKRRFNAAEHLVHTTKKNHACFDFDIRFPKMPSYLRRSAIQHALGTVSSYKTRLDLWEKTDGKSGKPKLVYENHAMPVFYRDVMYREGAEGKDEAYLKLYDGHDWKWSCVRLDHTDMEYLRKCWSGKKASAPTLEKRHQKYFLRFSYKEEVTLTKTPVKEQIICSVDLGINTDAVCSIMRAAVFTERKAS

SEQ ID NO: 45238 - protein, 429 aa, unknown
  TnpB Polypeptide
MNLTFRYPVYPTQTQETTLLEWLDHLCELQNSARHDRKVAWETEGEKVSCYAQQQKLTVARKKYADFREVPQDMQVCILERTDKAYDGFYSRCEAGAAKKGYPRHHKRIRSMSWKLRKYPKVVQRKTKDTDRKVIKVRQTPIRETAWKHDRLKVPGLGEVKIYMHRPLQGDPKEVTLIKKASGWYANISCELPDTPKVEPTDAIAVDMGTTHYLTTSEGEKEGNPRWYRQAEGLLRKHSKDLSRKKLGSNRRKKQQQKLALHHERTTNRRKDFIGKLVYKLYHHQKNNVLVAEDLRISNMVKNKHLSKSISDASWATFFKWCGDIAERDGFHFHQVDPKNTSQTCSSCGQKSPKKLSLAIRTFKCQFCGTVLDRDYNAAINILFKAAAAFRGERWVTTLYETRNKNEARDTGLQEATQLTLFPITSPSL

SEQ ID NO: 45239 - protein, 184 aa, Thermosipho sp.
VLGIDLGIKDTIVLSTGEKYILPKLTKYERRLKRLYRQLSRKQKSSKNREKARLRLAKYIEKINNIKNDWIHKITRKIVNENQVGKIAVENLNIKGMLKNKRLAKHIQWQSWYKFITILEYKTKNAGTELIKVDRFFASSQTCSVCGNVNKEVKKLSIRKWTCPQCGAVHDRDINAAINIASYA

SEQ ID NO: 45240 - protein, 418 aa, Cyanobacteria sp.
MLTMNYTYRIYPDLHQSAMMLEWLETSRKVYNRALRELKDWTLSRKCLADRCSIEREYIIPADVPFPSYHRQQNDLPKLKESWTDLKNVHSQVLQTTIRRLHDTWEAFQDRGYGFPRFKKYGQFKSFVFPQFKRDPIAGDCINLPKIGKVPMSLSRPIPEGFKVKQVRVLSKARGTQWYVVVSIQSDVSVPDAPFHGRSIGIDLGLERFATVSDGSFFERPKFLKSQHRKLKLLQGRAARKQKRSANSEKAQIKVARLHHHIASTRKDFHLKTAHKLCDQAETIFAEDLNTVGLNRGMLRKDCIDASFGAFLDLLEWVCWKRGAFFMRVNPNGTSQTCPHCGATVKKSLDVRDHHCPECGYQTHRDHAAAEMVLLRGLNLVPVDNRGMETVCAGVLPGSETARQVPKSRKGATRKPKK

SEQ ID NO: 45241 - protein, 537 aa, Syntrophomonadaceae sp.
LAKKVQKIKRKNNNDNLYKSVKIAVPKKLLNNIKLDRLYEVDKAHADAVNAWIDKYYDRIDLAEKILSGTATGIMQKDSVDVLLPAAYTQVAGNKMLDILRSHYLNVQDKIAADIWRDKDYTAEYKYVYATFARSIKLFTRFINNNYSVEDIILTWKTGYLAKELYHQLSLEEKQSIPAVIHTSFCEIREKWQKPVFTGGNIQLDYRVFSIAAADNSTHFNLWMDITTLVPHKRISIPFKLTSVKEKELTQHFPDWQTNKRKGTLVIRNRHIHLSIPVAKEKPDNVPEKYVGVDVGMLAPISTDTGKQIGVGFTELVKEDYDKYLTLQSTRNKIRALKNQAEKRLEITTNPITVEKLEKKITQYNRHLSPNNWTELRNKIKSVVTTEIGRTVNILIKDIEPAETLVTMEDLSDMNAKGVRRTRRGKFDLSNWARGELQRHLEEDITWHGGNIAYVVPEYTSQLCSHCSHLDENNRQGKIFKCLACGYTVDADINAASNIKERFFDTELQKLARKYNWNKELRRKKIKELLLSRFKTA

SEQ ID NO: 45242 - protein, 415 aa, unknown
  TnpB Polypeptide
MDNTPVIVKDEMLVKGVVFYLESDLPSEAKFLLEDFRLAVNNAVRAGLQARVTSRSALNKLAYKDFRRKHTRMYSQHLVSAFEVAGSVLKSHRRRVRKGVACRIPYVKRLMMKAENQAYKLDRKSGVIDLPIRAGCHVELKLVVSQYHRKYLDDMALSLGSLTVLPDRVIVAFRKVAPKPFVPESALSLDTNERSLDGVFVEGDVARAIKAEFPEVAIIQQRHHERRKRIQRKKAHDRRTSRNLCRREGWREHHRIDYRLHQVANSVLKFAEERRSAIVLEDLKGFKSKRSKELNRRLSFWPRRKLHQIIEYKAQWKSIPVLKVNPKNSSRTCPTCGRMRYSRMGTEFKCECGWHMDRHINASINLLQTVISKGMAGGLRFDPGAFQHDVMMILYDPVTGARSELNGTSGVVGVT

SEQ ID NO: 45243 - protein, 401 aa, unknown
  TnpB Polypeptide
MNRETKHSIKFANKEKLAKLEQVFNMYQHDLQLYINAILAGKIELAKFVSSKDLDVPGTFIKQSHWKSLLYKEASAMVKKQLRITKDRTYKKYKKLYAKCKTEDRLQYFTDRKFRDLSINYLKRTKINIKKVSIPLDQRIVNVQTGNHYDYFLEITLPIENIKNKKQRYDHIKIPLKSYSYCNKYISWKRSMTVKLSRNQYGMFACFCYEKEDIPKKETGKTVAIDLGYNKLITTNNGEVYGDQLKQIYLKLANKLRGSKNYAQYLQYKRTEVNRVVNQFVKEQDLSTLCCEDLKELRKSSKMSHKELNKQQYFTYAQALAKLETLSQTEGFLLIKVNPAYTSQTCSKCGEIHKESRIGEDFKCVSCNMELDADINAARNILQRGVYSPSSTKTDLIENFQ

SEQ ID NO: 45244 - protein, 381 aa, unknown
  TnpB Polypeptide
MVPLRCNKKDFKYMSGLNKTSAEVWNLCVQIDKDYKLKNQKSATLSILEFATKQKFFMHAKGIQHAVFKYYNARFAMWQSRKARHKNSGYVELPYKEKSFLSTGWDDQAIRCDYGKGKIKLTAVKGQGQVTCNAKSIPRNIVEIELVYKDKYYLAIKYKEENNTNLIQSDSVASIDLGEIHAITSIDNNGNSIIITNRLVRSLVRLKDKRKKELLSLRSRCQKGSRKYNKYTRAILKIRCEFDKKINDIIHKQTKKYVSWCEDRGIRQIYYGDLDGVTRNSKDRLRKSTNQKLNMWRFGQIENKLNYKLFNIGTSMIKINEAYTSQKCPACGKLNKTSTRNYGCKCGYSQHRDIVGAINILNNNSDYNIQRYVIKEYLQIC

SEQ ID NO: 45245 - protein, 310 aa, Frankia sp.
VPWTLPALRLEWNLEWNKAKATVAPWWAECAKEAYSAGLDQLASGLKNVTASRNGRRKGRRVGFPRFKKRGKARDSFRYTTGSYGPDGDRHVQLPRISRVKVCEPMGALTGRLADGRARLLGATVSRTTGRWFVSFTVEVDREVPAGPSRRRRTARPVGVDLGVKHLAVLSTGETIANPKHPAGSLRRLRSASRAYARSTPGSAGRRKRAARLARIHARAANQRRDGLHTLTTRLAKTHDTIVVEDLHVAGMLRNRRLARAVCDTGMAEVRRQLAYKTVWYGSTLVVADRWYPSSKTCSGCGWRNPGLTL

SEQ ID NO: 45246 - protein, 206 aa, unknown
  TnpB Polypeptide
VGGNVGGVAITQHRVLRQRGSPYPSSPSRPSCSPAREGAYDTLQSVSAKEHRRVKDRLHKISRAIVEEAKEDNALIVVGNLEGIQDRDLGAEMNRRLHTMPHHTLKNYIEYKAKFAGIAVKSVNEYMTSQTCWRCGEQEATTRKGQGQHLCHECGLDDNADKNGATNIAKKGLGKDIACPLSSLGAVCEPALEPSGADQAAATVRL

SEQ ID NO: 45247 - protein, 234 aa, Scytonema sp.
MLLGFKTELKLNNQQRTTLMKHCGVARHAWNWGLSLTKQILDHNKANSDSKIKFPSAIDLHKWLVALVKSENEWYYECSKSTPQQALMALRESWKRCFNKSAGVPKFKKKGKRDSFTLEGTVKILGNNKIQVPVIGVLKTYETLPQVLTKSATISRQADRWFISFRFDVEQQESLSESVVGVDLGVKALATLSTGEVILGAKSYKNMKPSWAECNGCIAIKLSALLTGRKLNYK

SEQ ID NO: 45248 - protein, 526 aa, unknown
  TnpB Polypeptide
MKRARTPTFLIELPLAADSVQSSHLRAHLEAGRCLYNALLSEANKRLRKMRSDPEWQAACAIPRTHKQERSRAFSRVRQQYQFSEYALHNYAKGARVSWIADHIDATMAQTLASRAYHAVNRVCLNKARRVRFRSKGRGLDSVEGKRNDTGMRFVLQPAEAGNAGWLIWGQDRIRAIIDWDDPVIHHGLLHPIKFVRLLRRAAPSPQAQGADCTGHRYFVQLVLAGTAHQKPKHPAGNDIIGLDIGPSTLAIVPREGEARLLTFCAELTPTAGRRRRLQRQMERQRRANNPDNYDDKGRIKQAGKKRLHWKESKRYSAIRRRAATAERKLAAYRKSLHGKLVHDIVRVGKTMRIEKASYKGWQKRYGKSMGLRAPGMFLEHLRRTVAKTGGILSEVSAFQTKLSQYCHGCKRYVNKPLSQRWHHCPCGVGPVQRDLYSAFLLAYLEPEDTIPSISLKEWEGAELRLRAEMERLQQRANEGQSLPRSFGIPRAGARRLEILEHPRQELFLPEGAEKKRRRGHKNPRH

SEQ ID NO: 45249 - protein, 388 aa, Lactobacillus sp.
MLKGVKLRLYPTQTQAKQLWQLFGNGRFVWNQMLAMAKSRYQNNPSSQFVNEYGMNNLLKQLKKEYPFLKASDATSLQIVNHNLAQSFSRLFKHQGGQPRFKSRRSTKKSYTGRFSASAKVVIAKRRVKLPKLGSIKTSKTGALAVGKFKRYTISLDPTGKYYLSLQIECPDPEPFTKTNLVVGIDMGVADLAITSDGDKYDKFQALWETYQATAWQRKYNRRKYKATINVRQWNHNKAHLTDMVINDYQNWQRARKTKARYQQKLANKRKDYLHKITTDLVKKYDVIVIEDLKTKNLMHNHHLAKSIANASWSQFRYTLEYKCQRYGKQLITVKPNYTSQQCSHCGFQSGRKPLEIREWTCPRCGTQHDRDVNAAVNILNKGLKNAG

SEQ ID NO: 45250 - protein, 397 aa, Ktedonobacteraceae sp.
MDIQRTVTIIIEEDEDLKSTLHAFRAIQQKVSAVCFNQGKPLSALALHHACYHQVKDSLNAQMTCSALRLVAGAYASAKSNKKPAQRPFLFTKACALFLIGKRGRDADVRSDGTLSIWTRAGRKHLSYTIPQDFKPLFEKAKELDSLTVIKRDDKLIGRLTLTLEAPEPAGILPVGIDLNETNALVAVDPDGRELFISGKAVKVKNRRTAKTRARLQRKLAARKAEKKDTRSVRRLLKRLGRKQRNRTRTFAEATAKQLVQWAPKDALLVFEDLHLPRPEKDKLRGRSLRRRMSLWPRALLRLCVQNKAQECGMSVAEVNPAYTSKNCSRCGLRGVRRRHTFTCPHCGFSDHADINAARNIRNRFTQLRLSGLPSISPEALSPAGDEGKPPSSDGGH

SEQ ID NO: 45251 - protein, 446 aa, unknown
  TnpB Polypeptide
MRIAYQYRLRPTSSQIALMEQWLELLRKQYNYRLAERFTWWEQNRCPINACPFICHLPELKDRPDFYSQKRDLVNTKARFPEYQAIHSQVLQNCVERVHKAFDRWLKGDCNGQRAGKPRFKGVGRYRSLTFPQMKQDCIQGRFIHLPKLGAVKLVQHRPLPEGFVIKTATLTRKADGWYVTLSLQDSRVPELTPEPPTLENTFALAARSALGIDVGLDSFLVTDEGESVPVPRYYRKAELRLKRLQRALSRKQKRSNRRRKALKPLAKAHLKVANQRKDFHYKTVKKLVSKGKHIAYEALNIKGIAGTRLAKSAYDAGWGQFLQILAVKAERAGLRAIAVNPNGTSQSCASCGQKVPKGLSDRWHSCPHCGLQLSRDQNAAINIKYRAVGHPVLKAQEMSFTGVTEKPALFIATQRGATALAARFPSGCRRRSALLWHESGSMSLS

SEQ ID NO: 45252 - protein, 369 aa, unknown
  TnpB Polypeptide
MLKTIRVKLLPTQDQKEILLATMKAVNSACTSISEFAFQNKVFNRFELQKQMYRSIRSEHGLGAQITILACRKVADSYQTSIKKKEELTLHTYRTRGAIAYDSRIYTIRDTQVSLWTLNGRIKVPVQTRYSFPDPKEADLCYDRTKNRFYLAISVEVPEEPPYEAESYLGVDLGIVNIAATSDGVQVPGTACDRVRQWYQDRKRILQQVGTRSAKRRLKTLSNGENRFKKNVNHIVSKNLVTLAKDTSRGIALEDLTGIRERTTVRRSQRDRHSKWAFAQLREFISYKAALAGVPVVLVDPAYTSQGCSACGYVDRKNRKSRNLFWCMACGHTEPADLNAAKNIAFRAAANQPMVAEASPMILAASPRF

SEQ ID NO: 45253 - protein, 494 aa, Oceanobacillus sp.
MARKCTPTYTIEFPLHIPIWQQHRLEKKCNMARMVYNSCLGEALKRHKAVKTDKRYRTLLREPTSKDRNKKLADIRLEYGFSEYGIHHFVKKVQHKFKEHIGSLESQKLATRAFQTVGKLHFGKSKKVHFKNAKDDISVENKSNQTGLRYIEGEILWGDKPTRKNPKPKNWLCMPISPKDDDEYAHWALLDKTKYVRILKRDVRGKTRYFVQLIQEGYPPTKRNRKVANDETKRIGLDIGTSTIAISSDSQVELRELAPACYYDEKELRRIQRKMDRSKRSTNPGNFNENGTIKKGRLTWSYSKRYERLRQKRKECYRKVAGRRKMSHEKLANDILAIGSDIRVETMRFQSLQKRAKNTTRNNTNGKVNRKKRFGKSIAKRAPAMLLTIIERKLNYQGREIKKIDTYATKASQFNHVTGKYEKKQLSERWNDFGAFRIQRDLYSAFLIANTKETLDSVDIDLCNEGWNNFIERHHCEIERLKQSTSKTIRWFVV

SEQ ID NO: 45254 - protein, 451 aa, Oceanobacillus sp.
MQQTKTIKNKITSHSSKTFEPTLAIYRKALSFLVDVINTEWSVLENLSTKELVNAVEKLTHHTKTNPCPKYDFDATFYKFPSYLRRAAISKGYGIVKSYRSNYQNWLDEKSESIVNGKHFKKKPPVLTVKHQAFPVFYKGNMFKQVSDNQAKIKVFLGNDWVWVTITFHHKNLKNRGIAGWKENNPTLVKTGKKYFIHFSYEKKIQLNKTKLKEQVIVSVDLGITNSAVCCAMRSDGTVIGRKFINQPVEKDRMYTKINKLKKAQRHSGYVNAPNYWRRINGLKKHIVHHTSSEIIKFAVDHQADIIVFEYLGKMKHPEGMYGAKKLRHKVHHWSKLGIQRKVEEMAHYKGVRIRRVSAKYTSALAFDGSGEVKRNHKKDLAAYQNDKVYHADLNASYNIGARYFIREFLKSFSEKKRLLLEAKVPSLVTRTRLTLASLISLHQALRTNGA

SEQ ID NO: 45255 - protein, 461 aa, unknown
  TnpB Polypeptide
LDETYKLTKTNRKVIMQVQKSLKIPVHYGTTKSKINILDNLTERITYCIMRISELIIDKTKIDRPTIRKLVKDNNIVLKTGLSAGFIDQCIDKIIWAWNSNKRLHREWEKKIKRAQERVQSARDEKEKEMREKSLQKLLKREPSRPLFQKKTPCRIDYRTGKVEWGRGKCKFSPLWIHISTLEKRETIDIPLNPSQYHLNELKNAEIGDFEIIKRNKKYYVHISITKFVEDKPISSIGGGDQGLNRTVAVVLLTDPLPREEHLMDAAKRELLDKYDAIIESLREAEKWDKLRELRNKRGNVSLYCDWILANDTAEFTEESLLMLGNTPFRRTQFRGNGMPTLRKRIGKWSYSRQRKLIALKRAELGMPTLFDDEYNTSRKCHICGSMLTTRKWDNGYSWILCHSCGAKIDADFNAAYNISYKVNPIAVWVYNSGIERYNALRCRDDRLKVQMNMGETYASA

SEQ ID NO: 45256 - protein, 377 aa, Proteobacteria sp.
MLMTMKYRLRPTEKQAHRLEAQLEECRTLYNHFLEARTRAWEERQESLSYYNQTVTLPVLKQQCPALSQVYSQVLQNVALRVDLAFKAFFRRCKAGETPGHPRFRGYGRYDSMTYPQYGLGWKMGERVLKLSKVGAVRVVQHRPRAGQPKTCTIRRSSLRTWYVTIACACTPATLPASHDAVGIDVGLRSFAALSTGESTPCPKFLRTDEHELKRTQRQLSAAPRGTPERRKRRAIVRRVHERIANRRTNFAHQESRRLVNRFGVIAVEDLAVHRMVHHHCLATSIQDAAWSQFATFLAYKAAWAGRRFVAVNPAYTSQDCSGCGHRQKKTLAVRIHQCACCGLTLERDHHAAVNILRLGLQSLGLVPGSSGLQAGE

SEQ ID NO: 45257 - protein, 344 aa, unknown
  TnpB Polypeptide
VEKSDEYGFFKECPSQVLQQKLRDLERGFKDCFDKRQPLKRLPVFKRKGKGDSIRFPQGVKLDNRRIFLPTIGWIGFYKSRSISGKVKNITISKKGERWYASIQVEQMIKIGKHPSDSEIGIDAGINYFVVFSDGRMIEGVNSFRKHEERLAREQRKLSRKKKGSQNWKKQKRKISRLHHTISNVRSDFLHKLSTETSQNHARVFVEGLQIRNMSASARGTIEEPGRRVRAKSGLNKSILDQGWFEFRRQLDYKLFWKGGMLVEVNPRHTSQRCSCCGHTSKENRLSQAEFECIACGYEENADVNAAKNIKTVGQTEMVCEANHVGGRQQEPVGTREEVLPVAS

SEQ ID NO: 45258 - protein, 297 aa, unknown
  TnpB Polypeptide
MLYAQYSNKLYPTTAVLDNKNSYLQASHSKIKNKNHLQFKEAGIDVGTNNLAAIFINDEITPSLIVDGRKYKDYNFKFNQLITELNKNKTIKCAKKRKKIEKIISSLYEKRDKYLKDQFFKIAKRITEYLYLNGVSTVYVSGNPAGLRNMWENNSNKTIPQYSDQIYFFKFLRYIKCHAQDYGIRVYYIDERYTSKTSCISDDIKNIQNNSNLTNTFNGKRVTRGLFMDTVINKAFHADINAAVNHIKVATGEDFSWLKNRLFKLASPIRIKSNQEFCKLIKKLQNSTQIDKKAIFC

SEQ ID NO: 45259 - protein, 550 aa, Streptomyces sp.
MAEQKRKPLRQIARPFVADGPPGVSIRDRLKGLTPQDEQMLRLVGEHMGRLASADLARRCRDGLDHCTDTWAGRKRDLTALSTSRWAGSVTAGTHDQWGLSRRAQHQHLMSLDAGIRMIRHRLSLPVGEKGSRGRPGGYRSKHEWFAKTRRLTILEDRYERVRAEQEAGQVCVVRGGRRLLNQRHHLTAAKKTPEQWRSEWEAARWFLTADGESGKRHGNETIRVTSDGEVSIKLPAPLAEHANARHGRYVLAARVAFPHRGTEWRDRLTRNRAVAYRIHLDVPRGRWYLDASWTRKDLPVVPLDALRASGVTGVDTNADHLAAWLLDEHGNPTGAPHRFDYDLTGTATHRDAQLRHALTRLLHWATTCGTQAIAIEDLDFTDTTTREKHGRKKKFRQLVSGIPTGRLRARLLSMCAETGISVIAVDPAYTSMWGAEHWQKPLTGKNRKTSRHAAASVAIGRRALGHAIRRRTAPPHHDRSDRRGHRTAQAGPHDQGREETRPRVPGPRTRGVQPDAAGTRATSASNTVRDAPVEPVWVQDSLLLTDQER

SEQ ID NO: 45260 - protein, 203 aa, Rhodococcus sp.
VKRVVKIKLAPTDAQARALHDTLMLCNTAAGVVSQVGHASEDRRAFALQKAVYHQLKALGLSAQPAVRTIKKVADAYAARGANLEAGNYGPRGGKRAMDIAATAIGFRALAAQPFDDRCLSWQQQGSTISIWTSEGRLKAVRYVCAPWQRALLEHRCGETDLVFRDNMWFLHATVDVPAPEPVVVEEFLGVDLGIVNLSGHLR

SEQ ID NO: 45261 - protein, 553 aa, Rhodococcus sp.
MSTTGDRRTAVAARQFSVTTRAPAALDDETGESIGLDDVDIRVGWLLDLITTAGAELVSRLWRPATFDVLAAGRDHQDRRLPAQGHVAAARLGWTPTYPEGVYVPSRVSRVVTAQVMATLRTLRILAYRDTAIAALSTRFDPDTGVVAPPIGSGDHVSAGFARGVRRQLIARARSSGGAPASRMRITDLQGPPQIASMARLSATDRQLAQLAVTGDELVLTVKLPTCPAPAGRAQWRRVRLTAAIPTHLHRRAITDWHLPTLVLDRRGLLWRCAATELVPAGDLDSAAVAVGVDWSPSTLGAAAITSENSEGLSSDYRGWTYDDRGLGIKLARLQAEGQLLHRKAARLTRLAATAPPEVRAQLEAKIAVLDAHRTAVGAKRGKINRELAFHFARQVTGYAAGAGAQVIAVEDLTTLETRGHGRVNNNRAAQSARRQATAALTHTAAGVGIAVVTVPARGSSAQCPGCDEPLARPGGYHTAWCPACQVGGNRDHVAGVNLAKRALLGRGKATRRRGQSPAVRWPSMRRYGHRATNRVPPRADHGTAGSATACPP

SEQ ID NO: 45262 - protein, 405 aa, Rhodococcus sp.
MTAAAVVADLTADVDAPDPSRLVIRAFVYVLDPTPGQVEALWSHCGAQRFAYNWALSRVKANLDQRAAERSYEIPDSELTPLVSWSAYSLRKDWNTVKNAIAVNAETGQPWWPENSKEAYSSGIANCAVALSNWSDARSGKRKGSMGFPRFKSKRAVPSCRFTTGSFGLVTDGGDRRHVQLPRIGAIRTCESTRKLARKTIAGSARIRSATLSFRRGRWQVSFSVEATLPARALPPTGAATVGDGGVGRSVVGIDVGVKHLAVLSTGEMIENPKHAGKQAKQLRRLGRRASRRVGPDRRTGQQPSRRWRRTQEQIRALHTRIAAARRDHLHKLTTRLVRDFDTVVVEDLNVAGMTRSGGVYKRGLNRALQDAGLAEIRRQLMYKTERTGTGLHVADRWYPSSKTC

SEQ ID NO: 45263 - protein, 410 aa, Methylorubrum sp.
VILTYQQKLRPTATQHRLLAEALERQRLLYNAALQERRDAWRLGRKAITRLDQQKSLTVIRADDPKGHGADPANMGRWTLKRVEDGFTGFFGRVKRGLKPGFPRFKPVSRWNTFGLLEATGLRHEGDRIRLKGFGRPIRLNHDRPLPRDAKILGVTFTRKGRHWYVGFTIETTEVVAAKPPLGEAVGGDLGVEALLTLSTGERIPNVRPSSRREREIRVSRRALARCRKGSNRRREVKVRLARQLRAVANTRDQHLHRVSARLAREHPLVVLEDLRIRNMTRSAAGTVEEPGTNVTQKRGLNRSILDAGWGKLVHLVRYKAIRAGGELICVDARGTSQECRQCRAVAAKPLSLRRHLCPCGLDEHREVNSAGVIRDRGLAVKAASEGGQPLGDANAGRRAVRRPGTLLAA

SEQ ID NO: 45264 - protein, 372 aa, Clostridioides sp.
VIAVKKAYKFRMYPNKKQQELINKTFGCCRFVYNKYLAKRIEVYKNDKETFTYKQCSSDLTNLKKELKWLKEPDKFSLQNALKDLENAYNKFFKEKTGFPKFKSKKTNRFSYKTNFTNGNIMYCGQHIKLPKLGMVKIRDKQVPKGRILNATISKEPSGRYYVSLCCTDVDIEAFENTNNQIGLDLGIKEFCISSCGDFIENPKYLKKSLNKLAKLQRELLRKTIGSLNRNKARLKVARLQEHIANQRNDFLQKLSTKLIKENDIICIEDLQVKNMIRNRKLSRLISDVSWSEFVRQLEYKANWHGRQIVKVGKFFASSQICNKCGYKNEEVKNLNIRDWICPSCNETHDRDINASINILKEGLRLITIQNK

SEQ ID NO: 45265 - protein, 246 aa, Escherichia sp.
  misc_feature (3)..(3): Xaa can be any naturally occurring amino acid
  misc_feature (234)..(234): Xaa can be any naturally occurring amino acid
VEXLERAYKNFFRKRAAFPRFKKRGQNDAFRYPQGVKLDQENSRIFLPKLGWMRYLNSRQVTGVVKNVTVSQSCGKWYISIQTESEVSTPVHPSASMVGLDAGVAKLATLSDGTVFEPVNSFQKNQKKLARLQRQLSRKVKFSNNWQKQKRKIQRLHSCTANIRRDYLHKVTTTVSKNHAMIVIEDLKVSNMSKSAAGTVSQPGRNVRAKSGLNRSILDQGWYEMRRQLEYKQXDARYVDIQRTPM

SEQ ID NO: 45266 - protein, 270 aa, Photorhabdus sp.
VLDSAIKIPKVSPIEARLHREITGTLKSITLSRSATGKYYASILCDDGTEAPAKPTLISNVTGLDMGLSHYAIKSNGDKTPNPRHLINASRNLRRKQKALSRKKKGSANRRKARIQLAGVHERVANTRADFQHKLSRKIVDESQAVIVETLKAANMMKNHHLARAIGDAGWSGFITKLEYKAAEKGVHLVKLDQWFASSKTCHCCGHKMPEMPLNKRIWQCPECGVEHDRDINAAINIERKGILELCAAGLVVQSAHGGQRKSVIQTVAA

SEQ ID NO: 45267 - protein, 418 aa, unknown
  TnpB Polypeptide
MKTQVKRFKRFKPATGEVQRKVTYRLYPTPGQEASMLDMKGAHMRLYNAFLEQRRLAWRRQGISLGKTEQSAELTRLRQENSEIGVLNAQSCQVTLNRVDLAFQAFFRRVKAGQEPGYPRFKTFNRFSGWGYATHGDGWTLMPGEKGQHGKLRLSGVGNIRMRGGMRDEGTPKTCEILHQRGKWYVSVTIHCKPIQQRGYGAIGFDWGIEHFLTVERDDGTFEEIDNPRWLRSNEAKLKALYQSRDAKTRFSWAWRFVNRQIARLHGKIARQRKDWQHKLSARLVNETGAIFTEKLTIKNMSKRPKPRSGEKPGEWLPNGAAAKSGLNKSILDGAPAQFLSYVRYKAANAGIVMGEAPTQKLKPSQRCRACGKVEAKRLDQRWHLCGCGHRTSRDRNAAGVLLDWGMEHFLVFWLACP

SEQ ID NO: 45268 - protein, 399 aa, Thermoanaerobacteraceae sp.
MTEKILLRLDKDQVKISGDVRREAARCWNAIVNIHRTIFNRYGIWLTGGQLKEFFKGRFQLHSQSVQALVELYEETCRRTKDLKKNGETSWRYPWRKKHYFTVTWKNAAISFRNNRICLSNGRGREPLEFKLPARIDPAAVRQAQLVWKGTCYWLHLSVEKPVPEQVTGFRVAGADPGEVHSVALTDGSECLVISGRLLRSWWRLQNKELGKYQRKLSRLKKGSRRWRKLTRKKRKFLEQMRRRKEHLLHTITARAAEWCFERGVKTLYIGNPLNVTKKNYGRRHNQRMHQWTFGQMFNLLKYKLAARGIEMVLVGEENTSSTCPSCGAKGTLRGRTFHCPECGFSCHRDVVGGLNIRSVGLHGEIRAGQEAVPKTTYLRPAVLAARAVDAFGPGHRAA

SEQ ID NO: 45269 - protein, 489 aa, Blastococcus sp.
VVYRTARVALRVTVGQRRRLFGLLRSGGDVWAAVLLLNRWRRQRGDRPIVGYQELCRELAAAGEGAFGELSTVGARSVLRAYSDAWMSAARRRRAGDETARFPRRRRGLVPVRFYAGTFTVTGGRVRLPVARGRPPLWVRLARPLPYPAEQVRSVRLTCAGRRLCLEVTAEVPVAVYPAGAGPDPDRVAGVDLGIIHPYAVLAPGGGEGPDAALLVSGRALRAEHRLHLAEAKARARAAARRAPARGQRGSRRWKQFRRRSRVLEGRHRRRLGQARHEAAKAVVSWAVGQRVGTLAVGDPRGVLARDAGRRQNKAVRDWAVGDLLRALADKAAQAGIAVELVDERGTSSSTCPSCAARVAKPRGRVFDCRHCRFTGHRDLVGAANIATRTTAVAGGGTGGGPVVGGSSPVTTHRRAGRHLPGAGRSRRDPRRGLISRPPAGRSPPIRWDAAAGPSGPPWPAPEPVPVPGSRSPAPAARIRHRPTGANLA

SEQ ID NO: 45270 - protein, 460 aa, Blastococcus sp.
LSVVTGTMPVVSHGAVRVRLDVTDVQAGMLLRAAGARRFAWNWAVAKIKANADQWTAEATYGLERADRVRPLSFFTLAKMWTTEKPDVAPWAGEHSTWTFRYALRDAANAHAAFLAGERRFPRFKSRRRDRSRFTVRDGLALKAGWVRLAKYGWVRISSACPQQAKLRRLLRRGNAVLQHITVTKHSDGRWYATVNFTREARTPAAQRTAPAGPVVGVDRGVKTAAVVADANGQMVAELPASRALRDRLRHVRHLQRSVSRAQKGSANRHKAVARLGRAHARAAAVRADALHAFTARLAREHAVVVVETLATKNLMANRALAAAIGDQGWAELARQLQYKTARHGGQLIVADRWFASSKTCSSCGAVKLKLTLAERSYRCDACGLICDRDTNAAANLAAWGEHTLGTCPCVIQAGDRHPGGPSAGASRHACGGWVSGPAVSAGPVLPGEAGTSRPRVSVA

SEQ ID NO: 45271 - protein, 389 aa, unknown
  TnpB Polypeptide
MKQTLTLVCKLHPTLEQVAKIEATLKAFADGCNYANQLVKPKVTNKVTIQAQAYEQLRQQFGLAANLAVRACARVAANRKTAKAKGKPVRAFQPTSADYDARIFAFREKDWTVSLTLVGGREHIPMQVGNYQIGKLKGRKPTSATLAKHRDGLYYIHIQLTDEVPDPIKSDNVIGVDFGRRSIAVTSNGDEWDGKPIQRVRDKFAKTRASVQKRATKGTRSSRRRCRQLLKRLSGKEQRFQSWLNHNISRAIIDQAKSQKAIVAIEDLAGIRDRTNTQPRSKTERRRSNSWAFFQLRFFLEYKGVRAGVEVVAVPPQYTSQTCHQCLHIGLRSDKIFKCGNCDWHGDADLNGSLNIGAIGAVVSLLRGSDSLSCVISSENSGLLKAPDF

SEQ ID NO: 45272 - protein, 441 aa, Kitasatospora sp.
MVAGQSSGVLARVVVSGPGQAGLVHLRYSYRLYPTSVQRAVLARTFGCARVVYNDALEVRREARRAGLPYPKVAELQKLVITAAKKTTERSWLASVGADPLIQSLRDLDAGYRNFFDSVSGKRAGRPVGLPRFKSRKDSRQSLRFTRNGFRIRSNGKLNLAKIGDVRVRWSRALPAVPSSVTVVLDAAGRYHASFVVDVEPEPLPEAGGEVGIDLGLASYAVLSTGEVVDNPRLLRKAEKRLKAAQRELSRKAKGSKNREKARRKAARAHAKVADSRRDWLHKLTTGIVRENQAVYLEDLNVRGLARGRLAKSVHDAGWGTFRRMIEEKAARYGRTVGIVHRAFPSSQLCSACGARDGPKPLQVRTWTCGACGAGHDRDLNAARNILAAGRADRSNASGGPVRPGVAEPRRARSVERGTHRSPRGTGPKPRTAGSAGIPAP

SEQ ID NO: 45273 - protein, 428 aa, unknown
  TnpB Polypeptide
MLVAGGDVWAGLIELNRYRFKRGGRPLLNYQELYREVAGVRVGELSVTALRSVVRRYADACMETAKRKRRGEIARYPRRRRRLMPLRYYAGTFCLKGHRVRLSTARGTPELCLRLARALPCPEADVRSVTLLAHVGRLWLDVTAEVPIASPPEEGTVAGVDLGIIHPFAVAGGKEALLVSGRAIRAEERLHLADTKARQKRLAPKTPRRGQRGSRRWRKLRAAQRRAEAKHRRRVHQMQHQAAKTLVERARGVGVATLVVGDLRGITGQRAGRVQNRRVGTAWRRTHLLGALGDKAEVAGITLVLVDERGTSSTCPQCHQHTPKPKGRQFSCPHCGHTEHRDIVGARNIAARGGGSATAPAVVTHRRAGSPPARRDRRRHLMDVHRSCPAPGRPRPEGVARRAAVSDQETVAAFTGRRRGSGNRANVV

SEQ ID NO: 45274 - protein, 409 aa, Chromatiaceae sp.
MQRLQAFEYELMSNGQQERQMRRVAGSSRFVYNKALALQKDGYERGEKKLGDAGLCKQLTEWRNSPETAWLAAAPVHPLQQTLKDLGRAYTNFFAKRADLPRFKKKGRSRDSFRYPDPKQIKLDQANSRLFLPKLGWLRDRNSRDVLGTVKNATVSQCGGQWFVSIQTEREVDVPVRQGGAVGIDMGVVRFASLIDGTVFAPLNRFKRQEPALAKAQRAMRRKTKFGKNWKQARARVQRIQTKIANARRDDLHQATTTISKNHALVCIEDLQVRNLSASAAGTIEAPGTHVRAKSGLNKAILDQGWFEFRRQLDDKTAWNGGHLVAVPPQNTSRTCPCCGHVAKENRPTQARFACVVCGFEDSADLVGAINVLRAGHARLACGETSLIGASAQEPTEATMREQALRAAP

SEQ ID NO: 45275 - protein, 680 aa, unknown
  TnpB Polypeptide
MSLFEGTSSAVSSGNLSKQEKINLKSKITINTKLFVYSLLDNEKNNDLDDFYNNDYDLIMDKLKIPILKNIETNDIKNEYDKLINDYNEIIQMENNKITDKQNNKTDKQNNDYYDLKINLNKITEKYEKDSKNFNEKYELFKNNIKNTKYNYNYLIKSNPTIYLQSFFNINNYLKSDLTGKFNCFPLYKNSINNYITITTSSLINLFTFSKLKNKYVNDINDKKEVNEKQKIFTKNKKIFEKSVTKDKYIIWREYFNIYKDDNINFKGENKLNYNDLKKLFRVNGYKFHYIKTDGVGVSLVFEKLDYKKSSTNKKSSTNKKSSTNKKSSTIKNDNDKNDNDKDIELDTNEIDTPYLQKIDDYKKYKLIGIDPNKRDVIFCTDGAYSRRSSLKKGRSMENINGKTKFFRYTKPQINHETLKTKYDKIRNKSRKEVGVELLESDLSQTNPKSNNFDIFCNYVDIKNKVYYETYKYYNYIKKPYDQNNIKNVGFLKMKLNTYFNTKRSEENMFKRFENKFLNDENLKPKDVIICYGNYGNGALKGTEPVKGKGMRNLFKQRGYNVFLINEKNTSKLCNHCHSELDKFHLKCHRKRKKGDNTEYSDVEKKSKVHGVLRCKSCKDKGPIKSLIFSNKQFSVMELNKSWNDNKYYRVWNRDLNASLNILIKAKHIIQGLNIPESFN

SEQ ID NO: 45276 - protein, 375 aa, unknown
  TnpB Polypeptide
MKTYKFKLYSNHGNRELHKTIDSHADVWNHFVALCRRYYAIYGKYPGKKALMRHLTKLKRLAKFAHWTQLPSQALQDVIDRLDKAYQKQFANPRRSGRPRFKKRVRYKSFTLKQAGWQLLPGNRIKIGKVVYSYFKSRSVFGNPKRCTIKRDAIGDIYICVLTDYEEPDLNRPTTGNSAGFDFGLKRYLTGHNGHDIDSPQFFKRSINAIKRANRAHSRTKKRSKNRERARLDLARKHRKIERQRENFHWKLAHLLTNQYDEIRLETLNMQGMKALWGRKVSDLSFADFVKKLVYIAKKKSVKITGIDKWYPTSKTCSTCGVVNETLNLRDRQWQCSDCGTIHDRDRNAAINIFRVGASTLDGEDVRDTSVSNPC

SEQ ID NO: 45277 - protein, 371 aa, unknown
  TnpB Polypeptide
MRLTYEAKLYPVKQQEQKLFELFYNARKLYNEMLETKIDAYKKEKKTITRFDLQKQFRAKYKKLPASVKQMMAYRVNTAYDKFFNKLGKFPRFKSENRFRSIELRQPKIDYQIINGRLKIWKQIGSIRMRGFRPTDNFSMGRIIKRASGWYFQYGTEVKEKRPIKKIKSAIGIDVGLKSFLVDSKGNGVKPPKFFRKSQYKVRKQQRKVSKAVKYSNRRKKKIHLLAKTYEHIANQRRDWLHKLSRKYVNKYDLVAVETLNIKGMIKNHHLAKSIQDSAWNIFTNMLSYKLQILGRHFIQINPHYTSQKCSRCGELVPKSLSVRTHICPHCNLVIGRDENAAKNILTIALEQGFGEGRTLVHPLTREATDL

SEQ ID NO: 45278 - protein, 342 aa, unknown
  TnpB Polypeptide
MLLTYKLKHGQNFNAELEKAFRVAEFAVQNPKCRSSKQVSDIGLPSAISNQILKKYGNQKTIKEVHNVNLIVPGQGIKFFEETNSIWVSCLKLHMENLIPTTFETINQMELDNEYAYISVTVPEKPEMIPQQFIGVDRNTTGHIAVAANPDTGFVRKLGKMAIHIHTKYKNLRRKLQSEGKYRKVKRMQDRESRIVQDLNHKVSRALVDMAKDQNAALVFEEMTGIRNTKKNHRSFRYSLHSWSFYQLQQFVEYKAKLLGVPVLYVNPAYTSQDCSRCGARGHRNGKKFGCPVCGHVNHADVNAAFNIALRQKDVVARIQTMMCTMGALIPLNDALLEGEHH

SEQ ID NO: 45279 - protein, 394 aa, unknown
  TnpB Polypeptide
MASSYEGALTLSIAMRVSPEPGAVELLRRYNTALNYAINRILSLNLKTIKDVHRELYRELREWFGLPSRIALDCYRDAIANAKAWRRNLHRGRRPRVKKLSMLLHHGSGYRIEDGYVEIIGGIRLKIIGLDRRYDQYESGEARLVYREGRMILWISKRIPRPKQYKPRDVIAVDINERKIVYGDDEINKDIGTAVDRAYRWKILAENLQRKYSSPRYPAWGRRKAILNRIRSYHRKARNILEDWARKTSLKIVRFAKRLGYAVAREDLTGLINSLRKIRNKDHRTKLIIMGYAKLGRWIDWQAEKQGVPLAIVNPNGTSSECPQCDSKLEENGYRRLRCPRCSFEANRDIVGKLNIRRRALKILGISGGVLAPLTAPQMTDVNPNRWGEPMSRR

SEQ ID NO: 45280 - protein, 160 aa, unknown
  TnpB Polypeptide
MRRLVREQRRLSRKQKGSNNRNKQRVKVASVHERITNQRNDFLQKHSSMLVRENQTICIEDLNIRGMVHNRKLARSIAGVSWGKFFRMLEYKAAWYGNDLIRVPTMYPSSQTCSCCGYKNPLVKNLAVRSWECPGCHAVHNRDSNASINILNKGLQMQSA

SEQ ID NO: 45281 - protein, 446 aa, unknown
  TnpB Polypeptide
MRLFSSYSVKIKHYNHIFQKTVNLYRNAVDFLIEVCLNEWDTIVNIHPERLRLTYVEHLCHLGRTHTNVAYPEFDRKFYKFPSYLRRSAINEAIGKVSSYRGNLANWEGEDPKTRGRKPSLPRAGYAYPSMYRTVMYEQTGDYEMRIKVFIRNTWDWITVKVRKSDMDYINRRCAARKKCAPTLQKRGKGWFLDFPFKEYLELPEVDVFDQVILSVDLGINSPAAVSVMRADGTVLGRHFCKLPNEYDSLTHAVNRIKKAQQHGNRKTPRLWAKAKGVNLDISVKTAQFIMDIARLYNVDMIVFEHLDLNSKKRGPKKQRLHLWRSQYVQSMVTDKAHRLGMRISHVCAWNTSRLAYDGSGRVQRGKWGDLPTYSLCRFQNGKVYNCDLSASYNIGSRYFIREILKSLPEMERLALEAKVPQAAKRSTCTWSTLINLNAELMSLAA

SEQ ID NO: 45282 - protein, 455 aa, Virgibacillus sp.
MKQVKTIKNKILSHSEKSFEPTLIIYREALKFTVDVVNKEWSILEGSSTKEAIRIIEKLMHQTKSNPSPKYNFTLCFYKFPSYLRRAAISKSFGIVNSYRSNYKNWENEKSKAIADGKAFNKKPSKLGVDYNEFPVFYKDNMFIRTDVDEAKIKVYLNHDWVWVKVKFNNKNLKNRNITDWKENNPTLIKVGKKYFINFSYEKEIKLNKTKLKDQTIISVDLGITNSAVCSVMRSDGTVIGCRFINQPLEKDRLRITVNKLKKAQRLSGKIEAPNYWRKINGLQNHIKVNTAVEIVKFADLHQASVIVFEYLGKMKLPSGVYGAKRLRHKLHYWSKIGIQSKVEEMAHYRGIRIRRVNAKYTSALAFDGSGEVKRNNKKDLATFKSGKVYHADLSASYNIGARYFVREILKSFSEKKRLRLKAKVPSIVARTRLTLASLISLHQALSTKGALTKA

SEQ ID NO: 45283 - protein, 454 aa, Virgibacillus sp.
MEQTKTIKNKILSHGSTALEPTLLIYRDALGFIIEVIEKEYSLLEGLRTKKMTTAVEKFIHRTKNNPTPKYDFTSNFYKFPSYLRRSAISRGFSIVKSYRANLRNWEVEKSQILGEGKVLKKKPPVLSVEHDAFPVLYKGNMFNRLSTDQAEVKVYKNNDWAWETITFNDKNLKNRRIMDWKENNPTLVKVGKKYFINFSYTKEIKLNKTKVIDQTIVSVDLGLTNSAVCSAMYSDGTVIGRKFINQPIEKDRMNTLLGKLKKAQRNSGFIEAPNYWKKINGLKNHIKVNTASEVIKFAETYNADIIVFEYLGKMRVPKGIFGAKKLRHKLHHWCKLGIQSKVEEMAHYRQMRIRRINPKYTSKLAFDGSGKVKRNDKKDLATFKSGKVYHADLSASYNIGARYFIREIIKPFSEKKRLLLEAKVPSLAARTRLTLASLISLHQALRTNGAKPA

SEQ ID NO: 45284 - protein, 397 aa, Geitlerinema sp.
MYPNHPQRQMLARTFGCVRVVFNDALRLRQENYQTNQTTISSSELQKRLITQAKHTAERHWLAEVSNIALQQSVQDACLAFKNFFQSLKGKRQGKQVGFPRFKRKRNTQAFRLTRGGFAIRENGKLYLAKIGEVKVKWARELPSDPSSVTVKQDAAGRYFVSFVCEVEPIQYPASNTGIGIDLGITTFATLSTGEKVANPRILQRQLNRLRRLQQSLSRKVKGSHRYQIARRKVARLHARIKDTRSDFLHKLSTKIVRENQAIVLEDLNVSGMVKNRRLARAISDVGWRQFRTLLEAKSIRYGRNFQVISRWEPTSQRCSSCGQLGGKKPLDVRTWTCLHCGAEHDRDVNAAVNIKAAGGHSEALNVRGGLRNSRSRVAADEAQTHLTDEQLSLFTG

SEQ ID NO: 45285 - protein, 499 aa, Hormoscilla sp.
MSTVTYTKGLPTPAEELNELGFTQFEMFLNAYAPIYRPAVCETVNHLLSGETFNKSQWNTHLQQIYRINKRHANGVIADALGKVSSAKESRQNHIKQLQGKLKSTQEWIRKAERKLKLARKFYSQKNWQHSPAGCIFPIASSVQYRDTNWQHLRFQIHQKKRKACLYERKISYLKLKPIRVKVPHSQCFVVGSKAEKWGNQVCQWDGVTIKFRVPACLEDRFGEYVTTRLGGYDRKINRLPSRGAKSWHFYLKNRKWNIAVQFTPTQPSRVSRHSSEGCIGIDMNPGSIGWAYVDPDGNLKAKGQIPMQMGIPKGQQDAQIADACLQLATLANLMECPIVCEDLDFSRKKEHLKECGSKYARILSGWAYARFYELLESILSNRGIDLLKVNPAYTSLIGLVKYVRQYGLASDEAAALVVARRRMKLKELIPSSITAYLDVKSGKHVWSLWYQLNKLLKSCNRWKNRHSFYSVSNWGLEVKEMVAPACGRSQTKRKRTSS

SEQ ID NO: 45286 - protein, 226 aa, unknown
  TnpB Polypeptide
LERTISSRVPRLLGTSTSTTVVSCSDGSARRQTKSPRLQSKLREGRYSSNRIDGCTDSGRSVVTMHRTRWCATLVERLYDEGVATVYVGDLTDVLEAHWSVRVNEKTHNFWAFKKFIHRLACVCEGVRHQPRNRVGSVDESDVSECGDHEKTVRHEDTLTCPCGFEGHADLTASETFLRENSNCEIRPMARPVRFEWDDHDWSGKLYPHESPKEVRTNPQVASVGR

SEQ ID NO: 45287 - protein, 397 aa, Ruminococcus sp.
MLRSVKIRLLPTPEQETLFRESAGVARWAYNYFLSENERIYQEYVSNGEQGRRYISGGDLRKHINNDLKPTTHKWLRRVGSNVMKQAVIDAEREFKSYLMGNKGKPKYKSRKCSKASFYVNYESLRRTDNGFKGEKIGMVKTAYALPKLPKGEKYANPRISYDGKYWYLSVGYPAEVSQEELTGDTVGIHLGMDNLAVCSDGKVFRNINHSGRVKKLDKRLKRQQHRLAAKIEENTASFHGKARIYKRPLDDCKNIARQREKIKSTYKKLKDIRNNHLHQTTSQIVKTKPSALVVENLNVTKMLKNQYLAKAIAEQGFYEFKRQIAYKSEQYGIEVVYADDLYTICKRCSQCGNISRNFDPNDKIYRCEYCGFTLERDVNASRNLADYAKYPSLSGN

SEQ ID NO: 45288 - protein, 385 aa, Bacillus sp.
MKRTYLIEIKPTTEQVSKIRQTIGVCRYVYNLYIFKNKEAYESGGEFLSGYDFSKWLNNIHTKECDQWIKEVSSKAVKQAIMNGDKAFKRFFKGLSKFPRYKKKKKQDVKCYFPKNNKTDWTVERHRVKVPTIGWIRLKEYGYISKNTTVKSGTVYQRAGRYYVSILCEVKGGKPNATLNAVGIGIDLGIKDFAVRSDGKTHKNINKTVQVKKIEKRLKREQRSLSRKFENIRKRGEQPVTNKRANINKNILRVQKLHARLANIRLAYVKSIVNDVVKTKPTFITVEDLNVKGMMKNKHLSKAVAQQCFYAFKTWLSTKCREYGIELRQADRFYPSSKICSCCGQKKSDLKLSDRVYTCDCGNVIDRDLNASINLLQAKKYTILT

SEQ ID NO: 45289 - protein, 504 aa, unknown
  TnpB Polypeptide
MHTVQLLLKTSKYERHEIDRRFHALAHLHNVCVKHARKCMIRLQHDKRYAELRQLYNELVKKEKMSKEEKSQKKKLAKQLAACRTEQGLSKASLEYYLKVCGKQFSKLLSSQQVQAEADRVWCGVERCLFGNGKELHFKKLMDFDTIGGKSNKNGARFDLDAMYVNWLGLSLKCYLPKSENGLSYVWESLKGKISYCNIKRLMFSSGWRYYAEIVVSGAAPTRVSIGTSTMGIDPGVSTIAGVSEDACVLEELAPNAIQYEKKIQKISQSMDRSRRISNPNKYNEDGTINRSNRDPWKYSKNYVKMCRLLKSLYRKKHAYIIDSHRKLCNKLITIARYFPVEKMHFQALQKKATDTKRQEKKTEVKQKDGTVKVIQKYKRKKRFGRSINRRAPARFLLELKRKAEAVGGVYAEVDTKEFKASQYNHVTNTYEKIPLSQREKEIGKRRVQRDLYSSFLIRNADLDFKHPDREKCEYEFEHFANLQDQLILKMKESGLSMRQCFGF

SEQ ID NO: 45290 - protein, 400 aa, unknown
  TnpB Polypeptide
MQTVRIYPLKDLDRRTRARLKTAQMEAARVWMYCVGRHRAARSDRLPWPSQDDLQRETKGGQYALHSQSIQMVCQQFLANVETIKQLRQTNPHHRYPYHPKKYMPVHWPAQAVSHEGKRLILPMGRGHKSLSFHLPDLPEHIGAVSLVWHGGYELHLVVPDPLPTPLLPLSERPVQATTDLGEIHLAAVTTSTGKGLIVTGRGIRTVKRHYNKTLGQLSRLQSHCKKGSKRWRRLQYTKARERGKKERRVRDLRHKGARQVVDFCRAEGVQTLYVGDPQGVRNESKGRHHNQRMAQWEYGKDKQYLHEKCAQVGIVCFSGSERGTSSHCPRCDWKKKPTGRTWTCRHCGFVGHRDIVGSMNMHPLAFGSRIAYPSSLTYRRPGPLRDRRLNKERSPSGTS

SEQ ID NO: 45291 - protein, 557 aa, unknown
  TnpB Polypeptide
MRKDNRIELTPADEPVQPVVGKVRARQRPKGAPTHVRSWPLRPNPGQCRDIQTRFFTGVRVYNAVLGEFIGRSRAMKCDPAWRAAQQLARRTKDERAARRAAFAAVQQAHSFSVDAAQSFASALRQSWVREHLPAQETQNLGVRAFDAVKQWHLGRKGKPRFKATRRGLHSLAAKDGHGALRPKTDAAGHLVGLQWGAGFVVAIAAPATTGRRGGEQQAELAEIQALIAAGKVRSTRIVRAVIGGRDTYRMQLVMDGHPTRRHPVGDGRVSFDLGPSQIAVAIERSDGTWAGWVQPLADRIRLNTVRLRRGQRRLDRQHGAGSPACFHADGTHQAGRCDWERSHTAKRTAAGVAEQQRRLGEHRKTLHGALANRLFGHGADVACEKLDYVAWQKNFPRSVRDRAPGMLVQMMRRKAASAGGDRLYEFSTKTTALSQTCLCGNREKKLLSQRVHRCGCGIKEDRDLFSAYLGLHVRRQVDGSDRLDLEAANHGWLLHRHDVDRRRGPVAAVSNRRGRRHPPSRRSVARIKARRKDKAAMRQSRSARTSTTNQPTALPA

SEQ ID NO: 45292 - protein, 311 aa, unknown
  TnpB Polypeptide
MDHPRIPPCKGKGEFTGRAYRRAHTDWRRSLKAAKKAGRTFTAPTLRAELIDAVHVQSPRKAKHFDLWVMVQGVGKLYLPARKHRALNRALAYPGATLCEQGEVFRKNEKWYCRVGVKVPLPDEQPVKEWIGCDVGVRRAITCSDGYQGPDLRPILDKRQQREADQKRHLHDAEVDSLTAPRQAQAREARTLLSRAQRSGRGIALENPRSLPKWRQWSAKFFAQRILLLAALAGVPVSLVRPAYTSLTCSRCGEVGQTFRNKTMFRCLRCRFTANADRNAALNIAYRAHRISCGSHHGLLRRSLLGGGIVE

SEQ ID NO: 45293 - protein, 277 aa, unknown
  TnpB Polypeptide
MRVLEAKLLNGTAQQYQALDEAIRTAQFVRNKCLRHWMDHQGVNRATLYSLCKDLAQEFPFARQLNSAARQASAERAWFAISNFYRRCKEKAARKGYPKFQKHCRSVEYKISGWKLSQDGMSIIFTDGFQAGTFALYCNGEARRDILTLKINRVRVVRRADGYYAQFCLDVERQEQVEYTGQVVGLDVGLMHFYTDSHGNKVECPKFLRRAERRLKREQRRLSRKFRRGAKPQSKNYHQQRKRLGKVHLKVQRRRRDWAVKLARCVVLAYGGAERFV

SEQ ID NO: 45294 - protein, 427 aa, unknown
  TnpB Polypeptide
LKVTKSHKIKLNPTKSQVKYFVKASGTARFTYNWGIDTWGKMYKEGDKPSAITLNKHLNSIKRDEFPWMLEVTKTCPQYALWDLEDAFKRYFKGLKDDSIQKKRDAYVSKQKSKWLPINKDKLRDIGKPKFKKKGIKDSFVAVENSLSFKQKGNHLWIPRLGYVKCHEELRFEGKVNNVVVKRIADMWFAIVNVEMNIPDPIVNENQVTVGVDLGIKTLITLSDGKTFENPKALKKNLKCLKRLQRSLTRKQKGSNNKKKVQMRLARKHYKVSCIRSNALHQATAYIADHYDKIVIEDLNVSGMVKNHNLSQAISDVSFYELRRQLEYKAGWKGKEVIVADRFFPSSKTCSCCGGIKKELKLSDRTYKCEVCNLEIDRDLNATINLANYSPTSKSEGCKACGEPSSLPKVSRGSKKQELNSLITIKI

SEQ ID NO: 45295 - protein, 409 aa, unknown
  TnpB Polypeptide
MYLIEQHIIDKSHELWKECDRLCFASKNLYNYSLYKIKEYQENNNNKLPSGYDLYHIVKKEQCFKVLPNDSAKQTVFQAVDMWKNFYKAIKSFKKKKDAFTGCPKPPKYKNKTKGRNVLTIPIRNCRLKDGYILFNKNLNLKLKTKVDNLKEVKVVPQSGCYLIQVCYEQESLPSVTTDRKIAIDLGVNNLMTISNNFNDKPLIINGKPLKSVNQYYNKKKADLQSKLPKYVDNKGEVKQRTYSNKIESLTNKRNNKVKWLLHNYSKYLIDYCKQQGVSQIAIGYNEGWKQDINIGKKNNQTFTNIPFRVLINQIQYKAELQGITVLLHEESYTSKCSALDLEPICKHDEYKGRRVKRGLFKTATEKFINADLNGSLNIGRKVFGDDYIKFDTGCVVHPVKVTPLQRVK

SEQ ID NO: 45296 - protein, 379 aa, unknown
  TnpB Polypeptide
MLRAIKVRLYPNTQQEQAINELLGSYRVVYNQTLALKQEAYKLNKTNLGLRELSKYFFGTLRKDEKYSWLKKQNTKVVKQAIRHMLTAYENFFKLHKGFPKFKSKKDKQSLLFPLETISKRNTFETKHISLVKSLKNIKFRCSDLYFKRLQAYKDKIRSATLTKTKSGNYFLSILMDTPQHELIKFKKTNNQIGIDLGVKDFVITSDGEVFGNKHFFKKEEQKLKRLQRQLSKKKKGSNNQNKQRIRLAKVFERIISQKENYIHSVVNELLTYYDIIYMEDLNVSGMLKNHSIAKPIQEVGFYRFKSVLQSKALANDKQVVFIDRFYPSSKTCSCCGYKKKDLRLSDRFWVCPECNTNHDRDLNAARNILIEGQRVLCS

SEQ ID NO: 45297 - protein, 232 aa, Hyellaceae sp.
MSRQLFRLGLNALLPNLKEENEWLRTEVYSQSLQQTSLNLSRAFINFFEKRARFPRYKSKHGKQSVGFPQSVKITGDWVKLPKIGLVKAVFDRRYCGTIKTVTVSKDSSDKYFASILYELDACFISGNGDQIIGLDLGIKDFCIAHDGTKTSKYANPRHFKKHEKNLARKQQKLARKQKGSKTRYKAKRLVAKVHSRISNARQDFLHKLSRKLTNESKVGCGRKPQRKRHGA

SEQ ID NO: 45298 - protein, 367 aa, unknown
  TnpB Polypeptide
MLKAYKYRIYPNKEQKAQIAKTFGCCRFVYNQTLAYRKETYEKEKKSVSKTDCNNYCNRELKKKYEWLSEVDKFALTNAIYHMDSAYQKFFKEHAGHPKFKSKHDSHKSYTTNFTNGNIVVDFEDGKIKLPKLKKVKAKLHREFVGKIKSVTISQLPSEKYYVSVLVETEHKELPHTKKKIGLDLGIKDFCVTLDGKKYENPKTIKKYEKKLAKLQRQLSHKEKRSSNYEKQKKKLALCHEKIGNTRKDYLHKVSYEIISENQVIVSENLQIKNMIKNHHLAKSISDVSWYELTRQLEYKAKWNNRKYIKVDTFYASSQTCSHCGYQNAEIKNLSVREWMCPVCGVKHDRDVNAAKNILAEGLRQIE

SEQ ID NO: 45299 - protein, 407 aa, unknown
  TnpB Polypeptide
LQSHYNLLKGIKIRLEPTNVQETMFKKHCGIARATYNWALNECQQQYALTKKVFSTGELHKRLVSEVKVEKPYFYEVSSKSSQEALRNLKLAYDNFHRIQKESGYKKMIPVKKRGVVIGQRLDGLPQFKKKHHKDSFYLEQYDAKGIGIEIIENRIKLPKIGWVRMSETFILLHAIKAIVVSRQASDWFVSFKVEFTPEVTNKIKGTVGVDLGIKTLATLSDGKVFESIKPFKKYKRKLKLLQRKVSKKFVKGSKQQSNNYDKAQKRVAKLHKRISDVRKDYTHKITSYLAKNHDEVVIENLNIKGMSSNHKLANAILDGGFFELRRQLEYKCKWYGSKLTVVDRFFPSSKLCSCCGNKKLDLKLSDRIYKCDVCGTSLDRDLNASINLKKQAESFSVLACGETNNC

SEQ ID NO: 45300 - protein, 267 aa, unknown
  TnpB Polypeptide
LEGPKDFRSFTYIQSGFEFDSKNGQPVLSLSKLADIPLIKHRAIPDAETVKEITIKKESTGEWFASFTVGDKETPEKPTDPDRCVGIDVGILKYAHDTDGTAVESLDLSDERERLERAQHDLSQKERGSANWERQRQVVAERHADLKRKRRDFLHKLSNYYATEYDLVAVEGLDAKELVELPGNSRNRAGAAWGTFLRMLEYKCEREGTHFAEVDPRNTTKACASCGVKTDKTSRCGFVNTRVPRVGLRRTGTRTQRGTFFLAVLKI

SEQ ID NO: 45301 - protein, 393 aa, unknown
  TnpB Polypeptide
VKAIRTVKLKISGSTKADGLLAVWLKAANWLSAIAFKTEELNSNRLAKAHYANLREMGLPSQLACSLCKTVCATYKTAKANKRWRLAKFSRAVIPTVWKRDFNRTNKGITLWGELLTVSDSRQLPEGAWKDSKIKRVGKAWYLCLAHEVEIADPKTEGCIVGCDFGIKRMLVATNSVNAKPFFFHGGVLNHRRSCIRRTRAAVQSVGTRSARRLLRRMSGHEAAVTAHLLHTASKALVSYAVEVGARRIVVEELSNIRDSSLSKGKDLRSKVHRWPYADMRFKIAYKAAAVGIELEAVSPRNTSRGCSACGHVSASNRKGLRFCCQKCGHKDDADRQASKNIRARSVSIACNAAGTRSLKARTSNGSVDINSESCVLHGDLALVKDSAKSPCL

SEQ ID NO: 45302 - protein, 393 aa, unknown; identical to SEQ ID NO: 45301
  TnpB Polypeptide

SEQ ID NO: 45303 - protein, 393 aa, unknown
  TnpB Polypeptide
MKTGRRFRAELTGAQAQLAQQTADACRAVWNIGLEQRREYRRRGAWINYEQQAHELVDAKAEHSWLKEPPSHCLQQTLRDLDTACRRHGTFKVRWRSARRWVPSFRYPDGSTMKIEKLNHRKSRVKLPKLGWVTFRASRSLKGEIIRSATLIREGKYWFLSLVVEDGVTTPAEHASPGTAVGLDRGVAVAVATSAGHLFDEVFSTPGERRRAVQLQRKLARAANFSANRNKTREALGKMRVRERRRRQDFCVQTAHRLTQDNALVVLEKLSVQSMTGRVQPVADPARPGEYLPNGGSAKSGLNRAILSKGWYRFEVALKSASRYSGTKVVKVPAAFTSQRCSACGHVDPKSRESQAVFRCTHCSRPAEHADVNAAKNILAAGLLAVSACGDDP

SEQ ID NO: 45304 - protein, 409 aa, unknown
  TnpB Polypeptide
MLKAYKYRIYPNNDQESLLQQTFGCTRWMYNRLLSDNNEEYKTNKKSKINTPAKYKKEFEWLKDVDSMALCNAQMQLQSAFSNFFRRLKEGKKGNKLGFPKFRSKHSGKKSYTTNCIKNSIRIENKKLKLPKLGLINIVLHRYCVGQIKSATVTQNPNRKYYVSILTEQPSTLTQRDSTAEKIIGIDMSMSNCAVLSDGTKAKFQRFYRLSEKRLAKAQRRISRKVKGSNNRDKAKIKAANIHEKTSNQRKDFINKLSYRLAENYDIIVIEDINLSDMAGALKLGKSVHDIGFGMLRIQLEYKLKDRLKTLIKADKWFASSQLCSICGYKNVRTKDLSVREWDCPKCKTHHDRDVNAGQNLVNWYKNTVAQTGIYAHEEPTSASLVTSKVSQFVEVRKVAKQDLASPCL

SEQ ID NO: 45305 - protein, 453 aa, unknown
  TnpB Polypeptide
MQHIITAKLKLIATPEQFALLRETQLAYRDALNAVSVYAFEHDKTSSADKLQKGMYSEIRLSYKLPAQMACNVPRQVGATYKGLWTKLKQNIEHRRTKRTKKRFKGLDQAPKYVSPTLTYNYGRDYGFKTEQRVSIMTLQGRVILDYKGYTPHVALIQHGATIGAAKLWYDKPRKQFYLLIALELEIADPTPTVQQQVVGVDVGQRYLATTTTLEGKSHFFSGKAVRAKADHYARTRKRLQRKGTRSATRRFIALSKRERRFKLNTNHVIAKNIVHAHPNTLIGLEELSGIRERTKRPKRRRKGKQGLPLTPKQRRANRHASKWAFAELHDILAYKAALSGSSFVVKVDADYTSKACPLCGYTDKRNRPGNGLMFVCQNKECGYQVRTGHAYHLHADLVGARNIAMRTRLIQQDWVRTGQLSVAPDVSDKEAKAARLKRYAELRWSPDTSPSL

SEQ ID NO: 45306 - protein, 417 aa, unknown
  TnpB Polypeptide
MLFRQGFLFKLKPNGRQARLMSRFAGCCRFVYNKGLGWAKEQYEKKTGQHPTYKNLSALLPDWKKDPDMLWLSECYSQCLQQSMKDLSRAYANFFSGRAAFPVFHRKFGSSDGFRYPQGFKIDETGKQIYLPGIGFVKFRQSRYIEGKAKNITVIRKADGWYVSIQTEYEKDIPKHDGDEVGMDMGVVWFCTLSDGTQIAPCNALKKHLKKLAQLQRALSRKEKFSSNWKKAQREVAKLHQRIGNIRQDFINKVALDLSKKHAVIYREDLRIKNMTASAAGTIEEPGHNVAQKSGLNRAILDQGWGKFFQRLQWKCEQRGGIVIKVAPQYTSRTCPICGHESKENRKSQANFKCVACGYQGNADIVGAKNIKVRGQRMSACGELGKVGQTQVNRRMESIHCAGQQQEPIEVIIGESR

SEQ ID NO: 45307 - protein, 531 aa, unknown
  TnpB Polypeptide
  misc_feature (394)..(503): Xaa can be any naturally occurring amino acid
MPGVSRFVFNWGLAFVKAALAQREAEKSYGIDGDALTPAPWTLPALRLRWNQVKNEIAPWWPECSKEAFSAGLDQLAQALKNFSDSRNGRRNGRRVGFPRFKKRGKARDSFRYTTGAYGPADDLRVKLPRIGRVKVHESMSALTGRLAGGTGRLLGATVSRTADRWFVSFTVEVDRDIPEGPSRRQRKAGPVGVDLGVKHLAVLSTGETIPNPKHLAGSLRRLRTASRAYARSKPGSVGRRGRAARLARIHARVANQRRDGLHTLTSRLAKSHDTIVVEDLHVAGMVRNRRAARAVSDTGMAEVRSQLAYKTGWYGSRLVVADRWYPSSKTCSGCGWRNPSLTLSDRTFTCQSCGLVADRDHNAAINLRQLVAVSTSETQNARGGDRKTALARXXXXXXXXXXXXXXXXXXXXXXXXXXXXXXXXXXXXXXXXXXXXXXXXXXXXXXXXXXXXXXXXXXXXXXXXXXXXXXXXXXXXXXXXXXXXXXXXXXXXXXXXXXXXXXPRERVRPGVPHRTVRRHERRYPALSRNG

SEQ ID NO: 45308 - protein, 523 aa, Bacillus sp.
MKITRICLLETNHNEEIGHLNELMRTWCSALRFSFNRLLEGENFGDVIKIVQQKFRLNKRYAEDAVLQAQAVFTSQKELLPIRLEGVQAKIQKTVRKMEDYQTGKKRPKKVPIDTCLVGLQARLDKLQEKESVLLKHDEQGTIPTVIFGGKKNFYHRLKNQISSKEWKELRANTLYSRGDRSKKGNLNTRIVWDEAENQFYLEVANPLLKKEEAKNSPRLRFQVYIPDKYFAEIIQIVLPNVVGTTPKGKDIEEFQVYSIEIKRKGKKYYVHLTYDLKTFGSELTWSEKITSDRMAGIDVNIDRIAVTILTKEGRFLESKTFYCHEMEYVKRNRRTNIAGETAKEVISYLLQWNVGAFVLEDLKFKQDQDTNKRFNRLVHSFAKNKMQKALISRGLKYGFKIKKVNPAYTSVIGRFKYSKMYGLSVHEAASFVIGRRGLGFEEKIPKELIHQLRSLVKPMLIQILGSMEESEKQSTHGKQRRKWIAILLKNIEDFKNNHSWKLWNVIHKTFLVKNQELQLKEV

SEQ ID NO: 45309 - protein, 520 aa, Lactobacillus sp.
MKRSSKPIKSYSKTIRAYSLKLDEETYAKLDQLFVSYGKCRNMFLNQYCGINHMLNVKQYFSLRNHLVKTKQGNIYVEKYHFLQKHWKYALRDACANINSMWSNLANQLRKVVQANDSIDKDERHLIYYLLSIRELWYYALTNDQAVLLDLSQKLQKHLTELEEAVTPKQRKHAYSYLRRLTRRYKYTPRKHYSLNKAMTYDENMYHFQGDELEQVTISSGVSRKKFTFDLTSPWHYRLKGDLQLILDRDKKRIEIHKVIKVRQKQDYQADTKLGIDKGLATLVSCSSGREYGKDFSQFTRPKIEQESQYLARRNPYYGYRYQLKKKLNRLKNANTPKQIIKKKQLASQLNKLNANNIGYKRKDKRHASYHACLESKINHAIKALIVTEHPSLIVKEDLTFTKDKANKTGNKYERQVRRSLSSWTKGVLNERLEYYCQQYGIDFKDVNPAYTSQYCPNCGQHFSVRFGKHNEKTLCPNCGEMDCNIAASKNILARATDKEITLYTPYKKVKAILDQRIAS

SEQ ID NO: 45310 - protein, 390 aa, Streptomyces sp.
VKLVIRVKLLPTPEQASALQATLHACNAAANHVSHTAFTTGIKRNRELRALTYTQVKTRWSLGAQAAQHVIKKTADAYAALTGNLKAGNLGKPGSKRFRKATEKPIAFRPQGAQPYDDRMLSWQMPQRTVSIWTVAGRMKRLAFTGEETQLLLLAHHRQGESDLTSHNGHWYLLATVDLPESPTTPDPREFIGIDLGITNIATTSTGHRHSGRRLNRSRQNDRRNRDNLARKQTRSAKRRAKRRAGREARRTRDINHKISKNIVTEAQRTGRGIALEDLGGIRERARLKKPQRVTIHSWAFAQLGAFIAYKARRAGVPVVHVHPAYTSQECSRCHHIDKRNRPAQAVFSCRNCGFVEHADLNASHVIAGRGWWMWVCGAESQVPALALIA

SEQ ID NO: 45311 - protein, 470 aa, unknown
  TnpB Polypeptide
LAGAITRSTEDAWQLGYRNLLAERRSLASRVRRIARRLALPASRRQGKVRGYAAGAERFEKQRRLQILEHRLVEVDRDIADGRVGVCRGGGRLARTRHNLGTAGLTEQEWRDRWRADRLFITADGEASQVLGNLTIRWHPDEQWLEIRLPRPLEHLANRPGGRYRLSCPVAFSYRAQDVAAQAQSGALRYDITFDPENHRWYLDASWRCATEAVPSMNELRAHRVLAIDCNHGHLAGCVLERSGNPLGAPFTVGLELAGLPASRRDGRLRAAISELIGVAKANGCGAIVVENLDFADSRELGRERWGNRPSRGRRGKAFRRLVAGLPTAKFRERLVQMATNQGLVVIAVDPAYTSKWGAEHWLAPLQLMSTDASGHHAAALVIGRRGLGHRARRRERCDSSRAEHRQERATNSAVGGVAKPIRNPVDREAQGLLHPQRKTRTAKRTTTGEQVAQDRSGPPARQDSVLLGV

SEQ ID NO: 45312 - protein, 470 aa, unknown; identical to SEQ ID NO: 45311
  TnpB Polypeptide

SEQ ID NO: 45313 - protein, 243 aa, unknown
  TnpB Polypeptide
VRWSRPLEGTPKTVTISREADGWYVCFSCADVPTQPLSLTGQETGIDLGLESFATLADGSQIANPRIFRVAEMNLKRAQRRVSRRKKGSHRRRKAVKLLAKAHQTVRWTRTDFHHKTALALVKDYDTIYLEDLQVANMMRNHALAKSISDAGWGQFCAILAFKAACARKQVVAVLPAVTSQACSGCGVLVRKGLSVRWHTCPVCGTSLHRDHNAALNILRRGQQSGAGQAPQALTQPVGAYVA

SEQ ID NO: 45314 - protein, 420 aa, unknown
  TnpB Polypeptide
LKTVQRVERHIIVNNKQIDNLCFLSKNLYNYCNYILRQVYLQRFVNIPEFKDLIKTFKFKDKIFYKIKEYDLSTKLAKINQSDFRALPSKTSQQVIKLLYKNWNCFYKAIKSYNSSNKTKFNGEPKIPSYKDKIKGRNVIIFTNQQTKLKNGFVHFPKQCNLEHIKTKVAKINQVRIVPQATCYVIEVVYTKEVKEYELDDKLYLGIDLGLNNLATCVNNVGLQPFIINGKIVKSINQYYNKKKAYFQSLSCNDLFLTTKRIKRLTLKRNNKIEDYFHKTTRFIINYCLKYRIKKIVVGKNDGWKQEISLGKKSNQNFVSVPHNKIIMQLKYKAEEVGIDVIETEESYTSKCSFLDLEEMKHQVQYLGKRVYRGMFVSKLGKKINADVQGAYNIIRKVVPGTFDGQGIEGLVLNPIIINR

SEQ ID NO: 45315 - protein, 443 aa, unknown
  TnpB Polypeptide
VQSRKFTVITQLHAKNNRDLIKYIDYYSVEYGKALRETFYAVRGSGINKSQYNTYLQRKYGIVRRTANSIISDAQGRFNALKGLKEYERKQLERKIKYLEDTVIPKLVEKRNQNSTKLRDGAPVSMVQQRNLRLRIVAKKSKLNRLKQRLSDIKYRLDSGRLKLCFGTKRLFRQNYKKFIEQRDSQMTFIGGRDELSCNQNLQLTYNRRSNQFLIRLRKDFGGYKLAKGDDKYTCGKVYFNHHRAQIVSILRSKASPLFYRIVKRDKRYYLYCVFEFQVGDDNIATRSEYGTVGLDFNKGFVTLSETNQYGHLVQTEFMSYRFKSGGKTKTDLQEVANNVVKLALRTGKDVCIENLDFRRTKAKVETKIGKKYNDMIHSLAYREFSDTIESVAYRNRVGLIKVNPAWTSWLAERIYCKPMKLNIHTGASYVIARRGQGYKDTV

SEQ ID NO: 45316 - protein, 490 aa, unknown
  TnpB Polypeptide
LVEIYCHCISIFVIELPELAGVACQEIFVELFGIPFNHKITQQGNQLINWLEELQFKYTFKSISKLIYIAETMRKCIVLNIVDLTPKKSRLLRCVFSEYLKVPNKTLELLPKASSSNQLHHLTYSGIRETSLLPSDIIQEARKDIWVKRRKIKNKIASASIRLNKRWFKFVKTKRNNPCFKITYSPRQSLAIPVKKNRQFQRFNSFTSSGWVFDNISLLKDGKIAVILEKEFEKPKLLRRYALGIDIGSSVLASVSIFDIVKSKVIRQLYFGKDIALRQQRYSKRRAYLQSLADKGSERARKSLKRLKRKQENFVKTRSGQIAKGIVTLAQKYDACISIEKLKNMRGKKGKFNKKANTKINRIPYGKFREFLKSNCELFEIPFYEVDAYRTSKWCSHCGAVNNGHYSGNYSLYKCKECGLIVNSDRKASLAVAVKSVLERSSQRLNNLDFVQISNTKVPVNGFFRPDDVGLNVAVQHNNQLMESQPILGR

SEQ ID NO: 45317 - protein, 334 aa, unknown
  TnpB Polypeptide
MKLAVFHCSRDYGIYKNTSANFWAGRAKYPNFKKKHHGGSAEFTKAAFRWKDGQVWLAKCVEALPIRWSRELPDGCEPSTITVKLDASGRWHVSLLVDNLSIRQEPKSDKSIGLDVGITSLIATSDGDKIANPKHFKRLRKKLRRFQKDLSRKQKGSNNRRIARCKVAKIHAQIADSRNDFLHKLTTQLVRENQTIVVEDLAIKNMVKNQKLAQSISDASWGELIRQLTYKCEWYGRILVKIDRWFPSSKRCGNCGHIVEKMPLNIREWDCPKCGTNHDRDINASKNILAAGLAVAVCGANVRPDSHTAKRQLRKSSNARTERSRSGKKQKPKS

SEQ ID NO: 45318 - protein, 446 aa, unknown
  TnpB Polypeptide
MELLKTSTDDSKEITPYWNESCFEMSQKLLSHTKMTDIGSDLNSLNLLQYYGLKNSWFSTRVHCHDELKKSQSFIKDMYECEDLKSTLVRSKKVRIYPKNPQQARKYLGLSRWWYNHTINHLNQPDTKASLYEVRKILKKGEDIPEWAMECPQRIREHAMSDACNAVRNAKVKCTKTGQFQKVSFRAKRDPIQSFGFDKISLNQDFVFSLKKFKMEFDATEEFDVDLEGTRIVREGSRYFVIIPQKRYYQIPENQRIDTVALDPGVRTFITFYSEVLHGKIGEGDFQRIYRLCLFLDRIYSKISKAKCRQKRRLKQAAERMRWKLFDLIDELHKKTANFLCRTFNRIFIPSFETSQMVTKLHSSVARNMMTFAHYRFKEYLKTKGQEFMCEVIECNEAYTSKTCSYCGKIHKIGSKKTMKCECGAKVDRDLNGARGIFLRALSVTT

SEQ ID NO: 45319 - protein, 459 aa, unknown
  TnpB Polypeptide
MQSKNISNTKRQEGETVRLKKNDPNTKQRVIQFELNPNKEQCIILGALTYASSKLWNVANYERITWTKESGNPYPDWYEQKARLKESFWYKNLPSQTAQEVLKQLDEAWSSFYKLKKTGGIENPRPPRYKHSNFNIRYLNKGFVISDGTIRLTVPKQQKLYIKQKYGLDVDFLYIQIPDRYKNLAGKAKIIEIIPIPKNNRYKVNIIINLPAAAYQQDNTTYMAIDLGVNNLMTCYTSTGKSMIISGRQLLSINRYFDKEIAYYQSVTYAQQAASGTKHKKSSRRIQQLYEKRKKQVHHLLHTATKQVIDFAEQEGVTVIIIGDLSHIRDDKDMGRVNNQKFHKWPFKKVEELLTYKAADRGIFTDKQEESYTSQCSPYATEVSEASAQKSNRKYRGLYIVDSKAYNADCVGAYNILKKYLCRVGKPNPAVVALDTPEMYRWDGYSFIGNPKLANLLAM

SEQ ID NO: 45320 - protein, 398 aa, Frankia sp.
LVRSRFRLYPTAGQAAALETHCGHARFVWNLAVKQQSWYRPWRGSALGYHEPSRQLTDARKGSPWLAAGSRTVQQQALRDFSAAMANFFAGKHRRPGFRKRGRSEGFRIVGARGRQWDVRQVHRRWSEVKVPKVGWVRFRRSRAVPDAKSFRITRDRAGRWHVAFAAIPESIDPSGTCEVVGVDRGVAVSAAFSIGEPLSCPGLRPAEVERLRRPQRRLARAGRRSNRRARLRGRIARLKAREADRRKDWAERTSTELARRYDLVRVEDLRLPNMIRSARGTVAEPGRNVAQKASLNRSILAAGWGLLVARPEQKAPGRVEKIPAAYTSQRYPACGHVAVESRRSQARFRCVACGFESNADVNAAIDITAGRAVTARGGGPLGQPVNREPQHFAPPSW

SEQ ID NO: 45321 - protein, 384 aa, Frankia sp.
VSLARAEAVKRAYRYRFYPTSVQVDELNRTFGYVRLVYNKALEERTRAWYGEQRRVTYVETSAMLTDWKKTKGLDFLPEVSSVPLQQALRHLQVAFTNFWAKRAGYPTFKSKRKSRPSAEYTWSAFRWKDGRLILATMSEPLAIAWFRPLPDGAEPSTVIVSRDPAGRWHVSILAETVVSELPPVDAQVGVDAGLAALLTFSDGEKVSNPRHERRDRVMLARAQREPSRKEKGSKNRAKARVKVARIHARIADRRRDGLHKVTTRLVRENQTIVIEDLAVRNMIRNHGLARAISDAAWGELRRMLEYKVGWYGRDLVVIDRFFPSSQTCSACGKIDGPKPLDVREWTCRQCGVRHDRDVNAAKMIPAAGLAVAACGDGVRPDQR

SEQ ID NO: 45322 - protein, 513 aa, Frankia sp.
LVRRRVPRRRSRRFRPAAAGRRPCRGGRRPCRGHHRYSHVDVCPTVWPTVWPLWRRDQGPPSRRSCCRCCRVTTLQAYRFAPDAHDIQAAALSRHAGAARFAFNRGLARVQAALAQRDAEKTSSVACAELTPVPWALPALRREWNWAKATAAPWWAECSKEAYSAGLDQLAGRPKHFGDSRSGKRRGRRAGFPRFTKRGKSRDSFRYTTGSHGPDGDRHVKLPRIGRVKVHEPMAALTGRPADGTARLLGATVSRTAGRWFVAFTVEVDREVPTGPSRRQRKARTAGVDLGVKHLAVLSTGEMIPNPKHLAASLRRLCTASRAYARSKPASAGRRRRAARLACIHARVASQRRDGLHRLTSRLATTHDAIVVEDLHVAGMVRNRRLARAVADTAMAEVRRQLGYKTGWYGCRLVVADRWYPSSRTCSGCGGRNPSLTLSDRMFVCPSCGLVIDRDVNAAVNLRSLVAASMSETVNARGGDQKTPLAGQVAVKREPGTAPAGKTGGASPQGEAA

SEQ ID NO: 45323 - protein, 456 aa, Frankia sp.
MVSAWMPRPSGRKGNAAPPRSPVNRLSIKWVHRPFLALSGHRTVGDSENQLRTCGVRVEPRGGTEQSWYRPGRGPAPGYVEQNRQLTEARRAFDWLAAGSIVVQQQALRDFATAMTNFWRGSHRRPGYRKRGCGDGFRIVAVRSGDVRQINRRWSEVRVPKVGWVRSRRSRPVPDARSYRITRGRAGRCHVAFAVVPEPIEAPGTGEVVGVDRGVAVSAALSTGELLSCPGLRPAEAARLHRLQRRLARAKRGSTRRGRSTTRIARVKAREADRRKDRAEKTSTDLARRYDLVRVEDLRIGAMTRSARGTVAEPGRGVRQKAGLNRGILTSGWGLLAQRLEQKAAGRVEMTPAAVYTSQGCSACGQVAAALRESQARFWCVACGLRCHADVNAARKIAAGRGVTARGGTAPAEPVNREPQHDAPCLLVGAGMGIHRLQAGEDVNLIMTTTVRDTAS

SEQ ID NO: 45324 - protein, 238 aa, Frankia sp.
VALAERRLRWCDRCRVPESAVPASAVGGDPLPGGGARLRVRVVGLEHLRQRRSFGSAGHRTRAAALACIHARVASQRRDGLHTLPTRLAKTHVTVVVEDLHVAGMVRNRRLARAVADTGMAEVRRQLAYRTGWYGSTLVVADRWYPSSKTCSGCGWRNPSLTLAERTFTCQSCGLVLDRDLNAAVNLRSLVAGSASETENARGADRKPHSGERVAMKREPGPASAGQTGSAAPHGTAA

SEQ ID NO: 45325 - protein, 309 aa, Frankia sp.
VAQTRPVGRSAGFRIVAVQPAAVRVLNRRWSAVRIPKVGWVRFRRSRAVPDARSYRVTRDRAGRWQVAFAAVPAPIPAPGTGGVVGVDRGVAVSAALSSGEMLHCPGLRPGEHARLVRLQHRLARVRRGPNRRARLRARIARVKAREVDRRKDWVEKTSTSLARRYDLIRVEDLPVGTMTRSARGSIVEPGRNVRQEAGLNRSILAHGWGLLVQRLEQKAPGRVEKINPAYTSQTCNTCGVRDRQARENQAAFGCRGCGQQANADVNAARNIALGPQWATTWVTARGGNADGRPVNREPPHCAPPPVDG

SEQ ID NO: 45326 - protein, 275 aa, Frankia sp.
MQDGHVQLRYNYRLDPSPGQVAALSRAFGCARVVFNDGLRMRQEARAAGLSYISDGELSRRIITEAKKTPERAWLVGVSAVLLQQALADLNTGYRNFFSSVSGKRKGRPVAPPRFRSRKDDRQAIRFTKNARFAVTAGRKLRLQKIGDVKVRWSRELPAEPSSLTVIRDAAGRYFASFVVQVGDEPLPPVEDETGIDLGLEYFAVLSDGTKVAAPKFLRRAHARVADDRRDWQHTLSTAIVRENQAVYVEDLCVAGPACRAVSTTTGTSTRPATS

SEQ ID NO: 45327 - protein, 402 aa, Frankia sp.
MSRFRLYPTVVQAALLESPCGHARYVWNLAVEQQSWWSPRRGPAPDYNEQARQLAEDRKENPWLAEGSQTVQRRAPRDFAIAMAGFLRGTHRKPGFRKRGKREGFRIVGRRGHQWDARQVGRRWAQVKVPNVGWVRFRPCRTVPNARSYRMTRDRTGRWQVAFAVVPEPIGAPGAGGVVGVDRGVALSAALSTALSTGELLSCPGWRPGERVRLRRLHRRLAKARRGSKRRARLRGRIARVKAREVDRRKDWVKKTSTDLARRFDLIRVEDLRIRSMTRSARGTVAEPGRGVRRKTGLNRGILAAGWGLLVVRLERKAPGRVEKVPAAYTSRRCSACGNVAAQSRESQARFRCVACGHTANADINAARNIAAGRAVTARGGTGTPEPANREPHHSTPPPVDE

SEQ ID NO: 45328 - protein, 331 aa, unknown
  TnpB Polypeptide
LGSPRRPGESGGSSSRSDSTSPLPVHGRPARPPGLSMTHKAARCPPATRSTLTWCSTTRSAGAARILAATISRRGDRWYVSFTVEVERAIPTSNGKPSVVGVDVGVRHLAVLSTGQTVANPRALEGSLRKLRRLNRELTRRKPGSKYRNRTRRRLARVHARAANLRRDAHHKLTTALATEHGTVVVERLNVAGMVRNRRLARAIADSGLGELRRLLAYKATWYGCRLVVADRFYPSSKTCSGCGWVKAKLTLTERTFRCETCGLVLDRDLNAARNLAKLVESVAQSGWETRNARGADQKPQRAGQMAVKREAGTGSYPDKTGIVEPQGLTA

SEQ ID NO: 45329 - protein, 415 aa, Anaerolineales sp.
MCSPLSVPDCMAGDPPETGRGKPWRSCNMQINRAYRYELKPNKAQREHLEQHADVARFAYNWALERCREALERGENRPNAIELHRIWNRWKKENAPWVYEVSKCAPQEAFRDMDRAFQHFLNGRKQGRRIGFPKFRRKGKDDRFRLTGTIRVGESWVQLPRLGRIRLKEKPKVLGCITSATVKREADRWYVSLTVEQEIPEPEPVSGPVVGVDVGLTCFLALSDGTKIYAPKPLEQYLRRLRQRSRQHSRKRKGSSNRRDSALRLARLHRRIRNIRRDFLHKITTELAKTRSVIVLEDLSVQGMMQNGKLARAIADAGWREFRKMLEYKTRWYGSQLVVAPRFYPSSKRCSACGYVMGELPFFIREWCCPECGIEHDRDINAARNLRDWYLSTVSSTGIYACGDGRLQASAGARR

SEQ ID NO: 45330 - protein, 399 aa, unknown
  TnpB Polypeptide
MSTHHKSYQFRMRPTKTQEAMLVQFAGARRFVWNWALARWKDYYKETGRTIPFSQLSKELTALRKKHETSWMLKCSLTSLQQAIIDLNLAFMRFFKGSDGHPKFKNRKSSSLNFRTTESIYIKESCIRISKIGLVRIHQTRPISGIIKQASFYRRPNGNWYASVSVQFDVVEKFIDPVALDRSIGIDLGIKNFIVTSKNCRVPSPNFHLHSERKIQRIQRTLSRRQRGSKRREKVRLSAAKIQQKIVNQRGDFLHKLTTQLVRDHDAICIEDLNVKGLARTKLAKLFRDASMGEFRRQLEYKAVWNRKHLVVVDRLFPSSKTCNHCGSINQDLTLKDRQWECQCGKVLDRDLNAALNIRDEGLKMLAARHAESLNAHGVCVSPETSGDGRRSEKSHGKP

SEQ ID NO: 45331 - protein, 477 aa, unknown
  TnpB Polypeptide
LRPAIRNTPAREVAEGLFLACATGGVSRLETALTVPVDERLFLCHGGRGDPRHVETLCGNTERPLGTGVVGVSETTCRKTYRYKLCPTPEQEQVLETVLWHCRRLYNVALEERKTAYDRRGVTISYYQQKAELPDLKAAFPELASVHSQVLQDVLLRLDKAFQAFFRRVQAGEKPGYPRFQGRNRYHSFTYPQYGNGAVVDGRLLSLSKIGRVKIRVHRPLEGTPKTVTISKEADGWYACISCENVPTHPLPKTGNVTGIDVGLKVFYVTSQNEVCENPRHFRKAEAALRRKQRKLARCEKGSKNREQVKQQVAKHYQKVKRQRADFHHKETLHLLRQYDTIYLEDLQVANLVRNHHLAKSISDAGWSQFRSILECKAVWAGKRVVAVPPQYTSQLCSRCGAYVQKSLSVRTHMCPECGLVLDRDHNGALNVLQSGLELDQQATQQQRRAEQEQAGAPPSGGNVAGCRRRSPRSPAL

SEQ ID NO: 45332 - protein, 370 aa, Bacillus sp.
MAKLNKAYKFRIYPTDEQSLMIRKTFGCVRFVYNKMLAERKEAYENLKDDKEALKSVKHPTPAKYKKEYEWLKEVDSLALANAQLNLDKAYKAFFKGNAKFPKFKSKRHRQSYTTNVVNGNIELLDGHIKLPKLKKVKIKQHREIPFVHKIKSCTLSITASGKYYLSILTEYEKEIETKEIKEVIGLDFAMDGLFVDSEGEKANYPKFYRQMLDKLAKEQRKLSRKKKGSSNWNKQRIRVAKIQEKVANQRKNFLHHTSKKLVTHFDAVVMEDLDMKRMSQALKFGKSVTDNGWGMFTSFLQYKLNEQGKQLIKIDKWFPSTKTCSKCGSVKEIKLSERTYQCTCGLNIDRDYNSALNIKKEGIRLLASA

SEQ ID NO: 45333 - protein, 352 aa, unknown
  TnpB Polypeptide
VKHAKTLKVRVRDKHATMLREMSRSVNYVWNYINELSARSIRDRGVFISAYDIQKYTSGCSKELGLHSHTVQCVSKEYANRRKQFKKSRLNWRKSDGTRRSLGWIPVNTGAASWKNGQIYHNGHYFKVWDSYGLSKYKFRSASFNEDTRGRWYFNVVVDVNVEPGRGHEALGIDLGLKDVATCSDGTKLENRRLYHDMEAKLAAAQRAGKIARVRAIHAKIANRRKDLLHKFSRSLVERCSLIVVGDVSPTKLAKTTMAKSVLDAGWGQLKTMLEYKCAHASIVLMEVCEAYTTQTCSCCGALPDSRPKGIAGLGIREWTCECGVTHDRDVNAARNILALGHGRPAVGIPAL

SEQ ID NO: 45334 - protein, 428 aa, Synechococcus sp.
VSAKLKVSQNPLTLCSVARMLLGFRTQLVLNHKQATLAAQHAGVARHAYNWGLEVCRQALENQQKLPTAIDLHKRLVAEVKKENPWYYQVSKCAPQQALRNLEHAFKRWRGGLGKFPHFKRKGVRDSFYLEGNIRISGNRIKVPIFGWLRCAELLPVATPKNVVISLRAGRWYISFKYEAPTPQVEKNGGVVGVDLGIHHLATCSGGEVFPIATAGRSPYPKPYRKARKRLVRLQRRLSRKQKGSANRKKAVVQLGKAHKRVSDMRQDSLHKLTTYLAKRYRVVVVEDLQVKNLLKNPKLAGSLSDCGFYEFRRQLEYKARLYGCQVVAADRCYPSSQLCSGCGHRQKMPLQERVFRCKACGLELDRDLNAALNLVRWYRTTHSSWGSDACGDSSGGVVGVNSAASHGSWKQEESRSAAGTEHSGSVC

SEQ ID NO: 45335 - protein, 379 aa, Lactobacillus sp.
MEQYRQACQKVSQYVFDHAFELRLIKLHQALYYFLRGEFDLRSQMAQSVFRTVKARYDAIQTQLKERPYRYRDDQGKWQQTPKDLTWLWQPVQFRRPQLDLVRGRDWSLKKDGRLSLNTLRGRIVVTPVPTKHWDSYFDGSWKLGTAKVVKSGHKWYLHISVTKVVPDYDKAQTTHVVGIDRGLRFLTTVYDETGQTSFLDGQAILRTRRKFKHLRSELQSKGTKAAKRKLRQLRQRENRWMTDLNHRLSQALVHHFGPQTLFVMEDLTHVRFATEKVAKDRRYETVSWAFYQLEEFLTYKANAMGSQVLKVAANYTSQRCPKCTVIVKEQRHHEVHEYQCQCGYRSNDDRVGAMNIQQLGNQWLAGQKHPKYHLRSAG

SEQ ID NO: 45336 - protein, 369 aa, unknown
  TnpB Polypeptide
  misc_feature (21)..(21): Xaa can be any naturally occurring amino acid
  misc_feature (23)..(23): Xaa can be any naturally occurring amino acid
  misc_feature (365)..(366): Xaa can be any naturally occurring amino acid
  misc_feature (369)..(369): Xaa can be any naturally occurring amino acid
MNKAFKFRIYPSDTQKTLIHXTXGHNRFLWNKMLEEKQKHYELNKTILYNRPAQYKENYPWLKDIDSLSLANTQLNLEKAFRQFFSRKQDIPKFHSKKQDYGYTTNLVNNNIVLKKGFIKLPKLGEVKIKQHRTIPNEMTLKGVTVSKTSTGKYYVSILCEYQKEIKKQVVKDSIGLDFSMTHFYVDHQGFKLDYPTDIQTDFKKLRILQSSLSRRIKGSSNYNKKVLDIALLHERIRHKRDDFIHKLSYAITKRYDLVSVESLNLIEMSKTNPYYAKQVSRFGWARFVSCLKYKLEKEGKTLVMMDKWYPSSKLCSECGEIHTELKLSNRMFECPNCHTNLDRDHNAAININKEGLRQYKLAFXXLNX

SEQ ID NO: 45337 - protein, 443 aa, Lactobacillus sp.
MKRMSSLTYHFGVKLRFYPSSKQKKIIKLNYDAQRFVYNSYVGRNRTSYHAKRYLANRQNRAMPFAFSALNSYEVQLAETVVINNELLAKPKNIRDAYSFLRVKEIDSLALANAIQNYQKAWNNYRKIGHGIPTFHKKRSDWSYQTNCQYPKQSEAYLDNGTARFIDAKHIKLPKLGIVRIAGFRKLIKERLLKQIPTRIGTVTIKKTADDQFYLSMQLGSDTAFVKELPKTQSQIGIDLNLDNFLTASNGAMVANPRFYRKTKKKLAHAQRVLSRRQRRAKKEGRNLWLAKNYQKQRLIVAKLHDKIRRQRNDFLQVLSTALIKNHDLVVAEELRNRNLLKNHALSQSISDVGWRSFLNMLAYKADLYGKEFLTIDPKYTTQRCHACGSIMGQNGYKKLTLKDREWTCPICRMPHIRDWNAAVNILEKGLSKWQNPKIKKAA

SEQ ID NO: 45338 - protein, 285 aa, Lactobacillus sp.
IKLRLYPNQTQQDQLWQMFGNDRFVWNQMLAMMNERYQNNKDLPFLSKFKLDYLLKPLKQEYPFLKSSDSSSLQVVNASLYQAWKNFFNDKTGKVGKPRFHSRKYLKNSYTGKSLVRIASRRYLKMPKLGYIKTSKTDILKDTKIKRYTVVLEPTGKYYLSLQVETNPVKPFKQTGKKVGIDVGVTDLAILSNGLKYPSFDGSYYEKQAISWQKKYSRRRHSAQLLCLQDKNRKVLNPRSLGSFLNWQKAQRTKAVYQAKVAAQRKDYLDKLTTHLVKQYDVIVI

SEQ ID NO: 45339 - protein, 457 aa, unknown
  TnpB Polypeptide
VKTIQAYRFALDLTSRQERDVLAHAGAARLAHNWALAKVKAVMDQRIAERSYGVPDELLTPSLSWSLAGLRKAWNAAKPEVAPWWGEVSKEAFNTGLDALARGLKNWTDSRSGKRAGRPSGFPRFKSRRRTTPSVRFTTGAIRVEPDRMHVVLPRLGRLKLHESARKLARRIEAGTARIMSATVRRDGGRWHVSFTVEVERAERSPARPGSVVGVDVGIRHLAVLSTGELVDNPRHLVAARQRMRALGRTLSRKQGPDRRTGRRPSKRWERAASRLGRAHARVAHLRRDGLHKLTTRLATTYGTVVVEDLNVTGMLRNRRLARHVADAGFAEIRRQLAYRTGRNGGRLVVADRWYPSSKTCSGCGTVKTKLALSEREYRCEACGLVIDRDRNAAVNLAALAAATAGSGPVAARGADQKTRTRGQVAVKREPGTAQADQTGTVLPQGRTTNRALTKAH

SEQ ID NO: 45340 - protein, 154 aa, unknown
  TnpB Polypeptide
MRKAYRCRAYPDEAQQQMLARNMIANRHLARAISDCGWSEFRRQLEYKCHRYGRDLVVIDRWYPSSKTCSACGHLLAELSLSIRHWRCPLCGTRHDRDANAAKNILAAGLAVSACGGDVRHYGSSRVRSPVKQEPRPARTGIPVPQGGGVVKGP

SEQ ID NO: 45341 - protein, 304 aa, Clostridioides sp.
VIEVKKAYKFRMYPNKKQQELINKTFGCCRFVYNKYLAKRIEVYKNDKETFTYKQCSSDLTNLKKELKWLKEPDKFSLQNALKDLDNAYKKFFKEKAGFPKFKSKKINRFSYKTNFTNGNIVYCGQHIKLPKLGMVKVRDKQVPKGRILNATISKEPSGRYYVSLCCTDVDIEAFENTNNQIGLDLGIKEFCISSCGEFIENPKYLKKSLNKLAKLQRELSRKTIGSLNRNKARLKVARLQEHIANQRNDFLQKLSTKLIKENDIICIEDLQVKNMIRNRKLSRLISDVSWSEFIRQLEYKANW

SEQ ID NO: 45342 - protein, 402 aa, unknown
  TnpB Polypeptide
MIQLAHKIELDPTVAQAIYFARACGTARFSYNWALAEWQRQYKAGEKPSEAALRRQLNAIKSTDFPWMADVTKCAPQQGIKNLGNAFKRFFKKHGKYPRFKKRGVHDGFRADNGPADPKSHAVEVDGLHVTLPKIGKVRMKEELRLKGRILSVVVSRVAHKWFASLSVEIEHTKSVRENQAAVVGVDLGLKYLATLSDGTKFENPKALRSNLVKLKRLSRSLSRKQKGSANRWKAREKLARLHYRISCIRKDALHKATTFLTKNFSVIGIEDLNIRGMAKNRKLSRAISDVGMYEFKRQLEYKAILYGCRVVVADRWFPSSKTCSECGCIKTHLELSERSWQCQDCGAEHDRDLNAAKNLKMLAESSSVTACGEISAGQIRKSLTKLASVKQEPSTEVSAYG

SEQ ID NO: 45343 - protein, 369 aa, unknown
  TnpB Polypeptide
MMRTVQFACTLPKSDADALNAESGRIYTDMLVRHYRLARKQGVWLTPKAGERLEDALGGPTSLHAHSRDAAQQGFYKACKTARACRQQGLDVKYPHWHKRFRTTIWKKTGISRSGERLWLARARGVAPVSVLLPPHLIPLPATAFLEARLVWDRAAQHYSWHVVVEDGVPPLPAPGTTTAAVDLGEIHPAALTDGRETVIITCRALRANAQYTVKRLSEIRAKQDRKAKGSCSWKRLQRRKSRFLAQQKRRARDLEHKISRAVVTWARERQIGTLVIGDVRDVADGKRMHSKRLASGRMDASATTSPTKRKRLESLLPWSRKPIPVRPVRAPCRMGQVACTVINPRGACIVARLAVLQRIETDWVLPIC

SEQ ID NO: 45344 - protein, 393 aa, Nocardia sp.
VQLRYQFRLYPTAGQQAALAKAFGCARVVFNDALVARRHAFDNGLPYLPDRELSKHLTEAKKTPERAWLAEVSAVVLQQALADLNTAYRNFFESIMGKRKGGRVAPPRFRSRKDSRQSIRFTRAARFAITSGGKLRLPKIGDVRVVWSRELPSPPSSVTVIKDAAGRYFASFVVEATEEPLPPVESEVGIDLGLATFAVLSNGATIASPRFLQRAERRLRQLQKALSRKQKGSTNRAKARTKVARAHAKVANTRRDWAHKRSTAIIRDNQAVFVEDLCVKGLSRSRLAKSVHDAGWGTFTRMLEEKARRRGRYFAEIDRYFPSSQLCSTCGRVDGPKPLCIREWTCPCGAVHDRDLNAAKNILAAGRAERLNACGALVGPDSFRHGARKQELT

SEQ ID NO: 45345 - protein, 388 aa, Kurthia sp.
MKRAYKLEIKPTDRQREKLIRTFDVCRYVYNMYIATNRVNYEEDRKFMSGYDFSKWLNTVHTKQNQQDLWIKTVSSKAVKQSIMNAERAYKNFFKGGSKHPRFKKKARQDVKAYFPKNGKGDFSLKRHQIKIPTIGWVTLKEFNYLPQDAIIKSGTVSQKADRFYISVLCEVPDCIKQSPESEGIGIDLGIKDFAMMSNGDVYENMNKTDKVRKLEKRLKQAQRKLSRSYEQNKFKKAGENCYFNNRQKQICRVQKLHQHLVNIRENYQKNIVSELVKTKPAFITLEELNVRGMMKNRHLSKAIAKQGFFHFRTKLQMKCEAYGIELRLVNRFYPSSKLCSACGHKKVDLTLKDRVYECVNCHQVLDRDLNAAMNLKQATEYELLVSV

SEQ ID NO: 45346 - protein, 243 aa, Kurthia sp.
MMRATIHSHASGRFSVSITCEVPEFQPLPKTYESIGIDLGITDFAILSDGRKVDNQRFTAKMAKNLARAQRKLSRRYEQAKKDSRDVRDCTNYQKQRRKVARLREKVAFQREDFLHKLTTAFIRQYDVICVEDLNTKGMLKNHKLAKAIRDVSWSSFVQKLTYKAKWYGRELVKINRFFPSSQLCHVCGHRDGKKPLAIREWVCSSCHTTLDRDINASRNILAGRRITPFRSNPTVGTTELAY

SEQ ID NO: 45347 - protein, 420 aa, Alloactinosynnema sp.
VHARYRYRIEPTAAQRSLLARTFGCARVVFNDAVRYRDACYQAGMRVNPTDVQRKVITLAKGTEERAWLADVASVALVQSLRDAHRAYTNFFDSLNGRRNGQRMGRPRLKSRKDNRQSFRLTRNGFTLRPNRRLYLAKIGEVKVRWSRDLPSEPSSVTIIREPDGHYYASFAVALAPTPLPPVEREAGIDLGIRRLATVADTAGGRGEIANPKHLARKQRKLARLEREKARRAKGGRNRAKSTRSVAIVHGKVSRARRDYHHKQALALIRDNQAVHVEDLNVAGMVRNRRLAKAIHDAGWAQFVRLLQEKAERHGRAVVKVSRWLPSSKTCSACGHVRDDLPLKIREWTCHECAAVHDRDHNAARNILAAGLAERLNACGAHVSPPSEEAVGAEAGSTYAARPRGACQGSQTSPSRPSRS

SEQ ID NO: 45348 - protein, 422 aa, unknown
  TnpB Polypeptide
MPMYECRIARIDTDITTYWILARMGWIATKLYNTALWHSRKQWEEKGKIPSGYDLQKVVLASNYHSFLPAHTYQHTAHQVGNAYKSWYKLRKTDKTARPPFFRPKEQPSTTMFDAFRVKDNNNTIFLTLSKSLKEEMEYPYKWLCMRLKWNTPFPEDGKITQIEIVPRNGYFELHAKTLLPEPVWRTEGQIMAVDLGERNPIVSRDEQGNLDIFKGGEILSNLRYWNKEKARVQAEVMSRTKNKKKYSKSLGKMSKHGSAQVKHAIHSMTSTFTNLCNQRDVKEVVVGDLKGIKKEKDGMGKNWNDKAQQGWQQFPIRTLVTQMGYKLARYGIRLVEQDEQGTSKGRCSLCGCEDRGKLRRVHRGMFLCRNCNTVQNADINGVGNQFVRYLHQIGKPVEGSSGCLAQPMVWRWDNHRWSVVG

SEQ ID NO: 45349 - protein, 380 aa, unknown
  TnpB Polypeptide
MRQTAEKTIVAKILTDSLTNKKREAIEREYRAFQQYIRGDEDVELYSATVQCADAYIEQDNIRDGHEYPWHIRNDVFDIDLRKDDNDVADWWLKIPVATVYGGVNVPIKPHEPIPDGAELCDSKIVRDDGEFYAHLTIEQQIEVSESYDGVIGVDFGVRWAATSVALPSRNTSFYGEEIRSVRRHYDEIRIRLQEKRAYRSLRRIKNKEHRVVEDRLHKISRSIVEEAKERNALLVIGDLNGIEDSDKGAEMNRRLSQMPHCKLKRFIKYKARWEGIAVVEVDEYMTSQTCSRCGNKNTTRQGQGRFLCDECGLDDNADKNGAANIAKRGLGKSIERPLSSLGASVDRLERCRDDSTSATVSGREDTEAPTSRNERVSVR

SEQ ID NO: 45350 - protein, 380 aa, unknown
  TnpB Polypeptide
MNKAIKYRLYPTTEQEILFTKTFGCCRKVYNLMLSDKLESYKSTGKFAAVTPAKYKKEYPYLKEVDSLALANAQLNLQGAFKSCFSKSRKSKNGFPKYKSGKHSRKSYTTNNQHGTVALTDKSIRLPKIGYVKAVIHRKPDCNWLIKSATVSQEQDGKYYVSVLFEFDDPINTYVADRTNAIGLDYASDCLYIDSNGNMGTNHKYYRESHNKLVRAQRRLSRMQGSKKHETKSSNYLKQLRKVNKIHRHIANQRLDNLHKISTEIANQYDVVCVESLNMKSMANRGFGNGKTTLDNGYGMFLSMLEYKLSDRNKYLIKVDKWFPSSQVCHCCGALHPEMKNLTVRTMKCDCGLTINRDQNAAINILREGLRMLNGSFNAA

SEQ ID NO: 45351 - protein, 443 aa, unknown
  TnpB Polypeptide
MVKNLTSVSGDKDQVNMHQENTMLPRRISVSLFIDQSIIWPVKRLQAFKFQLRPGGQQECEMRRFAGACRFVFNRALALQNENHEAGNKYIPYGKMASWLVEWKNATETQWLKDSPSQPLQQSLKDLERAYKNFFQKRAAFPRFKKRGQNDAFRYPQGVKLDQENSRIFLPKLGWMRYRNSRQVTGVVKNVTVSQSCGKWYISIQTESEVSTPVHPSASMVGLDAGVAKLATLSDGTVFEPVNSFQKNQKTLARLQRQLSRKVKFSNNWQKQKRKIQRLHSCIANIRRDYLHKVTTTVSKNHAMIVIEDLKVSNMSKSAAGTVSQPGRNVRAKSGLNRSILDQGWYEIRRQLEYKQLWSGGQVLAVPPAYTSQRCAYCGHTAKENRLSQSKFRCQVCGYTANADVNGARNILAAGHAVLACGEMVQSGRPLKQEPTEMIQATA

SEQ ID NO: 45352 - protein, 436 aa, Halopenitus sp.
VVEETFKYAATPDCDETAAAAWSDIQTCREVYNHALTQEYRPRPDYDKPSYREMQNKITAWKDRWPEWSTAYSKCLQMAVRRIKQSESVLESLQARGYGVGRLKWKPPHEFRSIVYNQSGFDVANNTDRTNHAIVNFSKIGDFHLNYHRSLPDDGDITQVILKKEKTGDWTVSILVDYDPEYPENPAVEDIAPEDTVGIDLGITKFIYDSDGRSFESLDDQCDRDRIERRHRNLSRKEHGSNNWEKARQQLAQAYERLQTRREDYREKLAHEYTTQYDAVFLEDLDVKAMKEDGRNSRNIAAMSWRQTIQAFKRHGKKNGCYVIEVPPEGTTKRCSQCGCETDKPLWVREHSCPSCGFEADRDYNAALEIKRLGLQQLGIETPAEDVGQGMAESTPAETALSGDTEGTPYVVSPKRVVETGSPCLKEPPKAASRQG

SEQ ID NO: 45353 - protein, 400 aa, unknown
  TnpB Polypeptide
MQRAILLQPDATKHKIEVLNEFKDRTISLANFLLANRKSKRLMDLHKEMYSVCKATTPFNSQVICDIERNIVRSKGTIIKAITIKFNVPRNCKTFTMSRFFVDFGLYPRKRIAVPIKQNRNYQRFQDLIKNGWICKTFGLTSSLQIVAYLSKEKEIQQRKNILGIDVNAKYFAISVVSPQGKVLYQTYFGKRIWAKRKKIMNRRALLQSLNATKKLKTLRNRERDFVKTNLGQIVREIIKIATKYDADISIEKLKRFNPKGKRFNKTVMRIPFYKFKQILEQRCFDNDIRLNVVSSWHTSKWCSHCGAVGNGHNSANYSLFKCKCGQTVNSDRKASLAVAVKSLLVRNRHTSNQSNAFFQFTNGRVSVNGLLRSDDVGLNQIAVQHLNQPDGMPTRFSGG

SEQ ID NO: 45354 - protein, 376 aa, unknown
  TnpB Polypeptide
MEMIAFKKQVQSSLRIKCDRLKSVSCGRVAPLKLQRTIHAKLVLDRKGKREVIAREYWAWQHQLQGFSGEELYSATKQQADRFRQRIRNQNGHGIKQQEYPMVLRRDCVKVQHQKDSVFKWWIRIPLHPESIHIPIELPHEQEPLLGHDIRECKLIRDGERWFVNITVQKEARLKRRYTTILPIDMGIRKLATTIENDKPRFYGKDVRQTRGNYFRLRRSAGKARIIKRWRHKERETVKHQVHAITRRIVEKAKATNAIIAIGDLEGIRDQDKGRRFNRRLASQPFYLFKQLLTYKANWEGIRVITVPEAYTSQTCHRCGMRGQRVAGRFSCQNCGLVCDADVNGAWNIRKRAHGLLAHETGVVLTPPGTLGEWEL

SEQ ID NO: 45355 - protein, 251 aa, Clostridioides sp.
MYCGQYIKLPKLGMVKIRDKQVPQGRILNATISKEPSGRYYVSLCCTDVDIEAFENTNNHIGLDLGIKEFCISSCGDFIENPKYLKKSLNKLAKLQRELSRKTIGSLNRNKARLKVAGLQEHIANQRNDFLQKLSTKLIKENDIICIEDLQVKNMIRNRKLSRLISDVSWSEFIRQLEYKANWYGRKIVKVGKFFASSQICNKCGYKNEEVKDLNIREWICPSCNETHDRDINASINILKEGLRLITIQNK

SEQ ID NO: 45356 - protein, 539 aa, unknown
  TnpB Polypeptide
MVKSTQWIATIPTPSLANISKINIANDLLAPYSDLMAYFLSDIDLRFVRDNEYLPFTNAKPYQTKEDYAKLFESCKKRYAKQIEKGQTPKKPLNEQLKMIEINAIQTPLSTRYAQTCYRQTLEIHLSWLTNLENIVRSFLGNSSIDDDLFLTTCYRINKCHLWHHSYVDLKWHKTKEGDLLVPTKTHKANITVPVSSDILFFMRKLIKRARKCIHFPRLNHIKTLKLDENVAVLEVSKNATHFNYFLKLSTLQKGKPIYLPLKRNPYLDDCLKKGERLPFVQVRLTDKLCTISAIVGYNKAPLRSPTESIGLDFGMVAMFTTSDGERHGLSSFTKLKIWDEELLELTKDLQKQSIKLSTNERYNQLQQRIKSYFKNEICRILNKLAKKNVGVFVVEKLDFRATGLSKRMNRLIGRIYRSIIKAKLSRLEEQYGIQIIAVNPAYTSQECSRCHHISKHNRKSQKDFVCQHCHFSCNADVNAGRIINQRRSLMLEFPVYTKSSTSRTVRCQVQEASEECHRRYCHDNGLLTYQESLAKSSL

SEQ ID NO: 45357 - protein, 552 aa, unknown
  TnpB Polypeptide
MFLDIRYLMERRECVMRTWKINIQPTKDAVLCDYFAENTTAAKCMYNVANFYIRNTMTGIRKSPEERTACETEVLHYVFTGIQKANLHARENYEKKLKKYQDMHTEKGDKLAADLKCKVFPYPTKEKWFLSYGVLDAIFKYTDHPTYRRMNSQVNQNAIKKTVKSWKSYFQLQKDYAVHPEKYKARPRIPGYVKNLAMTAAYTNQTARFICKDGRAYLQFVNHRQPVLIGRESLYSDMTYVKTEVKPQYGGYSILLTFKEDIILPEVPKFPKRILGIDVGVDNFCAVANNFGDIPFLIKGGAIKSMNQNFNKERSRLLSEVTKGSDSTHSKKETKRLHTLSRKRETRLRDFFYKTAWYLVRYAKQQQAEVIVAGHNEDQKQNICIGRQNNQNFVSIPFCRFLDILRYTAAKAGIPVVLREESYTSRASLLDLDAIPAYKKGDTTNHTFSGKRVHRGIYKTDKGLFINADINGAGNILRKEYPYAYDGQELSYLYETTKVVSYTDIYIGAKSLCNERYNGKNHQSGMGSRANHQYRKERRHRYRSLWGKSRAA

SEQ ID NO: 45358 - protein, 439 aa, Nodularia sp.
LALRRATFRLYPTKKINETLHYHRKLHKDLYNAAVYHRQTEYQKFGKSIKYLDQQNCLPAFKEQWTEYKNINSQALQATLKRVDFAFNRFFTGLSKHPKFKSIRHYSGWTYASLTGWKVHSIGDNGYLELAKIGQIQMRGKTRLWGTPKTCDIVYRNGKWYASIALEIDHELLKNSRQTNTGTIAIDLGCKDAIAWTNGDKDGLIEAPRFLRKAEQQIKKLSKSKRRKRSPNYKKKQKASRRWKKAQSKVTKLCRQVANKRQDWVHQVTTQIISGNSMVVTEELEVKKMTSKAKKGKRKKQKAGLNKSILDVGMGMIRSALKYKLQDVQGVFLEVPTKKVKPSQTCPKCGHQEKKNLDQRVHVCANCGYTQQRDIAAAEVMLVWSQNNLPGLGTSLVDADGSSTTKKRRVTGSLRQLSQVKRQKSQPTGGDVETPPSTT

SEQ ID NO: 45359 - protein, 385 aa, Acidimicrobiaceae sp.
VNVTARPDTEWVTRTPSTPTTFTQAFTYALDPTAAQASAMLSHVGGSRFAYNALLGLVKDNWDGNRAKKEAGLEVTKNDWVSTSHFGLLYLWAEKRDELAPWWAENGSSTYNDTARRLAASFTNFRKGRSKFLHFKRRGQSGSVRLMGPAVRLDDSHHVRISRIGEVKTYESTRKLYRHLERGTGRIVAATLRHRNGKWQVSFTAEVTRQLPATRTPERIIGVDLGITTLYTGATPDAKQVLEVDNPHHLVKAQRSLAHAQRVASRRQGPKKGVAPSNRWCRANTRVQQVHAHVANARKDQIHQVTTRLAKDYDVIVVENLNVKGMVKNHSLAKHISDAAWAEFTRQLDYKTRWYGSTLVKADRFYPSSKTLQSLRDSQSHTVPW

SEQ ID NO: 45360 - protein, 385 aa, Streptomyces sp.
MIDMKLRYQFRLYPSAPQRNQLARAFGCARVVWNDALRIRQDAYKQGKPVPSIVALAKLVITEAKKTEDRAWLGEVSAVLLQSSLRDLGTAYSNFFASKNGTRKGPRTGPPKFKKKTSRQAVRLTKAARFSITEEGALRLPKIGDVKIRWSRELPSEPSSVTVIKDASGRYFASFVVEAEDKLLPELDLDETETGIDLGLSSYAVLRGRKIASPKFFRRQEKKLRRAQRKLSRCEKGSNNRRKAKLAVARIHARTADQRRDFIEQETTRIGRESQAVYLEDLNVKGMARGKRAKSVHDQSLGRFARALEAKCARYGRDFAKVSRWFPSTQLCSSCGSVEGPKGLEGLKIRSWTCSCGAVHDRDENAELNIRREGRSIVAEGRPDT

SEQ ID NO: 45361 - protein, 371 aa, unknown
  TnpB Polypeptide
MNKAYKIRIYPNKEQIQTIEKTFGCSRFIYNYFLAQRIDLYKNQGKSIGYIDQQNQLPILKKEFIWLKEVDSTSLQMSLRNLDKAFKNFFRDKSIGFPKFKNKKNNKKTYTVNYVNNNIQIKKNTIKLPKLQWIEAKVHRYVQGRIISTTISKSPTGKYFVSIITEANIKPTDKKAKAKGKIGIDLGITHFATLSSGEKIENPKYLKKTLEKLAREQRSLSHKQKYSNNWYKAKKKVAKLHEKVKQQRADSLHKLSKRIIDENQIIILEDLVIKNMIKNHKLSKDIADASWYKFYSFLEYKAKWYGKTIHKIDRWYPSSKTCYYCCHVLDEIPLNTRKWDCPNCHTKDIDRDKNASLNILKQGLLEIAEIA

SEQ ID NO: 45362 - protein, 320 aa, Campylobacter sp.
MSKTNQSNLISISHKIELKPNNKAITHFKKAFGCSRLAYNWGLAKWQEYYKQGVKKSYLDLKKEFNAIKKDQFPFVYDVSKYATQQPFLNLNLAFNKFFRDLKQGKLSYPKFKKKKENFGSYYIGGDQIIIKNEKYLKIPNFGLVKIREKLRFNGKINSVTISQKANKFYASFSMQISHDEYNKTHKIKNLNNQSIGIDLGIKEFVCLSNGLMIKAPKPLNKLTRLLVKRQRRLSKKQHAKTKQEAINGVKKSNNYLKESKKLAKLHSKIANIRSDFLHKLSSIIIKNYDYIGLENLNTQGMMKNHKLAKSLVDVSLIDN

SEQ ID NO: 45363 - protein, 397 aa, unknown
  TnpB Polypeptide
MTTCTRILYAQCAKPADMERLKAACRNVGRMRAAIWQRWGGLGTVGKSVNKVRREITAANLFEKINIDGTVRAESTKDIVNDIFTYRKAAEAAVVKKIYQRYKDEATRKVKCSKLRSGEWVKDSYLHRQMRKHFRHGQGKSDKQFVVRSDKFSIGRSEDGFLTITLLFNRKSGGPVTLVTTTNGTNVKIANRNLRIIIENDEIQIHYAFEKVCQRPHGKETVGVDKGLTEAFATTTNELLGQGLGKLVFEYSDAITEIWRGRNKLRALAERYEKEGKKEKADKIRLNNLGTKKLDNMRRRFRNQGAQFAVQSRSPAHGSSLRHRGGRPVGLYQGEKPWSKNKSSIENLDKGGDAKNSGGNCRTARCSHRDRQRSLYVASRLSDGRLYRQTEGRSLLP

SEQ ID NO: 45364 - protein, 394 aa, Tolypothrix sp.
MLVLEYKVKGKKAQYTAIDDAIRTTQFIRNKAIRYWMDADRELKVDKFALNKYSTQLRKDFTFVTDLNSMACQAAAERGWAAISKFYDNCKFSKPGKKGFPRFQKDCRSVEYKTSGWRLHETKRRITFTDKKGIGELKLLGKWDLQTYNIKDINRVRLIRRADGYYAQFCIVIDVVDIQPKTGQEIGLDVGIESFYSDSNGHHEPNPKFLRKAETSIKKAQRRIYKKVIMSSGRHKARKVYAKKHLRVSRQRIEHAKRIARCVVRSNDLVAYEDLRVSNMLKNHCLAKSISDASWSLFRQWLEYFALKFDKLAVAVPPHYTSQKCSSCGVIVKKSLSTRTHNCACGCELHRDVNAAVNILKLGKQARDGQSRSNAVGVGISTLVGASLLEQILT

SEQ ID NO: 45365 - protein, 409 aa, Tolypothrix sp.
MRTAYQFKLRPTKQQATEIDRWLSMLCAQYNYLLADRFNWYEQNRCAINACPLICHLPELRDNPDYYSQKKTLPNLKKTHPHYGEIYSQVLQDIVKRVKATFDRFLSGDSNGKRSGRPRFKPRVRYRTFTYPQMKDGCLQGNLINLPMFGKVKVILHRPIPDGFKVKTASVTKKADGYYLTLSLEDATVPTTKPDFNPDSITGIDVGLKEFLTTSEGETVAIPQHYRKSQKRLRVIQKRASRCKKGSNRRNKAVKQVALHHKKVADTRKDFHFKTACNLLRKYDVVAVEDLNVKGLARTRLAKSVLDAGWSSFLSILTAKAENAGLLVIPVKASGTSQDCSSCGVKVPKKLHERWHDCPNCGCSLDRDHNAAINIKNRAEGHPVLKAHRVSEVITGFGEKPTPTCTQAV

SEQ ID NO: 45366 - protein, 367 aa, Tolypothrix sp.
LHKRWKSWLSASRYCYNKAIAALKAGEKITSAYSLRDYVLGLDLPDWVKSAPCHPKENAIFDAWDACKQAKSANGEASFRSCRQPSQSIKFHKVNFNGETWFPSLVKGLKFKSSEPIQKTDFATQLVRDRKRWFACIPVIEEVETRELDKVIALDPGVRTFLTGYDGDSFQEFGKADIGRIQRLCSHLDKLIGKASKAGRKQKRRMYLSANRLRIRIRNLVDECHKQVANYLTSNYKVILLPTFETSRMVVKSKRKLHTKTARQMLTWGHYRFECHLKQAAKKRGVVVIDVNESYTSKTCTKCGHSHIKLGGSKTFKCPNCGHEHDRDWGGARNIMIRALRDGSFALSINSESIAIAYDLFVQKHTA

SEQ ID NO: 45367 - protein, 473 aa, Tolypothrix sp.
MKTTYQYRFYPSTKQKLELNHWLRISRYWYNRQLGERFDWWKNNHLQLKAFPFWKNIFSSLFGNSPNYYSQKLQLPIIKQDLIKVFHSGELLDFTRVESTILQDVCKRVDKAFERFIVGDVNGKRSGKPRFKSESSFKTMTFATANDDWIKLIRNNWFYLRLPKLGVVKIRMHRSLPIGFKIKQISVTKKIDGWYMQICLEDNSVPKHKPDPIIPTWDNSMGLDAVLHGNDYLATSDGEKLPSLKVLRKSQHKLDKISVRRNKKKRGSKSRRKLAKKESKQHQKIARSRKDFHYKTAHKLIRFGKKVFFHEKLNLQGLGKRNKPKQDETGKFLPNGQSAKSGLNKSLNDAAFAQFFEIFSYIAAKAGAVVVPQNPAYTSQLLSYRNEIIFTNLSARKYWDEKELIYVDRDINAAINLKKLGLGIFPRIKRRSGKIVVEGSIADSTTKEILNTLYRASEAYTDLSQIRCRRCHK

SEQ ID NO: 45368 - protein, 402 aa, Tolypothrix sp.
MLSYFEEEKQMRTSYQFRLRPTKQQIVQIDRWLDMLRHQYNYLLADRFRWYEENRCSVNSCSLLVCHLPELRDNPDYYSQQNSLPQLKKDRPWYKEIHSQVLQNAAKRVELAFDRFLGGDCNGKRSGRPRFKAANQYKTFTYPSMKDNCINRGFIALPKFGKVKLIQHRTIPDGFKIKTCSITKKADGYYVTLSLEDKTVPAVKPDFNPDSIVGIDVGLKEFLTTSDNDVVKIPQYYRKSQKRLRVIQKRVSRRKKGSNRRQKAVKQLGKQHKKVADKRKDFHFKTANNLLKKYDVVAIEDLNVKGLARTRLAKSVTDAGWSNFLSILQIKAENAGFCVILCHASGTSQDCSNCGVKVPKKLHVRWHDCPNCGCSLDRDHNAAINIRKRAEGHPVFKKPRAS

SEQ ID NO: 45369 - protein, 373 aa, Tolypothrix sp.
VSIFANLFYILSFNPPSSHTLMLSYLSEVKQMRTSYQYRLRPTKQQITQIDRWLDMLRCQYNYLLADRFRWYEENRCSINSCSLFVCHLPELRNNPNYYSQQNSLPQLKKDRPWYKEIHSQVLQNAAKRVELAYLRFLGGDCNGKRSGKPRFKASNQYKTFTYTSMKDDCIDSGFITLPKFGKVKLIQHRAIPDGFKIKTCSITKKADGYYATLSLEDKTVPTIKPDFNPDSITGIDVGLKEFLTTSDNDVVKIPQYYRKAQKRLRVIQKRVSRRKKGSNKRNKAVKQLGKQHKKVADKRKDFHFKTANNLLKKYDVIAVEDLNVKGLARTRLAKSITDAGGHALSVDTTNQSRKCWIMCYPLSRVWHKSRLL

SEQ ID NO: 45370 - protein, 231 aa, Tolypothrix sp.
LTTSEGDTVSIPQHYRKSQKRLRVIQKRISRRNSGSSRRKKAIKQVAKQHKKVADKRKDFHFQTANNLLKKYDVVVHEDLNVKGLSRSMLAKSVHDAGWSNFLSILTTKAENAGLLVIAVNPSGTSQDCSSCGGKVPKKLHERWHSCLCGCSLDRDHNAAVNIKNRADGHAVLKAQRLLSNSRIGRDTPTLKLEYQFQCAECVTCLIVVVIQCVNFGLINIHSCLDLALDI

SEQ ID NO: 45371 - protein, 277 aa, Tolypothrix sp.
VLVLEYKAVVKKAQSIAINEAIRTSQFVRNKVLRYWMDNRGVGKKELYQYNTQLRSELKFVNDLNSHACQASVENVERAINRFFDNCKNNKPGKKGYPRFKKHSRSVEYKVSGWKLHPSIGRITFTDKKGIGELKLLGKWDIHQYPVELIKRVRIVRRADGCYVQFCLKIDNKQDAPSTTSEIGIDVGLEYFYSDSNGNHEENPRYLRKSEKDIKRVQCNIYKKKKGSSGRRKARGIYARKHLKVTRQREEHAKRLARNLCLANAKVVLEDLVRFVD

SEQ ID NO: 45372 - protein, 419 aa, Tolypothrix sp.
MIIYEFKVKGKDRQYRAIDDAIRTSQFIQNKCLRQWMDNKDKNIDKYALNKYCAVLAADFPFADELNSMARQSAAERAWSAISRFYDNCKKKVKGKKGFPKFKKHCRSVEYKTSGWKLSNTRKAITFSDNKGIGTLKLKGTYDLNYYHIKQIKRVRLVRSADGYYAQFAIDIDIKVETQPTGQVVGIDLGLKYFIADNKGNVEQSPQFYRKSEKQLNRANRKKSKKFSKDRKKAKLPQSTNYHKARNRYARKHLKVSRQRKEYCKGVAYSVIQSNDLVAYEDLNVKGLVRNRHLAKSISDASWFTFRSWLEYFGHKYGKVTVAVPPHNTSQNCSKCSQKVKKSLSTRTHVCPHCGFNEDRDVNAAINILKLGLSTVGHTGTYAWGDLPSWAIGVNLSSNGESVNQESPCLKTRGVSNEL

SEQ ID NO: 45373 - protein, 400 aa, Tolypothrix sp.
MLVFEAKLEGTKQQYEQLDEAIRTARFIRNSCIRYWMDNPYIGRYELSAYCVVLQREFPFANKLNSMARQASAERAWSAIARFYDNCKKKAAKKGFPRFKKHQTHGSVEYKTCGWKLSEDRRTITFTDGFKAGSFKMWGTRDLHFYQLKQIKRVRAVRRADGYYVQFCLDVERVEKREPTGKTIGLDVGLAHFYTDSDGKTVENPRHLRKSEKALNRLGRRLSRTTKGSKNRAKSRNRLSRKHLKVSRQRKDFAVKLARCVIQSNDLVAYEDLQVRNMVKNRKLSKSISDAAWSAFRNWLEYFGKVFGVATVAVPPHYTSQNCSKCGEVIKKSLSQRTHKCHQCGLVLDTDWNAARNILELALRTVGHTGTLNASGDISLCMSEEIPSSKLSRGKRKPKE

SEQ ID NO: 45374 - protein, 488 aa, Tolypothrix sp.
MKRKLKGQVTVTRIAILGTAKLNKWKEKELDTIAFRLGKLRSDLWNEFGSLKAWGISKFDIDKQLRGCSYKYQLPAKLWEATLYDVIDDIHLVQAACVEKVMNALGQSYQSFQAKKELLQLTLESREWLNHPLLCTLVRRFWYRGHTKVANQIVLKAFDTQTDSRDVVWLKFGGLVNGKTLKLPTTLPHKVKCQLRLIKRSGRWEIHYTTDIQKADKKTEGLVIGCDRGYTEVYTTSSNDGARFLGKNFGAIQTKETDYRTEKLIKRNKLLAVANKATLKGDSARADRIKRNNLGKIKWIARENSFKGQIKTIVFTATHALMLNAITVAYEDLTEQIKSKKPMKKRMKRNVCSWCKGIVVDALKQVSTRVGCTVKSVNCAYTSQLDSRFGTLTGTRSGDKFTGHDGVVMHSDTNAADNILVRMGDVEIPRYLKHSSVKVILQDRTQKFLDTFIPCRDEVFEAITGTDKPQTLEPKRQRTRLGQSESEL

SEQ ID NO: 45375 - protein, 396 aa, Tolypothrix sp.
MLVFEFKAYGKAAQFAAVDDAIRTAKFIRNSCIRLWMDVKGTGKNDLQKYCAVLAANFPFASELNSMARQVSADRAWASISRFYDNCKKGVVGKKGFPKFQKDCRSVEYKTSGWKLADDRKTITFFDKKGIGRLKLKGTRDLHFYQINQIKRVRLVKRADGVYVQFCIDVNRSENVDPTGKTVGLDVGLKEYYTDSDGTMVENPKFLRQGEKVLKRSQRRISRRVKGSKNRGRARQIFGLRHLKISRQRKDHAVKLARCVVQSNDLIAYEDLRIKNMVKNHCLAKSINDASWYQFRVWLEYFGKVFKRVTVAVNPQYSSQECSSCGVIVKKTLSTRTHVCKCGCVIDRDENAARNILSRGLGTVGHTGTFALDASNTCGDETSTLVGENLHEQVMS

SEQ ID NO: 45376 - protein, 445 aa, Tolypothrix sp.
MSQVITAKLKLNLTTEQKALVSQTTLAYRDALNYTSQVAFDAGKTSNGAKLQKAVYNELRVLFGLGAQMACNVPRQVSATYKTLWTKVKQSADAIAKGYTKKRYKGLDKAPKYVSRTCTLNYQRDYSFKSEQRVSINTLNGRVIVFYDGYSKHLDLIANCDKIGAAKIVYQRSSKTYYLMVGLEIDVPDVDPTKITRISGVDVGMRYLAVETDLKNKSKFYSGKEARHKANRYHKARQTLQRKDTRSAKRRLVALAGRERRFIADVNHQISKQIAKSNSLIGLENLTGIRDRTKSKSGKKASNKQRRANRNKAKWSFAELHGYIDYKANLNGSLATKVPAHYTSQSCPKCGHTSKTNRLNKGLLFRCECCSHELHADLVGSRNIALRTLLVRQDWMSTGALSMYPNVSSVEAKGEILQRFSELRWSSDTSPHALRYSAQWWVIDY

SEQ ID NO: 45377 - protein, 376 aa, Tolypothrix sp.
MLVLEFKVYAKPNQFQAINEAIRVCQFIRNKSIRLWMDGGAKSWFDLSKYCAIWAKEFDFANKLGAMARQASAERAWSAISRFYDNVKKGIKGKKVGFPKFQKNCRSVEYKTNSWKLSNDRKSITFTDKCGIGRLKMKGTRDLNFYAPSQIKRVRLIKRADGYYVQFCLAIERVEQVKTTGKTIGLDVGLKEFYTDSNGEMEQNPKFLRKGEARLKRAQRLVSRKTSCGANRRKARVVLGKRHLKISRQRKDHAIKLARCVITSNDVVVYEDLRVSNLVKNHCLAKSISDASWYQFRVFLEYFGKVFGRITIAVNPAYTSLECHNCGTIVKKSLSTRTHICKCGCEMDRDHNAAINILNRGIGTTGHVGTLIEERS

SEQ ID NO: 45378 - protein, 346 aa, Tolypothrix sp.
MLCQKLKKYFQGLSEVPSQVLQQAIKQLHRAWEGFQKIGHGFPRFKKFGQFKSLLFPQFKENPVVGVHIALPKLGLIPINLHRPIPNGFVVKQVRIINKVSIWYASINIQCNVSVPSPMPHGHSIGVDVGLEKFLATSDGVLVKSPKFLKVMQSKLKLLQRRFFRKTKRSKNYEKQRIKVARLHHTIDNTRKDFHFKQAHALCDAGDMIFMEDLDYQTLAKGMLGKQMLDAGFGQFRTITKYVCWKRGKFFSEVNSRRTSQECPECGAEVKKDLSVRVHHCHSCNYTTDRDVASGQVIRNRGIELISTDGQSGIQNAYADGLPGIEMSQSRSKSKTRKGATRKTKK

SEQ ID NO: 45379 - protein, 310 aa, unknown
  TnpB Polypeptide
MSRCRSFNYLLQPTVSQRAALERLMTLQRELYNAALEERRGAWKWERRSVSYFDQTKELTELRELRPETLAFGVTVCRGTLRRLDRAFSGFFRRCRAGETPGFPRFKGRGQFDSVQWEDRNGWALNEESGRLRLQGVGQVKVRLHRPTRGTPKTITVRREGRRFTVSVHCVDVPAEPLPSTGREVGVDLGVGAVLASSDGRLVENARFARRRQGALATAQRELATKTRGSRRREKARERAAVQHRKVRNQRRDFAHQVSRQLVAHYDLIVFEDLKIQHMTRRPQPRPDGEGGYQPNRAKVKAELNRAILD

SEQ ID NO: 45380 - protein, 244 aa, unknown
  TnpB Polypeptide
MRLVERHIVRDNRFEDICFKSGLLYNYVLYSVRQGIFSGNYLKEYEFSTKLGRENQFDFRNLPTDLSQQVVGQVFKSIRSWVKLKKDFDKNPSKYGNHRPHIPSYKKGKKQNVVVFTTNSCRIKDGYIHFVKNIIHPIKTKIGDSKLCQVRIIPQATCYVIEVIYEKKEQELNLNKDNVLSIDLGLNNLCSCISNVGLIPFIVNGRIMKSFNQWYNKNKAKLMSYVGDVGTSKRLRQLNNYRNF

SEQ ID NO: 45381 - protein, 380 aa, unknown
  TnpB Polypeptide
MERAYQYRIYPNKKQRVLLEKHFGATRWLFNYGLQRKIETYQKTGRNISCFELSKELPNLKSQKETEWLKEINAQSLQMSLRALDNAFVRFFRKKKGFPNFKSKKNKYKQSFSIPQGNRINFKKRKASFIKIGEIKIRIDRQFKDKIIKATISKNKINQFFVSYIVDENIKPPKPKPIKEKTTIGIDLGLNYFAVLSNGKRIKNPKYLKKSEQRLRVLQRRLSRKKKGSNKREKVKFKVAKLFNKISNQRSSFLHKFTEQLTRDNQVDTYAIENLNVNGMLKNHCLAKSIADTSWSEFIRQISYKSKWYGKNLLMIGRFEPSSKMCGCGYINNDLKLSERKWTCPECKIKNNRDLLAAQNIKKFALLGLLRPIELAEVSQ

SEQ ID NO: 45382 - protein, 234 aa, Singulisphaera sp.
MKLTLQTQLFPDKTHSAPLKATVERFNEAAEWLAGEAFAIKVSNKTELQKTHYALLRERFGLSAQMAVRCIAQVCEAYKRDKTKRPHFRKHTAMPFDPRMMSFKEADRVSLLTLEGRVVVPFVMGRYQTEQFTNAKGQADLVLRKDGKWFLLVTVDVADGTPIPTTDFLGIDLGIANIATDSDGNEHSGRPVERTRKKHNRLGAKTRVTGSPLGRSANSWRFSRTKPRSQACPL

SEQ ID NO: 45383 - protein, 498 aa, Solobacterium sp.
MANTIKKTTTSSFSLTLRLNTSDNDIKILEKRFDIARHLYNVCVKEARRRVNSFKKDKEYKRLMKIFAINKKFSSEEKEILRQLRVKYDLEGKYSLEKYLNRCRKKFRKYIDADTCCGIAQTAWKAVDSYLYKNGKKIHFKNDYGFDSVSSKTNKQGIIFRENAIKWLDLKIPVFIRNNDNYAKKCLLEHRIKLCRIKRKWYKHNYRYYAELVLEGKPPLKNRHSSNGEVGIDIGTSTIAAVSRYGVLFKELGEEAQYISKEISRLNRKSDRQRRANNPQNYNKNGTIRKNTKNFKRKWYYSKKHRLTLDRIHYLYRLRTDLIKQSHNRLANQILTMGDCIYIEDLNFEAMKRKSKELKKSKKTGRLVRRKRYGKTIREHCPGTLVLKLAERAKLLDCSFNKVNTNISKASKLNHITQEYVSSDINSRWKTIDKNIKVQRDLYSAFLLSNSDTSSIIDTKKCENNFMFFYYYHNAIIKEMQRLKYNGKYYPSSMGIRI

SEQ ID NO: 45384 - protein, 479 aa, Bacillus sp.
MANYKTMQVWVKKSHRMYGYFEEMCSSSKNLFNTTNFYTRQVFTGLTQEKPLQPLQQEVLENIQKHVPKINDNQQAAYQRKLEKEKAKPVEKRKEIKCNLFDEPSKENPFVDYNFMDALFKSMIQQDYRSLPTQSSQGIMKAVFHNWKSFYSSLREYKANPKKFKARPKIPGYSRNKEKEVSFSNQDCVIKESKFLKFPKTKERLNIGKLGFTEGKLKQVRVLPKYGHYVVEMIFQVPSEQGIKEPKKRYMSVDLGNDNIATIITNTGRRPVLVKGKNIKSVNQRYNQLKAHYMGILRHGKNHKEGQFTSKCLEKISHKRFNQIKDLFHKASFQIEKIALEEDVDTIIIGQNKDWKQNSNMGKRNNQSFVSIPHSLLIQMITYKAERHGIKVEVTEESYTSKASFLDNDNLPVYGEDDSKKSFSGKRIKRGLYRSKNGTLLNADVNGAGNIMRKLFPNALEEAFSCMETLMNPMSVVIK

SEQ ID NO: 45385 - protein, 596 aa, Rhizobiales sp.
MSRAERLLLAQLKAGRTWTGDLKVSFYQPLGISAVHLDMAYRQLTAKLASISELAKERAKDLARKVSSKKTDIKRKTLALARAKKVRRKLAEELATITVKLEYRRASMKIAAEERRADELFALKQLLIKYHARRAAFESATVEIQKLGFAVHQHKRRLAILETKQAQARNQAVDPTICFGSKKLFREQFNSQGNDYADHAEWLDAWRSARSAQFTLDGNSSKEGGNQFARLRPRGDGRFDLELRLPKALAHLATRTFKVSGQTIACVDFHGLSFNHGNDVIEQALANRKPVTVKFLRDAKSWKVMVSVDHAVEWKTPDFSAGALGIDLNAGHISAALVDRDGNPVEVFNFPCVTYGKTSDQAQDAVRKVAAEIAARAERLGVPVVSELLDFSEKKKTLKDAKDARYARMLSSFAYSAFGKALASACARQGVALRRVNPAYTSIIGRVKFARRYGLSVHEAASVTIARRAMGYSERLPRSSTDTVKVPTNGCDHVTLDLPVRKDASELAPKSRHVWPRWNGLNKEYQKALAALGSSRRRSRPKRGKSQAWGGQLSRPRAGTLAGGAENRSMALRKGQDVPAKSRFSHVARGGQRAGN

SEQ ID NO: 45386 - protein, 514 aa, Rhizobiales sp.
MKIKDADDLSAIDEVFVSKSHRSIRPRHASLQTISIPFSCSSKDAEFLNEIRRVQSAATRTAYANAQDSDRSRRTEKEVREILKSRFTRCELLDSWAMHCATRVGLLKRKLRPDGKMIFGGRKDLARRRENLITAEEWKDKRLHPFVSYGDRQKAFGNQNIQLIDETTIVVKIGRISGGKIVRCYATLHLPAMHGNVRSIMRQLALICAQPEQKDRINVSYSIGHDKVSITFDPADLPDHPQRRRPVVPVKGRALGIDLNPNWIGLSVAANSGDAAKIEDTKLREHALVKLDMAIDASPELVRETLAAVCDRAISMARKHRCGTIVLEKGLGKLRSSGKSRSLNRLLNYWARTVFVQMLTRRARLAGIAVLEVWAGYSSTIGNLAFDAPDACASATEIARRGIARLAGIKDVLPALEEGCVSRLWKNGKVPAELGSWQEVHRSIKAAKIGYRRPHPDVPIGARGSDVHGTEMFCGHAVVRLGRRQRPGLMFRPMVASPKPVAITRAQFNVGVSL

SEQ ID NO: 45387 - protein, 349 aa, unknown
  TnpB Polypeptide
MIVRTLKLKLTKKQETILVQWLWNLTGVYNWAIRKIKLDAQNKIYYSNFDFMNLIANHSKRMGIPSHIMRGILNQAYTAWQRCFKKIAKKPRLKGNRNKLNSIPFPDPIRAPKDNRIGLPGLDKVRYHKQELPNGKIKCGRIIKRASGWYLALFIDTVHTFPVQETDKAVGIDPGFRTLLTLSNGVKIENPRELHKGAERYAQAQRGRRKQLSARLQERQANRRRDRNHKISRKLVENYKAIYYSDDNFKGIARKFGKSISEAGLSQLIGMLRYKGSLCGRKVIPVNSKFTTQRCSACGSITGPKGISNLSVRQWDCACGAHLDRDINAAKNVLFAGVGATHEKAVRRA

SEQ ID NO: 45388 - protein, 347 aa, unknown
  TnpB Polypeptide
VYGKHEFPVVLRNPKTQTGKYQQEALKCGVKYCRITRKWVKTKWKYYAQFILEGYPPTKCDGNGVMKHPVNHGRIGLDIGTQTLAISGKDICDLRVLAPSARAQARGLTNEIARTTRAMDRSRRATNPKYYNPDGTIKRLKRQHGQKQRREWKYSKRYYRLRAKLRNLYRKLADIRKMEHNILANELLAHGNEFVVEDMNYKALQKRSKETKINPKTGRTHTKKRFGKSLSRCAPATFISILSKKANRYGSTVIKVSTFETKASQFDHTDESYTKKKLSERMARLRSGDIVQRDLYSAFLLEHIDTESLQYNMETLNSAFPAFLEMHENTKQRLQAVGSSLPASIGF

SEQ ID NO: 45389 - protein, 401 aa, Anabaena sp.
IYLARQLFLKTGKIVSKFDLIYEYKQNKHYQALYSQAAQQALITVAESFQSFKQLRKVFFEGKIEQKPRLPNYRKKGGLALVSYPKQALKLVNGQIRVPLGSLVKTWFGIDSFTIPLPSNLDYLEIKELRILPRNGCFYAEFIYKLEPQKPDLDYSLVLGIDHGINNWLSCISNAGTSFIVDGRKVKSLNQWYNKEVARLKTNQPQGFWSKKLAHITEKRNRQIRDAVNKAARIVINHCLEYKIGNIVFGWNEDNKDGINLGAKNNQKIVQIPTARLKQRIKQLCELYSIKFQEIEESYTSQASFLDGDTIPKFCEKPEGWVSSGKRVMRGLFVTATSIKISADLNASANMLIKAKTQLNLVFDLAKVVRGLLTVPPRIFLWEKNCKTRRGVALALPVASV

SEQ ID NO: 45390 - protein, 279 aa, Anabaena sp.
IFLTATQKQTIKQWFGVSRFVYNTTVKLLQDSTIKANWKAIKTDILNGLPGFCKSVPYQIKSIAIKDACKAVSNAKKKFQNGGGISKVKFRSRKDPIQSCYIPKSAVSDKGIYYSILGEVILKESLPQSFGDCRLVKAYGDYYLTVPEDVSRQQYDNQGLVVALDPGIRTFITFFSEFSFGEIGTSANIQIQKLCFRLDKLISKIAKAKCKSKRRLKFAASRLRGKIKNLVDELHKKTARFLVDNFDIILLPTFETSQMSKKAKRRIRSKSVRQMLTLS

SEQ ID NO: 45391 - protein, 258 aa, Calidithermus sp.
VKLTAKVKLLPTPEQRAYLLDTLRRFNATCNYISDVAWETQTFKQIPLHHLHYHATKERFGLSSQMVVRANAKVVDAYKLDRKAKRSFRELGAITYDDRILSWNLTASRVSIWTVAGRQSIPFAAGEYQRKLLQTRQGETDLAYVRGEFYLFATVNVEEPDPVEVEGVLGVDLGIVHIATDSDGEAYSGRRLNSVRPRHRRLRRKLQRKGTKGAKRRLRKLSGKERRFAHDVNHTISKRIVEKAQRTNRAIALEDGQG

SEQ ID NO: 45392 - protein, 393 aa, unknown
  TnpB Polypeptide
MVNRQLTVTYGIIYIGGDKMITSIKVRLEPNNKQNSKMFQSAGTARWAYNWALNKQQENYKQGNKFLQDGVLRKELTQLKKMPELKWLNGCSCNITKQAVKDACNAYKSFFKHLADKPRFKSRKKSKPSFYQDIIKIKFTETHVRLEKLGWVRLSEKNRIPTNVKYKNPRVTFDGVHWYVSVGIEIENVKPKLTTESIGIDLGIKDLAICSNKMAFKNINKTSKVKKLEKKVRRLQHKVSRKYLINKKGKSYCKTGNIIKLEKTIKKVYKRLDNIRTNYIHQATTKIVKTKPSRVVMEDLNVTGMMKNKHLSKAIAQQNFYKFIQTMKYKCEKYGIEFIQADRFYPSSKTCSECGVIKKDLRLSDRVYVCSECGCVIDRDYNASINLSRYELA

SEQ ID NO: 45393 - protein, 466 aa, unknown
  TnpB Polypeptide
LGDSEHSIPGARRRRPVALREPGREVVADGSEDVGQAVDHVSGHPACAGISSRRRNGRAAPKRHAYDPGPSLTVVGQWHRGFVIVRYRYRAYPTSAQAAMLARTFGCARVVYNDAIRLRDACYEAGVKLSDTEIQRRVITAAKQTAEREWLSEVASVALVQSCQDAARAYRNWFDSLSGKRKGRKVGRPRMKRRRERQSVRLTRNGFSIRSDGRIYLAKIGEVKVRWSRTLASEPSSVTVILEPDGRYYLSFCVERETQPLWVIDHEAGIDLGLSRLLTTSEGEIVDNPRFLRRRQRKLACLQRATSRKQKGSANRRKASKRVAVAHRKVREARLDHAHKTALRLIRENQAVYAEDLAIYGLARTRLSKSVHDAGWSQLLRLLAEKAEHYNRTFVQIGRFVPTSQICSECGWIDGPKPLSIRTWTCQCGAVHDRDVNAARNILAAGQAERLNACGERVSPSTRAAA

SEQ ID NO: 45394 - protein, 402 aa, Escherichia sp.
VERLQAFKFQLRPGGQQEREMRRFAGACRFVFNRALARQNENHEAGNKYIPYGKMASWLVEWKNATETQWLKDSPSQPLQQSLKDLERAYKNFFQNRAAFPRFKKRGQNDAFRYPQGVKLDQENSRIFLPKLGWMRYRNSRQVTGVVKNVTVSQSCGKWYISIQTESEVSTPVHPSASMVGLDAGVAKLATLSDGTVFESVNSFQKNQKTLARLQRQLSRRVKFSNNWQKQKRKIQRLHSRIANIRRDYLHKVTTTVSKNHAMIVIEDLKVSNMSKSAAGTVSQPGRNVRAKSGLNRSILDQGWYEMRRQLEYKQLWRGGQVLAVPPAYTSQRCACCGHTAKENRLSQSKFRCQVCGYTANADVNGARNILAAGHAVLACGEMVQSGRSLKQEPTEMIQATA

SEQ ID NO: 45395 - protein, 210 aa, unknown
  TnpB Polypeptide
MSTGQSVSAPNILNKLKEIDRLNSYLSKKMKGSNAAKKLQLKIQRKQKYLNDLKEDFLNKLVDYLIKNHDCVILEDLSIHKMIKKLGERKKSFNRLMTMIPMYEFRQKLQYKAMLAGKHCVAVNPANTSRTCSACGNVDKKSRKSQSDFECTRCGMSANADYNAAINIHNAGVKHLLAAGHAVKSAHATALAVSEANLSAVLPSSFGFSA

SEQ ID NO: 45396 - protein, 397 aa, Actinomadura sp.
MCLVTACVHRLLRRRCWRSIAGTPGSSGTSPSSSTGTGSLAAARPRRSTPAFAEQCRQLTEARAAFAWLRAGSQTVQQQALKDFAQAMANFFARTHRQPTWRKAGVHEGFRIVGQRGRAWGVRRVSRCVGEVRVPKVGWVRFRWSRPVPEGVKSFRVTRDRAGRWHVAFAPVPDPILPPGNGQAVGVDRGVAVSAAWSTGELLQAPGLTEAEVARLRRLQLRLARARRGSNRRARVKAAIARLKAREADRRRDWVEKTSTTLARGFDVIAVEDLNVRGMTQSAKGTIDAPGLNVRAKAGLNRAILAAGWARLVERLGHKAPGRVIRVDPRHTSQTCHACGHRAPENRESQAVFRCAACGRTANADVNAACNIRTAAGHAVAARGGGQSRFPTTTEFG

SEQ ID NO: 45397 - protein, 260 aa, unknown
  TnpB Polypeptide
LHQEIGGEIMFATISKSTTGKYWVGITCEVQHTPYDKTGSVVGIDTGIKDLAILSDGKVYKNIKTLKNNLKKLKYEQRQLSKKVKGSSSRNKQRKTLTLVHEKITNVRKDYLHKISTEIIKNHDIICVEDLAVKNMMKNHKLSQAFVDVSLGAFYSMLEYKAKWNDKQYVKIDRFFPSSKMCSKCGWINQNLTLKDREWICSSCGENHDRDFNAAKNILKQGLKTLSGSGIESDIKQKQVEALSLDESMKPETHQSLADV

SEQ ID NO: 45398 - protein, 422 aa, unknown
  TnpB Polypeptide
MVDKETNKKLKELALATVKCWNEVNWLRMQQFKKGKRVDFLMTEKLVYEKYKNVLKVNTQQVARKNAESWRCFFFLIKEKKDGKLPKWFKPRPPGYCKDKSRMLIIIRNDRYEVKENEKEIYLKDFKLSLNFKGKLKWYGKQGRLEVIYNEAKRSWYAYIPVEVENAIEGNGNLKASVDLGVANLATVYVEDGTWYIFKGGSVLSQYEYYSKQISKVQKVLARHKQMRSKKLKLLYDKRKRFLKHALNSMVRKIMNELSGRNVGKVVVGYPINIARDCGNKLNTNFWNYRYIIKRFHEIGEELGIRVICVNEANTSRICSLCGEAHENGHVERGLFKCPRIGKIINADLNGAINILHIPEFLYSGSRWQLPGRNRGNWLKTQPVVYRWTSKAGWLLATSYEAVRMKAINHKLMIRPKGTLTL

SEQ ID NO: 45399 - protein, 352 aa, unknown
  TnpB Polypeptide
VKKTKTLKVRVKDKHAKQLSEMARAVNFVWNYINELSARSIKEQGRFLSAYDIHPYTKGAGKELGLHSQTLQCIASEYVTRRKQFKKAKLRWRNSGGARRSLGWIPINTAAASWKHGQVFFNGHYFNVWDSYGLSHYTFRMASFNEDARGRWYFNVVVQIESVASAGTKAVGIDLGCKEAATDSNGAGVTGREYRRLEAKLGIAQRANNKTRAKSIHAKIKYRRQDSLHKYSRKLVDENAAIFVGNVSSLKLIKTKMAKSVLDAGWGSLKTMLEYKCDHAGVVFEEIDEAFSTQSCSCCGSIAVSSPKGRAGLGIREWTCSECGAEHDRDINAAKNILAAGHRRLAVGIPAV

SEQ ID NO: 45400 - protein, 476 aa, Mycolicibacterium sp.
MARHTTFRFCLDPTVEQREALARHAGASRFAFNQCLRMVKTALTHHRTDPSVGVPWSGFDLINAFNAWKKTEAAGRVFTVDSDGGVEVAITGLPWRREVCQQVFEEAAVDLGKGLKAWSDCRSDKRPGRRVGFPRFKKKTGDTPSFRLRNKHPKEKPAAIRIGDNTRPRSVTLPSIGQVAVYDDTRRLRRLLAKHRAKICFATISYHGGRWWCALNVEAADLHPLQQHPAHTDDAGGWVGVDRGLSTFLVAATADGTEVARVSDAPKALTRGLKRQRRLSKSLSRKKKGSQRRKHAVARLGRHHSRVANVRRHFLHQVSGELVKTHDRIVIENLNVAGMLTNHRLARAISDAGWAELARLLKYKQAWHGGHLIEADRFYPSTRLCPQCRVVNRVMTLADRVFTCACGHTADRDTNAAVNLAHWGHTHRNDLDRTPDLQAAGRVTNARRRDGSDQRPRVGETSSDDAGTDVHTAPAA

SEQ ID NO: 45401 - protein, 421 aa, unknown
  TnpB Polypeptide
LHDGCLEARRVRNEVNRLDKEGWDWNDIHDTVVDNANHVKNTTQLLVQKALGELETYHDHKQEDWGRPFPYIDETYPMRMNHNEGYALTVDDSGNVRFRVSYKPYNYVKGVLRGSSDHIEQVKNALNSNAWRVGMAELVYKHNEWRLHVTITHEERTVADPDDADTVVGVDINEDCVALAAMCRETGDVLDSVVIEYPDIKRVRHEFFTKRKRMQTVGQTAFETVVRTEERDFVHDQLHKVSRDMTRWVSQFNDPVIVFEDLKDMRDSIDYGTRMNRRLHSLPFAALRDMMTYKSAWNGIPSDDVDPEHTSQRCPRTECLHTERANRRKKRFKCKACGFQDHADRKAAVCVVQEWFEEQNENVPSLETLPHVKKVRRTASGLCEEADAHGAVFALGVTDTESARDASQVRAELNTVASIGD

SEQ ID NO: 45402 - protein, 351 aa, Paenibacillus sp.
LQSVTIKIRFFPNNSIELKSLSKEYIRVINLLTEQAEQEGAFPKLTTKHVEATLPSAVINQAIRDAKSIFKKVKKDRKRPILKKPTYYINNQNYSIRDSSIAFPIITNNIVKKTVFPAVLTERHKKYLQHAKCGLMRIVEKSGKWFAQVSLEVPTEIATGEHVMGVDLGLKVPAVAVTSGGKTGFFGNGRENKYRKRKFRSERKVLGKKKKLHAIRRLDNKEQRWMKDKDHKASRQIINFATKNQVSVIHLEKLTNIRKTTRTSRKNEKNLHTWSFYRLSQFIEYKANIAGIKVEYVDPAYTSQKCPSCSALNKATDRKYSCLCGFQTHRDKVGAVNIIHAPVIGGSSQSA

SEQ ID NO: 45403 - protein, 376 aa, Caldivirga sp.
MKTHRTILIKLPKDKCDVDYIRRLMALANLAYRGFEVWAPDLPKTIQYQLYGSFKNYMGSLVFGTTPKRWFARAWVPLKTVRVYADSSMKGDKSAPVVLDFESSVIRLRQVCRDELGYSIEVQMPKWVVERVREGGDVKYAMIGLRDDEPYLALVAEREVEPYQPSGYILAIDINSWSHGIAWGLLRSGRIVSFKQEGLNPQRIVSLYNQAVKREKKVGRLKRLGLEDTLNAKRAGRLVRRLRSRAYRLIRAEAVFLARKLTKKALRYKAMVVIDDVDWESLRELLTRKYGGKVGKLLLSGLKRFVKLLVTQLQWYGVPYEFRRLYSKKCPRCGHKLTQQKGRTMVCENCGFKAPRDEVPIYWALKAMPGASAGLT

SEQ ID NO: 45404 - protein, 419 aa, unknown
  TnpB Polypeptide
MILSFKTRLEPTKKQTTQFRKACGVARHAYNWGNEIVLKALQDRKTDPSVKVPSAIDLHKKLVAIVKPECRWYYETNKNVPQQALAELKKAWDRCFKKVSKQPRFKKKGHRDSFYLESGTQAKPMIRNDSKRVRLPSIGWVRLSEALPVEAVHNCVISRQADEWFIAIKVEVQKPDVADNRPSVGVDIGIKELAVTSDGKTFANPQAYRRMSGKMKRLQRSLGRKVKGSANRTKAVGKLAKLHQRISNIRKDAIHKLTTHLAKNHGTVKIEDLNIKAFLKNHKLAGAIADCGMYEFKRQLEYKTEKFSSQLVLVERMFPSSQICSNCGNHRHKMPLKNRVYQCPECGYTGDRDLNASRNLERWFEGIYIPECSDLAVSSTVSACGVDKPSRRQTGATVKQEVSSDPTLVELCLDLSRFV

SEQ ID NO: 45405 - protein, 402 aa, Escherichia sp.
VERLQAFKFQLRPGGQQEREMRCFAGACRFVFNRALARQNENHEAGNKYIPYGKMASWLVEWKNATETQWLKDSPSQPLQQSLKDLERAYKNFFQNRAAFPRFKKRGQNDAFRYPQGVKLDQENSRIFLPKLGWMRYRNSRQVTGVVKNVTVSQSCGKWYISIQTESEVSTPVHPSASMVGLDAGVAKLATLSDGTVFEPVNSFQKNQKTLARLQRQLSRRVKFSNNWQKQKRKIQRLHSRIANIRRDYLHKVTTTVSKNHAMIVIEDLKVSNMSKSAAGTVSQPGRNVRAKSGLNRSILDQGWYEMRRQLEYKQLWRGGQVLAVPPAYTSQRCACCGHTAKENRLSQSKFRCQVCGYTANADVNGARNILAAGHAVLACGEMVQSGRSLKQEPTEMIQATA

SEQ ID NO: 45406 - protein, 423 aa, Streptomyces sp.
MIRVQLRYNFRLYPSAGQRIALARAFGCARVVYNDALGARETARSEGMPLPKAGDLSKLLITEAKNTPERAWLGEVSAVILQQSLRDLDAAYKNFFDGLRGERPKMGAPRFKSKRDNRQAVRFTANARWSLTPGGKLRLPKIGDLKVKWSRALPSTPSTVTVVKDAAGRYFASFVVETDAAEVLPETRPEVGIDLGLGHFAVLSDGTKIDSPRFLRRAEKRLKKAQRDLSRKEKGSSNRNKARVKVARAHARVADARREFHHQLSTRLIRENQAVAVEDLAVKGLARTRLAKSVHDAGWSAFVTMLEYKAARYGRTFVRIGRFEPTSQVCSACGVQDGPKSLGVRVWTCGACGAVLDRDINAAVNVAKAAGLAVPACGAQVRPGPVPAPRSETGTHPKRPTRLVWEQAGIPGLQAGEDVKVAP

SEQ ID NO: 45407 - protein, 373 aa, Bacillus sp.
VIVNKAYKFRIYPNKEQETLITKTIGCSRFVFNHFLAQWNKRYKETGKGLTYNSCSAELTQLKKELAWLKEVDSISLQSTLKNLADSHTRFFNKQNKAPRFKSKKNRVQSYTTKSTNGNIAIVDNKIKLPKLGLVKFAKSRDITGRILNATVRRNPSGKYFVSILVETKVQPLHKTGSAVGIDVGLKDFAILSDGTIYQNPRFFQVLEKKLAKAQRSLSRRKKGSSNWHKQLVKVSRIYEKITNTRTDYLHKISMSIIKNHDVIGIEDLQVSNMLKNRKLAKAISEASWSQFRTMLEYKAKWYGKQVVTTSKTFASSQLCSYCGYQNKDVKNLNLREWECPSCGSHHDRDINASINLKHEAMRLLTAGTAGIA

SEQ ID NO: 45408 - protein, 298 aa, Streptomyces sp.
SAFCLRDDGTVYVAKVGNLKVKWSRRPPTAPTSLTVTKDSSGRYFLSFVVDTEPDVLPEAETDAGIDLGLSAFAVLSDGRRIDSPRFLRRAEKKLKRLQRELSPQGQGIEEPGQGPHQGRTPARQGGGPAPGLAPQGLHTDHSRQSSGVRGRPRGVRSRTHPSRQVRARRRMVRVRRNAGVQGGSARPDIRQGGPGLSVLSGLLGLRIQGRPQAPPRPCVGVRRVRHCARPRPQRSPQCPLRRTPYRRRRTGRIVAAGRAETRNACGAPVRRAHVPAQRGEAGSPRKGQTTQAGIPGL

SEQ ID NO: 45409 - protein, 254 aa, unknown
  TnpB Polypeptide
LGKWDIHTYNTKDIKRVRLIRRADGYYAQFCLNINVTDIQPKTGKEIGLDVGIESFYTDSNGHQEANPKFLRKAEQSIKQSQKQIYKKVKCSSGRQKARKVYAKKHLKVSRQRIEHAKRIARNISTSNDVVVYEDLSVKNLVKNHCLAKSISDASWYLFRKWIEYFAAKFDKLAIPVAPHYTSQKCSNCGVIVKKSLSTRTHICNCGCELHRDTNAAINILNLGKQARGGHPQSNALWTGNLYSVWGNPDGASI

SEQ ID NO: 45410 - protein, 378 aa, unknown
  TnpB Polypeptide
MLRRQAFKFEIMPNGEQIRRINQFCGCSRFVFNHGLDWQNTQYAQDNSVTFSYTKIANLLPQWKKTFPWLKDCNAQVLQQSLKDLDSAFKNFFKNRAGFPKFKKKGIKESIRFPQDCKLEQHNNRLYLPKIGWVRYRNSRNVIGEIKNVTVRKKCGRFYVSIQTEREVEITKHQGGAIGIDMGITRFSTLSNGEYFEPLNAFKTYKGKLAKLQRQLKNKIKFSKNWQKLQAKIAKLHHKIANCRKDFLHKISSHISKNHAMIYIEDLQVSNMSKSAKGTVEAPGKNVKQKSGLNRAILDQSWFAFRCQLDYKSQWQGGVLVAVPPHNTSRTCPCCGYTDKENRSTQAKFECIECGYTENADVVGAINILERGRATVQS

SEQ ID NO: 45411 - protein, 397 aa, unknown
  TnpB Polypeptide
VNRKKAVSKTKRAYKYRFYPTYEQKCVLAQTFGCCRFVYNLGLSTRKTAYFQHGQKLTSHDLSAMLPGLKKEYPWLADCSSVPIQQSLRHLDRAYKNFFAGRANYPTFKKKQGNQSATYASNAFTWENGQLTLAKMDEPLDIHFHRDLPQGCKSSSVTVSKDCANRYFVSILIEEQMKPLPVITSQVGLDLGLKSMVNLSTGEAVGNPKFYARDEKRLAKAQRRHAKKKKGSKNREKARRKVASIHARIQDRRRDYQHKLSTRIVNENQVMCVESLAVKNMVQNHCLAKAIVDVGWGEFVRQLEYKSQWYGRTLITIDRWYPSSKTCHDCKHVVEDLPLDVREWVCPKCGVWHDRDFNASRNILAEGLSVSACGGGVRPARAKARAGNPQRSRKACS

SEQ ID NO: 45412 - protein, 473 aa, unknown
  TnpB Polypeptide
MKTTFKFRLYPNREQEQRLLFTLDKCRFTYNQLLDFLNKSKKIDKNKTQHYILKLKKENEDLNEVYSKVLQYENCRLFSNLKGLSQSKKNGRKVGRLRFKGKGWFKTFSYNQSEFSISNEGKRYTTLHLSKIGEIRMRIGRKQNRPKGEIKQITIKKTKTNKWFAMIISNEKLKKLKKTHKKVGIDMGLENYAYDSDGNHFDSPEYLRESEDRLKWYHKELSRKKKGSNNREKAKLRLSKVYEHTQNQRLDFCHKLSHYYVKNYDFIALKDLQIPNMVQNHHLSKSILDASWSIFTGMVSYKVERTGKKRALVNPNGTTQHCSKCGRLVPKTLSQRWHICPFCGLKIHRDYNSAKLILKLGIGRNFPNIRLWRLGLYSATSKPWSEKQEATFDRCGSSRPYFDNIFISKNIIQPNSSPAKFNRFSPDFSITEMFKEIFMNFFYNTFNCCSLLKNYWLIFFFLAGCFCVYSYFF

SEQ ID NO: 45413 - protein, 207 aa, Blautia sp.
MLADKIEHYKKEKKMLRNTPASYKKEYPWLKEVDSLALANVQMHLESAFCKFFREPSAGFPRFKSKKSSRKSYTTNVVNGNIFLEGKYLKLPKMTAIRIKLHRPISEKWKLKSVTVSREPSGKYFASLLFCCENQTVEKRPAEKFLGIDFAMHGMCVFSTGERAGYPMFYRNTEKKLAREQRKLSRCQRGSRNYEKQKKRVALCHEK

SEQ ID NO: 45414 - protein, 298 aa, Blautia sp.
  misc_feature (243)..(243): Xaa can be any naturally occurring amino acid
VRKINRAVKIRIYPNAEQRVQIEKTIGCSRFIYNCMLADKIEHYKKEKKMLRNTPASYKKEYPWLKEVDSLALANVQMHLESAFCKFFREPSAGFPRFKSKKSSRKSYTTNVVNGNIFLEGKYLKLPKMTAIRIKLHRPISEKWKLKSVTVSREPSGKYFASLLFCCENQTVEKRPAEKFLGIDFAMHGMCVFSTGERAGYPMFYRNTEKKLAREQRKLSRCQRGSRNYEKQKKRVALCHEKXLYYNKRTKCSKAMIEIIYQHIRGEENKPGSKNKNLSKCRTTCADRKNNRLQSIYL

SEQ ID NO: 45415 - protein, 406 aa, unknown
  TnpB Polypeptide
MRRKKSKSPDTHNKAFKYRIYPTEEQEILFAKTFGCVRFIYNQILYDSMAHYEATGEIMITPYARYKEQFEWLKEVDSLALANAQLNIEGAYARFEALEEHKHSKKKIEKSERTGKPLTVYDLEKHPKFKEKKDGHRSYTTNCVNGNIAVVNGKLKLPKVGVVEMKEHRSAPGGYVLKSVTVSRVPTGKYFAAIVYEYAAAIALVEVGAAVGLDFSMASGYVDSEGGVAGYPQYYRRSEARLAKEQRKLSHMVPYSSNWHKQNQKVNLVHERIANQRDDFLHKASREIANSYDLVGVEDLNMRAMGQCLRFGKSVGDVGWGTFRRYVEYKLAEQGKHYVVIDKWYPSSKKCSTAGCGYTNDGLKLSDREWECPKCGAHHDRDANAAANIREEALRKHREGKKTETA

SEQ ID NO: 45416 - protein, 243 aa, unknown
  TnpB Polypeptide
MFGKVKAILHRPLPDGFKVKTASVTKKADGLYLTLSLEDKTVPEIKPDFNPDKITGIDVGLKEFLTTSEGETVAIPQYYRKAQKHLRVIQKRVSRRKKGSNRRQKAVKQLGKQHKKVADKRKDFHFKTANYLLSKYDVIAIEDLNVKGLARTRLAKSVLDAGWSSFLSILTNKAVNAGLLVVVVSAYNTSQDCSNCGEKVPKQLPERWHDCPHCGCCLDRDHNAAINIKNRAVGLTFLKRNAS

SEQ ID NO: 45417 - protein, 247 aa, unknown
  TnpB Polypeptide
LPKHKDPVQLRLHRSIRPDGKLKSVTVTMESDGKRYYSILMEYPKQELTRDLDTDNAIGLDMSLPKLYVDSNGNTPDFPKPYRTMESKIKREQRKLSRKEKGSKNYEKQRIKLAKQHAKAKHLRNDVLHKLSCALTDRYDLIAIEDLDMSAIKRSLRFGKSASDNGWGMFTDMLSYKAKRKGKQLVKVDRWFPSSKTCSHCGHIHKELRLSDRIYLCPKCGHTMDRDQQAAQNIVKEAKRMLLNAAF

SEQ ID NO: 45418 - protein, 221 aa, unknown
  TnpB Polypeptide
MPAATTGLPFSTRTASPKPYLRQTKTVGVDVGIETFGTCSDGEKIKSPKALKSAEKKLKKAQRAFSRKQKGSKNREKARKRLAKLHRKVKRRRSDFLHKTSRRLVNENQALIFETLKIQGMMKNHHLAKAIADAGWAEFMRQCEYKAKHEGRIFAKIGTFFPSSKTCSSCGHKLKELSLATRSWTCPHCGAHHDRDINASLNIKQEGIRMLKAAGLTVLRS

SEQ ID NO: 45419 - protein, 249 aa, unknown
  TnpB Polypeptide
LIPKSTCFIVEVVYECEIWPINVIENSFISLDLGLNNFVTAIDNQSKQPFIINGRAIKSINQFYNKLKANYQSKAKISNNKHFTKRLAKLSLMREFKISNFMHKASDLIIKCCIKHKIASVIIGKNDKWKNEVNLGKRTNQNFVSIPYESFISKLAYKCENYGIKLIQTEESYTSKIDHLANEPLSHKDKSDYLGKHIKRGLFKSSTGKFLNADVNGAIGIARKVFRDAVQTLTDSKAAFVPIKINLAF

SEQ ID NO: 45420 - protein, 383 aa, unknown
  TnpB Polypeptide
MLKAYKYALLPTAEQKQQLAKFFGSCRFVYNLGLETKLQAWTTARKHLTCIDLANQMKELKDTEAEWLHECPSQTLQMALRNLDNAYTNFFNGGGFPKFKSKHHKQSIQFPQGVKTDFENGTIFLPKLKNVTCIFHRQFIGEIKTVTVSKTATGKYFVSILIDNQKQLPKKKSVREKTTVGIDMGMKTFATLSDGAAFDNPKHLKNNLKRLRLEQRKLSRRLKKGIKEQSKSYLKQKMIVAKLHERIRNQREDYLHKTSAYIIRHFDTICLEDLNIKGMMQNENIALAIGDIGWHKFETMLEYKAEWYGKNILYIGRFEPSSKLCSHCGHIAKELGWKDRLWTCQSCGTYHERDINAAKNIKNFGLRNKPSTVNVSHQAVRMS

SEQ ID NO: 45421 - protein, 334 aa, Ralstonia sp.
MAREVNFVWNYCNELSCKIFERERRFASGTEIQRYLNGASKEGLGIGSAVFQQIAEEYATRRRQHRKVRLAWRKSGGARRSLGWIPFKARSLGWRSGQIVFQGLHLGVWDSYGLAGYELGAGCFSEDSRGRWYLNVVVRVKPVEVSAARDVLGIDLGLKIFAGFSDPRLQNIEAQRFYRDLEPALAVAQRARKASRVKALHAKITNRRKDFLHKLSARLAREYGAIFVGNVNASALARAQHGKSVLDAGWSTFRTMLRYKCADAGAWFDEIDEAFSTQTCSCCSSRTGPKGVAGLGIREWACSHCGTIHDRDRNAATNILAAGRGRLAEGIPSL

SEQ ID NO: 45422 - protein, 383 aa, unknown
  TnpB Polypeptide
MQKTYRFRLYPTKDQEQVLLQTLEHCRYVYNTLLEWLNKQEKSDRYALQNRLPALKQKHPELNEVYSKALQYEVYRLFYNLQGLSQSKKNHRKVGGLRFKPSHRFRTIHYNQSGFSIKDTGKRLDRLHLSKIGDILMRMHRDVQGTIKQVVVKHYLSGDWYACIVAEQQNEVAKQPIRTAVGIDVGLKHFCSDSDGLQVENPKYLDKSLKQLKRKQRCLSRTSKGSCNRNKQCVLVARKHEQVQNQRNDFLQKLSRYYVNNYDLIAFENLNIKQMVRNTYLARHIHDASWNQFANLLFCKAESAGKTTVCVDPWGTSQEHNHGKCIDRDYNASLNILERGLQKVGLGLSELTPVDIRPLQRLHQASASRVVETGSPFLEHRKG

SEQ ID NO: 45423 - protein, 690 aa, Streptomyces sp.
MRRKVRLGEGQTERVACASASAFRGLDTVTGEALGADALAGRVGWLTALVETMCMSVTGAHWNRPDLAQLASGRDLSGQRLPSHAWMALRMLGWAATVPAGLYVPDRVRRIAEEQAGRALRSAWWRTQITDAVLATWPTGPDADPMRRTGAEWEALRAACPDGQAVAASVLRARTRQSAAFQAAHDRLPADICELEAAPGGGRQVVLAAADKQLATLARCEEDPARYAVLTVRLPVRPDPRTRGDWHPVVIRFRLPPTIDHTAALHTPTLRLRAGRLRLDLAHTTAVPTTRRDGHARAVAFDYGLNTLLTGGSLTLTGGAQPTVHTNGQPVFFRPDGILAKADRLRVLAEQLWAKAAHLQSLTDGHAARGLRPDPLTAAKLAVLRTEHARVSKRRTRLNEQLAQAAAHFMVGHARAAKTSVIYLEDLRDMEARGKGRTLNTRLSQSVRGQIVAHTRHQAAKYGIAVVIVPARGTSRYCPRCLTAFRYCAAPDRTTPGWKWAVCPNTACGYSADRDVAAWQRIGARGLTHQHTTVLDRASGTYVIRRTVPELDRPVRHTTHPGPAIPDGPQQSAAVDRTKAGPTRNRPVPRQRRRVPAPPGTPAAAGPGGKRPAGRTPQPPTRRTQRRGRRQAPHTMSTPTRHQPRGARLGAGFHLHTHATPVTRHGRPGPQPRSLFHRDRAENPALPRKT

SEQ ID NO: 45424 - protein, 407 aa, unknown
  TnpB Polypeptide
MKRLQAYKFELRANGEQQRKMLRFAGACRFVWNRMLALQKQRLDAGEPILRYNKSCLLLPEWKRELPWLATEAVAQTLQQTLKHLDRALMDAFDPESPKRFPRFKKKGVYNSFRYPQDVKLDQADSRIFLPKLGWLRYRNSREVVGTVKNVTVSQRAGKWFVSIQSQRDVDSPVHPSGSIIGIDLGVVRFATFSDGTPVEALNSFKRHQRALRKAQQSLSRKVKRSNNWIKQKRKIAKLHARMADARNDFLHKTSTAISKNHAAVVLEDLAVKNMSASAKGTVAQPGRNVRQKSGLNRSILDQGWGEFRRQLEYKQHWRGGLVIAVPPRNTSRACPECGHVSADNRKTQAEFRCVACGFGGNADHVAAINILRAGHARLACEVSGAVRPPAAGTRRTDSTGNPDAPA

SEQ ID NO: 45425 - protein, 366 aa, unknown
  TnpB Polypeptide
MCRHLWVSKELWNEMLAFTKEIYNNYEKFPTKKTLRELVKNSGLFSQVGQELVDRLIDALHRKIEMKKKGEKGGFPRFKSFDRMKSLRYPQYEFGFSLDKKLKVTPFGEISIKKHREVKGRIKTLTLKKEASGKWFAVFCVDTPKEISKENRGAAVGIDLGLKTFATLSNSLKIGNPRHLMKHEDRLAFIQRKFSKKKKRSKSRKRAKVRIARLHEKVADTRKDFLHKTSTQLVNDYSFIALEKLASKEMAEQSYGKQINDAGWNMFANMLAYKAEGAGCRVVFVDPKNTSKMCSRCGNIRNDLTLWDREYDCPNCGLSIDRDLNAARNILTRATPGHGGSNACNSLQKERDVAVATSVKQEACTL

SEQ ID NO: 45426 - protein, 493 aa, unknown
  TnpB Polypeptide
MTRCDTFEVRPLSHRDELLLLELLDASAACNNQVNYDRRQTLFETTENADSRVPVNELKFTVKQAVTQEEYRQKYIQILSSSTPQQLVQKNWEPWKAYFALLSKYRDPDNSKVTDRPSPPGYWKEDGKRTPRTVIRNDQYTLELGTRSRLEIPVGQDLKEKYGLGYHDRLRLEVAGQPRWTGKQGRLEIVYDRDTETFTAHRNVGDKDNPPRRRDSYQPTPLATTGSGEEVVAAVDIGANNLAAVTTTQGDHRLYHGRPAFHTFHAHTERIAELQSILGDDEWSSKQIRLTYHKRGEQRNHAMDALIRDLGEWLVERGVSELIVGALGDVRKKHWSATVNEKTDLFWAHGRFRKRLDEVLEFEYDITVTEKSEAGTSSMCPACGSEDVHRSEDLLQCHACGREGHSDVAGSANFLRKHAAESIVVESSGSMARPAATGENTKVDGHQIQVPCLEWDDHAWTVKYDGHSTKEAPANQSTTRSTRRNVAPGVSDD

SEQ ID NO: 45427 - protein, 445 aa, unknown
  TnpB Polypeptide
MQDTGLTQTLSFGLNIQTGSSDNLHEGCLEARRVRNEVNRLDKEGWDWDDIHNTVVDNANHVKNTTQLLVQKALGEIEMYHDHKDDGWGRPFPYIDEMYPMRMNHNEGYALTVDDSGDVRFRISYKPYNYVKGVLRGSPDHLNRVKTALSSDAWRVGVAELVCKHDEWRLHVSVTHKTRTVTSPEDAKTVVGVDINEDCVALAAMCRDTGDVLDSIVIEYPEIKRIRHEFFTKRKRMQKVGQTAFENVVRTEERDFVYDQLHKVSRDVTRWVSQFNDPVLVFEDLKDMRDSIDYGTRMNRRLHSLPFAALRETVTYKTAWEGIPSDDVNPEYTSQRCPRTECLHTERANRYKKRFKCKSCGFQDHADRKAAVCVVQEWFNKQNENVLSLETLPRVKKVRRTVSGLCEEADAHGAVFASGVTDTESAQDSQSQARAELKTVASAAD

SEQ ID NO: 45428 - protein, 249 aa, unknown
  TnpB Polypeptide
MVKRDGEWYAHFILNKTVELIDEPETVIAIDRGERNLAVAVAISKSNPGKSMKGQFWRGEEIKRIRGLYGHIRRKLQEKKLLKKVKELKGRERYKVNQQLHIIANQIIAYAKQFPKPVIAMENLNGIRRSFNKSKRLNRRFHSLPFRKLQTLIEYKANLQGIGVEYLIKKETKNTSKTCHKCGHVAQTKGRIFKCPRCGLTYNRDLNAAINIAHALTRRMGRGSREPPKPADEGDGVKPLLNAGSSLLQ

SEQ ID NO: 45429 - protein, 425 aa, Euryarchaeota sp.
MSASYLAESVLTHRALVFPVPWDDPHLRWLLAEFRLLVNESIRIALKEDIRSRARLTRAAYKDLGARHAVYKQYIPSAFEVALAVLKAHRRRVRKGKRSSIPFLRRLMLKAENQSYWLDRETGRIRIPIRGTEGVQLHLPLAEWHRSILGDPSWGLGSLTVVSGKIIVVLRKEAPKPYEPRGTIALDTNEDSLDGVQSSGDSAGLLRVPFEGVRRIQEIHYRRRRKIARKKAAHDRRVARRLLNREGRRERHRVRHRLHRVSKGLVRLATEAQAAIVLEDLTLHGAGGRSRRMNRRLSSWPRREIHRQIEYKAALEGVPIIKVNPAWTSKTCPVCGARRRDRVGKVFVCLMCDWEMDRQINAGMNILKTALASNEALARAVRFQPGALRDDVVSPLYDLLREGGGAREEPSGVESQIGVIPSPDS

SEQ ID NO: 45430 - protein, 460 aa, Moorea sp.
LLESVKKPAKVIRTDKWQLNPTPDQKLLFGETVKVYRRACRYLVGIIYAHWSELGELTADQLTPAVEKFMHQTAKRPDVKYPQFKKSFYKFPSYLRRAAIAFSAGQVSSFVTRYREWQTGNRKKKDAKPPKLNADTGCYPSLYKGQCYKLHGFDQVEIKVFNGSDWIWTTVQITGLRERHLVATNKMMSPSLVFNERCCHLSVPFTCKPEKRKPEANVTAVDLGINTTATIAVVTHSGTVIHREFIHRGRDIDRRDKRLKSVSVRASQTMGKGGKLHKGFCYRTYDKCRRINHQIGHIVSKRIVEIAKQFNSVRVAWPTALAIVFENLKGWKPKGGRKRSNLRQRFHGWLKDKIRNFTEMKWTELGGKVIEVVAAYTSKLAYDGSGTVRRDSRNYSLATFPSSKRFNADLNGAYNIGARGVFKLTYRNGSEGRSSKRSGRPPRSWACLCDLWTLRSSRLA

SEQ ID NO: 45431 - protein, 216 aa, Moorea sp.
MKVLEFKVKGKKAQYAAIDEAIRTGQFVRNKCVRYCMDNKGVGQKELYRHNTWLRAEYPFVKDLNSHACQASVERAYSSIARFYDKCKKKVPGKKGYPKFKKFSRSVEYKTSGWKLSPDSKSINLLDKKGIGKLKLKGTWELWRYDSAKPFAKRGLRPPLPEQKLIKRVRLVRRADGYYVQFCIKVDEKELLEPTHTNIGLDVGLKEFYTDSQVLS

SEQ ID NO: 45432 - protein, 398 aa, unknown
  TnpB Polypeptide
MKKEITKTYKYRLYPNKYQIEMFDKYFGCVRFVYNKFLFERKKQYQETGKSDNYYGQAKALTLLKKDDNYYWLKEINSQVLQCSLRHLESAYTNFFQGRAKFPVFKKKKSKNSFTVPQNVKFENGKLYIPKFKEAIKVVEHRQLQGKILFATISKTPTNKYFVSITVKQDYNSKNHTNQEVGIDLGIKDLVITSNGDKYKNHKFTQKYAKKLKQAQQHLSRKTKGSKRFEKQRLKVALIHEKIANCRSDVLHKISHKLVMQNDVVYLENLNIKGLSRSNLAKSINDCSWGELTRQLHYKGDWDDTYIHEINRFYPSSKTCHSCGYIMDKMPLDIRKWTCPNCKIEHDRDVNASINILFEGKREISAGTVDYTNGEDIRPISSNTNRQTSMKLEAPCFS

SEQ ID NO: 45433 - protein, 395 aa, unknown
  TnpB Polypeptide
MRLVERHIVKDNRFEDICLKSGLLYNYVLYLVRQGIFNKEYLKEYELSTKLGRENQFDFRQLPSSISQQVVGQVFKSIKSWMKLKKGFEKNPSKYNNHRPHLPKYKKGKKQNMIVFTTSACRIKDGYIHFVKDIVNPIKTKIGDNKLCQVRIIPQATCYVVEVIYEKKEQDLNLNKDNVLSIDLGLNNLCSCISNVGIKPFIVNGRIMKSFNQWYNKKKAKLMSFVGDKGTSKRLRQLNNYRNFWIEDHIHKISRYIVNYCVDNNIGSLVVGLNKGWKQEINLGKKANQKFVEILFSKFVDKISYKCKLVGISFYLSEESYTSKVDHLVFEELEKHDVYLGKRKRRGLFQSSVNKLINADINGAIGIGRKVFGDSCVNRVIDSGLAFNPIKVNIV

SEQ ID NO: 45434 - protein, 407 aa, Halothece sp.
MQLVERHIIRKTHPNWTECDQLAFCSKNLFNYANYQIRQSFIWQGKFISYETLASEIKESEPYRSLPSKVAQQTLRKLDESWRSFFAAIAEWKENPSKFLGRPKLPKYKDKEKGRSVVTYTIQAISRKWLKKGWINPSQTNLFVKVIHADIACVRIVPKCDHYVIEVVYNQEEKDYGLDQNRIASIDLGLNNLCTITYNQPEFNPVLINGKPLKSINHRFNKKKAHLQSRLPSSEKTSRQIRELTNKRNRRIDHYLHHCSRWIIDDLVSKNIGTLVIGHNKGWKNGVKMGDQNNQNFVGIPHSRLIEQLKYKAQLVGIKMVLQEESYTSRASFDDGDLIPTYHPQEANQYKFSGKRIKRGLYRTGKGCLVNADVNGSLNILRKVFPKACEGIKVSVVRPFRVTPCYV

SEQ ID NO: 45435 - protein, 427 aa, Escherichia sp.
MHQENTMLPRRISVSLFIDQSIIWPVKRLQAFKFQLRPGGQQEREMRRFAGACRFVFNHALALQNENHEAGNKYIPYGKMASWLVEWKNATETQWLKDSPSQPLQQSLKDLERAYKNFFRKRAAFPRFKKRGQNDAFRYPQSVKLDQENSRIFLPKLGWMRYRNSRQVTGVVKNVTVSQSCGKWYISIQTESEVSTPVHPSASMVGLDAGVAKLATLSDGTVFEPVNSFQKNQKTLARLQRQLSRKVKFSNNWQKQKRKIQRLHSRIAYIRRDYLHKVTTTVSKNHAMIVIEDLKVSNMSKSAAGTVSQPGRNVRAKSGLNRSILDQGWYEMRRQLAYKQLWRGGQVLAVPPAYTSQRCACCGHTAKENRLSQSKFRCQVCGYTANADVNGARNILAAGHAVLACGGMVQSGRPLKQEPTEMIQATA

SEQ ID NO: 45436 - protein, 411 aa, unknown
  TnpB Polypeptide
MVLRKITYRMYPSFQQSDKLLELLGLHQRVYNTALEYRISTYKESGKSLGFSAQCRELTGWRKQCDSLDSVNAQSLQVTLKRLDLAYAAFFRRVKAGETAGFPRFKPVDRFSGWGYKTHGDGFRLHAGDKMRHGHVRLSGIGMVKLRGTARTPGEVKTAEVQHKSGRWYLSVTVECEPQRIGGTAAMGMDWGVETFATVCSNDAKTHSVQNPRFLDKPQRQKLKALQQAVSRKTSKRSNNRRKAIVLLSAESRRIANRRKDFLHQTSAELVGQYGLIATEQLNVKNMTASGGQCKKGLNRNILDTAPSTFLNLLKTKAEEAGSLWVEVPTRQVKPSQTCHRCGSQRKKPLSEREHRCDCGASCSRDENAARVMLNWALFGNATGQELSEVGSGGRLAVQNHETPSIVAVVA

SEQ ID NO: 45437 - protein, 426 aa, unknown
  TnpB Polypeptide
MKLTFQYPVYPTKTQEETLLDWLDHLCELQNSARNNRKYVYEDEGRFVSQGEQEKLLTAAREKYDDFRQVPQDFQVSVLKRVEKAFDAFRRRCREAAEKKGYPRYKMRVRSLTWCLRKHKVKDKATDGLKRVRQNPIRETGTRLNRLKVPKLGEVKIRMHRPLQGDPKEVTIVKKASGWYAHISCELPDPPKVEPTAAIAVDVGTTDYLTTSEGEKEDNPRWYRQAEGLLRKHSKDFSRKKKGSQRWQKQHHKLALHHERTTNKRKDFIGKLVYKLYHHKENNVLVAEDLGVSNMVKNKHLSKSISDASWGKFFEWCGNIAERDGFHFHQVDPKNTSQTCSACGKKSPKTLSLAIRTYDCSFCGTSLERDHNAALNILFRAACAHRGERWVTTLDETRNTNKAPDAGLENAKQLLLFDDLLTSPSL

SEQ ID NO: 45438 - protein, 379 aa, Clostridium sp.
MEQMTITAKIQIVVDETDKVLLDETMSVYRNACNYVSDYVFRTHDLKQFSLNKILYSTLREKFNLKSQMAQSVLKTVIARCKTILENQNEWIKPSFKKPQYDLVWNRDYSLTQNCFSINTLNGRVKLSYFADGMSKYFDHTIYKFGTAKLVNKHGKYYLHIPVTYDVEESNISDICNVVGIDRGINFVVATYDSKNKSGFVSGKAIKQKRANYSKLRKELQMRQTSSSRRRMKAIGERENRWMQDINHQVSKALVENNPKHTLFVLEDLSGIRNATERVKTKDRYVSVSWSFYDLEQKLIYKAKQNQSSVIKVDPRYTSQCCPCCGHVEKSNRNKKIHLFACKNCGYKSNDDRIGAMNLYRMGIDYLVDSQVPNTVVTE

SEQ ID NO: 45439 - protein, 281 aa, Streptomyces sp.
VSIWTVDGRMRGIRFTGSPDQLKVLAEYRKGESDLVQRGGKWFLIATCDLPDPEVYEPSDWIGVDRGIVNLATTSDGTNYQGRRLSRYRRWQARKRAELQAKGTRSARRRLAGRACKEQRHATQVNHRISKEIVSVAQRTGRGIAVEELGGIRERVRLRRDQRGTLSSWPFHQLGQHLAYKARRAGVPFLEVDAAYTSQRCPRCGHTERANRPDRDHFRCRRCGLAGPADHVAGVNVRNRARSAWVFVTTLVPHQPEQAGLQGDATRDRPVVGGSRERDKV

SEQ ID NO: 45440 - protein, 398 aa, Streptomyces sp.
VTTTCVKRAFKYRFHPTDTQAAELSRTFGCVRKVYNLALAARTEAWARQERVNYNATSAMLTAWKKTGELAFLNDVSSVPLQQTLRHLQTAFTNFFGKRAKYPRFKSRKKSRKSAEYTTSGFRFRDGRLTLAKMSEPLDIVWSRPLPEGSQPSTVTVSQDSAGRWFVSLLCDDPTVKPLPATDGAVGVDVGLDHLLTLSTGEKAANPRHERKDRARLALAQRRLARKAKGDGANRAKARREVARIHARIADRRRDGLHKLTTRLVRENQTIVIEDLTVRNMVKNRSLARAISDAAWSEFRSMLEYKAAWYGREVIAVDRWFPSSKLCSTCGTLQDKMPLNVRTWTCDCGTTHDRDVNAAKNLLAAGLAVSVCGAGVRPQRSTPGGRSATKQKTPRREP

SEQ ID NO: 45441 - protein, 408 aa, unknown
  TnpB Polypeptide
  misc_feature (291)..(334): Xaa can be any naturally occurring amino acid
MPAYRKAQTACVVRIIPLRGLNHAQTELCSALRREAGRCWTDMLHAHIESRGGKWLSSGDLEKLFKGKYSLHSQTVQALAQKLIANVDTSRQLRKTDTGAKYPYKDKTYQTVIWKDQAIKVWNDMIQLPNGCNMPSLALPIVAEYQDCDIRKAELTWRADHYELCLTIDTGVVIPTLLENGKVIGVDLGEINIVAAVTEEGEGIVISGRYLRSINRLRNKRLAAYQSRIDRCKDGSKRQRKLIRNKRKASAKYDRQQRDILHKASRQLVNFCQDHGVSQITIGDVKDIQTXXXXXXXXXXXXXXXXXXXXXXXXXXXXXXXXXXXXXXXXXXXXCGARLSRDGNGGANICSRFLHGEYARVQINHLTYLRPLVRSRACDTSQSCSPTISVRTPCLRQGECQGLHICMV

SEQ ID NO: 45442 - protein, 405 aa, unknown
  TnpB Polypeptide
MLVRSLVFRLKDPLPNDAKFLMEDFRLAVNNAIRFGLQTGATSRNSLNTLAYKDFRKEHPGMCAQHLVSAFEVAGSILKNHRRRLRKKLPAQIPFVRRLFMKAENQAYKLDRVNGILDLPIRAGCHVKLRLVMSEYHRKYLDDESLSLGSMTLLPDKVIVTIRKHAPKPYALASVLSLDTNERSLDGVLAKEDQITAVVRAEFPEVSVIQSVHHDKRRMLQKKKSHDRRTAKRLCAREGKREHHRIDHRMHEVANAVLSFAEERKSMIILEDLTGIKPRRDKGFNRRISMWPRRKLHQIIEYKAAWRGIPVAKVDPRYSSRKCPVCGRIQDSRKGAEFVCGCGWHIDRHINASINLLQTAASEKAAGGLRFDPGAFQHDVVMVLCGPNRTVRLEPNGTSGIRAVA

SEQ ID NO: 45443 - protein, 280 aa, Cyanobacteria sp.
MKARYQYRFYPTDQQQQRLAQLFGCCRVVWNEALAICKQSEKLPSNNDLQKWVITQAKKTPEREWLSTVSNIPLQQSVIDLGVAYKNFFESQTEKRQGAKMGLPRFKKKNAKQSARFRIGGFSIKGTEVYLAKIGNVKPIWSRTLPSEPSSVTVIKDCANRYFLSFVVEIVAVTMPAMNASIGIDLGLKTFAVLSNGEKVQSPDYSSLDKRIRRKQRKLAKQVKGSKRREITRRQIAKLHNQIADTRKDFLHKLSTRVVNENQVIALEDLNVSGMVKIAS

SEQ ID NO: 45444 - protein, 414 aa, Campylobacter sp.
ITKGFKYRIYPNKEQRKQLDHQCFIYNQAYNICLNLQKEQWEQNKLLDKKDRTYLKASQIDSKVKLALKQRELSFKSVVAQQARINASRALEQALKDKNKGFPRFKNSKLSKQSFNWNNQGYQIKKSDNPKFKIFRLLNTPLKMRYHRDLPERYKLNQITIVKNHNKYFISLSITYDNANISLISKDNLNIKKAVGIDVNINDIALSNGELIHTYSKLLSAKKFNLTFKRLQRKQSKRILKSKKEKTKLGSNFKKTQIQLNKIYEKCSNIKKDSYHKITSKLIQEFDLIAVEDLQIKNMTKRAKLKNVKVKSGLNKSILNTSFYQFSQYLEYKTKHNGKFFVKVNPQYTSKICNVCGNIKDNLTLKDRIYVCNKCGNEIHRDINASINILKRGLESFGLGINLLDYNQKAFRVS

SEQ ID NO: 45445 - protein, 446 aa, unknown
  TnpB Polypeptide
MQLSHKIALRPTPEQADYFNRACGTARRVWNWALAEWNRQYAAGHKPNAMALKKQFNAIKYSDAHWLDESGQPWLRGIHRDAHAQPFAHLAKAWSRFFAEIKAGKPAHEPQFKKKGRCRDSFYVANDKFSLDGLRIRLPKIGEVAMTEALRFDGKIIGATVSRSAQRWFVAIQVDVSDAQFHRARTAQGVTGVDLGIKAAATLSSGEAIQAPKPLKAALRRLKIRARRVGRKIEAAKVQAGFAPNARLPKGTRLPVSGNRRKSAATLARLHARIAHVRADFIHKLTTRLCRENQAVVIEDLHVKGMLANDKLARAISDVGFGMFRLQIEYKAKRYGTRVVMADRWYPSSRLCSVCDWKNEALTLKDREWTCPQCGTRHDRDHNAALNLQRLATATALPVASPSSDGGATAETVSVVAGKVTPVRDECGPQDTSGQEKNRAHGCALS

SEQ ID NO: 45446 - protein, 386 aa, unknown
  TnpB Polypeptide
MKIYRAYKFRMYPTKEQQQKLNSFLGTSRFIYNNYLSKKETMYKEENKTYLLESMKKDLVNLQEEYPWLKDIDGCILRTSLEDLDKAYDNFFKKRGGYPKYKKKNCHESYRTVCIRSTYKNKTYSNIKIDLERRVIKLPKLEEIEIRGYRNKKSFPHKIFNATVTKEANRYYVSLCVEEEIEEITFNPHFFIGLDVGVKNLVTCSDGIKYDKIKEIEVQEKRIKGLQKALSRTKLGSNNRKKIIQKIQRAYQKIRNMRKYYIHAITTKLVKENDVITAETLKVKEMIEQGKNHLAKHISNASFSEIIRQLGYKSKWRGKRFYQVSTYYPSSQICSHCDYKETSLKDLSIREWECGVCGFINDRDLNASINIMNKGIDMYIKEQYGN

SEQ ID NO: 45447 - protein, 474 aa, unknown
  TnpB Polypeptide
MHALTLKLKTNHSQKKELDKRFRVMCHIHNVLVKRAIKLLSRLDHDQTYQALKAEYRQAENDRKKELTVQMNNFRKSIGLSEYGLQSYIKVCRQRYKTLVSSHQVQKEATRVWKGVEKVLFSNGEHLHFKKEENFDCIGGKSNTNGAKFDKEDLSVTWNGLYLVCCKPRNEKEAWYVHEALKDGIAYCEIKRKMFNNGWHYYAIVVLKGEAPKKQKACPKGRTGIDIGTSTVAVVSENSVLLQELAPKMKTYNRKIDALLRSMDASRRAMNPDKYNEDGTIDRKNRSKWVFSNQYKKKRNRLKTLYRKKAAYIKQSHRETVNELIKNGNEFYVEKMCFHALQRRAKTGTKKKRFGRSLNNRCPALFVSLLKEKAEAYGGTVHEVDTASFRASQYDHVTGSYTKCRLSERWKTIGPYPVQRDLYSAYLLKNSDRTKKHADRTRCQEGFEAFMGMHDQTIQEMKERGMSRKGCFGF

SEQ ID NO: 45448 - protein, 406 aa, Trichormus sp.
MLVFEFKVYGKSVQLAAIDDAIRTAQFVRNSCIRLWMDVKDTGKNDLQKYCAVLATNFPFASELNSMARQASAERAWSSITRFYENCKKGIAGKKGFPQFQKDCRSVEYKTSGWKLEDNRKSITFTDKKGIGRLKIKGTRDLHFYQINQIKRVRLVKRADGYYCQFCIDVNRQENVEPSGNTIGLDVGLKEYYTDSNGVMIENPKFLREADKVLKRSQRRVSRKVKWSKNRGKAKTFLGKRHLKISRKRKDHAVKLARCVVQSNDLIAYEDLRIKNMAKNHCLAKSINDASWYQFRVWLEYFGKVFKKVTVAVNPQYTSSECSSCGEIVKKTLSTRTHVCKCGFVMDRDENAARNILSRGLSTVGHTGTFALDKADGGRFILPPNCRASNALGDETSAQAGEILFK

SEQ ID NO: 45449 - protein, 313 aa, unknown
  TnpB Polypeptide
MIKSIKVMLIPNNKQKTKLFQCFGVSRFSYNWALAKQQENYKNGGKFISDNDLRREFTQLKKQDNFKWLNQYSNNIPKQAIKDACDSYKKFFKGYSKFPKFKSKKKSKPSFYVDNIKIKFTDTHVKLEKLSNSTKKNKAKLNWVRLSEKGRIPTNCKYSNPRVTFDGINFWISVGIEYEDNLELPTNNGIGIDLGIKDLAVCSNGYVYKNINKTKEVKRLKKKRRRLQRQVSRKYELNKEGRSYYKTCNIKKLEKQLLKVNHRLTNIRHNYLHQITTEIINRKPIFISLEDLNVVGMMKNKHLAKAVQEQSFY

SEQ ID NO: 45450 - protein, 276 aa, unknown
  TnpB Polypeptide
MKIISSYGVELRKQNIPIRQTLEIYRSAVRYLVEVYESVWEELAQIEESKKRFNAAEHLVHTTKRNPARFDFDFCFPKMPSYFRRAAVQHALGSVSSYRTRLEQWKAEGEKTGKPYLKSEQYAMPVFYHDVMYRENTEEKDAAFLKLYDGYDWKWFAVWLKHTDMEYLRKHWSGKKASAPTLEKKHHKYFLRFTYAEEVSLNQTPVKEQTICSVDLGINTDAVCTIMRPDGTILGRKFINFPSDKDRMYRVLGRIRRFQREHGSRQVQGKWHMQNI

SEQ ID NO: 45451 - protein, 370 aa, unknown
  TnpB Polypeptide
MEKCFKFRIYPDTAQELMMQRTFGCCRYVFNRYLAIRMEAYKTNKTTITYNACSADLTAFKKELTWLKDVDATALQSSLRDLDDAYKNFFRRVKQGIMPGFPRFKSKHNHRKSYKSKRVGENIAVSDKHIKLPKLGLVRCAVSKQIEGRILSATVSQNPSGKYFVSVCCTDVEIPQHKSTGTVVGLDMGLKDFAITSDGQVFENHRHLKRSEKKLARLQRQLSRKSKGSKRREKARIKVARLHEKIGNQRNDTLHKLSTQLVKDYDVICVETLHPKNMVKNHRLAKSISDASWGEFVRQLEYKTTWQHKALVKVDPFFPSSQTCHVCGDKNPETKNLSVRSWVCAECGAEHDRDINAAKNILNEGLRLLA

SEQ ID NO: 45452 - protein, 445 aa, Methylicorpusculum sp.
MTIRAYKQEIRPNAMQRAELNQYFGAGRWAFNFGLDMISKAYARRKDGVNYIGVSKLITKLKKTSRYAWLNEIPSDVVSQKLRDLDRAFQNFFAGRAKYPRFRKRKASASIRFNFDPRHCGKVKAWANGEMVLPKLGKIKLTEKLPAGMPKLITISTDGTGRYYASYAVDQVIQFKPKTSSMVGIDMGLNHLATLSDGQKIENPKFLKSLLKTLRIRQKSLSRKRKGSERWKYQARRVAKVHARIRDSRRDYLHKATTAIVENQDVIFVESLHVKGMARNPKLSRTIHDTSMGEFLSMLRYKCEWYGKEFIEVDQWYPSSKTCSCCGHRLDELDLSTRSWTCPKCKAEHDRDVNASRNILAEGLRIRAGSPDFKRVENRALASNQSLNGSETRINEARIVGEPKIPYGTGSRGRMTNSRVAFLMLNSEGDAADKVVEKTGLQEEV

SEQ ID NO: 45453 - protein, 276 aa, unknown
  TnpB Polypeptide
MLSYKFRIYPSKTAQAKLNEQLELCRWLYNKLLEEVNKARKEGRKITRKDTQALIVKLKQEKPELKSVYSKVLQMVNYQLWSNIRALNELRKNGKKAGKLRYKTSPNSFKTLNYNQSGFKIDSENSRLILSKAGSIPIKLHRSVEGRVKGVIIKREKSGKWHAIIQVEDEPRSKSKPLPKAGKVVGIDVGVRHFLTDSEERQIENPKYYERTMSKIKKLQKDLSRKQKGSKNREKARIKLAKAYEKLVNQRNDFLHKLSKFYVDSYDVIILEDLQI

SEQ ID NO: 45454 - protein, 396 aa, unknown
  TnpB Polypeptide
MESKATRTVSLKLVNPSEALGKTIDSFAQACNYVSQVAFENNYLSRRLALHRLTYKDIRARFPLTAQMTCSVIRQVSGTYASMKSNGERHLATFKPTSILLEGGVRGRDFRLIHKTQMVSISTIEGRIKVPYVLGAHQAKYLADGWDIGAATLTRRKKGIFLNVSLSKTINTPELKDAATIIGCDMGQRFIAVTSTGKFFGGGKIKNKKHHYRRVRQSLQAKGTRGARRTLKRLSGREERFQTDANHCVSKAIIEEALKYPKPAIAIEDLTGIRSSTKHRKAQRSDFHSWAFYELRQFLEYKGGVAGIVVQPINPRNTSKTCSRCGHLEDGQRNGLNFRCKACGFQLHSDLNASRNIANLLRLSRQDLERLGCSSTSPEVSPAPGGVGQRQAVCFS

SEQ ID NO: 45455 - protein, 325 aa, Enterococcus sp.
MLKAFKFRMYPTEEQKQQLIRTFGCARFTYNHLLKKRQKSWQQTGVADFSLTPATLKKEYPFLKEVDSLALANAQLNLDRAFRNYFKGRASFPKLKTKKSMWQSYTTNNQTRTIYLENGYLKLPKQKELIKINQHRPVEGSIRSATISARYNEEFYVSLLCDVSSVKKESLAKWIGIAYHPKTLIQTSRPLEVTLPKFHQTEEKLQHAQRKLNVKVRSAHHRKIRLDQASNYQKQKNQREDYLEQLSGKLVKQYDYLFVESFPKEEAHADFSIHDWHKLITKLRYKSQWYNKKFLLINTDGAEESNSVRKSQVVEEMGRHSLIKG

SEQ ID NO: 45456 - protein, 417 aa, Aphanothece sp.
MKLRYHYRIYPTDQQKRLLSQLFGCCRVVWNDALAHCQQEYREGKKKPDSKQLSSRLTSLKKTEEKIWLGEVSAVPLQQSLRDLDVAFKNFFNSCTGKRKGKKVKPPKFKSRKSKQSAKFTNNGFKVNQHNVYLAKIGKLKIIWSRKLPSEPLSVTVVKDSADRYFLSFVCEVNPIPLTLNNNSIGVDLGIIDFATLSNSEKIKAPKPLKSNLKRLRKLQRNLSRSQKGSKRREVARKKVAKLHAKITDIRTDFLHKLSTKLIQENQLIALEDLNVSGMIKNRKLFRTISDLGWRSFRTMLIAKGEMYGRDVRVIDRWEPTSQVCSCCGFKGGKKELNIREWTCLNCGTVHDRDVNASKNILKVAGGQSDTKNGRGGRRKTTSLVAVSCEASTTPQYKQRKLVLRESPPFYGAGGCQ

SEQ ID NO: 45457 - protein, 373 aa, Bacillus sp.
MLIHKAYKFRLYPTEEQATLINKTIGCSRFVFNHFLSLWNNSYQETGKGLSYNKCSKQLPQLKKEYIWLKEPDSIALQSSLENLADAFDRFFKKQNAVPRFKSKRNRVQSYKTKYTNGNINVKGNQVQLPKLGLVRFAKSREVQGRIISATVRRNPSGKYFLSIVAETDVQELPKTSSTCGVDVGIKDFATLSDGTVYANPRFFCALEEKLAKAQRILSRRTKGGSNWNKQRIKVARIHERIANARKDYLDKISTEIVKNHDIIGIEDLSVSNMLKNGNLAKAISEVSWSQFRKMLEYKAKWYGKQIVVVAKNFASSQLCSCCGYKHKDVKHLALREWECPSCQTFHQRDVNAGKNLRNEAIRLLTAGTAGIA

SEQ ID NO: 45458 - protein, 527 aa, unknown
  TnpB Polypeptide
MKEKKVFRMYKTKGSEKLLPIYNKLQKELNLILSNKFYKEELMKIDLKYIDKEGKERSKLGGTLQKEIVEIIGKRLIGELPDNWYLRILIHNIISLLKSRKEQVEIYELLKGNAYKIDSELKKKLKEKKLSARRSYLETLAEAKSIPTLPDKKVFILDFSASDKQMFRIGKNGRSWEVKIYSKEEKEKYNLESQWIEIETYLPIYIREGFKGEAAKPQFYIDRSENHFVCAIPCKIETISNEYKNIMGVDIGRIKPYSATVIRKDGSISDEYIPTEELMKMSDKLDRLETHIENVYGKYSRSKKYGNRTNRQIMRGIDYKEGKRRRTNLKYQIARLIAVEVINVAIQEECKEIHIEHLAWVKNKAGKWNFSAIQKCIEEVAELYDIKVVKVSAKNSSKENPVTGEIGKVNDREVRFSTGEVIDRDQLAGLNLALRRPKEEVRKIKQLNKRKVKKITRLSRQSNFKRIKNTAIPDKKINKKENVKIVMFSHDKVTNSYAIVNVFCVSQNNCYKDNNIHFIHIYDNFTQ

SEQ ID NO: 45459 - protein, 205 aa, unknown
  TnpB Polypeptide
AKSVNQHYNKQTAKIMSRETKGSAEKFIPTQKYRDITNYRNDRIKDLMLKAGKSLIIWCVENRIDTIVIGSNPGWKQGSNMGRRSNQKFVQIPFDDLKRILKYQGERNGIRIVEQEEAYTSKASFIDHDDIPDLDGSKEAVFSGTRTKRGLYRSKEGITINADLNGSANILRKAFPNALSENNMPDFTDIVVIKHPDEMLKRQRK

SEQ ID NO: 45460 - protein, 417 aa, Halobacteriaceae sp.
MADQVTRTYVASIRNHQQVRDDLDSLGFAASKLWNVARWTCDRIWHETGTIPDDSTLKTYLKNHERYADLNAQSSQAILEELAEAFDSWYAHRENGNKDANPPGYRKHSDDHPRSTVTFKEDGFKHDSDHNRIRLSKGRNLKDGRNDFVLCEYAVDPEVTIQNVQQVRAVWTGDEWELHIVCRVKTGDPDPPGDRVAGIDLGICNFAAVAVGDEALLYPGGALKEDDYYFQKKRAKCDDSDSDKSQRLDHKRRGRRDHFLHAVSKNVVAECAARNVGTIAVGDLSGIREDADWGDHGNLDLHGWAFDRFIEMLEYKAAERGINVERVDERDTSKSCASCGTTDDSQRVERGLYVCEACGLVANADVNGAANIRQKVLPSLACDGGDRDNGWMAQPAVRLFDKSTGRVTPQEQANREP

SEQ ID NO: 45461 - protein, 402 aa, Streptomyces sp.
VIRAYRFLLRPTARQAVALGEMLRDHCSLYNGALQERRDAYRHVSKTTVRYGAQSAQLKAIRTFDPERQGRWSFSSQQATLRRLDKAFQAFFRRVKAGQTPGYPRFKGVGHFDTVTFPKDGDGCRWDSTPHDRQTRVRLQNIGHVRVHQHRPVQGRVKTISVKREGTRWYVVLSCDEVPVEPLAATGSVVGIDMGVAHLLTTSDGEHLANPHFLATMADELAEAQRHLATFPKRTRQRTKKHRAAARKVAKLHAKIRRQRADFHHKTALALVRDHDVIAHERLDTAGMTKAPAHKADPDTPGSFLPNGAAAKAGLNRSILDAGWAQFLGILANKAESAGRLTVPVDARNTSRTCPGCGHVATGNRVTQTRFQCTACGFAANADHVGATNVLNRAGLALCNVA

SEQ ID NO: 45462 - protein, 445 aa, Deinococcus sp.
LSYTLYIGHRLRPHPSQLPHLDRQFEVSDLAWQALRARAALDRTDFDLDALLRDAERADATTCVLRDPPNRRGWLRDLARHHGWTHDVGSDVIDGVARAFGQVIGALEPGARLRDLPRAHPDEPLDVGNLARPLFDDAVELLGVEGLVPAAAYVWPVAADRVVRAWRAQSFDRLRDERADLERRLTTGDVDANVELLRHLARHPYEPPRVEEAATTAEGGVRLAWANRATLRRMPSPSGPIYHVSWGFEVLEVPEPRHPGMIGVDPGMLNLVTTAGEHVVSRVPTVLPAALRLDVPVPRAPGVRRTHDERVARLKRDAVLFRTVRPAFEAATSLLLDHEEVAIEDTDYAGFRRRESPYAEWADALGSKVYVRYAADLVRARGGRVELVDPRDTSTTCAACGTPGAMKYWAREGRCVCCGAREHRDVNAARVIRERARGTHAQRSR

SEQ ID NO: 45463 - protein, 248 aa, Streptomyces sp.
MRSDHAVAAGGRFGPDEVLHDVPVLDDAVVLQSEDVNDHRGTGPPAVDEAVREHEVALGRHALRLPGEPLQPRHCGAECAEARTANHLRAVQKVAGLHRKVRRQRLDHAHKTALGLVREHDVIAHEDLKIRNMVQAPKPKPDPEQPGVFLPNGAAAKAGLNHSISDPGWGVFLTILHAKAESAGREVIAVNPRNTSRTCPECGHVSAENRPTQAKFHCVSCGHLAHADTVGTLNVLRAGLVRRNANPA

SEQ ID NO: 45464 - protein, 413 aa, Methanoculleus sp.
  misc_feature (331)..(408): Xaa can be any naturally occurring amino acid
MALRVVSNYLHLPRKTFQILDTLAYHAKSMYNVGLYNVRQHYATHQENTQILQGIRPDLTSGVDILVGSYLPFTRKKDFPYKACSNYAQSKPNENFGLLHNDNAQQTLRSVEEAYKSYFELLKLYRTGQLEYCPSPPHYLPKDGRFKLAFPRAHLTIRNGSVTLGMSLTFRKQHGLTGKELTFPIPPCIKPHQIREVAILPVNGGKAYKIEFCYTVPNQPQNLDPNQYLAIDLGLTNFATMVDTATGAAVILGGKRIKSINRWYNKENARLQSIKDKQKIGGITKRQARLLKKRDCRIGEAMNRYAVWIVNYALQHRIGTVILPRWDGIKXXXXXXXXXXXXXXXXXXXXXXXXXXXXXXXXXXXXXXXXXXXXXXXXXXXXXXXXXXXXXXXXXXXXXXXXXXXXXXSSGRN

SEQ ID NO: 45465 - protein, 303 aa, unknown
  TnpB Polypeptide
MNAEAAFKRFFKRQSKFPRFKKKKNEDVKMYFVKNDSKMIIECERHKIKIPTLGFVSLKEKGYLPTDLIIKSGYVSYKAGRYYVSVVVDDNKEYTNILFNDGIGIDLGIKDFAIVSNNDVYKNINKTKKVRKVEKYLKRQQRKLSRKYESLKKRNKKGEATKQNIHKQVQKVQIIHQKLNNIRTDYINQVVNKIVKTKPSFITLEDLNIKGMMKNRHLSKAIQKQSFYEFKVKLLYKCRVYGIEMRIVDRFYPSSKKCSRCGAINKNLKLSDRIFICPECGFIIDRDLNASTNLRNAKIYKVA

SEQ ID NO: 45466 - protein, 455 aa, Chromatiales sp.
MAEPVSITYKSPHPVAKQSGAKGEGVLTASATACYTAPMPAVMRSYRLRAYPNGAQVRMLNQWFGAARWLWNYSLASRTKAYQRRKESLTSIDISRRLTKLKTLPKYAWLSAPPATCLTQTLRDQDATFRHFFRRVKAGENPAGYPRFRPRHEHTTSLRFQGVSLPKWVKGTVSLHKLGAVKLAEPLPNVQRPDTVTLKRESDGRYYITFSAKVEVALLPVTNRVIGVDLGLTHLATLSDGTKIENPRHYRARLRYLRQQQRCLSRRQKGSKRRERQRLKVARIHAKIRARSQYTAHQFTTRLVRNFDVIAVEDLAVKNMIRHPRLARSIADAGWGEITRQLEYKCAWYGRTLVKVDRWFPSSKTCSACGHKLERLALSVRGWTCPDCGAIHDRDINAGQNILLAGMSQIGGREDRDLRREGGALAGDGETAPDELRTGQIASELFSNGFNQINL

SEQ ID NO: 45467 - protein, 435 aa, unknown
  TnpB Polypeptide
MRKTQCLPWRSSLSVSIGQRYHRAMQRLQAFKFELRPNGEQERDMRRFAGACRFVYNKALALQKANHEAGGKFIGYVAMARHLTEWRNGGETPWLKDAPVHPLQHALKDLERAYKNFFAKRAAFPKFKKRGLSDSFRYPDPKQFKLDQANGRIFLPKLGWMRLRLSREALGTLCNATVSHAGGKWFVSIQTEREVDTPVPQATSAVGIDVGVARFATFSDGTFLAPLNSFKRHEVRLRRAQRAMSRKVKFSSNWKRAKARVQRIHTQIGNARRDFLHQATSAISKNHAMVCIEDLQVRNMSRSAAGTVEKRGKNVRAKSGLNKSILDQGWFEFRRQLQYKLQWSGGMLVAVPPHNTSRTCPACGCVSVENRPSQAVFRCIECGHDDNADVVGAINILARGHRVAACGEDFSLGASQATSVKQEPTEATMHGATHV

SEQ ID NO: 45468 - protein, 452 aa, unknown
  TnpB Polypeptide
MQEYQQNTTPVVRVHVFPDLPRTTLACISAGRAEAAKVWVCCRDLHQTARTSRTRWPDMRDLQAATRGRFALHSQSIQQVFRAFLGAVDTTRQRRAAGDTWMKYPWRDKRYYPLLWPAQAVAITARHIILPMGRGRASIVLPKPEGFVPGACKLVWNGSANELHVTVEVSVQAARDSTVVATVDLGQIHQCAVTTNTGAALIVSGRGQRSLKRRQNKMHGEIARRQSRCQKGSRRWKKLARARHKHAGRIERQVRDLAHKGTRAVADFCAAQDVGTVFIGDPHGIRKKRNGRKHNQRMAQWEYGRDKNYLAQKLGRAGIASFTGSERGTSSRCPQCGHKHKPKGRVWQCKACGFTGHRDLVGSVNMHEDNFEKLTTFPSLQDVTYLRPRSVSMEQAGRMKTCRLGSSSRPDTGHEADSLALLSERCVSTTRIDGASLEAGHRVTHSTEAHRL

SEQ ID NO: 45469 - protein, 392 aa, unknown
  TnpB Polypeptide
MYLVERHIVKSNEDLDKLCFNSKNLYNKALYIIRQHYFNTKEYLDYVKINRLLVDSKDVDYYALPIKVSVQTLRLLDRNFKSFFSLIKKRKSKDYNKPVRVPRYLDKDGRTIAVFPKDAISRIFIRKGLIKLSTLNILIPTKVTESNLVEVRVLPRNNHHIVEVVYEKEEKPLLENNGRYAAIDLGLNNLATVCSNVEKPFIINGRPLKSINQRWNKHKANLQSRLANKSSKQLALITEKRNNRVKDYLHKSSRKIVNFLVSNKISTLVIGYNGEWKQNINIGRVNNQSFVTIPFLTFVQQLEYKCKLEGINVILTEESYTSKCSFLDNEPLGKHDNYKGKRISRGLFKTSTNKLINADLNGSLNILRKVFGEFQYPIGVSSAPVRITPSFN

SEQ ID NO: 45470 - protein, 446 aa, unknown
  TnpB Polypeptide
MKTVITTKLKLHVTPEQFTALRATQLAYRDALNYVSQYAFAHGKMSNKVKLQDGTYDEVRTRFHLPSQMACSVPRQVGATYKGLWKKVKQNAEARGAGQTKKRYKGLDKAPKYVSPTLTYQDRKDYTFKKDQQVSVLTLDGRIIVPYTGYAPHVALLEKSKDIGAALLWYDKPRKQFYLLVSLEIETADPTPETQSSVVGVDVGVRYLAVTSNTQGTCSFYSGKGVVPKANHYARLRKRLQKKGTRSATRKLVAISGRERRLKADANHVVSKRIVTRYPHAIIGLENLTDIRERTKRRTHKRKKDGKGARRVSVKQRKANAVYSKWSFAELQSMIAYKALLQGSMAIKVDAHYTSQACPVCGHIAPANRPNKGLLFVCQNCHYTLHADLVGARNIAMRTLIARQDWAVTGVLSERPDVSSAEAKAARLQRYAELRWSLDTSPASLD

SEQ ID NO: 45471 - protein, 280 aa, Oscillatoriales sp.
MVESMAKSNKTMGVQQVLLRPNKETHALLEYLCQQSGKLYNTGIYFARQILFKTGKLLTGKFDLASEPSVSKSLLAQSMPSTPMQQTLMSVTESFKSFKNLRDLYSKEQLHFRPKPPGYLKGSKLFKVAYPNSGGQRPTLINGQLRFALGTTVKRWFGVSEFFLPMPSNIDYSKVKEFTILPKNGVFYLEMSYEAEKQKHELDINQALSIDLGTADNLAACVDTLGNSFLIDARAMKAMNQLWNKKVSTNILRKVSGRLGISLDQLSRRSLAVVARIKLN

SEQ ID NO: 45472 - protein, 403 aa, Actinobacteria sp.
MNTAYKCRAYPNPEQASALNRTFGCIRVAWNRTLAWRQARYHEEHASTSYAQASAYLTAMKATEELGWLNEVSSVPLQQAIRHQQAAFTSFFAGRALHPRYKSRHGRQSAEYTRSGFRYRDGQLFLAKTGAPLAFAWSWPDIDPASLDPTTVMVSRDPCGRWYVSFAVDVPDPAPLPPAGAVVGVDLGIKDFAVTSDGDKIANPRRLARREHSLARYQRRLARCQQGSANRAKARAKVARAHRKVRASRADFLHRTSARLVRDHDLIVIEDLAVKNMVRNRSLAKAISDCGWGEFRRQLEYKAARAGRRLVVTGRFYPSSKTCSACGHLLAELSLRTRAWRCPSCGTRHDRDVNAAKNILAAGLAVTACGADVRHSGSSRVRSAVKQEPRPVRAGIPVFQDGE

SEQ ID NO: 45473 - protein, 412 aa, Rhodospirillales sp.
MKQLPWPVPTDPSAGDPAHDDVEHRQIVYRVLFDQPATARRLAAVAGACRFVWNEMLDQQAQVYDIARMGGAQPPAPTFFTLGKAFTQLRRVTPWLQAMPYAPVRYTLKYQADAWRRFFRGEAGPPRFKKRGRDSVTIPQDVRIRDGKLWFPRIGWLRLRRRGGNPYPNAEPVQAVLRRVNGKWMAIVCYAVAAPARPDDGTVTGVDMNVGQVAVSDSCSTHIVHAPDSRRLEARKRRYQRRLARQRRGSRRRERTQRRIAQRRRDWQHRVSRSLAGGTVVVEALRTRAMTASARGTMEAPGRHVRQKAGLNRGILATGWSGLRTMLAYKAPRLVAVDPAHTSRTCAACGHADAASRRSQASFECVACGHADHADLNAARNIRRRGLAQLHGEGRSHSATPATRETDRRLAA

SEQ ID NO: 45474 - protein, 403 aa, Thermoactinospora sp.
MRTAYKVRVYPTPEQAAVLNRTFGCVRLVWNKVLAWRHARYHTQGLKTSYAETDRYLTEMKRDGEHDFLYEVSSVPLQQALRHQYTAFVNFFAGRARYPRYKSRHGRQSATYTRSAFRWRDGRLHLAKMDGPLAFAWSWPDIDPATINPTTVTISRDSDGRWYASLAVEAPETGTAPQPLPSTGAAVGVDLGVTDFAVLSTGEKIVNPRHLERKARNLARYQRRMARKQRGSANRAKAKAKVARAHTKVRDARADFLHKTTTRLVRDHDLIVVEDLNIKGMVRNRKLARAISDCGWGAFRRLLEYKAARHGRHLVVIDRWHPSSKTCSACGHLLATLSLSTRHWTCPGCGTRHDRDINAAKNILAAGRAVSACGADVSHAGFSRMRLAVKQEIQPVRAGFPRL

SEQ ID NO: 45475 - protein, 501 aa, unknown
  TnpB Polypeptide
MKGAFLFWCWEMEGMFDLERMFLTVDGILLYTGEYEPDLQEQSRRVLELSIPCGLVSNRAEKGIHPGNRGAFESHHRAGVPRASNSKLSNKNMSKRARPNKAQQPTKTYLFRLYPTSKQVRRLEEWLGLCCEVYNAALDERKSAYRMAGVSLSFENQCAELPGCKEVRPELVSVPSQVLQDVVKRVDLAFDAFFRRIEEGEKPGYPRFKPRFRYHSLTFKQYGNSFHVLPDTKKKRGTLVLAKLGHVKMVMHQAIKGTPKTAIVKRTPTGKWFVAINVELADQEVQEKRLSPSEEAVGIDVGLHTFAYLSTGQAIANPRFFRAEEAALARAQRKLAQAPKRSRQREKKRKVVARIHERIANRRKTFVEQEVRQLIQRFGFIAVEALVVRNLIKNPRLAKSIADASWSMFFTRLLAKAEETGRQVVRVDPAFTSQICYACGHREPIPLSVRVYECLHCGLVIHRDHNASLNILTDAFYAVGRHSRVIPEAPGSQPWGVVTRF

SEQ ID NO: 45476 - protein, 423 aa, unknown
  TnpB Polypeptide
MEVRRTVPVALDVDSDNAALLADIVDAFLRSAQYVVDHAFRSEYVTTRKTTLNAETHDDAREKTGGFNRGLVQAARNKAAEACKSVVRKWDRGKKATKPQFTSPHVVYNHRTATFHDDYVSLATVDRRIEADYVLPDESSDTPHAEYLFSSEYETTGAERHYNNGNWILHIHIKMEVESDTPAQSTPENRTVLGVDLGVNDLADTSTGTFWTGDEFDHWRQEYEQRRGNLQACGSRWAHRNIQPVGRKEKGRFKLTLHRIANELVAEAREYGCSVIAFEDLTDIRERTGASWGHKWVFNRLSDYDEYKPEEYGIDVEQVTPENTSRRCSHCGFPHPDNRADELFECQKCGYETHADYNAAKNISLRYLRRNQTGGGEGAPLGVRLNSGTLNANGGYSPAEDSARTGVHAESHDFSWGAQETHI

SEQ ID NO: 45477 - protein, 448 aa, Halorubrum sp.
VKRTNTFAVRPLSNKGEQLLRELLDASAALWNEANYERLMRYNDEEGYEDEDVWDADTGRLEGTYKGVLGASTAQQVIRKNSEAWRGFFDTKNKYHDESNTSVTEHPEPPGFWGNKDDGRKLHTVIRNTSYTIEWGDCSRLEILVGNELKDRYGHTGRLRLEIAGNPNWPEYEKQGRLDLWYDETDSTFRASQPVTVSDGVRAIPLADETAALDIGANNLVACTTTAGEQYLYEGRELFQRFRETTREIARLQSKLEEGQYSSKRIRRLYRKRTRRRDHAEEALCRDLLERLYKDGVDTVYIGGLTDVLDTHWSVETNAKTHNFWAFEKFTKRLACTAEEYGLTVEVRSEAWTSQECPQCGSTDRTTRHQDTLTCPCGFEGHADLTASETFLRRHAEQAVRPMARPVRFEWDDHDWSGIPYPHERPKEQRTDPSTVHRDGNVASGESA

SEQ ID NO: 45478 - protein, 416 aa, unknown
  TnpB Polypeptide
MGRVVRGMEVRRTVPVKLDVTEEQADLLHETIDEFLWAANYVVDAAWDGEWAETRSSVLHEQTYDDVREQTRLHSNHVQSARDRAVDALEGIVAKWSKGEYASLPTFSTPFVEYNQRNVTLYDDHASLSTVDGRVTAEYVLPDETRDTPHSEYLHSDEWEQTGATLHYRRGDFYLHVRTKADVDAPDPAVNGAVLGVDLGVENIAVTSTGVFWSADELNHWRAEYVERRKSLQECGTRDAHENVQAVGRTETGHFEQHLHRVANELLEEATENGCTVVAFEDLTDIRDRMPNARKFHEWAFRRLYEYVLYKAEERGIRVEQVNPKNTSRRCSSCGFTHKDNRPSQDTFCCQQCGYENHADYNAAKNIGYRLLRNQTGGEGGAPVGVRLNTGMLNANGVKPVPESVRAGVHGEIPPL

SEQ ID NO: 45479 - protein, 333 aa, unknown
  TnpB Polypeptide
MDYKIRQETELPAQLVCSSRDKAAEVLKSKPRTKPILKEHLTIRYDARSFSFKYNKEGYYVSLSTIDGRIKIPIEIPEYYWKYLDWKPCSADLIYNKGLFLHIVLSKDIITPKFLDGFLGVDVGINNIAVTSNKQFFNSKKIKRKKLMFKRLRAKLQSKGTLSSKRLLKKISGRENRWMTWVNHNISKQIVDCKEGTIVMENIKGIRNAKVRKQQRFWLHNWSFFQLQRFIEYKGIINGKRVIKVNPYHTSQTCSHCGELGSRSKGFFVCKHCGYSLNADLNGAINIASKHHSMSDDVSAYVTKPHIQAYEHKSTSSAIACEVMDKVSKNPTL

SEQ ID NO: 45480 - protein, 395 aa, unknown
  TnpB Polypeptide
MSKKYYKGYKVKLDPTPEQTKQLFRFAGAARFIWNYFLSFQKEHYEIHKKYKNKYELSKLFTELRNNPKYSWLKEISFKAVRNSVYELDRAIWNCVDKRKNNKKNFPVKKTRKNKKFSFYPGEPVIWFKNNCFNIMKIGYVKLKEFNYIPIGKDIKYIDPRISFDGVDWWLSISIECETQTLDKSKTTKLGIDVGINNLITLSTGEQFQYPKKLLSRIKFIERRLRKLHQLTSKCYLKMKQNNIDIYDSNKTKNLLYLEMLIRKCYRRLTNIRKDFIHKLTTSIIQRNPEKIITETLNVREMKTKNNRFNKRLYSSLVGEILIQLEYKSIWNEIEFIKADKYFPSSKMCSICGNINYNFSPFNKYFTCGQCFYWEHRDINAAQNLYAYENTQIAG

SEQ ID NO: 45481 - protein, 503 aa, Caldivirga sp.
MLCRAVAVELEVTRELNKLLYSVETMYLNIVREVVEYAVVNNVTSATQLQRLFYSKYRSEYQGLHAHLIIQAIRQAAEIAKSFMERRRKGLVDKPYPEVKAVSIRFTEQAWSYEQFVKSIAPVRLNLSLLGERREVWLRPHKRFWLYWWKVLNGEAELASTLIIRRRLNKWYAVFIFELKPREEEPKSIVSFDINENTVAVGKIDLASTVGMVVNWNRQYVTPQLYEIRTDFGKLAKRYEKTRNMIIDRLKPLYALPNGKYVNIMNTREFRKRVKRLRERGRKVGRVRQIANELTKTPAIIVTEELGENPQESMINEIEKDELRHRIKQTPFKSIEKAVEDKALERGSRIFHVSSYRNSRVCPIHFTRLGETNDWHTLKCPFGHLVDRDHASVMNMAWKLTPEAWTKGVWWDLKSLSKNMNWRKHEGKSNPLVPYEIVKYIHATLKEFKASFEQSPAVLARGSPMNPAGEANEDWARKPPRFKATPTPQDGEEVSMPSSLAYS

SEQ ID NO: 45482 - protein, 422 aa, unknown
  TnpB Polypeptide
VSFVKSSLKKGESMSVNTSVSFQKGYKYRFYPNQKQQQYLKEVFGANRFLWNKLLEISKTEYELWKSDPDNHQKPTVSGYTLVKRVMEIKQQNNWMNDYPAVCYQQTALRLGQAFANFFRNVKMGKTSGFPRFKNKYINQSVGITDQFFRVSGDSFKFPKLDEEIRLRLHRPLPSKSTSCVVSLTSSGEYTVSFVCEYSPEKISGEKIVGLDMGITDLITLSDGVKVSNPKHFVKSQKRLRRLQQSLSRKKKGSSNRSKAKRKVALCYRDIANKRSTHLHQLSRKLVNDSQVIGVETLNIKGMLRNGKLSKHVADASWGELIRQLGYKARESQHCSVVMMHPYFPSSHLCSATGLHLGRKLGLGERKWKCPHCDGEHDRDVNAAQNIAIEAMDFATFHNLSHPAQCGKVYRIDDKNWRQVLV

SEQ ID NO: 45483 - protein, 384 aa, unknown
  TnpB Polypeptide
MLQAYKYRMYPNREQIASLLQHIHACRFVYNHSLEQKIRAYEQEGRKLSCFDLNTRLPALKEEHPWLKEVNSQSLQSTNKNLDNAFTRFFREKRGFPRFKSKKNPVQSFQVPQHYTVDFEQGRIKLPKIGEIRTIFHRVFTGKMKYATVSITSTGKWFVSILVDDGTVEPEPTPSSLDTTIGIDVGLLNFATLSTGENIENPRYLKNSLQRLKVLQQRVSRKKKGSKNRQKAILRLARCHEMVANQRNDFLHNLSFRVVSENQAIAVESLNVAGMQKNHCLAQAIGDVSWSTFFTMLEYKCQKYGKTLLKIGRFDLSSKICNCCGYINRDLKLSVREWICPDCGTHHDRDINAAINIKKFALQEQNLVGVSGVERAAEPVDLPR

SEQ ID NO: 45484 - protein, 366 aa, Lentzea sp.
MVGRVKLVVQVKLLPTAEQAAALRSTLQACNDAADEVSRVAFETGVFREYALRKPTYAALKARGLGAQAAQHVIKKVADAYAALHANIRNGNLGPAGSRRRVKAESEPIGFRSEAAQPFDDRCLSWQHDAGTVSIWTVAGRVKHLRFTGSPEQLTTLRAYRRGESDLVFRDAMWFLIATCDVEEKPEFEPVDWIGVDRGIVNLATTSDLDNFQGRRLRRYRRWHARKRAELQAKRTKSATRRLKRRAKREARHAHHVNHRIAKQIVAVAERTGRGIALEDLAVSVTGSRFPGTSEPHSTPGRSTGSNSTSATKRNAPVCRCCSSTRGTPARGARGAGTPTAPTVPAGTIFTVAGAVSLDPPTSSPP

SEQ ID NO: 45485 - protein, 485 aa, Haloechinothrix sp.
MSWLEVPDGWIVQAYRYALDPSSRQRRALLGHVSAARFCFNDMLALVKAVLDQRAAERSYGVADADLTPPLGWSLPALRRAWNARKHEVAPWWSEYSKEAYNTGLDALSRALDAWSASRAGERAGGVVGFPRFKARARSRASVRFTTGTIRVEPDRHHVTLPRLGRIRTHESTRKLARRIEAGTARILSATVTRDSAGRWYCSLQTLVRRQVTPAPNAGTAPHRVVGVDVGVSDLLVAATPDGTETMRVPAPKSLAEAQARLRVLGRRSARQHGPYGPATRRKQRPSQRWRRTQSRIGKAHARAVNLRRDVLHKATTALARHHEVIVVETLNAAGMRRNGGVRTRGLNRALADAALAEIRRMLGYKMRWYGSTLVEADRWYPSSKTCSACGGRKPSLALAERTYVCEHCGMVLDRDRNAAINLARLHETRPGERGPADSGSVAGRGATQKTSPAQAGKAGGREASTPHSHTVDQTGTAAPQGAAV

SEQ ID NO: 45486 - protein, 511 aa, unknown
  TnpB Polypeptide
MHTVRLLLKLTEYDRQILGKRFHAVSHIHNVLVKHAKKQLQKLYNDQEYVSRKTEYTVLLKKEKDKEKKTKLSRQEKELKKQLSAEMNQIIKDLGLSEYGFQSYIKICGEMYSKCLSSQQVQKEATRVWSGVKDVLYGNGNEIHFKKYRDFDTVCGKSNKNGVRFHKDSLITEWMGLSMKCRIPKNNDYIMEALKSDISYCEIQRKMFPNGWHDYVVLYLKGNAPKKITQNGNMGNITGIDIGTSTVAAVSDDLLMLKELAPKCHEYNRKIKKVSKHMDLSLRALNPGKYKPDGTIDRNNHDRWVYSRTYLKNRDLLKTLYRKKSAYIKQSHEEMIKELIRDSSFFVVEKMSFKGLQKKAKKTERSEKTSDIRQKDGTTKQIHKYKRKKRFGKSLNNRAPAEFIEILTKKTELYGGAVYKVDTMKFKASQYDHVSDTYTKHSIHDRERNIDGNTVQRDLYSAFLLKNTDNNLEHTDRDKCIYEFDRFLKQHNELITEMKHQNISMKQCFGF

SEQ ID NO: 45487 - protein, 400 aa, unknown
  TnpB Polypeptide
MQGGTGKVNADYPSLDAWMKQIDNSHYRGVAAQASQQVLKGVVESFNGFDELHEMFWRGEIVRPKLPGYRKKGGMALVSYPAQALQFDLETGMCRLPLGRTTSGESGIDSIWVQGAWGIKVEQISEVRILPRNGEFYAEYVYKATGLQAKYNLDPTLALGIDHGVSNWLTCVSSLGKSFIIDGRKVKSLNQLYNKRIATIKAGKDRDYWDGELARITEKRNRQMRDAVNKTARFIVNHCLANGLGTVVFGWNEGNKNGADMGRKNNQEFVQIPTARLKQRIKELCEDYSIQFIETEESYTSKASFLDGDELPKFGEKPEGYKPSGKRVERGFYRTVTGFLLNADCNGAANILRKVSIQLDLDLARVCREALNLTKRYDLFSCLTKSYRRQSEAARFQPAA

SEQ ID NO: 45488 - protein, 447 aa, unknown
  TnpB Polypeptide
MITIKLDITTTNPNRILEYQKQYSNLLHIFYNRYKEGISQTECKHLQFNNIELLDSWFRQSCIYEAIALCKKFKDKSIIFGGKKNFFDRLKNIISKEEYNRNRLSPLYSIGEGSNPGVKGNRKFFIRDLNTIIFKPSKKEKIELKFQINSKKYKQYLQLLMLHQDKKDLSITYKLSHEKIWISFDETILKTELKNYNKIQNRIISIDLNPNYIGYSVLDWLDSEHFNIIDKGILSLKYLNDKENKTKCSSNDKLKIYLNNKRNFEVLEISKFLINKMKHFKCSLFAIENLNIKSKDNGKGRKFNKLCNNQWCRTKLVNNLQKWCNIYSVNLLKVNPEYSSFIGNIVNRELKLPDMILSSIEISRRAFEFNHQYILKDCPLKKNIIWIEMTNYIKNKIIQSLEELNICCDWKNLFELYLHIKKSKCKYRFPLEIDGFKAKLLKYQLIF

SEQ ID NO: 45489 - protein, 516 aa, Rhizobiales sp.
MVPEVPQENPQGWDRQATSGNYFRCVPRMRSDNYRNRDHARPRSPSCRCRSAIRYPPLGQIDQGAVIAAVAARVSRVQDASSLALDQQLLRIHRGRRSARNRQTIYREPKERLMLIQRATLYRLDPTPEQAAAFAQWAGACRFVYNLALEQRRDWGRKANLSYNQQQRELTPLRAEVDWLRAVPVHALQMAVRSLDNAFQRFFSGLGGFPTPHKKGQRDAFTLPDPSYLDFKRLNANRGAVKLPKVGWIKLLGWRPLGGELRSVTISRKGAHWFASVAWRQEVKDPATSSLPSVGIDRGVAVFAALSNGGMVEPLNSFKAIQNKLAKAQRKLAGKVKFSANWLKQKARITKLHLRAANARKDFLHKRSTEIAKNHGVVKIERLKVKNMTASAKGTVEQPGVNVAQKSGLNRVILDQGWSMFAAMLRYKLSERGGELQEVDPRFTSQGCSACGQIDKASRQTQSCFVCTACGHEANADTNAAINIHQARSIAAESPKRTLRRVGKRKQLLEALDVAA

SEQ ID NO: 45490 - protein, 412 aa, Streptomyces sp.
MKLVVQVKLLPTPLQAAALEATLHPCNEAASWVSEVAFAEDVKRNFVLREHTYREIKQRWGLGAQAAQHVIKKTCDAYRTLAANAKAGNLGKPWSKRYRRATEKPITFRPEGAQPYDDRMLSWQITDRTVSIWTLSGRMKQVAFTASPEQLARLAQYRKGESDLLYRDGMWFLNATCEIPEAEPNADPQGFLGIDLGIVNIATTSDGQIMAGRELNRGRLRERTLRTKLRKKNTPSAKRRLKKRRRKEARRAKDINHKIAKHVVAEAERTGRGIALEDLGGIRERVRLRKPQRATHSSWSFAQLGAFIAYKAKKAGVPVVYVDPAYTSRTCAVCGHIDKANRVSQAWFACRACGFVDHADRNSSRNIRARAEELWRRGAQSTAPAPPPTSGGGTGRKRSTTTSGARCASPGL

SEQ ID NO: 45491 - protein, 218 aa, unknown
  TnpB Polypeptide
MAVYRDACNYVSGYIFDTHDLKQASLNTHLYRPLREQFGLKSQMAQSVLKTVIARYKAVLEQEHKWIQSVFRKPCYDLVWNRDYSLNNHQFSVNTLHGRLKFDYHDEQMRQYFDVDTYKFGTAKLIHKHNRYFLHISVTREIDDCDMSDICNVVGIDRGINFVVATYDSHTHSEFVSGREIKQKRANYVKLRKELQMRHTPSARRRLKAVGQRENRWM

SEQ ID NO: 45492 - protein, 338 aa, unknown
  TnpB Polypeptide
MKMYTTYSVKIKHYNSIFKETVAIYRHAVGYILNVCLENWEEMSSLEGRNRLFYVERLIHATKDNPVPTYNFDSKFYKMPCYIRRSAINEAIGKVSSYTSNLANWNKNPIGKKPSYPKAGYAFPFMYRKGMYNQIGDYTAQVKVYTRNTWDWINIDLRKSDMDYIARRCHDRKQCAPTLQKRGHEWFLDFPFEEKCTLNNTSVFDRTIVAVDLGINTAATVSIMQSDGTILGRHFCKLPEETDRLMHSVNRVKKAQQNGNYKTPRLWAKVKGINHDISVKTAEFIIETAVSYNADVIVFEHLDKTGRVRGSKSSASSYGAVRKSSPLLLTEHIDLVCI

SEQ ID NO: 45493 - protein, 408 aa, unknown
  TnpB Polypeptide
MRVAYQYRLRPTKQQAQEIDRWLSMLCAQYNYLLADRFDWYERNRCPINACPLICHLPELRDNPDYFSQKKTLPQLKVTHPWYAEMYSQVLQDVVKRVKVTFDRFLKGDGNGKRSGKPRFKQRSRYRTFTYPQMKEGCLQGNLINLPMFGKVKVIMHRLLPDDFKIKTVSVTKKADGYYVTLSLEDKAVPEIKLDINPDLITGIDVGLKDFLTTSDGEVVPIPQHYRKAQKRLRVVQKRVSRRKKGSSRRLKAVRCLGKQHKRVADKRKDFHFKVARKLLSTYDVIAHEDLNVKGLARTKLAKSILDAGWSNFLSILTNKAENAGLLVIAVNPSGTSQDCSNCGVKVPKKLHERWHSCACGCELDRDLNAALNIRKRAEGHPVLKAQLMSEAIAGVTEKLPPNLRFGA

SEQ ID NO: 45494 - protein, 381 aa, unknown
  TnpB Polypeptide
MDLMDIVRTVICKLAPTPEQVVAIDATLQAFAAACDFAADAARRIGSTNKVKVQADAYRAIRETFGLSANLAIRAIARACAALKVPAKMHSRFEPTSIDYDQRIFSFHEWNWTFGLTLLSGRVKLATRLGDRQRSALKGRKPTSAVLVRRRDGGYYLHVPLADAAPEPIEVKGVIGVDMGVKHLAVTDDGETFSGERVEACRKKYHRIRQTCQRTGTKSAKRKLRKARAKESRYRKDVNHVLSKRIIAKAKGTGCAVGVEALTGIGNRTTARQADRSRMKGWAFHQPRTFLTYKALAEGVPVIPVDPRNTSRTCSECGHCERRNRKTRDDFECRHCGFQLPADWNAARNIRDRAFVMMPDVGAVDAGGRIPAEAHLQAQTL

SEQ ID NO: 45495 - protein, 411 aa, Providencia sp.
VTKTKWTCIRNIQCLPRRILVSFFIDQSIIGNMKRLQAFKFQLRPNAQQEREMRRFAGACRFVFNRALVRQNENHEAGNKYIPYTKMASWLIEWKSDTETQWLKEAPSQPLQQSLKDLERAYKNFFQKRTAFPRFKKRSKNDAFRYRNSREVVGEVRNVTVSQSCGKWYVSIQTEYEATEPQHESTSIVGLDAGVTKLATLSDGKIYPPVNSFKASQRKLATLQRQLSRKVKFSANWKKQKRKIQRLHSHIANIRKDYLHKTTTEISKNHAMIVIEDLKVSNMSKSAKGTAEQRGRNVRAKSGLNRSILDQGWYEMRRQLEYKQLWRGGQVLAIPPAYTSQRCACCGHTAKENRQSQSKFVCQVCGYTENADINGARNILAAGHAVLACGGMAQSGRPSKQEPTEASQASV

SEQ ID NO: 45496 - protein, 360 aa, Geobacteraceae sp.
LIDIETQEKAHDARICFGSRVLFRKQFNLEINGYHDHADWLQDWQSKRNSQFYVLGSGDEETGCQGCQIVENENGTFNMRLRSLSKEASYLTISGIDFKYGSDVIRSAIANNIDAKVTRANRDMQVRLNKKRTAEAESLHIDPVLIDVIPAVLGQALSYRFIRDDKGWRIMITTDLPDFERISVEGDGYVGLDLNADCITMAETNRHGNLLKSKVFPLVTYGKNTNQAETLICEVAKQIVDYAASVKKPICMEKLSFKNKKADLSKENPRQARMLSSFSYNKIIQAVKTRAYRFGIVTKQVNPAFTSVIGLINHSKRLGISVHQAAAFVVARRGNRSILFLHPGGTVYVVSHLVPAGNNP

SEQ ID NO: 45497 - protein, 468 aa, Saccharopolyspora sp.
VKVTRIAYSQGLNAGKFELLAEQARRLGRVRGEVWQRYGSVNGAGLSDRQIRDTWMADGTAELFGVLANAWKETVRDAVADIAANRASAKAVVRKAIHQRTLDQAERKRMYTALKRDAWTEDPFLSRQMRKQWKRGRNRTHNQIVVRSDQYRTFTLAEKGDVWLAVPGLQRRQLVRIPLNTTVAPSGTLRLILRAGRVEVHYQIDASVMKSSAHPAGDREIGVDKGYTEVLTDSDGQHHGTGLGVLLTCESDYRKTKNARRAKIRSVAEKAREAGDHAKADRIVRNNLGTIKRDRRSSRWQQTVRATTFRAVHAVVDKAALIAAEDLTRTFTARNKRGRNVNRRLAAWTKGVTAEALASVSERRGSALTLVNAAYTSQVAPCCGVFGRRSGERLHCTRCGVVWQADHAAAINVLHRVGDPDITPHTPYQRVKSIVQQRTDRRPDQTADPGLQPIDGERNIQLKINLDQ

SEQ ID NO: 45498 - protein, 406 aa, Microcoleus sp.
MKARYRYRCYPTPSHKLALAKLFGCVRVVWNDSLVFCISEYIGGKKKPKNAELQKQFITQAKKLEEREWLSEVSAVPLQQSLNDLEQAYQNFFNSCKGKRQGQKVKPPRFKKRKSQQSARFTKLGFSIKGEKVYLAKVGKLKVVWTRELPSEPSSVTIIKDSSDRYFLSFVVEVQPEVLPYSDSSVGIDLGISTFATLSNGQKIKAPKPLKERIRKLKKLSKSLSRKTKASKRHEFSRKRLAKLHAKLADTRTDFLHKLSTQIIRENQTIVLEDLNVSGMVRNRKLSRAISDLGWRTFRTFLEAKSEKYGRDFRVIDRWEPTSKTCSCCGFKIGKLDLSIREWICLNCGTSHDRDINAATNILVAGGLSETLNGRGGSIRLSQDSSTQRSVNPPEFKQLSIFDWLE

SEQ ID NO: 45499 - protein, 662 aa, Streptomyces sp.
MQHAQMQGKFRGKNKAPKWTKPDGGIVSVMVLPLAVTDPADLDRLDKLFGAMWSVKRAVQRDARAKVDAYWAARHERDTHGAKAARQRLGLSREGLERCAYKHLEDAGHLKHHASKALVMHMADQVWNGVQRHLFADSAGNRHGRPRVGRWYDFTRIPGRARSHTIVNKWETFRLVGTFHGHATAYAGGGRHALVQPRRMPTPAKPDGKIPIGRGTRKATWWDHTGPLAVVFAGGPDGKRGDLVLPVRIPQGPGQEDRARHFLAACARWHKVDLVRRRKAGASGGWAYEAHLMVLGPGYASPAVRQMRQRAAELDRIGGVDGNVSNLSVVSFPASLDPAEGKPESSEIVLTDQERARLEREAKKRRGRARALERSRRATNAAQYGLSKRQAVRAERRAAQGLKPKKVTVPGGARDSRADGVPKQAFRRDRLSSGYRELRARQAEAAAGAAEYRRHRARAVAREIVAAHGPVLMVEDCDIRTWYRLWGKRLSQTTPGMLVSALEIECRAAGGRLVRASTWSTALSQHCLCGERVTKTLRDREHKCIACGLVGKRDLVSAALAAFVDLADPDDPKTARLDSARSRHAQITYGEGLEEALNESTTPCQNTPRGAGRVAVPRQSGASAHRTAERRDRATPDEPRHVRDHAGAPGTRPACSPQLTLW

SEQ ID NO: 45500 - protein, 393 aa, Nonomuraea sp.
LWGVAQIVKRAYKYRFHPTPEQAVELARTFGCVRLVYNKALEERTRAYRLEGRGVSYEESSALLTAWKRSAELRFLAEVSCVPLQQALRHLQAAFAAFFAKRARYPVFKSRKKSRLSAEYTRSAFRWRDGRLTLAKMGEPLDIVWSRPLPEGVEPSTVTVSRDAAGRWFVSILVEEKMSPLPPVEARVGVDAGITALVTLSTGEKIVNPRHERADRRRLARAQRALARKQKGSANRVKARLKVARVHARITDRRRDFLHKVSTRLVHENQVIAVEDLTVRNMIRNRSLARAISDASWRELRGMLEYKSRWYGRRLVVVDRWFPSSRLCSACGTLQPSMPLNVRTWVCACGACHDRDVNAAKNILAAGPAESRNACGADVRPQGKSSFLAGDRR

SEQ ID NO: 45501 - protein, 264 aa, unknown
  TnpB Polypeptide
MKVNCAYKFELILKPEQRAKCAQFVGNCRYVYNKAVEIQLRQLETKQPFVSYKELASQLVGWKKDDSSLWLSESPAQTLQQALKDLDRGLMRFKQHKGGMVQFKARGDGDSFRLPQLLKGDFDEANARIRIPKIGFVRYRKSRDIQGKVKNLTISIEARRWYVSVCTEIENFQPQATRNGEVGIDLGIVRTVQLSDGTVYRLDVNEIKKLEDRIAVYQKQLESNKTSRQKLAKLGKAADFDKKVPSRKRRSMAGWQLRICKFGI

SEQ ID NO: 45502 - protein, 353 aa, Thermococcus sp.
MATSIFKSYRKKRRKGKAKGKPVFKKDVIMLDDHLFKLDLENGIIRLSTPNGRISLEFYPAKYHEKFKDWRVGQAWLVRTPKGVFINIVFSKEIEIGEPKSFIGIDLNENNVTLSIPNGEFVQIITHEREIRTGYFVKRRKIQKKIRTGKRRKALLQKYGEREKNRLNDLYHKIANVIVEFAKRYGGITLEDLTEIRESIMYSAKMNGRLHRWSFRKLQSIIEYKAKLNGIKVVFVNPSYTSSRCPICGNKLSPKGHRILECSNCGLKTNRDVIGSWNIRLKALKMWGVSVPPESQPMKTGGWKGKFQNGIEFSTIKAEYFFDNPPIWHSQKFSVHALFDVQTTIRRSEYGRF

SEQ ID NO: 45503 - protein, 420 aa, Thermococcus sp.
MRKSSGDSSSTTRRAKNETVVRAYSIPIRVDEVILEFIEEYHKLARSALQEILGARKFTRVERKQLRDKLLKDWNYASHYVDSAINQMLSLVKSYRRKLKKGKKARRPRLRKKFVYVKSTLFSLKGSTLRITIIPRKHYLEVNLANCPHILPFLKEVWAGRLKLGGLFLFPDRLILNFVKSVEFIDVKDWMSIDINLTNVTVLAGLTVYRFDTCELYHIHRVYELKRQKIQKISAWNKKLSEELLKKYSERERNRVKDFLHKLANKIVEIAKERRMGIILEDLNRIKERVVNSSKELNRKLSKWNARELQRIIEYKAKWFDIPVIYVNPKNSSRVCPACGGQLIPQEGRLMKCSCGLVEDRDFIAVLNLRMWGVRGSPEGVGGFEAFANDGPMKTNPYGVMAIEKQRIGIKFHEITLTPP

SEQ ID NO: 45504 - protein, 363 aa, Thermococcus sp.
VNYLRRRQFFNHEKVDFNKTEKVVYEKYKKEIGSATVQQICRKNAESWKSFFSLIKKRRELPKWMKPKPPNYQKENGKRKPLIVLRNDQYKIEENKLILKGLGKFKQLEVQFKGRIHLRGKQGRLEIIYDDVKRKWYAHISFNVEEKLIRGEWVKLPKEPLGNLSAGIDLGVNNLMAVYVENGESFLVNGRPLKSIVFYWQRKIAEYQSKLNKSGCKGSRRLKRMHEKAKLQAKHYINTVVRQTVERLYQLGVSRIVIGYPKEIARNSDKGRKQNFILSHIWRFNTVIQRLKEVSEEYSIQVVLVDEAFTSQTCPLCGKPHNGARLVRGLFKCPAEGLVMNADLVGAFNILRKVVRTITPSLG

SEQ ID NO: 45505 - protein, 383 aa, Thermococcus sp.
LRRQQFFNHERVDFNKTEKTVYEKYKGRIGSATVQQICRKNAESWKSFFTLIKKKKQGELPKWLKPKPPNYQKENGKRKPLIVLRNDQYKIEDNKLILKGLGKFGKLEVQFKGRIHWKGKQGRLEIVYDNVKRKFYAHITFHVQEKLSRNGWVKVPRQPKGNLTAGIDLGVNNLIAVYVENGEGFLVNGRPLKSIAFYWQKKISEYQSKLNKSGFKTSRKLRRMHEKAKLRARHYINTAVRQTVERLYYLGVSKIVVGYPKKIARNSNKGKKQNFILSQVWRFNYVIKRLTEVAEEYGIRVLLVDEAFTSQTCPLCGKPHNGARFVRGLYKCPAEGLVMNADLVGAFNILKKVVRTITPSLPGLTAGRGNGGKTLLEGVEKPV

SEQ ID NO: 45506 - protein, 513 aa, Bacillus sp.
MLQTYQTKLLNIPLHNGLSSDNYLQEYAAYFGRLERKLFVQSHVKGAASSSLKKTFMMQFGITARQFNSIRMQLDGKVSSFIEKRKLEIQELKSKTKYLQRIIDKKTAQKEQLHQKLQMIPQTNPSFLKMVKKYHNIKFYLHQKKRRLRNLGQKLKKLESDVQNKRIRICFGSKKLFHKQFHLEENQYKNHQEWRNDWLEARESQFLVIGSKDETYGNQTATYDLKNTLRLRVANHFADTFGKYIEFSSVIFPYGQEWLDKAKVPSMGFTRSGSPQKYYSSITYRFMKRKKGWYVNATVERETPKAGTTNDNGLIGIDLNAGFLAICEIDRFGNPIHSWTIKTPMYSRRKEQVLASMSDAVKAILDYAVFVHKDVVIERLDFSRKKTQLREMGPAYARMLSGFAYSTFQQLMESKAKKAGVKIKRVNPAYTSQIGQMKFMARYGLSSHQAAACMIARRGYHFKTEKPKYDMILSFPKNFDKHQSNFSNWRTITNHLKKTYFFQDKIELLKADI

SEQ ID NO: 45507 - protein, 179 aa, Vibrio sp.
LTEIPNPLFLLRAERNLRKKQKSLSRKVKGSRNREKAKLLVAKAYEKLTNARNDFQHKLSKRIVDENQALIFEKLKSPNMMKNGKFAKHIGDAAWFSFVQKVRYKADWAGKHFVQISQWLPSSKTCSCCGHKLESLPLAVRHWICPECLTLHDRDRNAGMNIRLAGIIDLKAEGFIVSA

SEQ ID NO: 45508 - protein, 263 aa, unknown
  TnpB Polypeptide
MLMAEDLPNTENRNICRLTLRYGQYHLAVPYGEKLPPQRENQARLVALDPGVRSFLAWYCADSVGKIGEGAYFRIQRLCERLDELLSRAAKAPSRKRRNMRRAAGRMRIRVENLIQELHRQAARFLVDSFDVILLPTFETSEMVERGRRRIRSKTVRNLLSLAHYRFGMFLRHKALEAGVAVVSVNEAYTTKTVSWTGEVLNNVGGSTVIVGGDGERMDRDYNGARGIYLRALGDTPALRAWLSACAATVADSRLSGNVRAAA

SEQ ID NO: 45509 - protein, 367 aa, Moraxella sp.
MKTLKLRIKDKHANQLNKIAGSVNYVWNYVNELSCKHLQKTGKFFSAYDLNTYTKGSGELLGLHSQTLQAINETHAKSRKQFKKAKLNWRTNRPDAKRKSLGWIPFKKSAIKYLSTRQTGKKALKSTIQLSLSKGQKLIIDVFDSYNLSLYQINTCELVQDSRNRWYACITVKDYPKTTCGKGSVGIDLGLKDSATTSNGNKLQIKQTQAWAKKLAIAQRTKNKQRVKAIHAKIKNTRLDLIHKFTTQLVKDNALIVVGDVKTTQFNSKKGKLAKSVYDAGWFELKRQLEYKCKHAGCRFEIVNEKYTTQTCSYCGDMSSSPKGRAGLRLREWTCVKCGTWHDRDINASRNILAVGLDRLGAGIPER

SEQ ID NO: 45510 - protein, 384 aa, unknown
  TnpB Polypeptide
LCPTVRQQVTLVSLLGSQCELYNAALEERRGAWQWEHRSVSYIDQCRTLTTLRADRPEVLAGGVTLCRGTLRRLDWAFAAFYRRCRAGQRPGYPRFRPWTRFDSLQWEDRNGWRIDPASRRLQLVGVGALKVRLHRPIRGTPKAITVRREGRRWWLTIRCVGVPAERLPPTGRQVGIDLGVNVLVATSDGALIINDRHAQRAAKRLARAQQNLTTKQRGSQHRHRAVERVAAVHRQIRNRRTDTLHQLSRRLVNDHDVIVHERLAVANLVRRPKPKPDGAGGHEPNGATAKTRQNRCIHDAGWGQLLAMIAYKAESAGRTVIAVDPRNTSRACADCGHVSAGNRRGAVFECRACGHLAHADTNAAVNILRAGRALQLDAAQSRN

SEQ ID NO: 45511 - protein, 391 aa, unknown
  TnpB Polypeptide
MQQPWNSCRQSAGDSINWWVMKLKNGESWPGTLMAKKTLKESRKHDPELNYVYNKLLQEVFFRLGAAMDAFFKRCKNAEKPGFPRVRPRHCFFTLCYPASYLKIEHGVLILPTGGRGKNKKYPDVQAKLTEPAPEEFGEVAISRDGRGNYYASFSHQRQEEEHESGQVVAFDLGIKQLAVGTNEQGRLYHVGGFKGSKWFNHQLDKIRSKRDRCKKKSRRYKHLSKVYKRISEKKRNKQHDSLHKASHLIGHKLVESTVVVGDLSQRQMVTKQHHEKNKARNRAVYNDWGLYTFIEMLTYKCQLYGKELVILDERNTSKMCSGCEYLQEMPLWKRTYKCPKCGLVMDRDENSAINILTRYLARLGPHTSSECGVLQEDGLDVEVTQASQVA

SEQ ID NO: 45512 - protein, 369 aa, Ardenticatenales sp.
MILTFKYRLTPTPAQRTALTRTLDAARWVYNKTLEVRRDSWAEQKKSMSKYDTHGLLPGWKAEYPFLQDAFSQVLQEAQERVDLAVKAFFRRVQAGETPGYPRFRGREGYDSFAFPQPGFGWKLLDNERVRLSKIGDVKLKLHRPLDGTLKRLILTRDRLGNWYACFVVEAEPRVLPPSPHITGIDLGLAVFATLAHGPPIDNPRFFRRDELDLARAQRQMATFDKDTPKRARAKRKVQHIHQRIKNRRNDFAHQESRKLVNRYQVLVFEDLNVANMVKNHSLAKSISDAAWSQLVREATYKAEWAGRSLVLVDPKYTSQDCSGCGERVPKALSVRVHDCPHCGLVLDRDLNAARNILARGLASIGINP

SEQ ID NO: 45513 - protein, 652 aa, unknown
  TnpB Polypeptide
MEKAKEKQPEFFKSTKTSIKSILKHPEINTKKINDVVFKAHKIVIHTLQFLKMYILHHYQTYSQSIPIIDKVLILNVMKVVCGEKHTKQGKPPKKETVALTDKLTSFYTEHYKPYTQPEQLDYEYMSNVLSYLCEDIMTMYENNIQLHYVDYVERFVNVVWKKKMLVDKIRKIVPTKKEREARIRHLEKELRKIKNDLLNVDSSVDYTSQPHYHKWITQQKKHILPDKEKFQKKSIYYDLKCKPMDYFPCMIAMMKQVENDEETISNVFPLRSSIAPGYIRLDTITLVNMLLRKEQGNKCDYSNQGNTKKHEDKIWKFFFRTEKKVFHKTDFSFHHMISTDGVGVSVLFLREDLVGKRLPNAKKGVSKELYIDELNDYSALRDKTIVGVDPGKDDLIYCVDDASKDANVFRYSQDQRRKETKMKKYNNIILGMKTQKIQGKSVIEYETELSHFNRKTLHIDNFKTYINEKNKVNNMLFGFYAKQLFRKLKFGRHINTKRNEQKMIRDFRKMYGNSEEVVICIGDWEQRKQMKYKEPTLGKGMRSLLRKNKYKVYLVDEFRTSCKCSKCDGGVCEKFMVRENPRPNKDDIRLVHGLLRCKSGCGSWNRDRNGSSNIYKIAYQAIYGLERPGYLCRTSNQSASTSTYNQNIHKV

SEQ ID NO: 45514 - protein, 329 aa, unknown
  TnpB Polypeptide
VLSSGVTLFRGTLKRLDRAFAGFYRRVGTAESPGFPRFRSAPRWDSLQWEDKSGWKVKGSDRRLRLRGIGEVKMNYHRAISGVPKAITLKREGTRWWVSVRCVDVPATPLAPTGREVGVDVGVINLVALSDGQLIKGNHFGARSSDRLAQAQRALSSKRRGSLRRRRQVEEVARLHRRVQQQRLNNAHQLSRRLVNNYDLIVMEDLAIKNMVGRPKPTPDPDKKGDFLANGASAKASLNRSIHDAGWGQLLSLLSFKAESAGRTLVIVNPRHPSLTCAHCGHVDAGNRVTQAAFRRCSCGHEDHADTNAAVNILRAGRARLASASVGSN

SEQ ID NO: 45515 - protein, 280 aa, Lactobacillus sp.
KSIIKTAGKRYLKIPKLGYVKTSKTGVLQNTKIKRYTVLLEPTGKYYLSLQVEISEPEKYSLTGKRVGIDVGVADLAILSNGLKYPSFDSSYFEKKAKIWQKKYSRRRHLVKLLVLQNKNKRVLCPRSLESFANWQKAQKSKAKYQAKAANQRRDYLHKLTTHLVKQYDVIAIEDLKTKNLQKNHHLAKSIANASWRMFRQMLEYKCEWYGKKLIAVDPKNTSRICSKCGYNSGAKPLEIREWTCSKCQTKHDRDINAAVNILHKGSTKLSGQGLAMVTS

SEQ ID NO: 45516 - protein, 321 aa, Lactobacillus sp.
MPKYLAKGQRHVFFVTNQNAKVKDDYLIIPKLGFKLKLTPHLKAIQRAAFKPVYGGYKAIVQYKTNRDIDYLPDNGRYMGIDPGVDNAFACVANIQKAPLLINGRAIKSVNQYYNKERSRLKALQARYHQLESIVDTQQGKKPVYRETKAMCRITAWRNRKIRQFAHKASKRIVDYALSCGANTIVIGNNKSWKRSSDMGRKNNQNFIGIPHKVMIDMIQYKANLAGISVIRTNESYTSQTSALDHEKPCWENGSQSRKRQGKTPINRRIHRGLFQSNNGRLVNADINGALQIIRKVFPKFSLDEGIEDAVLHPVKWSPLI

SEQ ID NO: 45517 - protein, 946 aa, unknown
  TnpB Polypeptide
MPKARKKKNSSFQTTITKSVFLYGRPNKEKLAVLRQMQNSYTALINRDIELLEKNPDIVLQLVKNDKKDPQMRKLEKAIRPEGINSAFCQNAFDAAVVQVSGHLNNIRLDLLPEGMGIFAQSKVLFAMSVMGCSKQKMEETMRQIEGTFYEDCAKTLHEMSEKEFSDLQLEFQERYASKSLEYRVPKLRFVSVPLDLRLMKIEQSTDTKMPYVIIITNPLKTRQRITIPIDTSSHFLHKIQNNKMAGTVLMQVRKGNLRIGWSYDSARQQPATTNCIGVDTGISDCFHTSDGRAIGSMSPVIDFYHEEVEPAFAELASLRNKKRKIKHFLRKHDLPEDVRRSLIKKMDRLERMIQTAEVPYRKKRCYYARLDHEIKKSVTTYVDSISKDTLTAIEKLDIKEFNKSRKINGMFSTFARGKLQRKLMEALNQKGCDFFEVAPDFTSQVCPVCSNLNAENRYSKGFCCTSMIGLRGDDLLLEQEAGIDIHHRLRLLDEAGIQQRQLFLRRGVLEKLRDEERLVEGGGGFGQRHRRVVHHQRLVAQHAVVERMPQLVRQRTHVGGAAREVGHHAADVLLVITGAERAAALALARVHVDPALVKRGAHHVAHLRAEAAEQVEQQRARLLDGVGAAGVADRGEEIVERQAVLVAEQAALRLEILAQLRQRLADGRPHRVERLFIHAEVSERHIQHALVAAQLRHGFALGLDVVEAVAHRDFDFLIRGQLGVVGLAAHVRVRVVGHRAGGGKRNCLAVVIDRQRRIQLVAKLGERLTAGKLHLHHRLFEGFRKLMLGVFGHLQQREGAGGERFVRMNQLAQVLQLGEIATQRVVRLLHQHGGAHQRRHRGVGGLVLGVHGKRQIDHQHQALKGHAQRFDLADQRGQLGGLVLARRGDGFGQRGDGRIQPAQIRLKRRIVKILVKNGQIPIRLHGVPPFSLRASSPVFLLVLPL

SEQ ID NO: 45518 - protein, 410 aa, unknown
  TnpB Polypeptide
LEEKLNSNDNKIYRSVKIRLLPTKEQEILFWKSVGVARWSYNYFLSESYRVYQEWLADSSKPKYISEGEVRKYINNVLKKTTHTWLKEVGSSVMKQGVKDANIALQGFFKHNKGYPKFKSKKRSKPSFYVNYESLKRTPNGFQGEKIGVVKTRELLPKIPNGDKYRSPRISFDGRFWYLSVGYEVERVDTKLSDTRLGIDLGIKELAVVSNQDGTMVKKYHNINKTYEVKRLERKLKREQRKFSRKILMNTSHYANNGRPIYSKCLELCKNIQRQKRIIQRLYRRLLNIRTNYLHQTTTEIVKTKPFQIVLEDLNVSCMMKNRHLSKSLMCQKLYEFRRQIEYKAELYGIEVVIADRWYPSSKLCHKCGNVKRDLKLSDRTYRCDCCGNVVDRDINASINLANYNIGNIK

SEQ ID NO: 45519 - protein, 351 aa, unknown
  TnpB Polypeptide
MILTYRYRIKDRSAKKTLRRHAKACNVVWNYCNEVQRDIEARYRDGSPKRKWPSHFDLQRMTKGTSKDLGIHAQTIGSVCEQYVRSRDKAKHSLRWRGSRALGWIPFQAQSRQVSANTITYLGKVYHFWQARRPLPPTAKGGAFVEDARGRWYGCFHVEVPDLPMGNGEIGIDLGLKTLAACSDGTSVPALRHYRQYEWALATAQRAGNRKRAKAIHAKIANARKDHIHKATARIAADNRLIVVGNVNAAQMARTRMAKSVLDASWASFRSALRYKASRHGATYIEADERWTSQLCSTCGARCGPKGIAQLGIREWTCGECGAVHDRDTNAARNILALSAQRRGDESRRAA

SEQ ID NO: 45520 - protein, 507 aa, Streptomyces sp.
MCTVCSDCMTGGLKVGQYSGGVYDLGLHVVWCPKCRRRVLGGRVAARLRELIEVSRTSRAGCPRCGRRGSSSPQPAPSRRTRWRSTATPSGNAPGRRNSRRRGPTVHRAYKFLLRPTVRQAQALGEMLRDHCALYNGALQERRDAYRHVSKTSITYRQQSAQLKEIRAFDPGCQGRWSFSSQQATLRRLDKAFAAFFRRVKAGEKPGYPRFRGVNWFDTVVFPRDGDGCRWDSTPHDSVTRVRLQGVGHVRVHQHRPVKGRVKTISVKREGRQWYVILACDNVPAEPLPATGAVCGIDMGVTHFLTTSKGVHVPNPRHGKRTADALADAQRALNAFPRRKRQDRTAKHRQAVEKVAKLHRKVRRRRTDHAHKTALALVRDYDRIGHERLNIANMVRTPKPKPDPERPGAFLPNGAASKAGLNRSILDAGWGVFLGILAHKAESAGRVLIPVDPRNTSRTCPTCGHVDSENRDGEKFQCTACGHTDHADRVGAWNVALRAGLVLPDVA

SEQ ID NO: 45521 - protein, 333 aa, Micromonospora sp.
VLEVNGWRRRRRDVPLTGYQALCRELASSGPGTFGELDSVGARSVLRRFSDAWFAAAKARKDGDVSARFPRRRRALMPVRWHHGTFTLDGRRVRVPTAQNSPPLWVRLAREVPYPVEQVRSVTLLCEGGRLFLDVTAEVPVATYPPGEGPDPARVAGVDLGIIHPYAVASRDGEGLLVSGRAIRAEHRMHLADTKTRRRSVSQRAPKPGQKGSRRWRKYRRRARLVEGRHKRRVRQAQHEAARQVVSWAVQQRVGVLHVGDPRSVLDTDAGRRHNLLLRQWQIGRLMQVLEDKGHPGRHHRPPRQRTRHLLHLPRLSTTGTETPRPDPDLPAL

SEQ ID NO: 45522 - protein, 694 aa, Blautia sp.
  misc_feature (376)..(376): Xaa can be any naturally occurring amino acid
MQKCFFSTYTKPDKMASIKNDMEYYNSMKRYAFSLIVKQGGDGPVPGGTSIHNHLKEKFNVNDHFANAAKNEASAAYRSAMECLQLNAETLESRIRQETKKLSSEQKRLDHLKKEKDSLINRSRKLKSGSKKKLKFRSYRGGNETEAKDGTFRVRKGRKVTVYENQYLFEVKYLDPEIKRLKQRIHNIEQRKTRHEHELLKVKAQLDSGHPSVCFGSRKFFKQQDTVYAGRHEEWLKKFRSRRNHGMTIPGRSGIIQGNCVVRYDTGTKTLFYDSMTRIPVKTKSRKTKKEAVLRAVTYEIDRVVFPYGQDLVNEALNSTDRKAVAWRFEDAGNRILVKCMVSIDQGLSRKNEYYADGCIAFDTNVDHLAVAETDXKTKNRKAKKEAVLRAVTYEIDRVVFPYGQDLVNEAVDNTDRNAVAWRFEDAGNRILVKCMVSIDQRLSRKNEYYADGCIAFDTNVDHLAVAETDRHGNLIYHKVIPFDLTGKTSEQREQILSLALEKVYKRARERYKPVAMENLKDIKNESMYGNKEVNRKLSEFAYTQITRLAESKSYKYGIGLCRVTPAFTSQIGKIKYMRHYGISIHTAAALAIGRRAMGFKERPPKDIRHLIPQANKDRHHWSQWRFLARYLKDQSPYKFYRKIPYSEFECITDMNKYMKEEFCNGQDRNCFLKKLTVILDQMAARKQGNATTI

SEQ ID NO: 45523 - protein, 390 aa, Sporolactobacillus sp.
MVLKGIKIRLYPNQEQRHYFSRAFGCTRFVWNQMLDMLNERYKNNSKLKMLSNFKMDTLLVPLKAEYPFLKEIDSSSYQIVTGNLYKSWKAFFNDKTYSAGKPKFHSRKYAKQSYSTKSTVKAIAKRYVKLPKVGYLKSSKTGQLVHTKIKRATITLEPTGKYYLSLQVECDNQVLPKTNRAVGLDMGVADLAISSDGMKYAAFEARKLEKQVIQWQSKYSRRRHLAKVKVSFDQHNKALSPLGLEDFSNWQKARKCKAAVQAKIAHQRKDYLQKLTTKLVKQYDVFVIEDLKTKNLLKNHRLAKSISNASWRMFRTMLDYKCRWYGKRLVIVKPNYTSQICSSCGYHSGKKPLEIHEWTCTRCHTHHDRDINAAVNILNQGLKAIEARD

SEQ ID NO: 45524 - protein, 518 aa, unknown
  TnpB Polypeptide
MPSVSRAYPRRPYACFTEDGKGIDLHDVLEEVRVEAVECARQAVKHLTWKNMARVSDYAGMKAAEAGRRMGVQLSPGGRRRGRSRFERMVREYAVSQLRAWRERFLACKGKSDKYVSAGWRRTANLCPPASLAPRLPLSATDRQYHCVSVKGNTTVLRMVVGGCWVSFHFKTPSRFLDTGVRPIAPDIIVDAHGQVMFNWFAEIPVERTEFSSRYVVGVDVGRNNAVFSTVVDVTTGEPVEASGGTRRIKTLENRIARTENQIRSLHRVGRHEEAAQHRAGLANRRNELAILVGQEIADLSYRHNNALVAVEDLSGIRNTMSHGRWVRGQMVQRTVDMVESNGGRVLRVNPAYTSQKCHRCDSQMDVRDSRRPRCLVCQVTWDRDENASINIAKRARHSKACQTRKRHASKTRRRNSKGVTRPLKHPLRKTGPTPKAPQNRPRRSHMVEHSKRFRYEKHKGGVTTRTMCAVGWSPVAMTGVSVPAVGSFCEDVQTKSRTTIPYSAGGGVTVSCGDTKV

SEQ ID NO: 45525 - protein, 182 aa, unknown
  TnpB Polypeptide
MHELYRDSNGKEPAYPGYYRNAEKKLAREQRKLSKMQKGSNNRNKQRLKVAKLHEKVSNQRKDFLHKQSRQITNAYDCVCIEDLDMKAISRSLNFGKSVSDNGWGMFTTFLRYKLEEQGKKLVKVGRFFASSQTCSVCGYKNAKTKNLALREWDCPQCGTHHDRDVNAAVNIRNEGMRLVNA

SEQ ID NO: 45526 - protein, 458 aa, unknown
  TnpB Polypeptide
LITLKIKYSVENKEKDRILEYIKNYNSVFNCLLNYFQDKNKVLSTKDSFVFMKSLNNIFIDTIFQNSALYDAKQTFNKFGNKKLVFGGKRLFLDRIKNLISKEEFKLKRLRPLQVVGAANNKGNCKFQILYENKILFKPSRKEHFVLNLEGVGKNYQKKLKALILAQEKRELPITYKLDLEYVYLTFDESAIEKVDIKLKLKDRIFAIDLNPNYIGWSVVDWKGELSYKLIKSGLISLKSLNGYENNLNVSSDSPEKKYITNKRKFEIIEIGYELAKLANHFRCEIFSLENLNIKSSDKSRGRNFNRLVNNQWNRNLLVHILEKNCKLYQIHFQKVMANYSSFLGNLVYREEKLPDPCLASIEIGRRAYEFYHQYVVKDKNKEKNIIFDKLENVKDRIAKSLEEFGYSDTFESLSDLYYKLKKRKCNYRFSLEKALKAHRKSFSSLKHSKSLCNFVTF

SEQ ID NO: 45527 - protein, 372 aa, Exiguobacterium sp.
  misc_feature (276)..(277): Xaa can be any naturally occurring amino acid
MRRTHHDLRRGGGTNMLKGYKYRLHPTPAQEEFLIKTIGCARFIYNKLLEDRIAIREEAKAGNGTRRKPATPASYKPLFPFLAEADSLALANAKLNLDAAFAKFFAGTGGFPVFKSRRRSRASYTTNNQHGTIRIEDGKVRLPKIGFVKFTQHRPFDGIIKSATVSMTRTGKFFISILVNQDEEKWIPVKSKVGIDLGLEHFAVMTNDAMVSEKIDNPRLLRKSEAKVKKAQRALSRKMAGSRNREKARLILAKRHEKIANQRKDFLHKLSRRIVXXVETLKSKDMMQNHKLAKSIGDVSWYEFVRQLEYKSNFYGRTLIKADQWFASTQICSSCGEKGQRKTMDVREWTCACGAHHDRDMNASINLLMLAN

SEQ ID NO: 45528 - protein, 403 aa, unknown
  TnpB Polypeptide
MLKAFKYRIYPNNQQIQILNRHFGCVRYIYNKGLETKIKEYESTGKSSSCFQLTTGMLKQEKENNPWLKNTYSQCLQMSLRNLDNAFTSFFREKKGFPKFKSKKNPVQSIQYPQNIKVNFENNKIKVPKIGEIKTVFSREFEGKIKTVTISKTSTNKFFVSILIDNEIEIPKKHKIEEKSTVGIDLGIKDFCITSNGEKVGNPRFLKSKIDRLKVLQHRKDKKKRGGTRRYRLNKKVAKLHEDIRNSRNDFLHKLSTKLISENKTICLEDLNVKGMMKNHCLAQSISDVSWSKFVEYLNYKSEWYGNNIIQIGRFEASSKTCSNCGWIKKDLILKDRVWKCESCDKGHDRDLNAALNIKKFGLIQHSKYSGLGQPGVPVEASSVEEPMKRKESPCGWVVQYID

SEQ ID NO: 45529 - protein, 670 aa, Rhodococcus sp.
LPSGTIVVGSARPDLRGVASCRVSSSGSVGRSGRLGRACGGRNAEGVVWVCRRRPSRAVPAQGGKHTTLRRPLADPSMDRRPPVEDRDRLAGSGSCASTQCCRCAVVPCLCFNDDGVADDLGARYDRGDELPVRPPDRAARCTLACRSCRGRCGGPVVTPTALLADLGTQDPAPGHAANSSRTVIRAFVYVLDPTPEQASVLRSHCGAQRFAYNWALAQVKANLDQRIAERSYEIPDAELTPTMSWSAYRLRKHWNVVKNDVAVNSDTGQAWWPENSKEAYSSGIANCAAALSNWSDARSGKRKGAIGFPRFKGKRAMLSCRFTTGSFGLVTDGGDRRHVQLPRIGAIRTCESTRKLARKTIAGTARIRSATVSFRRGRWQVSFSVEITLPARALPPTTGTAAAVGERAVGGSVVGVDVGVKHLAVLSTGEVIDNPKHARKQAKELRRLGRRASRQVGPDRLTGQQPSRRWRRTQEQIRAVHIRIANCRRDHLHKLTTRLVRDFDTVVVEDLNVAGMTRSGGAYKRGLNRALQDAAFAEIRRELTYKCEWSGTCLQVADRWYPSSKTCSNCQVVKAKLPLNVRVFTCDTCGFRADRDHNAALNLAALAAVVDGGASSASCGRDVKDARQKPSIRPATRWADGIAAGTPPGGERDRGNPDTHADCTKRNPA

SEQ ID NO: 45530 - protein, 525 aa, Okeania sp.
LKARYKYRIYPNHIQIIKLNQLFGCCRYVWNSALAHCNQLYTNGHKRPSYVDLTKQFITQAKRELVWLKEVASTPLQQSLKDLDQAYRNFFNSCTGKRKGIKVKPPKCKSRKSRQAVRFVGANYKIGQDKIYFPKVGKIKIIWSRPLASNPSSVTIIKDSAGRYFASFVVETCAENLPKTENSIGIDLGISTFATLSNGEKFKLSLPLKKNLKKLGKFQRKFAKTELGSKRREKARVRVAKLSFGMLRKHAKVKDISFPSECFPTGCYANANGMLRKRTDFLHKLSTDLAINYDTIVLEDLNVSGMVKKRCDPATTPVASGRTPRRRQSQAVRPRDDASRKRCDPATTPVARERRPREGTCTKRGNADQERERAPRDRKLAKAISDLGWRQFRTLTEAKCEKYGREFRTISRWEPTSQKWSNCGFKGGKKELNVREWTCLNCGTFHDRDINAAVNILEAVQPKTKVEIVKGTVAKNPVQLSLFNEVAEGQRSIIYRTRRKRQTEKPADSNDVSTHPESFLQRASV

SEQ ID NO: 45531 - protein, 376 aa, Methanobrevibacter sp.
MINKSVKVRLYPNRKQKEQFQNNFGACRFVYNHILDRLKKLYQYYPGQYRLNIKLINTFLNQIKDENSFLKDVESTSLQQSSRDLYKSYMNFFKNPKTRFPRFHSKKKTRLSFRQTVTANLVQGKYFKLRKYGKIRYRTSKEYINLLNNSNVKINSITVSCDNGEYYAIVNIEIVNDVLFDFTGVSVGFDVNSNRNGWLVSSAGDKFRFDISHENQMIKYLNRQLSLKQKGSRSFNRLQRRLWKYYNKRTHKLYDYIHKLSKCIVEDFDTVVFEKNLGSIKVLIGGEQNSVFPLMEFIRLLEYKFGWYKPDAEGVVFVDPKYTSKTCNECGYIHNNLDVNTRNWICPECGSSLDRDINAAINILNRWDNGDCLVKV

SEQ ID NO: 45532 - protein, 375 aa, unknown
  TnpB Polypeptide
MVVTKGIELRLDPTKAQKVYFNKCIGAERVAYNAMLNTKITLYRDYGVKNFHPNWSSLKDFYPWMKEVDSRCLNYAKIEVTTAYKNWFKSLKNGGNTGYPKFKKKEHKGSYHNTSMPSTPDRLFKDNKIFIPVIKWVRFRRYKDLGFTRIKKIRNLTIKRTNTGKYFVSVCCDVEIPEYTHTGNRIGIDLGVKDLIITSNGEKLENKHLLKSSEKHIKHLQKVLSKKSKGGKNREKARIRLATAHEKLGNKRKDYLHKLTTRLVRENDIICIEDLNVRGMLKNHSLAKSIGDCSFSMIRSMLSYKCEWYGKKLVVIDRWAPTSKRCSCCGHVMPSMGLNVREWVCPNCNTYHDRDINAAKNILDEGLKFLDVGSE

SEQ ID NO: 45533 - protein, 148 aa, unknown
  TnpB Polypeptide
LSRCVRGSHNYELQKKKVARCHEKIRNQRRDHLHKLSRKIADSYDAVAVEDIDMKAMGQCLHFGKSVHDNGYGMFREMLDYKLAWKGKKMVKVDRFFPSSKKCCQCGRIKKELKLSERVYHCVCGNEMDRDRNAAINIREEARRMLTA

SEQ ID NO: 45534 - protein, 268 aa, Photorhabdus sp.
MKLLQAFKFQLRPNGQQARDMRRFAGACRFAFNRALAHQNENHEAGNKYIPYTKMASWLIEWKSDPETQWLKEAPSQPLQQSLKDLERAYKNFFQKRAAFPRFKKRGQNDAFRYPQGVKLDQANSRISLPKLGWIRYRNSREVVGEVKNVTVSQSCGKWYVSIQTEYEVSEPQPESTSMVGLDAGITKLATLSDGTVYQPVNRFKASQRKLAVLQRQLSRKVKFSANWQKQKRKIQRLHSHIANIRRDYLHKTTTEISKNHAMIVIET

SEQ ID NO: 45535 - protein, 121 aa, unknown
  TnpB Polypeptide
MVKNHHLARAVSDVGIGIAIRLLFEKAERSGKTVVKIDRWYPSSKMCSHCGHVVEKLPLSIRDWTCAQCSTHHDRDENAAQNILAAGQAVSAHGDGVRAKRTTVRGACCRRSASLQGAAYA

SEQ ID NO: 45536 - protein, 389 aa, unknown
  TnpB Polypeptide
MKKLKKAYKIEINPTDEQKSKIHQTIGVSRFVYNFYIAHNKEVYEKEGKFISGMEFSKWLNNEYIPNNQDMKWIKDVSSKATKQAIMNGDKAFREFFKKSKGFPKFKKKKNQDVKAYFPKNNKTDWTLERHRVKIPTLGWVRLKEFGYIPINSIVKSGTVSQKADKYYVSILVEEDNLKISKPINEGIGIDLGIKDFAICSDKKIYKNINKTSTVKKIEKKLKREQRKISRKYESLKIRNKKGKGEATRQNIQKQVVKVQKLHQRLNNIRTDYINKTISSIIKQEPSNITIEDLNIKGMMKNKHLSKAVASQKFFEFKIKLTSKCKQNNIELRIVDKFYPSSKTCSCCGSIKKDLKLSDRVYKCKCGLIMDRDLNASINLKNAKKYKIA

SEQ ID NO: 45537 - protein, 450 aa, unknown
  TnpB Polypeptide
VRWRFWPGLIETLSPNLQRGCPVVHGGEELRTAGLPWFYGRSCHPVRVRTAYRCRAYPDEAQQQMLTRTFGCVRVAWNRTLAERHRLYRIEGKSLSYAASDAALTVMKKDPELAFLNEVSSVPLQQALRHQHKAFGAFFAGRARYPRFKSRRGKQSATYTRSAFSMRNGRLRLAKTSAPLSFAWTWPDADVAGLDPTSVTVSRDPCGRWYVSFAVDVPDPEQLPATGAVAGVDLGIKDFAVTSDGGKIPNPRSVARRERNLARYQRRLAHCQKESANRAKARAKVARAHRKARAARADFLHRASTRLVRDYDVIVIEDLNVAGMVRNHSLAKAVSDCGWGTFRRMLEYKAARAGRHVIVIDRWYPSSKTCSACGHLLAELSLKTRTWQCPSCGTRHDRDVNAAKNILAAGLAVAACGADVRPQGSSLRRSAVKQEPRPARAGIPVPQGRE

SEQ ID NO: 45538 - protein, 622 aa, Actinoplanes sp.
MPRCRGASAGSVMHRTARIGLRLTRAQRQRCFGLLRSAGDVWACVLEFNGWRRRRGDAPAAGYQELCRLLAQSGPGTFGELDTTGARSVLRRYSDAWFSAAARRKAGALEVRFPRRRRALMPVRWYHGTFTLNGCRLRLPVARGCPSLLLGLDRLVPYPADCVRSVTLLFADGRLWVDVTAELPVTTYPAGQQPDPDRVAGVDLGIIHPFAVATRDGQALLVSGRAIRAEHHLHLADTKARRRATAAQAPSKGQRGSRRWRQTRRRARLVEGRHRRRVRQALHEAAKTVVGWAVEHRIGTLTVGDPRGVLDLPAGRRHNLRLRQWQIGRTLQILQDKAALAGIRMHLVDERGTSSTCPACGKRISKPSGRVMLCRHCRFAGHRDLAAAFTHSGEESLAHICGRGSTTSPELDPVSVRGHRTSALRRRQLVGGVQRLRRPAHRVHVFADKVHVGRAAFAVLVRVDCLQHLPERSRALRQGRRHLRGQRELFGHLGRCHAEDPGHPGDDSGHERRVGRRPERVGHVLAEPRPGQHVQHVLFGGPADLVEDHQHRPLADVRQPDHHDRLLDRRHPVRVPGRHRIAGSKHAQGQCRVARDDRDDAGQVGVGRAQRRHQFQPPQPRG

SEQ ID NO: 45539 - protein, 401 aa, unknown
  TnpB Polypeptide
MIMSDYVKKTIKVKLDVAPENKKKLLETFKQFNQACNKVIEAGWIEEDRKNYNKMELHKETYREIKDKTDLTANLVCEARNRGAEAIKQAVIKWSNGKKASKPHIHKYSSIIYDKRSSTIKNRYCTLSTIDGRIKAEYLLGNYQKKHLDDKNYEKRTATLNYNQEKDEFYLHITIRRPVLYENGENTLGVDIGINNLAVTSTGKFFGKEVKWKKNRFFRTRRNLQSKDTRSAKRTLKQIFGRENRYTLDVLHRISRRIVEEAQKHNCQVIAFEDLTDIRNKTEKYDKRFERQLHSWGFRKIQEFTEYKAKEQGIETRYVKPKNTSQKCSKCGHVEKNNRNGNNFKCRKCGYEVNADYNASKNIGLKCLKETLPSDKSSDGMSHGQLALKSEMLNPTTASSV

SEQ ID NO: 45540 - protein, 477 aa, unknown
  TnpB Polypeptide
LKWRFRDKESLGIMARGKRKRDKRWMWVAKPGDKIVVSRTAIMPSKKLSRREFRALEEIVNIYTRMLENALPHASRNIIENYYRLENGKYRELRSIYLDIPSHYVHGVCQDAVERVSSLRRNRARQYSREIFNEIVKHLGLGKKDLRGKRIRRYLWKRSWEIARDQVDLEMNNGILVSRINSVSLWLVNNHVWKPINPMKIRINGVENIFFTSVAVNTHRGWVHLDLEPSKEFYKLLARGFKPTSHAKIKLDRRNRRVIFYLSLEKEVEIYKPGDIKPIDVNKNSVATLYEAFAIILGTDLAKTTLGYSYRKEGIQRRNGSGGREAGKAMKKLKEGEKKRDYRMKTASLIVRDALRMRGVIVIERISGDDIRVMIARYKNKQLRHRIYQSALKGELNTIIDKAREYGMPVLMVDPRNTSKICPIHKTVIEYGEDRIGVCSKGGERWHREVAALINIYLKALEALYEGNAQKGFEVSS

SEQ ID NO: 45541 - protein, 397 aa, unknown
  TnpB Polypeptide
MASGGEGLLTISIGVRVSPEPGAIELLRRYNTALNYAINKILRLNLKKIGEVHSALYRELREWFDLQSRVAIDCYRDALANANAWRNNPRRGRKPRVRKLSMLLHPGSGYRVKEGYVEIIGGVKLKIIGWDRRYDGYENGEARLVYRDDKMILWISKRIPKPKPYQPRDVIAIDVNEKKTVDGDHVINGERDTEIDEAHRWKKLAEDLQKRYSSTRYPAWRRRKAILNRIRSYHRKARNILENWARKTSLRIVELSKKLGHAVSREDLTGLINSLRKIKNKDHRTKLIIMGYSRLVKWIDWQAEKHGVPLAIVNPNGTSSECPKCDSKLEENGYRRLRCPRCSFEADRDVIGKLNIRKRALKMLKIKVIPGGSLTTPTAPQMTDVNPNRWGEPMNLQ

SEQ ID NO: 45542 - protein, 543 aa, Streptomyces sp.
VGEVRSIEAPFVVSGLSGVAVRTRLKGLSPGDEKVLRLAGGHLGSLASRDLRARCRDGLAHAGQAWAVRKRELTPASSSRWAGGITKATHDQWALARRCQLAHIHTLEAGIRTIEARLALPVGQKGTRKAPGGYRSRREWHAKSRRLRVLQDRLAAVRADREAGIVHVVRGGKRLARARHHLEGAGLTESAWRGRWEAERWFCQADGESGKRHGNETIRVSPEGEVSIKLPAPLVYLANAPHGRYVLACRVAFAHRGSDWADRVAANRAIAYRIHLDTGRGRWYVTASWQMPPTPTVPIEAALAHGVIGVDMNADHLAAWRLDTHGNPAGSPRRFFYDLTGTAGHRDAQVRHALTRLLHWAHACGVTAIAVEDLDFAAEKTREKHGRRKRFRRLVSGMPTGRLRARLASMCDATGIAVIAVDPAYTSRWGAQHWQKPLTSTTRKTTRHDAAAVAIGRRAQGHPVRRRTAPPPHDRSDRAGHRTVQAGSGVAGREGTRPRIPGPRTRSVPPGRGANAGNQNAQHRPGRSVEHETWQQDSLPLGL

SEQ ID NO: 45543 - protein, 388 aa, Glycomyces sp.
MCSVNVTTRHRAYRFRCYPTPVQAEQLARTFGCVRLVYNKALDYRHKAYDRRRESIGYTQTSTLLTKWKQRKDLAFQNEVSSVPLQQALRHLQKSFSGFFKGHTEYPRLKKKRVLAGSAEYTRSAFKWSCGQLTLAKQHEPLKIRWSRRLPVGAAPSTVTVTRDASGRWFVSLLAQEDIPALPERDEVVGIDAGITSLLTLSTGEKITNPRHERQDRDRVAKRQRELSRKQKGSANFRKAKVKLARAHARVADRRADHLHKLTTRLVRENQTIAVEDLNVHGMLANHTLARAIQDASWSTFRRMLEYKADWYGRNLVVIYRFLPSSKTCSVCGTLVESMPLSQRTFTCPDPTCGHVEDRDVNAAKNILAAGLAERRNACGDGVRHEPS

SEQ ID NO: 45544 - protein, 431 aa, unknown
  TnpB Polypeptide
MSPGVRGYKTELDLNHAQITACKKHAGCARKAFNWGLTRKQEARAAGLPMPNAKQLHKELNALKASEFPYMYEVSKCAPQEALIDLDDAFKHFFRKATLKKRGQFDGNCGYPKLKSRKKGIGGFRLTGAIHVHEKSIQLPRLGTLRLKEKGYLPTNAKIGSATITECAGRWYVSISVHQELAEPPPAAGPVIGVDLGVKRLAVVSDGREITNPKAMRTHLKKLRRLSRWHSRTQKGSANRKKAHQKLARMHARIAHIREDALHKATASLVAKNKPPEKRPAVIGIEDLHVSGMLKNRKLARAIADVGLSEFRRQLIYKAQDAGVQIQVVSRWEPSSKTCSCCGWYNPDLTLADRVFVCQECGLVIDRDLNAARNLELLAYREWMSTASYAGFDGSGQDGSGLLETEGETALVERATEPVPMWLVHKSQSFG

SEQ ID NO: 45545 - protein, 230 aa, Oscillochloris sp.
MKLTAQLKLTPTPAQADAVRRTLEAANAACDTISRTAWDTQTFRQFALHTLVYYGIRADFGVSSQLTVRCIAKVADAYKRDKKTQRTFAPVGSVAYDSRILTFDVAASTVAIWTLDGRQTIPFVCGARQRRLLATQQGESDLAYRDGQWYVCATCAVQTPAPQVPTGVLGVDLGVTNIAVDSDGEIHSGKAIKNIRYRHRSLRNKLQRKGTRGSRRRLRKLAGQERRFAT

SEQ ID NO: 45546 - protein, 382 aa, unknown
  TnpB Polypeptide
MIVNKAYKFRIYPNKEQEILINKTFGCSRFVFNHFLAKWDNAYKETGKGLTYNSCSAQLTQLKKELTWLKEVDSIALQSSLKNLADAYSRFFKKQNNKPRFKSKKNPVQSYTTKHTNGNIAIEGNKIKLPKLGWIRFAKSREVEGRILNATIRRNPSGKYFVSILVETEVQELPKTDSAVGIDVGLKEFAILSDGTIYSNPKFFRRLEEKLAKEQRVLSRRKEIALKQNKPLYEAKNYQKQKRKVARIHEKIANARTDYLQKISTEIVKNHDIIGVEDLQVSNMLKNHTLAKAISEVSWSQFRTMLEYKAKWYGKQVVTVAKNFPSSQLCSCCGYKNKDVKNLGLREWECPNCGTHHDRDLNASINLRNEALRLTAGTAGIA

SEQ ID NO: 45547 - protein, 422 aa, unknown
  TnpB Polypeptide
MILTQKNKLYLNEDDKFIIDKLSYHSARLYNSCNYIIREYYENNNSFLSYNEQYHQIKFNEHYNLLITDSSQQIHRIVDRNYKSFFSLLKLKQKGKYSNQIKIPNYLKKDKGWSIFVAGRSARIKNGKVKVGLSNKFREMYGIDKKDIIFDLPKNINIKKLQQLQIKPIYGGKEYEILFCYEKETEIKQLNHKHFLGIDCGLNNLLTTYNNKNKKPFIIDGKPLKSINQHYNKTKSKLQSAYYKNNIKDKNTKKFIKLSEKRKNIINNYFNQTVNKIVKYCLVNDIGNIVIGNFKEIKQNINLGSKNNQNFVSIPYGILKRKLESKCDYYGIKYILQEESYTSKCSSLDLEKIQKHEEYVGERIKRGLFKTKYNKLINADVNGACNILRKYKSKSGSDLSDTDVSGVINHPVRFNPTKSINL

SEQ ID NO: 45548 - protein, 428 aa, unknown
  TnpB Polypeptide
LLAKESPSAFRRGIEFGYCLLIIILNKRCKFCKMLYLCIVLKAFKYSIRPTKEQTILLNKHIGSSRFVFNLALECKQMAWVGSKINLSCFELHKQLSDLKKECEWLKEVNSQSLQQSITNLDRAYTAFFKGQNNFPTFKKKSNGGSFNIPQNVILENNKLIIPKFKNGIEIVLHRTIKGEIRQATISRTPTGKYFVSILCETGEAIKVKAKIKESTTIGIDLGIKTFLVTSDGQEFDNPKFLRKAQSRLRFTQSKYSKYKGKRTKHRLAILHERVANQRKDFLHKTSTKLIRENQSVAIEDLQIKNMVKNHCLAQSISDAGWGTFVTMLEYKANWYGKNILRIGKFEPSSKTCSCCGSINKELALADREWTCKSCGTLLNRDVNAAINIKSFALKNHSSVERRLKNRNELSTMVEVLTYEATSPLGKR

SEQ ID NO: 45549 - protein, 120 aa, Azotobacter sp.
VVCAETLAVKNMIRNAKLSKAIADAGWGELVRQLEYKGGWAGRQIVQIDRWYPSSKRCSCCGHTLERLPLDVRRWSCPECGTEHDRDVNAAINIKAAGLAVLALGENVSGMGRVSVSCSR

SEQ ID NO: 45550 - protein, 278 aa, Azotobacter sp.
MTKRAYQYRFYPTPEQAELLARTFGCVRFVYNSVLRWRTDAFFKEQQKVGYTQASARLTAIKKLPELAFLNEVSSVPLQQCLRHQQAAFKNFFEGRAKYPAFKKKRHRQSAEFTSSAFRYRDGKLFLAKCDEPLAIRWSRTLPGEPSTVTISRDSAGRYFVSCLCEFEPETLPVVPKSLGIDLGLKDLFVTSKGERFGNPRHTAKYASRLALAQRRLSKKPLGSKNRAKARRKVARIHAKISDCRTDSLHKLSRRLIINQALKFTPWHSVLQDAGNRP

SEQ ID NO: 45551 - protein, 429 aa, Lentzea sp.
LIEHAFDTVIGVKLVVQVKLLPTPVQAAALAATLNACNAAAVHTSMVAFDRNVKSRNELQKLCYREIKDQFGLSAQPAVRVVKKVVDAYTALHGGIRAGNLGGETSRRRVKAESKPIGFRATAAQPFDDRCLSWRYDEATVSIWTTAGRLKDIGFTGSADQLATPRAHRRGESDLLFRDGMWFLIATCEMPEPEMFEPTDWIGVDRGITNLATTSDLDDFQGRRLQRYRRWHARKRAQFQTRRTASANRRLKKRARKEARHATCVNHRIAKDIVAVAQRTGRGIALEDLQGIRDRVRLRRHQRATQSSWPFQQLEQHIAYKARRVGVPVLFVDARYTSQMCPRCKHTACSNRPARDFFSCRRCGLAGPADVVAAVNIRDRARRAWVFVNMPVPMAVRAVGGCDPHTTASGGRGTRLGLREPSASPVLQG

SEQ ID NO: 45552 - protein, 372 aa, unknown
  TnpB Polypeptide
MQLTVTAKIKINPTSAQIILLQGTLNAYRKGCNFVSDIIFNTKELSQSKLQKIAYNDLRSNFSLRSQMSQSVMKTVIARYKTLKSNKHDWTKIQFKKPEYDLVWNRDYLLTKGIFSINTLDGRIKVPFDIKGMERYFDNSWTFGTAKLVHKYGKFFLHIPMSKEIDMVSDYDINSIVGVDLGINFIAVTYDSKGKSIFFNGRKIKAKRSYYKYLRKQLQQKGTASSRRRLKRIGQRENRWMHDVNHQVSKALVNQYGANTLFAIEDLAGIRNATERVRVKDRYETVSWSFYQLRQMLEYKVLLNNSKVIAVNPKYTSQTCPKCGHTERSNRNKKAHIFCCRNCGYKSNDDRIGAMNLQRKGIEYIVEVLIGV

SEQ ID NO: 45553 - protein, 384 aa, unknown
  TnpB Polypeptide
MKIAYKFRLLPTKSQHATLSQILEDQRQLYNAALQERIDCYKKTGKGRSYIDQCKAVTQWRQQDDVIATIPVNLQRYTLKQVDEAYKAFFRRLKTKKGKAGFPRFKGYGRFNSFGFAEFSGIQLKNNRLHFRGLPGSLRIHFHRELPCTKILSCSFRKTTKGWYVSLNIDVETEELREPVKRVGVDLGISAFAAYSDGKVISNPRITKRYERELRKKQRALARCKKSGNNRKKAKLKLARLHTKIANTRDTFLHQVSASLVKQYDLIAIEKLNVKGLTKGFLSKEVHDVSWGTFCNYLKYKAEKAGVSLVVVNAKYTSQTCPSCGNVKAKTLSERIHHCECGCLLDRDTAAAQVILNRAVVSPRKHNVTGCGKRAFRNTNQKEF

SEQ ID NO: 45554 - protein, 484 aa, Desulfurococcales sp.
MSSGGNPRGVSAREPDPLQSFRELIEKRKKNNKRAVRLRLLPEKHEEEILFDIGLASVRLWNELNYEKRKLFFRDSLTPEKRAEINRKYYHKYKKVLGVNAGQIIDKNEETWESFFELLKMKRQRRLPSHISKISPPGYWKDRITGKKKIHILIRNDRYYLEPISDGEGRLILKDFKLSIRYVGRIRWEGKQGRLEIIYEANRWFAYIPIEVGEKSSKSNLKGYIKPSYKDKKNRIFNPKSIKQRDPVGDKKAFIDIGLNNLFAIVVSDGSALLVKGGSIKSEYYWWKREISTYQAVRDLLRNAEIHKWVEYHEKYLKALYKRNERLRHLYRTAIRFLAEMLWSRGVEKIYIGYPIMLSQNNGNEYNTNIWWYRKIILWMIDVFIEYGIDIEIIPEDHTSIECSICGEIHKNGRIYRGLYVCRKTNKKINADINAALNIARKIGYKIIISRKIESYLITHNGVKSLTPRQRANTRDPEVRNPAL

SEQ ID NO: 45555 - protein, 475 aa, unknown
  TnpB Polypeptide
MAEKVTRILRSAGLNRTKYNHLADMAARCGRVRADAWQRCSGVSAAPLSAYDIRDAWMAEGYAWHGLPARLGKATLADALGDIDAAREAAKVPVKRAVRHRTKGDNAERQRLHSLLKQNRWTEDPFLHRQMRKSWRGGQSRVTNQIVADAGSYTTKIWHGRAWIHLQCLERGRRIAIPLKGTHLPSGTLRILLQANGQVEIHHAVDEEAVCSTRPCGDATVGVDKGYTEAYTDSDGERHGEGLGDLLSAESDHRKVKGTRRNQLRAVEQKHRAKGNTGKADNIRQHNLGNQKWNRRRTLHHQQVRDHLCQAAHAVVDKAGTLACEDLSLPMKSAQYRHKDTSRRLNGWVKGVMADTLTSISRRRGSALVLVNPAYTSQIDSRTGLLQGTRRWDRFYCTDGVVLDADTNAACNILARLYDAEITLYMPYREVKALLAERTRTTVGTAPPGLELRGLATRLPSTESELPASVPKGAG

SEQ ID NO: 45556 - protein, 523 aa, unknown
  TnpB Polypeptide
VRSWALRPDASQDREIGVRFFTGVRVVDAVLGEFIRCSRVVKADPAWQAARGLPHRSLAERQIRRVAFRTVEQAHGFTVDAAQSFASSLRRSWVREHLPAQETQNLGARAFDAVRQWHVGGKGKPRLQSAKRGLRSLAAKDGHGALRPKTDEAGRLVGLQWGAGFVVPVAPAAASSRRGREQQAELAEIEALIAAGKVLWTRIVRTVINGRDTYRMQLVGDGRPTRRHPVGEGRVSFDLGPSQIAVAVERGDGSWSGWVEPLADAIRLDTMRLRRTQRHLDRQHRAGSPACFNPDGVHTSGRCVWRRSAAAQRTMIRVGELHRRLAEHRKSLHGALGNRLLGHGTEIACERLEYVSWQKNFPRSVRDRAPGLLVETVRRKAESAGGTPVYEYNPRTTALSQTCLCGNRKKKPLSQRTHRCECGVTEDRDLFSAYLGLYVRTQVDGVDRLDLPSAQQGWGHRQDVDELPKSSRSASACKRRGRRHPPSRRSVARIKARRKAKTKMRQSRSAQTSTTDQPTAIAA

SEQ ID NO: 45557 - protein, 392 aa, Caloramator sp.
MVIQLALSNEQKIILNHLTYSASKLWNVANHNIINSSLKPKELKTKLKDTFWYKNLHSQSAQAVLEKLQIAWRNCYKKHTKRPRFQPKDGHFPVRWKKQGFKIEGDRVKLSLSKQTKDYLKTAHSIESNYLWISLPKNLSLKDVQEIEIKPHRLYGHTTYVMHVVYKKSISDRKLNLTGTMAIDLGITNLATIVTTNKTATIYDGKALVSRLRLFSKKKGQLQSVITKSKHTTSKKMHYLIIKERNYLKDYMHKVSTFIVRKALQENIGTIVIGKLSHSIVNIDIGSQNNEKLHKIPFGKLCSMIEYKAKEKGIDVTFVDEHYTSQTCSKCGIINKSNRKYRGLYTCKCGNTLNADVNGALNILKRVVPSPVMDRDRGYLNNPVRVKVNGSN

SEQ ID NO: 45558 - protein, 468 aa, Phormidium sp.
MKSAYQYRLYPDSQQKVQLNQWLRICQYWYNRMLGERFDWWEQNRCAVNACPLICHLPALKEKPNYYSQKKQLPDIKADLVLVRHSRELVDFTEPYSTILQNVCKRVEKTFERFVRGDCNGKRSGRPRFKGAARYRTMLFDGADDAWLKFCTINGKRLFMTLPKVGLVQVRMHRPLPEGANLKQVLVTKKADGWYVSLVLSDETVPGSTPEVIIPTWENSLGLDAVLHEDSYLATSEGEKLPSLKPLRRNEAKKAVLQTKKNSRKKGSRRRRKLAKREARLGLRIARSRKDFQYKTAHKLKRTGKKVFFYEKLNLQGLSRRHAPKQDESGVYLPNGQAAKSGLNKSWHDAAFGQFFDILRLVAAKAGAVAMEQNPAYTSQLLSYRDEFVLTDCSIREYWDEAEKLWVNRDINAAVNLKRVGLDLFPTLKRRRGNPVVVASMTHSTSKEVLIALRGIRSPRCTASVSVG

SEQ ID NO: 45559 - protein, 204 aa, Photorhabdus sp.
MGLSHYAITSSGDKIANPRHLINASRNLRRKQKALSRKTKGSANRRKARIQLACVHERVANARADFQHKLSRSIVDENQAIIVETLKSANLMKNPKLARAIGDAGWHGFITKLEYKAEAAGIHLVKLDQWFASSKTCHCCRHKVPEMPLNKRIWPCPCCGVEHDRDINAAINIQRKGIQELQAAGLVVSAHGGQRKSVASTVAA

SEQ ID NO: 45560 - protein, 375 aa, Clostridiales sp.
MKQTLTAKLKIVPTEVDATLLADTMHAYTSACNFASEYIFETHDLVQASLNRALYHNIRTNFGLRSQMAQSVLKTVIARYRTILTNQHKWIKPVFRKPELDLVWNRDYSLNADKTLFSVNTLDGRIKVSFFSKGADLNGMFGTAKLVHRHGKFFLHVPVTKEINALSMSDVSNIVGVDRGIRFLAATYNSNGKSVFCSGNAVKEKRAHYKALRKQLQQVGTPSSRRRLKALGQRENRWMRDVNHCVSKALVENNPEGTLFVLEDLNNIRKATERVCKDGRYVSVSWAYFDLEQKLKYKALKNRQLVVNVDPAYTSQTCPKCGHVAKSNRDKKKHLFCCENCGYTSNDDRIGAMNLHRMGIEYLVQCQGSNAPLAG

SEQ ID NO: 45561 - protein, 189 aa, Enterococcus sp.
  misc_feature (134)..(134): Xaa can be any naturally occurring amino acid
VNFVERLKAYKFRIYPTEEQEIFFAKTFGCVRKVYNLMLDDRKKAYEEVKNDPSKKMAFPTPAKYKKEFPFLKEVDSLALSNAQLNLDKAYKNFFRDKSVGFPRFKSKKNPVQSYTTNNQNGTVALIDSKFIKXPKLKSLVRIKLHRQPKGMIKSATISRHASGKYYISLLCKEEITSCLKPILQLALT

SEQ ID NO: 45562 - protein, 238 aa, Streptomyces sp.
VLRRRRRRSRSRTGSDRPTDSGARGVRTPGAGWEEARLLHYEQRAARRKSRRKKGERTSRRLSKTYDRVARIRATAKRRREDWQHKTTTAIADTYGTVVVEALHITNMTRSAKGTTDKPGTRVAQKAGLNRAVLGEAWGRTVELLAYKLAHRGGTLAEVPAPGTSQECAQCHTVTPGSRRNQAEFVCNNPACGWEGNADTNAARTVLHRYRTGHALVPAAGRAVVRRASNGVKPATAR

SEQ ID NO: 45563 - protein, 133 aa, Bacillus sp.
VVKVIFLHSKVESVVGLDFAMAELYVSSEDEKANYPRFYRQMLDRLAKAQRVLARRVQGSVRWNKQRICVANLHEKVANQRKNFLHHKSKELATNFDVVAIEDLHMKGMSQALRFGKSVADNGWRMFTTFLSY

SEQ ID NO: 45564 - protein, 368 aa, Paenibacillus sp.
MANRAYKFRLYPTPQQEQLLAKTFGCVRFVYNKMLAERKETYEQFKDDKDALKQQKLPTPAKYKSEHPWLKEVDSLALANAGLHLQKAYQNFFSGRAAFPKFKSRKARQSYTTNVVNGNIMLLDGYIKLPKLKLVKMKQHRDIPSHQVIKSCTVSRTKTGKHYISILTEYEHQPVQKEVQDVIGLDFSMNGLFVDSEEGKTANYPHFYRQALEKLAKEQRILSRRKKGSNRWHKQRLNIAKLHERIANQRKDFLHKESHKLAKRYDCVVIEDLNMKGMSQALNFGKSVADNAWGMFTTFLQYKLEEQGKRLIKINKWFPSSKTCSCCGRVKESLSLSERTFHCECGFVADRDWNASINIKREGLRWLA

SEQ ID NO: 45565 - protein, 373 aa, unknown
  TnpB Polypeptide
MIMGVKVRLRPTEGQEQSLWQSAGTARFIYNWTLARQEENYANGGKFISNNDLRKEITQLKRNELSWLKEVSNNVAKQAVKDACDTYKKFFKGLCDKPKFKSRKKSKPSFYNDNEKLKVKESAVLIEKVGWVKVKKNAIPMSLKYSNPRVSFHGKYWFISVGIEKEQPKLELTGESIGIDVGIKDLAICSNGMKFKNINKTQSVKKLEKRLRRLQRRVSCKYLKNKNGGTFAKTCNIIKIEREIRLLHRRLANIRSNHNHQATNAIVKTKPSRVVMETLNIKGMMKNKHLSKAIMQQCLHEFKRQIKYKCAFSGIEFVEADRWYPSSKTCSGCGHIKAKLSLSERTYVCEECGSVIDRDLNASINLSRYESVV

SEQ ID NO: 45566 - protein, 362 aa, unknown
  TnpB Polypeptide
MGGEHMLKAYKYRLYPNREQQEFFAKCFGCARFIYNKMLSDRIDHYKETGKSLKNTPAQYKADFPWLKEVDSLALANAQVNLNKAYNNFFRDKTVGFPKFKSRKFNYFSYTTNNQKGTVHIENGYIKLPKLKSPVRVKQHRQFTGTIKSCTISKTPAGRYFVSVLVETEIKQLQPISSKVGIDVGLKEFAVLSDGSRFANPKHLRKSEKRLAKLQKDLSRKRKGSNNRNKARLKVAKLHEKISNQRSEFLHKLSTKIIRENQAIVIEDLKVKNMLKNHKLSKAISEVSWSMFRTMLEYKAEWYGRDIIIAPSNYASSQLCSSCGNKSSQTKDLSCRVYICPECGLEIDRDYNASLNLLKLAL

SEQ ID NO: 45567 - protein, 300 aa, Filamentous sp.
IKDEQNRICIDLGKIGRVPIAFHRSIPPGFKVKTGTVIREADGWYISLTLEDKTVPATVVEIQPTDKNTLGIDLGITNYVYLSNGERIENPRFLRKSAEKLAKLQSKLADRVKGSKPWQIIKNKISRLHQFVARTRLDFQFKIAHELFSKCDVLVVEDLSIKNLTRRTKIKTDIEDNKLVYLPNGQAAKSGLNKSMLDAAHGQLIAVLKYVAWKLGKGVLFVNPKGTSGHCWNCLNKVPKELSDRWHSCQCGESLDRDENSAKLIKRIGLNYHESGGGTSSLKKALVQREKEACGLTEYR

SEQ ID NO: 45568 - protein, 369 aa, unknown
  TnpB Polypeptide
MTNTTKTRIKTLCVRVKDQHAVVLDRMAIEVNQVWNLANEMSCEAWRVPVPGFGWIQGEWLSAFAIQKATAGINKERGWMIGSATIQEVIAVHAKARNQFKTSKLRWRVSGGARRSLGWIPFKSRAARFEGGKVRFAGHSFSIWDSYGLDKHTFRAGSFAQDARGRWYLNIQVEVPVQALPTGHKSIGIDLGLKDLAVCSDGTRLEAGQPYRTLEQKLGTAQRAGKKSRVRAIHAKIKNQRKNALHQFSSKIVRENAAVFVGNVSSSKLAKTRMAKSVLDAGWSMLRTQLRYKAIAHGVWFDEVDEAYTTQSCSCCGSISDNSPKGRSGLGIREWTCLACGTTHDRDINAAKNILALGHERLAGGIPRL

SEQ ID NO: 45569 - protein, 406 aa, Kitasatospora sp.
MAATHVKRAFKFRFYPTDAQAAELSRTFGCVRKVYNMALRARTEAWTLRRERVNYNATSAMLTAWKKTEELAYLSEVSSVPLQQSLRHLQGAFSNFWQKRAKYPTFKSRKKSRRSAEYTTSAFRYQGGRLTLAKMAEPLDIVWSRPLPEGAAPSTVTVSQDASGRWFVSLLCEDRPSMPAPVNAAVGVDAGITSLVTLSTGEKVANPKFERADRERLARAQRELARKAKGSRNRDKARVKVARLHARIADRRRDFLHKLTTRLVRENQTVVIEDLTARNVLGNHSLARAISDASWTELRSMLEYKAQWYGRELITVDRWFPSSKLCSACGTIRNAMPLNVRAWECACGAVHDRDVNAARNILAAGLAVAACGDGVRPQRSTPGGQSSVKQEEVPPPRPRAAAQPRG

SEQ ID NO: 45570 - protein, 415 aa, Gulbenkiania sp.
MQRLQAFKYELMPSGEQQRQMRRFAGSCRFVFNRALALQKERYERGEKKLGYAGLCKLLTEWRNGPETPWLADAPVHPLQQTLKDLERAYANFFAKRADFPRFKKKGQHDSFRYPDPKQIKLDQGNSRIFLPKLGWLRYRNSREVLGTVRNVTVSQSCGRWFVSIQTEREVEQPVPQATTAVGIDMGVIRFATLSDGTFYVPLNSFKRHEDRLRRAQQAMSRKTKFSNNWKKAKARVQKIHARIGNARRDFLHKATTTISQNHAMVCIEDLQVRNMSRSAAGTTEQPGKHVRAKSGLNKAILDQGWFEFRRQLDYKLAWAGGHLIVVPPQNTSRTCPACGHVSADNRQTQARFLCVECGFEENADLVGAINILRAGHARCACEVSGAVMPPAAGTHRSDSFRLDAGVSAVGIPRL

SEQ ID NO: 45571 - protein, 398 aa, Kribbella sp.
MSRFRLCPTPAQQVALLEQCRQARYVWNLALEQWSMWTCDKGATPGYVEQARQLTEARAASGWLRAGSQTVQQQALRDFDQAVKNFHAGTHRRPTWRKAGLHEGFRIVGGQAGRVEKLNRKWARVLAPKVGWVRFRLSRPVPDAKSYRITRDRLGRWHIAFAAIPPPIPAPGTGEVVGVDRGVTVSAALSTGELLTCPGLSETEQARLKQLQRRLARCRHGSNRRERAKAAIARLQARAGDRRKDWVEKTSTDLARRFDVIRVEDLRIAPMTRRPKAKPDLERPGRYLPNRRRAKAGLNRGILANGWGLLVQRLEHKAAGRVEKVNPAYTSQTCSVCGHCAPGNRENQAAFRCVACGHQANADVNAAVNIAAGRAVSARRETPVRVSPKREPQHATSA

SEQ ID NO: 45572 - protein, 270 aa, Komarekiella sp.
MRLAYQYRLRPTSQQIARFENWLDLCRRQYNYRLAERFNWWEKNRCDVDRFSIISCSIAPLKNRPDYYSQKRDLTNTKTLFLEYKELPSHTLQDVIARVEKTFDRWLKGDIKGFKSGCPRFKGAFRYRSLAFPDPIKPEHVQGKFIQLLKIGKVKMILHRPIPDGFKIKTATITCKADGWYISLSLEDVTVPSLTSDIIPVPDNTVGIDMGLKSFLVTSDNQEVEIPQHYRQAEKQLKRLQRQLSRKKKGSNRRQKSIKRVAKTHLKVAN

SEQ ID NO: 45573 - protein, 373 aa, Kandleria sp.
MNKAIKYRVYPTTEQEIFFAKTFGCCRKVYNLMLADKIAYFKATGESLQTTPAQYKKDYPFLKEVDSLALANAQLNLQAAYKNFFDKKRKVRNGFPKFKSRKARNSYTTNNQKGTVSIINDKYVKLPKIGKVKAIIHRTPDADWKIKSATVSRERDGSYYISILFEFDKVIIKVAKSDNAIGLDYKSDGLYMDSNGNIGSNHKYYRQSHKKLAKAQSRLSRMKGSKKNEVKSNNYLKQLQKVNKIHRHISNQRLDNLHKKSAEIANQYDVVCVESLNMRAMSNKGFGNGKATLDNGYGMFLSMLEYKLNDRGKYFIKVDKWYPSSQLCSCCGKKKKITLVDRIYKCDCGFTIDRDLNAAINIKNEGLRLLEVA

SEQ ID NO: 45574 - protein, 375 aa, unknown
  TnpB Polypeptide
MANESIRIGLANDVSSLRKLSLLSYNQLAQYDSPSCYKLCAISRAAGILAARKKSLKRGFATRTPYAVRQLLVSCYNFKMKNEGLEIPIARGKRLSIPLTKHTLNVISQPGVTVHSFTLTRNILSLCIARDVPIVECTSTMGVDRNLRNLTVGNEQETRQYDLSETVRIASTTMRIVASFKRDDARIRTRIASRYGERRTTRTGHLLHTATKTIVAVAVQRRQAIVLENIQGIRRLYRKGNGQTRKHQGRMNGWSFGEAQRQIEYKARWVGLPVVRLSRRETRATSITCPRCGERLQSDKRLVRKLWCGNCRIVMDRDRVAAVNLARRGRVRFARSRPPILLEAQGEAVEAMKGNPTPTVIPGVDAPKLTQPTKS

SEQ ID NO: 45575 - protein, 374 aa, unknown
  TnpB Polypeptide
LFESLDIAFLKSIKAVRFTYRPTVQTLQLLHTFREMVNRAIQICLAENIKGRLNLRNRIYREFRERYGVQSSYPYSVAEIAWSIVRKHRRWQRKPVAQRLMLKMDSASYSLNNGMLSLPHRKNGRIRIPLTYGDYQRLFLADPGLKRGSLTMTNVTIIIAFSKESVPVEPLSKVGIDVNEKSAVLSDGSRYDLSEVARLHTEYWVRRRRFYRKHPHDERLKKKFSVNSREKARVKQLLNRVSKTIVQNARDKKQAIVLERLKGIRFANMRGNGKSRASRRRIALWPFRQLQHQIDYKANWEGLRVEYVSGAWTSKTCSICGNINRGLKLSDRSWRCPCGATHDRDYNAAQNIVARSKIECLPMVLAEAQSDVKL

SEQ ID NO: 45576 - protein, 415 aa, unknown
  TnpB Polypeptide
VATRRITYRLYPSVQAERKLHLARRMHCDLYNAAIANRRTQYKRFGHGVDYFEQQNSLPGFKEVWPEYKGLGSHTLQATFKRVDFAYQRFFKGLAKYPRFKAKRRYRGWTYPDKAGWKVHSNMGVNGHLELRDLKLSIPMRGKARTWGNPTTCTIIWSNNQWYASITVNCVPERHAGQGAIGLDFGCKVAIATSDGEFIEAPKFQAKAAEKIKELSKQLRRKRRPEKRKTKASRRWKKTQSQIRKVNRQVANQRHDWSHKVAAQIVSDNSLVATEKLNLKGMTRKGKGKRKRQKAGLNRSLLDVAIGMTKDAIKYKVDEAVGVYLEAPTQKLKPTQRCAKCWEITPKTLSDRVHNCQHCRHCEDRDVNAAQVILTWARGQELASPDAESPSSTSWVSMKQLGALKCQKRLTQRSG

SEQ ID NO: 45577 - protein, 316 aa, Streptosporangiales sp.
MTRFFKCFRGEHKHPKRTCGKPSYRKKGMHEGFQIVHFERRHVRRLSRKVGEVFVPKIGWVRFRWSRAVPEGAKSYRVKRDSAGRWWVSFAHVPASVAGPGTGAAVGIDRGVACSAALSDGAMHSCPKPDGTVKRLQRKLARQQKGSKRRARTRQQLARAYAREANRRKDWAEKLSTSVARNFDLIRVEDLKIKNMVKSAKGTVESPGRNVAAKSGLNREIHRSGWGILGTRLEQKAPGRVEKINPAYTSQRCSACGHVHRKNRQSQALFLCIACGFRCSADVNAARNIRAGHVRRRDKPAGPPAGATAKREYLAA

SEQ ID NO: 45578 - protein, 304 aa, Escherichia sp.
  misc_feature (242)..(296): Xaa can be any naturally occurring amino acid
VKRLQAFKFQLRPGGQQEREMRRFAGACRFVFNRALALQNENHEAGNKYIPYGKMASWLVEWKNATETQWLKDAPSQPLQQSLKELERAYKNFFRKRAAFPRFKKRGQNDAFRYPQGVKLDQENSRIFLPKLGWMRYLNSRQVTGVVKNVTVSQSCGKWYISIQTESEVSTPVHPSASMVGLDAGVAKLATLSDGTVFEPVNSFQKNQKKLARLQRQLSRKVKFSNNWQKQKRKIQRLHSCXXXXXXXXXXXXXXXXXXXXXXXXXXXXXXXXXXXXXXXXXXXXXXXXXXXXXXXFDTGSGLV

SEQ ID NO: 45579 - protein, 379 aa, Sarcina sp.
MKGQRAYKFRLYPDREQAELFQKTFGCCRFLYNHMLADKTEMYEKTGKMKRLTPAGYKKDYPWLKEVDSLALANVQLHLEAAYKKYFSQEKAGHPKFKSKHRSRKSYTTNVVNGNIRIEEGKLRLPKAGHVKIRCHREIPENYVLKSVTVSMEPSGKYYAALLYEYPVSENQAGGKNMAARERAGTAGTPDVLGIDFAMQGMAVFSDGSRAGYPMYYRKAQERISREQRKLSHCRKGSRNYGKQKRILAKCYEKVRNQRKDYLHKLSRKIANVHDAAAVEDIDMKGMSRCLKFGKSVMDDSYGAFRNMLSYKLKDQGKELVVVGRFFPSSRMCSRCGHVKEELRLDERIYRCGCGNCMDRDVNAAVNIREEGRRILMTA

SEQ ID NO: 45580 - protein, 134 aa, unknown
  TnpB Polypeptide
MEHRIGTIVCGYNGDFKRSMNLGKITNQQFTQIPFGNLRETLKGLCERYGMKYIEQEESYTSTASCLDLDEIPVYKPEQPYTGAFSGKRVHRGLYQFADGRMANADVNGAANILRKSKQNFDYEELCRGFWTAP

SEQ ID NO: 45581 - protein, 330 aa, unknown
  TnpB Polypeptide
LRATATGVETLADGVLQLLQADRRLSEIQAKSHGGSAEYTRSAFKWDAKRNELTLAKMREPLPIRWSRTLPRKTEPSTVTVSLDAAGRWHVSILVEETIRPLPARRNAIGIDLGVDSYAVTSDGETIANPRHYKKLAERLEREQRTLSRKTKGSNNRRKAALKVARTYARITDMRRDFLHKLSTRIIRENQTVVLEDLNVKNMAKRCAPKPDPDNPNHWLPNGQSAKNGLNGSIMDAGWSEFRRMLEYKAEWYGRQLITIDRYYPSTQICSHCGAKTGPKGMPGLKVRAWTCPDCGTTHDRDLNAAENILAAGLAVSVCKDGRTGTKVSH

SEQ ID NO: 45582 - protein, 424 aa, unknown
  TnpB Polypeptide
MELTKTVKIQFKLVAKADAALLRQTMDQYRLACDNVSRYVFDHDFVLNTTKLQMVLYRSLRARFGLKAQMAQSVLRTVIARYRAVHTQLKQRPYRYQDEAGQWQRQAKDLTWLWHPISFRRPQLDLVRRRDWAIRKDGSFSLNTLEGRLIVWPVLNHWRDYFDGTWKLGTAKVLTSGGKWYLHISATKEVPDYTRDQTTHVVGVDRGLRFLATAFDETGRTTYWSGTRALNKRQRYKYLRAKLQAKGTKSAKRVLKRIRQRENRWMSNENHRAAKALADCCGANTLFVLEDLTDVRCATAKVAQDRRYEQVSWPFYQLEQFLIYKAAAQGSRVLKVPAGYTSQRCPQCGVIKKQQRDHERHEYVCVCGFHAKDDPAHLNYPATGKPVAGRDCQAVLRAQADWVEKTMHLRELSAPETVETRSEM

SEQ ID NO: 45583 - protein, 372 aa, Clostridioides sp.
VVVVEKAYKFRIYPNKKQQELINKTFGCCRFVYNKYLAKRIEVYKNDKETFTYKQCSSDLTNLKKELKWLKEPDKFSLQNALKDLENAYEKFFKKKAGFPKFKSKKTNRFSYKTNFTNGNIMYCGQHIKLPKLGMVKIRDKQVPQGRILNATISKEPSGRYYVSLCCTDVNIEAFENTNNQIGLDLGIKEFCISSCGEFIENPKYLKKSLNKLAKLQRELSRKTIGSLNRNKARLKVARLQEHIANQRNDFLQKLSTKLIKENDIICIEDLQVKNMIRNHKLSRLISDVSWSEFIRQLKYKANWYGRKIIKVGKFFASSQICNKCGYKNEEVKNLNIREWICPSCNETHDRDINASINILKEGLRLITIQNK

SEQ ID NO: 45584 - protein, 439 aa, unknown
  TnpB Polypeptide
MPVDALILRFHRGPCLCEDNTGVHSEAEQEMNRTNLFTLAPAAGQNRILQERSVNCAKLWNEINYLHRQQYENYLKLDLNPRVYKKYVPRVGSATAQQIVRKNNEAWHSFPALKRMEKRGELPTTTRRVVPPGYWKRDERYVLRILFRCDSYRIRNGCVDLPRGLSIAFRGQLKWTGKQGRLEVAWDALSKKWRVFQAIEVKPIITPLGSKTCYIDMGVRNLATVWLTEWRQPVAYQSGRLLADWWYWTNRIARHQQRLATVNGRRRSKQLSRLYRARRNRFRHAVATFARQLVRDLYARGVSTIVIGELTGIRSNSDHGRQGNAMVHNYWSHKHVADRLRWTAEEYGMKVRTISEAYTSQTCPRCHSRHSQRVLRGFRCLDCGLEAHRDAVGVLNIAARYGGYAVRPMVWPMLLRWDGCGWNRNNGMPTQAKRIRVEA

SEQ ID NO: 45585 - protein, 228 aa, unknown
  TnpB Polypeptide
LQQVELVKRDGEWYAYFTLEKPFKDFEPQTPIGIDLGERNFATVVALVGKPTKGTFFKGPKIKEVRHRYFNIRKKLQEKRRLDVFKRLRGRERRIVNHELHVISKEIVEYARQFPSPVIVMEKLTGIRENFKKGKELNRRFHSLPFRKLQKMVEYKAKIQGIKVVYIDPKNTSKTCHRCGYVTHVEGREYRCPKCGLKYNRDLNASINVARALTRGTGRGYVNTPKGR

SEQ ID NO: 45586 - protein, 492 aa, Streptomyces sp.
MKKFVPQPGFTVSAHRLALDPNAAAGARLYSHAGAARAAYNWAVAHVTAVWWQRGAEASYGIAEDGLTPWRSWSLPSLRKAFNENKHADPRFAGWWEENSKEAYNTGLAHASAAFDNYAKSRKGKRKGARVGVPRFKSKRKARPACRFTTGAIRIEPDGRHVTLPRIGTVRLHEHRPDLRARIDAGTMRILSATVRLDRGRWFVAFQVEQRNELVRVARPAAAVGIDLGITSLAVLADSDGNVSGEPNPRHLDRAQRQLARASRVVSRRRGPDRRTGRKPSRRWEKANRVRNKVHHRVANLREDTLHKLTTRLTAEYGTLVIEDLNVTGMGRNRRLSRRVADAAFGEIRRQLTYKTRRHGTRLVVADRWFPSSKTCSRCGAVKTKLPLSVRVFACDTCGLVLDRDENAGHNLLALTTRTTRTTRSTGTGVAGDLDPTTTVGPKPRGADRKTRTTRPRLTARAGRAGGTIPSPRAGTETGDRQQDTRTQLALW

SEQ ID NO: 45587 - protein, 358 aa, unknown
  TnpB Polypeptide
MAKAIIRTAKNQLNLLKESARYQFNNLYKRKRSLYKKIVKFKILLSSSSTSLKQRKLAKLRLFWTQMKLNKVNQLILNGLKLHFTFGTKHLLKTNKQKFFAKRDNQVVYIGDKNETCGNQQFQINFSSKYNRFEYKLRLDNHWVQGSEKYIFGSFVLKNKEAKQCILQTLSEKKSNPLTYRIIKRKGTLYLQIMYKYKTFDITRNNYGVLGVDFNKGFISVSEINSDGKLQSLTRYNYLHKGKATKTKTSMLELVSKLVTQAISVGKDIVIEDLVSLDSNKKQEKTTSKDYNRMINSLKFGLFKRCLRSKTTKEGISIHTVNPYNTSKIARKSYTNSMKLNVHDAASYVIARRFYQYD

SEQ ID NO: 45588 - protein, 509 aa, unknown
  TnpB Polypeptide
MGYMRTATVYINEGHPLFQYADNLTALTNNLSNTARFRQRQVLSAVSKEEADWTTNEREVMEEIRKTVPLIKKASMPTKGKHFLGYMFLEGILRVNHNPDFYAEGLPRQTAQHVLKVAVKDMKGFYKAIKEYNKNPDRFTGEPKLPGYKRKGGHSTALVTNQDCTIKTCDGKWYAYFPFAKDKPVCLGCPIPDARLKQACITPDNGRYKLSFQFEVDADIPEIPEDIRPERICAIDFGVDNLMSVTNNCCLPSLIYKGGVAKSVNQKYNKTIAALVSEQTLRTGEKFVPDAAYYAATNRRNDQISDFMRKCAKHFVAWCIENRIDTVVMGINKYWKQEAGLGKRNNQNFVQLPFDRLRNIISYLCVWEGIFCLDQEESYTSKASFPDRDFIPVYGNEKGKPSFSGQRRPVHYKGMYKKDGFRGLYTTKSGDIINSDLNGSANILRKAFPNAFTEKPAPDFNSVVIIRHPDEEKVKNNRKKQTAVQKQDSHAKIKRQRKKDAKRKKHPAA

SEQ ID NO: 45589 - protein, 282 aa, Bacillus sp.
VNQLIINKSFKFRIYPNQAQAILINKTIGCSRFVFNHFLSLWDHAYKETGKGLTYGTCSAKLPAMKKEFVWLKEVDSIAIQSSVRNLADAYTRFFKKQNSAPRFKSKKNNVQSYITKQTNENIAIVGNKIKLPKLGLVRFAKSREITGRIVNATVRRNPSGRYFVSLLVETEVQELPKTSSYIGMDIGLKEFAILSDGTTYKNPKFFRSLEEKLAKAQRVLSRRSKGSSRWNKQRVKVARIHEYISNARKDYLDKISTEIIKSHDVIGIEDLQVSNMLKIVS

SEQ ID NO: 45590 - protein, 417 aa, unknown
  TnpB Polypeptide
MRIQRAYRYRFDPTPAQAENLARTFGCVRVVYNWGLEERLRAWKERRQTLRYEDLAAALTRLKQAPERLWLQEVSNVPLQQSLRHLNRAYTNFFARRTQFPTFKSRRDTQSASYMRNGFVWRDGHLTLAKHDAPLGIRWSRPLPEGAEPSSVTVTRTAAGRHYVSILVEEDVAPLPPSSRSIGLDFNTGAVVDSTGRVHGVPQRLKDIEARKRRYQRAQRRRIAAAKVRMGLAPNAPLPKGSRLLVSNNIKKAGRRVARVQERIAAIRRDWQHKLTTRIVRENQAIAIEDLAVRGMTASARGTAEQPGRRVAQKAGLNRSVLNAGFAELRRQLEYKTAWYGREILVIDRWEPSSKRCSACGNVLPKLALSIRRWTCPSCGAEHDRDVNAAKNILAAASAVNAGAAVLKQHQPGDFGG

SEQ ID NO: 45591 - protein, 386 aa, Shimazuella sp.
VYFTTSKSDRDRLFACNRESALVWNHCLSLSRQHYVDNGKWITKSELQKVTKGKFHLHSQSIQAVCHKYLFARDTAHQAIQKGRKTARYPYRNKNHFNTKWAKDGFKIHANEKIELSMGIHDGKREKPIVLYTRNFPKGMIKEIELCYDYGLYLSIAFEDGKENQPYQKKQSVGVDLGEIHSLAAFAETGEAIIITGRKVRSIHRLRNKKVAEIQRLQSKCKKGSRQWKKYQKAKRYVLSKSEKQLQDALHKTTKQFVDWCVNQAVSNVHIGNPEGVQRKTRQKKRATRKQAQRLSNWSFGKVKKYLLYKLAMKGMRLHPIDESYTSQTCPVCKKRKKVSSRNYRCSCGYQEHRDTHGARNILAKSLYGEIYHLDVSTKQTYLRIA

SEQ ID NO: 45592 - protein, 511 aa, unknown
  TnpB Polypeptide
MSRGKKTPSFIHEIVLVVSPKDESVLLKRLDCARQLYNACLGESLRRLDLMRESKAYQEARTMPKPKPKDKGKKREFSPRNDLFQHLNREFRFTDDSIQAFATKTKNACHFGDHLDAHTCQKVATRAFLSAQSYAFGLRGRPRFKSYNQFDSVESKSNDCGIRWRDGHVLWSGLELKALFDPKDKHGVEFHALSCRTKYVRLVRRKIKGRNRFYAQLVQEGKPLLKKPLGTGPTGLDLGPSTYAVVSAEEAILAPFCAELEPIQKEIRRLQRKLDRSCRAFNPEAFSENGTIKPGIRLKKSKGYIKTQDQLAELNRRLAATRKTLQGKLANQVLTMGDTFNLEKISYRAWQKMFGKSVGFRAPGMFVSILRRKAESAGGTVNEFPVSNRLSQTCHQCGAVVKKPLSQRWHTCSCGVHAQRDLYSASLAACVVGDRLDTTLAARRWGLVEPLLLRAVSRLEQIMMGRDLVPSSLGLKRGRNDSHGKGNGLQREAWGVVACPTRQARTLENAA

SEQ ID NO: 45593 - protein, 499 aa, unknown
  TnpB Polypeptide
LLRTSKIRITDSKFKKFGIEKMFLTRHFENILLILLEQDYKQAIGDFKLISNAYVMRAVIRDTKGGSYADEVNYVKEKYKDNQLMQDLIKIGGQLKKDNLVMTIQKIKSEYKGFFTKIKKGDKSARPPKPKKLSSLNHYTLLIDNDKGMSIAYLMKGKNKLGITLDHDIGRQYIYVDYQAITKLVGGNLDNIQSINLHYSNGELYLLITYHKEVKDSTDIPLKIAGLDIGINNLASIYIDDQESSSLIIDGEPYKHYNSKFNRFVGQLTSAIDTIDNKNRIKYLKKFKSYIFEKRNRYYFDQFHKVSKRILEYLSRCNVTELVISENLNQLKNNGNCNLHKKTKQSFIQIPFGRLLKKLKYKSKEYGIKIIVIDEAYTSKSNSLTDDVYKVHSILDKIKRLKSSQSEDNKTHQEVKNLTNAYKKLLKVFNFQGKRVKRGLYHDELNNKIYNSDLNGAYNILKLSPDYRPTKKNINYEKLCNPIKVKNDYQLCKLIKRIV

SEQ ID NO: 45594 - protein, 431 aa, unknown
  TnpB Polypeptide
MTENKIKLEQQKTWLKKRSTNLTQKLEVVEQQIAKKRAKNHNDRSLQGLFSLRSSLQNRLAHLTLQPVVFGTKRLFRARIRGKISRAEFLIQRDASFGCVGKVQGGVQNNNLKLLPSEELRISTFHKAKGRIPKRLRVPLAVNPHQMAIFQALLQMDKYTVIVKRKFVKGEVRYYAHMSYEVLEPKVRIGFQNGAIGLDFNYNFITLVHIDKAGNFLSYQQIPFRNLHSYRKGRRDNYASFKLDKVINYCINKGKGLIIEDLSFDQSFSYNKKQNRKLNQLKTSMLPLLERKCARHGIAVRKVHPAYTTIIGVLKYSWSLNFSEHVLASYVIARKGVGLVESLPACYEWLLAQVGGVLKPRLNPSSPYWQWAQLYDLFKHYGVTPFRSPDPATNLKRNLLVALDTVLDGLNPATGVPPDNLRAGLLACGCG

SEQ ID NO: 45595 - protein, 417 aa, unknown
  TnpB Polypeptide
MKSMPYVIGIKVRIFPSTIQKRIIAKNDGAARFIYNRLVARDRELHSLQKVQIYCEPVASRIDYLKSLGTDLSDFKAAYPFLEDPEIDSLAIANAKQNYLAAWKNFRKVPGTSMPVFHKKWYGKSYQTNCQYASGVTRMDKGSVRLLDDRHLKIPKLGSVKFAGSGMLQKIFKRTCETRIGTVTVSMDNCGDYYVSLQAGSVCPFHKALPDTGDGVGIDVNIKNLYTDSNGQEADNPKFYTKEQKKLAKAQKKLARRKERAIKEGRSIYESKNYQKQRLKVARLCRTIARRREDYLDVQSKHLVESQDYIFAEDIKTKNLLKNHKLAKAIADVAWGMFLSKVSYKCDFYGRIFGKVPSKNTTQTCSSCGHVMKDGEHLDLNIREWTCPECGMHHNRDENSAVNIKNLGKMIYLPETV

SEQ ID NO: 45596 - protein, 352 aa, unknown
  TnpB Polypeptide
MKTTKTLKVRVRDSHAFALSQQAKSVNFVWNFLNELSHRSIKERSTFMSAFDLQKYTNGAGKELGLHSHTIQEVGKEYVTRRKQFKKAKLNWRKARGVKRSLGWVPFKSGSAKWKNGTVSYNGKFFKVWDSYGLSGYTFRSGSFNEDSRGRWYFNVVVEVETEQGTGTNAVGIDLGCKETATDSTGHKIKGREYRKLEQKLGIAQRAKNKQRAKAIHAKIKNRRSDTLHKYSRKLAQENAAIFVGNVSSKGLVKTKMAKSVLDAGWSTLKTMLEYKCANANIVFEEVNESYTTQTCSCCGSISANSPKGRAGLRIREWSCSDCGATHDRDINAAKNILAVGLRRLAEEKVAA

SEQ ID NO: 45597 - protein, 352 aa, Oleiphilus sp.
MKKTKTLKVRIKDKHVKLLNRMARSVNFVWNYINELSSRSIKERGVFLSAYDIHPYTKGAGKELGLHSQSLQCIAAEYVTRRKQFKKARLNWRKSGGVRRSLGWIPVNTGQAKWKNGQVFHNGRYFSVWDSFELNNYKFRSASFSEDSRGRWYFNVVVDVEFEISEGTQSVGIDLGFKESATDSNGNVVAGREYRLLEQKLGIAQRAGNQKRVKAIHAKIKNRRQDALHKYSRKLVNENAAIFVGNVSSQAMVKTKKAKSALDAGWGILKTMLEYKCDHAGVVFEIVNEAYSTQTCSCCRVIPDSSPKGRTGLGIREWVCSECGAEHQRDINAARNILAVGHDRLAVGIPVL

SEQ ID NO: 45598 - protein, 551 aa, Oleiphilus sp.
VDTPTKTLTFETRLDLIYEQDAALCQYAELWNQVKFRWFANLQKPKAQQLNRTQFMHEMGMPFSYRVFQGVQQSIKGLIQSYQTNRNNRLVTLDVKIKQLEKTLNKLNKRCDHVAEKGCPQQAKQLRNRLRQKEVKLRRWQQKQSALVAEKQENKTPICFGGRKLLKERQALETGSAIEGWKQRWHEARHREFLLVGSHDESWGCQNAQLSPSEQEDAYQLKLLVPHQLRATFGTTIHIDHLQFKHGRAMIAQAVWQNQVKKHDKSIKGQSLSFRFKRDKKGWRLLVSVEVAGPTEQAEWIDADQGVIGVDVNPDHLAVVELDRNGNPLQHRTFDLPLHYKNDVQRSAIIGDAVRDLMDFAAQQGKAVVIEKLDFQQKKRQYQKQDHPQYARMLNAFAYGKIKDLIETQSIKRGIRLYHVNSAYTSLLGRMKYRDRHGFSDHHAAALVIGRRHYGFKEKPPKQLIGINAKGIVKTEHPPVRMALRDYQYYTKLQRWYQPLEKSLDFLSGWRHFRRVNRVSYFVEARLDGRPGMSPDLIQESAPLLSAHPAL

SEQ ID NO: 45599 - protein, 450 aa, Oleiphilus sp.
VAIRGFCINISERLRSNQATTFAQWIGAANVVRNQKVGEYRKLLSEGRGSEIAQGYSHIKKCSGLEFLREVPVQVLRNAASGVFSDAEAARKGLRKFPKVKGRNKKRSVLITRELFMLEPLDQSSSLLTLFDNATKQRQKLFSLKLPYTPEQLARQFRVSRQGNKFTLSGSFDDGVINDSNDKLLKSYAHLDDETLLGNITGIDRGVVRPIQTSDGLIIQYTPEEVESLRKQARKKARYQRILARKKRLNKNKNKHKCETAGQRKLAAKIAKADAKMADIRKNFSHQASSQVVKSAKLIIGLEDLNLKGMTKRAKPKQDGRQFVKNKARAKSGLSRSLLNVALGRLGDYIEYKAVDYGKATVRVSAAYSSKTHYACRSRDTVRPNQATLICRRCGAEENADENAAKVVAQRTVTYIKENAFADKAKSRKTIVRRKKKVDDPPLVCELASG

SEQ ID NO: 45600 - protein, 389 aa, Oleiphilus sp.
MLRATKVRIYPTPEQAEFLNRQFGATRFVYNKALHVISVQYKRHGLKLKAKKDIKPLLAVAKKSRKYHWLKEFDSIALQQACINLDKAFQNFFDPKHSARYPKFKRKHGKQSSYHCTSISAEDNWIKVPKMEPIKARVHRALEGKLKSITLSRTVTGKYYASLLLDDGVETPAPMKTVDTVLGLDMGLTHLAIDSEGRKIANPCFLKRTAANLRRKQKALSRCQKGSKGRAQARLKLAKAHEHLANARADYQHNLSRQLIDENQAVAVETLKVKNLLKNRKLAKHIADASWFSLIQKLEYKAKAQGKHLVRIDQWFASTKTCSGCGHKMASLSLSVRHWTCPACKAVLDRDVNAAINIRQQGIIKLRAEGLSVPANGGLRKSSHAPVAA

SEQ ID NO: 45601 - protein, 458 aa, Oleiphilus sp.
VDTPTKTLTFETRLDLIHEQDAALCQYAELWNQVKFRWFANLQKPKAQQLNRTQFMHEMGMPFSYRVFQGVRQSIKGLIQSYQTNRNNRLVTLDVKIKQLEKTLNKLEKRRDHVAEKGSPQQAKQLRNRLRQKEVKLRRWQQKQAALVAEKQENKTPICFGGRKLLKERQALETGSAIEGWKQRWHEARHREFLLVGSHDESWGCQNAQLSPSEQEDAYQLKLLVPHQLRATFGTTINIDRLQFKHGKAAIAQAVWQNQVKKHDKSIKGQSLSFRFKRDEKGWRLLVSVEVAGPTEQAEWIDDDQGVIGVDVNPDHLAVVELDRNGNPLQHRTFDLPLHYKNDAQRAAIIGDAVRDLMDFAAQQSKAVVIEKLDFQQKKRQYQKQDHPQYARMLNAFAYGKIKDLIETQSIKRGIRLYHVNPAYTSLLGRMKYRDRHGFSDHHAAAFIGRTLSHLTEL

SEQ ID NO: 45602 - protein, 408 aa, Oleiphilus sp.
MYKYHPGMNDSSIRQLAFKTQLFANNIQRAYFAKASGVSRFCWNWGVYQWNKQYQAHCVNPCLPKPNGKALKKQLNAIKKDEFPWMYEVTKYAAQQPFIFLDRAYKDWIEDLSSSKPKHLKKSRPTFKKKGKCLDSFYVGGDQVRVIGDKVKVPNLGWVTMAEPIKFDGHIHSMTISRQADKWYVSFSIADDLPVLPSKNQAACGVDLGIKTLATLSNGGITHWHTPKPLKHALTKLKRYQRHLARKIKGSSGYQKQKQKIARLHKRIADIRLNTLHQLTKYLSKHFSKVVIEDLNIRGMMQNRKLARSIADVGMFEFRRQLSYKLAWKGGKLIVADRWFASSKLCSKCRKKNEHLKLSDRIFHCVYCNHSQDRDENASVNLEYYEQFYTGRSPGINAVGDDGSALLV

SEQ ID NO: 45603 - protein, 364 aa, Halorubrum sp.
VARVLPFKNQYHDSSNTSVTQDPEPPRFRGNEDDGRQLKTVIRNTSYTIEWGDRSRLDILVGSELKDRYEHTGRLRLEIAGDPNWPDYEKQGRLDLWYDETDRTFRASQPVTVSDEIRATPLADETAALDIGANNLVACTTTTGEQYLYRGQDLFARFRETTREIARLQSKLEDGRYSSERIRRLYHKRTRRRDHAQEALCRDVIERVYADGVDTVYIGELTGVLETHWFVEVNAKTHNFWAFRKFVDRLACTAEEYGISIEVQSEAWTSQECPQCGSTDRTTRHQDTLTCPCGFEGHADLTASQTFLERQTEQEVRLMARPVRFEWDDHDWSGQPHPHDSPKEVRTDRCTIETDGKVASGETA

SEQ ID NO: 45604 - protein, 533 aa, Mycobacterium sp.
VEDQFQLGMRGLIAHVADLKAAVSVLSERCALNPGERSTAELDHARIASARRSGVRRGYRSKAERFTKTRRLAVLRQRLHAAEEALAAGRPSIVVGGKRLWRQRHNLVHSDLAELQWRQQWDAARMFITADGEAGKIGGNETIRVDPEGCLRIKVPAALTAEFGSHVVIEQPVHFAYGGDEWAERVAARQAVRYDVHLDTKRGRWYLDASWRTSPKPVPGLEELRSERVLGVDLNADHLACCVLDASGNPIGGPNSIEVVTLGLTGFHRDGRVRAAVVTLLNLAQQHNCRAVVIENLDFNDSRATGRETLGRGKRGKRLRRTVAGIPTAKFRRRLIGMAARRGIYVIGVDAAYTSRWGAQHWIQPLRQQTSDPATVTSHHGAAVAIGRRGLGLAIRRRPAGPRTGQRTDAGKPPARTSRHLSTTRRYGSSDPPARPQRGVAVRRKTPIACGERPRAPGRGPNVELHRVGAVVENGRDSDGAIDGRRRAHLVGDPLDVRRLVQFVGQRLVGRSLQREEPRHLATPLLRVTTTPA

SEQ ID NO: 45605 - protein, 375 aa, unknown
  TnpB Polypeptide
MQQKAYKYRAYPTEEQRTFFAKCFGCCRKIWNLMLADRNQYYKDTGKSLYPQPAQYKGAYPYLKEVDSLALSNVQKQQNKAIKDHIENPKAFGVPKFKAKKRCKKSYTTNNQKGTVALVENGIKLPKIGVIRTVLHRVPEEGWKIKSATISQKRDGSYHISVLCEKDTEDPERLPIDEDRALGLDYKSDGLYKDSNGDLAGMPKFFRKAQKRLAKLQKKLKNKEKSSKNYEKQLRKVAKLYVHVANQRRDHLQKLSTAITKQYDYIIVEDLNMRTMANKGFGNGKATMDNGFGMFQDMLAYKLKRKGGKLVVIDRWFPSSQLCSVCGYKNKKVKNLNVRSWICPVCGTEHDRDENAAINILVEGLRILYEEREAA

SEQ ID NO: 45606 - protein, 409 aa, Microcystis sp.
MRVIEFKLKTNSHQEIAIQEAIRVGQFIRNKCLRFWMDSTKEDKVNYATLCRLTTELSNNPEFSFVGKLNSMARQASAERAWFSISRFYNNCQKRTARAESNSASGRSKKGLAKKGYPKFKKFSRSVEYKSSGWKLTEDKKFIHITDKTGIGKLKLIGTFNRQLLDKSTIKRVRLIKRADGFYCQFVLDIERVEPLDSTGKEVGIDLGLNHFLTDSNGDKIDNPRFLRKSEKRLKKAQRKLSKKKKGSQKRLKQKSKVARLHLKVSRQRKDFAVKTAKALIQSNDLVAYENLKVSNMVKNRKLAKSIQDASWSMFTNWLDYFGKIHGKFVIAVNLQYTSQQCSDCGNIVKKTLSIRTHICSCGCVLDRDENAAINILHKANTVGRTEIQALGQTTHCLTGESLLDKVTG

SEQ ID NO: 45607 - protein, 384 aa, unknown
  TnpB Polypeptide
VYIQIVEVVLGVPFGYEPNNELNKLLEDFRKMINFCIDYAHKRRITSYAKLRKGVYEEWKRRWDYSTHFCHSACKIALAMLKKYRKKHREGKTEAKKLFMQLDPELYRFYGDKIRISVRPRQFLFINLKFGEYQKKFIYSWKEGKLKIGEVTINENKIIIPFKKEVDLQNPEEWIAIDINESNVTAVSSNPHVLRIDHELRTVHTTYFIIRRGIQKLAKYKPRTAQKLLKKYSDREKRRTEDLCHKISKKIVDFAKQHNLGIVMEDLKGIRKRIKKGRQMNRRLHNWNFRRLQFYVDYKAKLNGLPVVYVNPKGTSSLCPICGGRLAPNGHRLMRCLRCGYEKDRDVTAGINMLRMRGAPLPLKAINEDSNPLLSEMERIVIKC

SEQ ID NO: 45608 - protein, 308 aa, Leptolyngbyaceae sp.
MMGNCQVRFLGEAGTATRRSLPDKTTGWSLSEDCRQITFTDKKGIGRVKMLGTRDLGFYSADQIKRVRLIRRADGYFVQFAVKVDRTEVLEPSGSVVGLDVGLESFYTDSNGEKVPNPRFYRKGQQALRQKQRRVSRKVKGSKNRAKARVRLAKKHLQISRQRKDHAIKLARCVISSNDVVVYENLRVRNMVKNHCLAKSINDAGWYQFRIWLEYFGKVFGRLTLAVEPAYTSQECSSCGVIVKKSLSTRTHVCECGCELDRDENAAINILMKGIGMRGHLKTATRDVENAWGELTSTLLGETLAEAS

SEQ ID NO: 45609 - protein, 415 aa, Cyanobacteria sp.
MLSALETIRMIIYESKLEGTGDQYERLDAAIRTGRFVRNSIIRAWMDGQIKSRNEAYAYSKVLSDNPEFPWAKQLNSMARQAHAERAWAAIERFYRNCQAKKPGKKGFPKFKKYQVRDSVEYKTSGWKLSQDRRYINFTDGFKAGTFKMRGSRNLHFYQLDQIKRVRVVRRHDGYYVQFLIDQKREEDKELTGRQIGLDVGLNHFYTDSLGEKVDNPRFLKKDERLIKRLQRRLSKTEKGSKNRAKLRNKLGRAHLKVSRRRNDWVCKLAQRVIRSNDLVAIENLKVRNMVKNHCLAKSISDVAWYRFREWLEYFGAVYGVPVIAVNPNYTTQNCSNCGQKVVKTLSTRTHKCPHCGYMADRDENAAINILKSALKQWATTVGRTEREVSGEIPLCLKVETQVSKGTQRKRKPKK

SEQ ID NO: 45610 - protein, 406 aa, unknown
  TnpB Polypeptide
VSVVCDKFRLYPSQAQESALNETLAVCRLVYNSLVHERTTLHEQGLKSPTYYTQAPAITRWKKDHAELKSVHSQVLQNVAVRVELAFQAFFRRVKQGETPGYPRLKGKGQYDSITYPQSGFKIGDSTISLSMFGKQVQVKAKLHRPILGTVKTCTVRRYGSNPKSCKWFVCFSVIKSQVEQEDASLPKSTEAIGLDAGLNSFLALSNGEFVDNPRFFRKDEKALAKAGRKQAKTKKRSPERKKANKVLSRIHERIRNRRHDFVHQTARRLVNRFGVIAVEKLTVKNMLGNHCLAKSISDASWSMFRSVLTHKAESAGRDANGTVLREVIAVNPAYTSQDCHACGYRAKKKLRKKLSERWHFCPKCSVSLDRDTNAAINILNLAANQSGITDCQVTPVEAPAFTPGE

SEQ ID NO: 45611 - protein, 372 aa, Clostridia sp.
MQTVTLKIKLLPPNKDKLEKMARLLETYRRACSWFLEQAEALDTTSRAHLNRQTYRQACAQFDLNRGTLQCAMLKALSARRSYLSRKQRGKKASLPKFEKTVPVMVRQDCYSLHQLPSGTWVVKFPVYSGRSRIAVPLAASAYHIKKLQDLAGGSCRQGSMEIWRDKSGEWYVGVSLVYETRLNEPGGVIGVDFGIVKLAVLSNNVFFDGRQVRWRKERWAERRTALQRAGRLSRVKREAGRERRWMRYINHCLSKRIVEIAKAEDTAIALENLLGIRERAKGSKKFNRMMSGWNFRELASFIEYKAALAGVPVIYVDPKETSKACPRCGNVSRYNRKNQGWFRCTRCGYQSDADRVGALNTAAKALDALGA

SEQ ID NO: 45612 - protein, 395 aa, unknown
  TnpB Polypeptide
VSFSIDLIVCFFYNDVMKKINMAYKFRFYPTKEQEKQLAQAFGCSRFVYNKFLNVKTDSYYLNKEKVGYNQTSNLLTHLKKEEGFTWLNDVSSVNLQQTLRDLDKAFTNFFQKKAEYPTFKKRNSKQSVRYNKSAFTFRDGVVKIAKNKKPLKIKWSRKMKGTPSSVTVSKDFSGRYFASFQTEEEVKELKKIKKSIGIDVGLKDLCVTSDGDKTSSPKYFKKYQDKLAKKQRELSKKVKGSKNRVKARVEVAKVHAKISDCRNDFNQKLTTKLINENQVIAVESLNVKKMMGNKNLSKMIADASWGEIFRMLKYKAEWYGRDLITIDRWFPSSKRCNHCGYINNKLKLSHRNWKCPNCKCNIDRDINAAKNILAVGTTVLAFGESGRLCPSKLE

SEQ ID NO: 45613 - protein, 384 aa, unknown
  TnpB Polypeptide
MNQKRAYKYRFYPTDEQKHILTQTFGCARFVYNWALRLRTDAYYQEHQRIGYHETSSRLTTLKQELPWLNEVSCVPPQQALRHLDKAFRNFFGGRAKYPAFKKKQGAQTAEYTTSAFKWNGKQLTLARMDMPLAIHWSRALPDGCKPTTVTVRKDTANRYFVSLLVEEEITHLPAVEQEVGLDLGLKSMVILSTGETVGNPKFFAQDEKQLAKAQRRHARKQKGSKNKDHARLKVARIHARISDRRRDYQHKLSTRIIRENQTICVESLAVKNMVKNHCLAKAISDVGWGEFVRQLEYKAAWYGRNLVKIDKWYPSSKRCFDCGHLLDSLALEVRVWTCPACGVIHDRDLNAAKNIHAVGLTVFEACGEAVRPGRAKARSGKLR

SEQ ID NO: 45614 - protein, 171 aa, unknown
  TnpB Polypeptide
VLQRRVSRKKNGSKNRKKAIQKLARCHEKVANQRDDFLHKLSYQVVSENQAIAVESLNVTGMLKNHKLARSISDVSWGTFFTMLEYKCLKYGKTLLKIGRFDPSSKICNCCGYMNRNLKLSDREWTCPDCGIVHDRDINAAINIKKFALQDQNLVGVSGAERAVEPVDLPQ

SEQ ID NO: 45615 - protein, 322 aa, Streptomyces sp.
MQLRYNYRAYPDAPKRRALARAFGCARVVWNDCLRDRKEAHAAGLPYVKSAELSRLRITQAKRTEERAWLAEVSAVVLQQSLRDLDTAYKNFFDSIKGKRRGRKVGPPRYKSKKDTRQSIRLNTNAFAVQDNGTVYVAKVGNLKVKWSRPLPVGPDHKASTQIIRDNQAVYVEDLAVAGLGRTRLAKSVHDAGWSAFVGMLKYKAVKHGRTFSKVDRGFPSSQICSACGFRDGPKPLHIRQWTCGGCGTVHDRDHNAARNVLFEGRRIVAAGRAETQNAGGAPVRRAHMPAQRGEAGSPRKSHTTQAGIPGLRSGSTSSWEA

SEQ ID NO: 45616 - protein, 405 aa, unknown
  TnpB Polypeptide
VRKINRSYKFRLYPNKAQIELLEKHFGCARFVYNYFLNKRIEKYRLTGKSDNYYEQCKALTELKNQEETAWLKEVNSQSLQFAIRCLETAYINFFKKRTKFPKFKSKHSKNSFTAPQFASIDDNRLFIPKFKEGIKCRVREIKGKIGKVTVSKTPSGKYFVSVFTEEGYTTPFEKTNKSVGVDMGLKDFLITSEGEIFKNNRYTRKYENKLASMQRHLSRKKKGSGEFENQRLKVARLHKKISNSRSDYLHKCSISLIRRYDVICIEDLNVDGMKRNHHLSKSISDVSWGSFVTMLTYKANWNDKKVVKIDRYFPSSQTCNVCGHLNKQTKDLSVREWECPSCNTHHNRDVNAAINILHLGLNKNISAGTVDYTDGEDVRADLLKGQSSVKSEANGFLTHGQFTI

SEQ ID NO: 45617 - protein, 402 aa, unknown
  TnpB Polypeptide
MKKINRSYKFRLYPNKEQTDLLAKHFGCSRFVYNYFLNQRIEQYRLTGKSDNFYEQCKALTLLKKQGETEWLKEVSAQTLQSSILSLDLAYINFFKKRAKFPKFKSKHSKNSFTAPQYAHISDNKLFIRKFREGIKCCVHREIKGKIGKVTISKTPSGKYFASVLTEEDYETPFEKTNKSVGLDMGLKDFIVTSEGEIFKNNRYTRKYERKLAKAQRHLSRKKKGSRGFENQKLKVARLHEKISNRRADYLHKCSISLIRRYDTICIEDLNVKGMIRNHNLAKSISDVSWSSFVTMLTYKADWNDKKVMKIDRYFPSSQTCNVCGYVNKQTKDLSIREWECPSCHTHHNRDANAAINILHLGLNKNISAGTVDYTDGEDVRADLLKGQSSVKSEASEFLTHG

SEQ ID NO: 45618 - protein, 409 aa, unknown
  TnpB Polypeptide
LRDLGRTSWENVAKRKINRSYKFRLYPSKEQIDLLSRHFGCVRFVYNYFLNQRIEQYRLTGKSDNFYEQCKALTLLKRQDETEWLKEVIAQTLQFSLKCLEAAYTNFFQNRTKFPRFKSKHSKNSFTVPQCAYISNNRLFIPKFKGGIKCRIHREIKGKVGKVTVSKTPSGKYFVSVFTEEEYEKPLEKTNKSVGLDLGLKDFIVTSEGEKFKNNKYTREYERKLAVAQRHLSRKKKGSRGFENQRLKVARLYEKISNSRTDYLNKCSISLVRRYDTICIEDLNVKGMIRNHNLAKSIADVSWGSFVDMLTYKADWNNKKVVKIERYFPSSQTCNVCGYINKEIKDLSVREWECPSCNTHHNRDVNAAINILHLGLNKNISAGTVDYTDGEDVRTDLLKGQSSVKSETY

SEQ ID NO: 45619 - protein, 214 aa, Helicobacter sp.
VCEKEDEPAKAECLKPFASEPACGNSVGLDFGLKTFLTASNGTQIASPLFFSKFLPLICACSRSLSKKKKGSHNRLKARLRLARLHRKVAHLRKDFFHKLANNLAQQYSRIFIEDLNLKGMVKLWGRKVSDLAFSEFVAILAQKTQVVKIDRFYPSSKTCSSCGAVKKDLSLKDRVFSCHSCGFSLDRDLNASMNIHRVGASTLGVEAKTRPAG

SEQ ID NO: 45620 - protein, 674 aa, Indivirus sp.
MSAIEEKKTKPPDKSTDYFKCVKIPLKHVLKNPDINLSKITDAVIKCNKIVINTLMFMKLYLLDYFEKNNKLPEIDKVFVNSCMKILCNESASGRPPKKEIKELKDKLTAFYKSDYKPLIKDTDLDYTHLNTVLDYLTIGIITMYENNIKLHYVEYIERYVNIVWKKKETILKIKEENKKEDKQKELVNEFCRQLRKIKTDILEISSEYKSDVKYHNWIKDIKKTITPNKDKYQKDNLYYDLQCDPQEYLPCMIRMMKEVEKDKVMIYNVFPMRNDIIMKSIKLDTTTLVHLLFTQKQGNKTDYLLEGNLKKHENKIWEFFFRTERQCFKKPKYTFHHMIETDGVSCSILLLRNDLIGKRIPNIKVGSNTEQYIDELNDYTNIKNKKIVSYDPNLADLIYCVDNDSKEANEFRYTQDSRRKECKIKKYAKIILEFKKEKIEGKTIIEYETELSKLNRKTLTIKDFKEYIKKKSEINNKLYKFYEKYIFRKLKLNGYINIKKHEQKMINNFKKIFGKPEDVIICAGDFEQKQHMKYKEPVKGKGIRRIFRNNGYKLYLVDEFRTSCMCSICKEETGRCEKFITRKNPKPYKSSNILVHGALRCKNCEAVWNRDVNSATNIYRIAKNAINGIERPKYLCRENKVDDKVEKLKKEKVKKVVQKKANKSVKVVALTKS

SEQ ID NO: 45621 - protein, 353 aa, Halococcus sp.
MTVTATVTTKFSHPTRKRRREWQQAMHEYRDVKQFLIDGWESNEFGKSITTGSIDSPLYSAIQNQAIREAKADHSRDGALTYTAAQPFATNNQNWEIDRTENGSVVVGFPCINQWWYTPIEVHDHIREPVERLVNGEAGRSRLQVYRRGDDWFCSFTIEYDAEAGGETPIGVDIGERHILAVHEPESDESMLVSGKEARYVRRTFRSLRDSLAEAGALRARNRVGNKEHRRIRDLNHTLSKRLVEFATQFDNSLIRLEGLEGLEGIRDRTGWSGVHSWYFDQLRRFITYKAEREGIRVESVDPAYTSQTCSRCGERGDRNGDHFACSSCGYERHADLNAAANIAVREGEPCTG

SEQ ID NO: 45622 - protein, 411 aa, Halococcus sp.
MTATATKTLEATLVSPTAGKERALQRTVANYRRALRESFDSGATTQAAVNDVVTPYRLTSYAKDALKSYVPTLRNSYGASELADDHPVRFTNRGFRLDHSAEREAGFCWYVPQAGRGNGFWIPLHINPEQRGLWFGLLDGDASVGEFRVQERRSSWVLHVTVEHEVPKPDESGDPTHVGFDIGESKLLAGCACRDDGTPVRPMFVDGGRARHLRKEMHTTLKRLQERDAAEWRTDERFDHYQNALTDIVEKTSREAVEYAQGFDSPVIVMEDLSFIRERLDYGAYMNRRLHAWAFARLQGRITDKAREVGIAVEFVAPAYTSQTCHACGHIGRRSSQAEFRCTNADCWVSEYQADLNAASNIASRVDPWGESLPLKSAGDDSPQDGSALDSTTARRERSAKSAQMTLAEWG

SEQ ID NO: 45623 - protein, 410 aa, Halococcus sp.
VEIQRTIPVNLNVSDSDAESLHATFEEFRFAANCVVSRSRKENGYIETSKSCLHERTYDEVRERTDDLHANLVQAARSRAADALKAVVERWKDGDKASLPTFTSDFADYDNRSATLHDDWASLATPDGRVEAEYVLPPETDGTPFDKYVESDKYSVNGATLHYRNGSFYLHLRAKTEMDDAEPAEHPSVLGVDLGIENLAVTSTARFWSGGLLNHRRDAYERLRGNLQQTGTESAHWTIKGIGQRFSQWSEDLLHTVSKELVQEAIEHECSIIAFENLTGIRERISNASKFQQGAFNQLFEYVEYKAEPFGIDMVEVNPAYTSQRCSACGHTAEGNRPNGDDEFCCGNCGYEVHADYNAAKNVAWKHVRAGQKSRSGRANRQLALKSGTVNANGEYSPADAVSARAGVHR

SEQ ID NO: 45624 - protein, 304 aa, unknown
  TnpB Polypeptide
VYLDLSARYFKLPSEVSSSALGEPVITLEKVHLPVHYEDTQSGKPAVAWDFNLLSLDGYSPETGWVRIDTKKLASVHISSFEKRRSVQRKASHSKKAKRVLSKYSNRERNRARKHQLEITRVIQSLCGSVGLEELKKQGMYTRSRVWNRRISRSDWRSIARILEERLGEARVEELDPYGSSSYCSRCGWHNQDLNGADIFVCGGCGLRIDRQLNAAINLYMRMSFGYTEKWVGGKKSIQLRMEGASQREWWERVVLPSLLGGCVLTGAELKGTNELVRGLHDAVRPKLYYAYDRCADAYLRIPT

SEQ ID NO: 45625 - protein, 227 aa, unknown
  TnpB Polypeptide
MVLCTSGSYGYGISEKMLVREKGICPDSGKETPEVFFCVFSYKEEVTLTKTPVKEQIICSVDLGINTDAVCTIMRADGTVLGRRFIDHPSEKDRMYRTLGRIRRSQREHGSAQTQGRWAYTKRLNTELGKKIAGAIVRYAEENHADVIVFEYLEMQGKISGKKKQKLHLWRKRDIQKCCEHQAHRKGMRVSRICAWNTSRLAYDGSGAVTRDWENHSLCTFPDRKTI

SEQ ID NO: 45626 - protein, 354 aa, unknown
  TnpB Polypeptide
MQKTIKASIIGLTNIKKELLDNDYFNYQWWMIFGVDKGLLSAFKAAKGHKQKIVNYLEYPLPLQTRFIKNWFRTRDTKLTKNWIKIPNSRRKGQGIWLPLKFHQPLPEKYELKDSYLVRKNNKYYIHFVIEIEEPKVYQPKNILGLDLGLRNPIVMVDLKTRKTFFLGKEIKEIRGKYYYLRKKLGKNNYIKQIKKIRNKEKNKINSRLHKISKDIINLAYNTKSAVVVGELKYLNKNKGRKFNRKLNNFSYYKFNKYIEYKAKEKGVPVIFVNEAYTSKTCTVCGSIGSRKGNWFSCNNCRYEDNADRNAAFNISKRGLSYMLKSGVEASALKSLISNNEETSTIKMQNCIFA

SEQ ID NO: 45627 - protein, 399 aa, unknown
  TnpB Polypeptide
MIKTLKVRLYPNEKQKILLEKHFGACRFVWNYFLELRTALLRESKAKGKPQGLNYFETCKLLTELKKEKQWLYEVSNPSLQQVLRKLDNAFTAFFRKNAGYPKFKSKKDNQYFVVPTGVKATRRKIIIPKFLEGIRYRDKTDASTLGKIKQAVITKVADRYFASLYYEAPDSEKKADTEFAVGVDRGISRFAVLSDGIAIENPRFLQSFERKLRREHRRLSRKLRGSKNRAKQRLRLAKVYLKLSDSRSDFLHKLSGAIAKSYSTVVLEDLNIQGMVHNTRLAKHILDASWGAFGRMLEYKAVNTVKIGRFEPSSKTCSDCGWYNPSLKLSDRIFRCKECGLIIDRDLNASINVRNIGLIKVGWGTPEFTPVETPLAGYLSRRGISYVSLKQEPQSLQG

SEQ ID NO: 45628 - protein, 439 aa, Natrialbaceae sp.
MSEECKTLEAYLAPPTQHKQRKLHDEHDRYESLLHRSFNDKCDTMTAVNEVVTGEDLNWHSKNALKQYVPNLLDKDTYDAKQLADTHPIRYANTAAVFDHDENRHHEICWEVPLPGRGTNFWIPLQLNPEQKEWWHSLIDDEDESMWAGELRLQRDGNRWMLHITANYEVEAEHSCSCESDDVTPVGFDVGESKLLVGCALQDNAPVDPLFVDGGRVRHLRQKQASSEDRLKPRYASNLLDNLVWGRWQDAIEDEIEKASAKAIEYASQFENPVIILEYLDGITDEDIGKYWNRRLGKWLFSQLQSRIEDKAVERGVPVECVYPHHTSKTCHACQHVGYRPHQGTFRCTNEECWVSEYQADLNATANIANRLNPWGESLPVKWVGDDSPRSGGQWQAHQDTSLNEGLPSEKRASDDKVSSSSPAVGAGMEPETGDAHTS

SEQ ID NO: 45629 - protein, 394 aa, unknown
  TnpB Polypeptide
MKIMIKTIRVMLIPNNKQKTKLFQYANTARFIYNWTIAKEQENYKNGGKFISDGDLRKEITQLKKTDEYAWLNNVSNNVAKQAIKDACNAYKRFFRGQSKFPKFKSRKYSTPSFYQDNVKIKFTDTHVKVEGFSGSKKKNKQKLNWIRLAEHGRVPTDCNYTNPRIKYDGINWWITVGIEYKRVMKNSSKDGVGIDLGIKDLAICSDGHKYQNINKTQIVKNLEKRKRRLQRSISRKYEKNKEVNRYCKTNNIIKSEKELLKLNHKLTNIRHNYLHQTTSEIIKREPSFICIEDLNVKGMMKNRHLSKAIQQQGFYKFRKQIEYKAKWNNIPVIIADRFFPSSKLCSCCGNIKKDLKLSDRIYKCECGNVIDRDYQAALNLKRYGENVLKQSIS

SEQ ID NO: 45630 - protein, 397 aa, Streptomyces sp.
VATTCVKRAFKYRFYPTDAQTAELSRTFGCVRKVYNLALAARTEAWARQERVNYNQTSAMLTAWKKTRELAFLNEVSSVPLQQTLRHLQVAFTNFFGKRAKYPRFKSRKKSRKSAEYTTSGFRFRDGKLTLAKMSEPLDIVWSRPLPEGAKPSTVTVSQDAAGRWFVSMLCEDPGVRPLAAADGAIGIDVGLDHLLTLSTGEKIANPRCERKDRARLAVAQRNLARKQKGSANRAKARRKVAKVYARIADRRRDHLHKLTSKLVRENQTLVIEELTVRNMVKNRKLARAISDAAWSEFRGMLEYKAAWYGRELIAVDRWFPSSKLCSTCGTLQDRMPLHVRTWTCGCGTTHDRDVNAAKNLLAAGLAVTACGAGVRPQRRTPGGQSATKQESPRREP

SEQ ID NO: 45631 - protein, 485 aa, Streptomyces sp.
MSGKFRPRPGFVVQAYKFALDPNTAQERALRSHCGAARAAYNWAVSWVTASWWQRKAEASYGLGEEGLTSWRPWSLPALRREFNRVKITDPRFADWWEENSKEAYNTGLANAAAAFDNYANSKQGKRKGPKVGVPRRKVKRKARLACRFTTGTIRVELDGRHATLPRLGTIRTHEPTVKLLARLQDGTARILSATIRHERGRWFVSFQVEAAREITPVARPDGAVGIDLGIKHLAVLADRTGEIRYEPNPQHLDGSLKLLRFHSRRVSRRQGPDRNKGIQPSKRWIKANTERNKVHHRVANLRTDALHKLTTRIRAEYGTVVVEDLSVAGMLKNSRLARKVADAGFGEIRRQLTYKGQRNACRTIVADRWYPSSKTCSACGAVKAKLPLHVRVFTCDVCGLVMDRDENAARNLAALTAAVTTGTGVAGDQDTPCVSKPRGADRKTRRQRPDRNTGRGGRAGGATLPHQRQTEARDRRQAEALVLW

SEQ ID NO: 45632 - protein, 397 aa, Streptomyces sp.
VHAKRAFKYRFYPTDAQAAELSRTFGCVRKVFNMALAARTEAWMLRRERINYNATSAMLTAWKKTGELAYLNEVSSVPLQQALRHLQTAFTNFFSKRAKYPRFKSRKKSRKSAEYTASAFRFRLGELTLAKMAEPLEIVWSRPLPEGAQPSTVTVSQDAAGRWFVSLLVEDPDVRPLPGAETAVGIDAGLDRLLTFSTGEKITNPRHERKDRARLGKAQKELSRKVKGDGANRAKARRKVARIHARIADRRRDHLHKITTRLVRDNQTIVIEDLTVRNLMKNRKLARAISDAAWSEFRSMLEYKAEWYGREVIAVDRWFPSSRLCSKCGVLQDRMPLHVRTWTCGGCGTNHDRDENAANNLLAAGLAVSACGAGVRPQRSTPGGRSAMKQEALRREL

SEQ ID NO: 45633 - protein, 388 aa, Streptomyces sp.
VMRQVKRAFKYRFYPTGEQAAELSRTFGCVRLVYNRALEERTRAWYGEQRRISYVQSSAALTEWKKTQELAFLAEVSSVPLQQALRHLQAAFGSFFAKRAKYPRYKSRKKSRASAEYTRSAFKWRDGRLTLAKMSEPLDIRWSRPLPQGAQPTTVTVSRDAAGRWFVSLLCEDTIAPAPTTANAVGIDAGVTSLVTLSTGEKIANPQHERRDRARLARAQRELSRKVKGSANREKARRKVAEVHARIADRRRDFLHKLSTRLVRENQTVVIEDLTVRNLLKNGRLARAVSDAAWTNLRMMLEYKCAWYGRELVVIDRWFPSSKLCGHCGTVRERLPLNIREWTCDDCGTVHDRDVNAARNILAAGLAASACGDGVRPQRESPGRGNRR

SEQ ID NO: 45634 - protein, 433 aa, Streptomyces sp.
VIDMKLRYNVRVYPSASQRGSLARAFGCARVVWNDALRLRRDAHAQGLPRPTAAELSKRVITEAKKTPGRAWLGEVSAVVLQQSLRDLETAYSNFFASKNGTRKGPRMGPPKTKKKTARQAIRFTVNAHSVTRSGKLRLSKIGDIEVCWSRKLPSKPSSVTVIQDPSGRYFASFVVEVDDKPLPGLDVEETDTGIDLGLSSYAVLRGRKIASPKFFRRQERKLRRAQRAVSRKRKGSNNRRRAKQAVAKIHARIADRRRDFIEQETTRIVRESQAVYVEDLNVKGMATRRGRLGKSVHDHSLGKFVRTLEAKCQRYGRTFVRVDRWFPSTQLCSRPGCGRLTGPKGREELNVRVWTCAECGTRHNRDENAEANLRAAGRKRVAEMQHEAERQNACGEHVRPRKPGLRSMKQEPTRSLAAARGGAGGSHPRSRG

SEQ ID NO: 45635 - protein, 431 aa, Streptomyces sp.
MRADTGRKYRAYPRADQEQMLIDWDHDARALWNLALDHRLMVGRKHDGSWVWSTEQCVLLTEIRNDPDPSVNWIRDLPAQSGQQILRRLDRAFANMANPDHPAGPPVFKRRGDRIGIPFTGQAVRFRKLNRHWAEVRFPVLGWLRIRLSRALGGTIRNATIARDGLGWHVSLGVHSGAKPTAPNEGPGCGVDFGVSVSAWVSTEPAGRFMRPTLTPGEERRLTALEQRKERQLAYAEKRNGGARSNRLMRTIAAIGALRARQARRRLDFTHKLTTDLSKSHGFVGIEDLRVRNMAASASRSQAAGGKKNRNQKAGLNRGILDNAPGERRRQLAYKCALYGSDLRPVPPQGTSQTCPSCNKRDPRNRLRCGREFSCVHCGHTEHADRVASIEIEARARRMGDTDIKGTRSLRSEARGQATGARLRAAPAAAR

SEQ ID NO: 45636 - protein, 369 aa, unknown
  TnpB Polypeptide
LIRSLKFSISNSNPGKLNSLDELWIEYSKLLQLLFSRLRNRLSVDNSYLKTLSTPLSARYRQCAKRQAMLSFKSWCRGQKNSNKKPPVFTSPHLVLNKNLVNISPRGNSFDMWVGISVLKKGKRVYLPIKLYKYANNFLKDWELVQGCRLNRNRKGWYLSLTFRASPPILPISKNMGVDIGYRKTVTTSEGESIGKIKTLCEKCARKKQGSLSERRTKEEIRNHIGRVTNQLIDGNSNIIVEDLKHLKSNKKGKWSRSTNRKFNSWYYPLILRRIRNRCEVVGVQCHSVNPAYTSQDCPECGHRDPKNRKNEVFLCTKCAYSADADYVGARNILSRFLWRSQELIVPVVSNQEQQFDLGPIGVRYQPVL

SEQ ID NO: 45637 - protein, 426 aa, Streptomyces sp.
MSRFRMYPTPQQEPQMLRHCAHARYVWNLAVEQHAHWKLGRKSAPGVAEQCRQLTEARRESEWLRAGNVDVQQQALQDFAKAKAARFTAGFGEPTWRKKHKHEGFRVIGTDRVPEFNEDGTAKTNPNTGKQVMGRSVVLQKLNRRWAQVKVPGCGWVRFRLSRPELPKAKTFRVTLRNGQWHIAFAVIPEPIDAPGSGEIIGIDRGVTITAALSDGRKLNCPQLTAKERVQMRKHQRRAARAPRGSHRKTAEYAKAAKLRAREANRRKDWREKTSTMLARTYDTIRFEKLNIKSMTASAKGTVDKPGTKVRQKAGLNRVILAQGWGLLRQRTEGKAPDRVEDVPAPYTSLRCSACGWIDKDSRKSQAEFVCSSCGFTCNADENAAINVAAGQVIRPGPLARAGGTTPHQRSSVREPQPAWVGIPLF

SEQ ID NO: 45638 - protein, 422 aa, unknown
  TnpB Polypeptide
MSSIKAFRFQLRLRPAHSRELQRWAGALRWLWNQALAEQRARHARGEKYASYVDMAKWLTAWRQAPATAWLAEGPVHPQQQTLKRLDESYKRFFEAARKGDTRRVKPPRFKRRGKEPGMRFPDPKQFKLDPANSRICLPKLGWLRLRLSRPVTGELRNVSLSKEGASWFCSIQTLGPDVALAGLAPSLGIDMGLVQFITLSSGESETPLKAMAEQQRRLRRYQKSVSRKKKGSCNRKKAIKRLGDLHLRIARKRADWLHQLSSEIVSAHPVIALEDLRVAAMSASARGTAERPGTRVRQKAGLNKSILDAAWAEFRRQLEYKTSAVGGEVIAVNPAYTSQRCAACGHTESGNRKTQSSFVCLACGHADNADVNAAKNILAAGHAVWLERAKACGEDVRRAKPARAKRAASSKQEPPEEPCRA

SEQ ID NO: 45639 - protein, 385 aa, unknown
  TnpB Polypeptide
MILANKIRLYPTEVQEQKLWQSVGTARFIYNWVIARQEENYKNGGKFIPDKDLRKEITQLKKTDLQWLSKVSNNVAKQAVKDACDSYKRFFKGLSDKPRFKSRRKSKPSFYNDNCKLKVKDNAVNIEKVGWGNIKPYSIPLGVKYSNPRISFDGKYWYISIGIERELANVELTNESIGIDVGVKDLAICSNGMIFKNINKTKEVKRLKKVLKRKQRKVSRKYEMNKIKKGGENCCQFKKTKNIIKFEKQIRLLHRKLANIRSNHIHQATNKIVKAKPSRVVMETLNIKGMMKNGHLSKAISEQCLYDFKIKMKYKCEFYGIEFVEADKWFPSSKMCSCCGVIKKDLKLKDRVYQCSCGLKIDRDFNASINLSRYKLAQCHLKDKC

SEQ ID NO: 45640 - protein, 373 aa, unknown
  TnpB Polypeptide
VKVFKGFKTELAPNDRQRTLLLKSAGAARWAYNWGLSQKKAALDAKVKVPGVNELNKRLNVLKKTDLPWMYEVSKCCPQEALKNLDAAFKRFWGGRKKSRKVGFPRFKSKRRGVGGFRLSGDFRVGLDHVRLPRLGAMRLKESGYIPAGAKALSATVTEHAGRWFVSVLVEVEQPEFAGVKDTESIVGVDLGVKTLAVVSDGQTFANPKTLGRRLKKLRRLQQSVSRKVKGSSNKKKAAKKVARLHYRIGCVRKDTLHKITTQLTKTKSVVVIEDLNVSGMVKNRRLARAISDVGFWEFRRQLQYKAPLYGCRVVVVNRYFPSSKMCSTCGVRNDALTLNDRTWICECGVTHECRDLNAAINLRNAAVSPTEA

SEQ ID NO: 45641 - protein, 392 aa, unknown
  TnpB Polypeptide
VNRNDHAQGGAAHTVHAVQTQAALLERCFGDRRFAYNQQVEAFNTYDKETNPKPAYPNVTGMKNANEWLRDSPIPSNALSNAIMDFRKAQSAYFRKAQYGKHRPRFASRNDNIQSFRNTMPIRRMDGNRYPLSRKLGSVRIRKRDRLRYPIESLSSWTVKRENRTYYLVLLFDVDIQPKTRSEGRIGIDLGVKDFLTLSTGEKIDYPNRLRRLEKNVKREQRKLSRRTKGRTTTADRRRSWPRRTPSSATTAITSSINCPTADRREPIHRHGDPDGTEHDAEGTEEAGRGRQAHAQRPVTQTRSEPFHTPRRVERLVDKLSYKAEWYGRTLVQVDRFYPSSKLCHDCGHKYKGLRLSEREWTCENCHSRHDRDVNAALNIRDEAIRIGQENQ

SEQ ID NO: 45642 - protein, 358 aa, unknown
  TnpB Polypeptide
MDSSRIERAYKFRLYPTPEQESLLRRTLGCVRLVYNKALDARRTAWHEREEIIGYADTSRMLTAWKKTDDYAFLNEVSAVPLQQGLRHLQSAYMNFFNGIGAYPRYKQKRHGGSMEFTRSAFDYQWPYTLRLAKMMDTRLNVKWSRTLPKGAEPTTVTVSLDPAGRWFVSLLVRDDAVEHLPAVDRAIGIDMGLDAFAILSDGTKIENPRYGKRQCKRLRKAQRALARKQKGSCNYEKQRQRIARIHAHEADQRRDFLHKLSTRIIRENQTVCVETLNVKGLSARCKPKPDGNGGYAKNGQSRKRAMNRSIRDAAWGMFLTMLRYKAEWYGRVFQPIDAGTPAARSAPNAGTIQDASR

SEQ ID NO: 45643 - protein, 541 aa, Streptomyces sp.
MAEKKQLRQIARPFVADGPSGVSIRDRLKGLTPEDEKVLRAVGEHMGRLASLDLARRCRDGLDHSADTWAARKRDLTAASSSRWAGSVTSNTHDQWGLSRRAQHQHLQSLDAGIRTLRHRLSLPIGEKGSRGKPGGYRSRHEWFHKTRRLAILEEQYERVRAEREAGKVSVVRGGRRLLKQRHNLTDPQKTPAQWRGEWEAARWFLTADGESGKRYGNETIRVTPDGEISIKLPAPLADLANARHGRYVLAARVAFPHRGGEWRDRIEANRAVAYRIHLDVSRDRWYLDASWTRKDLPVIPLDSLRAGGVIGVDTNADHLAAWLLDEHGNPTGAPRRFDYDLTGTADHRDAQLRHALTRLLHWARDCGVQAIAIEDLDFTDSKTREKHGRRKRFRQLISGIPTGKLRARLLSMCAEAGISVIAVDPAYTSMWGAEHWQKPLTATRRPASRHAAASVAIGRRSLGLRIRRRTAPPPHHQSDGVGHRTAQARTGDRGSEGNRPRVPGPRTRSADAGRGEKAEDQNAQDRSGRSAEHVQLMLSL

SEQ ID NO: 45644 - protein, 413 aa, unknown
  TnpB Polypeptide
MMRSQKIRLKLTKEQENLAWWYSKVSRNFWNLLVDIDKCNNKGEFDEILSKNGNKIYYSKFHNREIYNLNQSDYLNLAKIVVAKNYEEDCDAWSWYYQPNQSFIYGFLSRELVKIRKLNKGKLNFRSIDEIQPNFDVRCGVSSDNKRPSRIYLKDNGKLQIPTIGDVEFGSVRKGFDLSCKKQVANISFDGKYWYLSYTEDVKNQVTNLPDYTDGLGVDLGIKTLATVSDGTTVPNIKTFRRVRILNKRLKRLQRKVSRKYRINKCNKHNKTKNIIKLEKQIKLIHRSIRNIRINHIRKFVSELVKKQPQYIAIEDLNVKGMMRNKHLAKDIVNCSFYTIKEHLIRKSKERNIIVRLVDRFYPSSRTCSNCGGYKKNFKLSQRVYHCNSCQVKIDRDFNASLNIATTDKYKLA

SEQ ID NO: 45645 - protein, 544 aa, unknown
  TnpB Polypeptide
MTLSDWTRRGLITAAVNVLNESIDDALTLLRRKRIPSYLIRKVRDSCDSPKNNGSGYHYAMGILRQVRLALDKHILDTMEVKIGWRARQRKKVASLLKSGSPDCQRVSHIIESKLDDWVKSGYAFTVPQLRSYSLDFSASTENSIGQGYWFTLDEERENEIHLHLKLPPGINGTHHKDSPYKGKTLTFRFLDWLPRAAKQDRRKTQTAREKREVNRAESLIFRAAKFDDMHNQLMNTLKFQHLALKLARLKQRKDSPPKEIIELQKQITDLKGARRSAPPRLLLRGQRVILQIPFLSPNGSVSSTIFEDRKYSTKAGVDRGLRAPVALSVEKEQSFEDLVISVDTLIKNREKLRKHAYNLTSKLTRKKNNWDQKRSGQSYPAPILKHDRHVEALWRKVRRLDREIARQVASRTVWFCEEHRVKKLFFEDLRSFQGHAGSKDFSYNLTSNLWGKIIDTVRYMRESLGHSKYSVWTVSPRYTSQTCHVCGERGKRVEDEKSTTEKRGGEYFYCEKCEGHFHADINAARNIIHVQDSSAVPGRTMST

SEQ ID NO: 45646 - protein, 330 aa, unknown
  TnpB Polypeptide
VLAFRAVAQTHQASNQLLSLLDDFRRIVNVCIEIGIEKNVSSLEALSLATYHRLSKNVLGYYRLGAISTASRILKNYRRAKRKNSRTRFPHARRLMLTTCYGFKIQDEFLRLPVEPYRYTYIRLNSHTLKVLSGMKARSVTLTRYSFTISYAKEVVQANPEGYIGIDRNLDNVTIASTDQAVRKFDLSRATVIKSTYRLVKSRCRRNDSRIRQVVYDKYGERQRNRIQPILHNVSKKIVEEATTRRYGIVMERLSHMRSLYRRGNWRSKSYRAKMNSWSYGELRREGSLCPCQGHNQAVLDMRVQDPREREATAVVSKMPDDNGQGRERG

SEQ ID NO: 45647 - protein, 373 aa, Deferribacterales sp.
LTTISKAYKFRIYPNKTQQHQLYVEFAASKVVYNYFLNKSIELYNSEKKSSNYFDWAKELTELKKKEEYTWLQQASNGCLQQSLKDLDVAYKNFFRNIKKGVKPGFPNFKKFNSSIRYSNVSCKYSKENHKIQLSKCGWINVADYKTPFGKLMNMTISKTKSGKWFVAICVEQELKKYVNESVSEVGIDVGIKSFLVDSNGDKIDNPNFLKRQDRKIKRLQRQLSKKKIGSNNCKKAKLKLAKEHEKIASQRTNFLHQNSTKLVKENKLIAIEDLNISGMVKNHRLAKSIMDVSWSEFFRMLTYKGERYDCEIKKIGRFEPTSKKCNNCGYIKLDMTLNERSWICPQCNSILDRDINAAKNILSLALDRKEVV

SEQ ID NO: 45648 - protein, 245 aa, Bacillus sp.
LPKLGLVRFAKSREVTGRILNATVRRNPSGRYFVSLLVETEMQKLPKTNSYIGMDVGLKDFAILSDGTIYKNPKFFRSLEEKLAKAQRVLSRRMKGSSRWNKQRVKVARIHEYMTNARKDYLDKISTEIIKNHDVIGIEDLQVSNMLQNHKLAKAISEVSWSQFRTMLEYKAKWYGKQVIVVSKTFASSQLCSCCGYQNKDVKNLNLRKWDCPSCRTHHDRDINASINLKNEAIRLLTARTVEIA

SEQ ID NO: 45649 - protein, 395 aa, Alkaliphilus sp.
MIKGIKVMLIPNNKQNTKLFQYAGASRFAYNWTLEKQQENYTLKATGENGGKFINDGELRKEFTKLKKQQGYEWLNNISNNVTKQAIKDACNAYKRFFKGESKFPRFKSRKKSAPKFYQDVEKIQFNGTHVKLEGFTSSKKKNKQKLNWVRLAEHNRIPFGENVKYINPRVSFDGLNWWISVGIEYEDKARQPTNEGIGIDLGIKDLAICSDIDKTYKNINKTLKVKKIKKKLLRLQRKISKKYEMNKEGGRYKKTCNIIKLENKLKRVHHQLKSIRHNYLHQTTSEIINREPMFIVVEDLAVSNMMKNKHLSKSVQEQCFYEFYRQLEYKSLWNNIKFVIADRFYPSSKLCSACGNFNNNLKLSDRTYTCECGNKMDRDKNASLNLKRFGELAI

SEQ ID NO: 45650 - protein, 283 aa, Crocosphaera sp.
MKSKYFGFPRFKNRYRMRSFVYPQMLKDCLKGNQIKLPQIGWIKFRKSRKIPDGFEIKQARIVRKASGYFVMLSMQLDVNIPSPYPLMEGGMKGGIGHPLGIDLGLDKFLVTSDGELVDRPRFLNRLQRKRKLLQRRLRNKKKGSNNRHKLNLKIARLHQRISDTRKDWHFKLAHHLCDQAQSIFIEDIDFRSWARGMLSKHCLDAAFGQFVTILKWVAWKRDVFVAEVDKNYTSQICPQCSCETGKKTLDVREHICPECGYTTHRDVASAQVIRNRGLTHLD

SEQ ID NO: 45651 - protein, 385 aa, Kitasatospora sp.
VKLVTQVKLMPEADQAAALRATLRTVNKSANWVSVVAFERGVPREYELRKHTYAELKARGLGAQAAQHVIKKVRDAYTTLKGNLKAGNLGKPGSKRRARAESRPVAFRLDAAQPYDDRCLSWQYDQRTVSIWTVAGRLKGVRFACSPDALTMLREDRKGESDLIERDGVFYLIATCDIPEPQVYEPAGFVGVDLGIANIATTSTGYRAAGRGLNRHRERQLDLRKKLQAKGTKSAKRLLKKRARKEARHTANVNHVVSKTIVTTAERTGRGIALEDLTGIRSRVRLRKDQRTTLHSWSFHQLATFVEYKAKRAGVPLVYVDPAYTSQECSQCHHIDRKNRVDQATFACRACGTLLHADDNASHNIARRGETAWTSGRESRVPATP

SEQ ID NO: 45652 - protein, 273 aa, Natronolimnobius sp.
VEDWDSRSLFHNENAELHVNVTNTKQTVRDKQDSRTVVGVDVNEDNVALTALSEDGVEDTLVIDFPEIKFERHRYFTMRKRVQNAGKDSIHDTLEGREERFVRDRLHKVSRHIVEWSQQFEKPCIVFEDLKEMRDSIDYGTRMNRRLHHLPFRALQFYTSYKASFKGIPTAWINPEYTSQRCPMCGHTERANRNKKRFKCRSCSHQDHSDRVASVNIAVKGIKKHQDWNVPALNSLPVVRKVRRQASGAVDAPTVTHDAVRGYQTDGIVGVSD

SEQ ID NO: 45653 - protein, 773 aa, unknown
  TnpB Polypeptide
MPLDYRYEAVDAAGRRLNGTLTADSEKDARRKLFEQGLVVSKLQGEAKAKTSWDWRSLFNKPLSTTELILFTQQFRTLYMAGISLPEALRILHDQAENKQFKWVVGDMQRRVLEGESLHQAFSANRKVFSSLYCAMIAAGESSGALPEVLERLVYLLEHDAKTKQQITSALRYPKMVVFAMVIAFLVLLNFVVPQFASIFQSAKVELPLPTQFALWLNQFFQDYWFIILALFFGFIYAWKAYMKTEKGVFWRDSMALKIPLIGKVVQKAAIARFAAIFSILQRSGLSVLNSLDIIRDTVDNAFFQTKFEGIKTKIQAGSGIAAAVESVKGFTPLAVNLILVGEHSGKLDEMLNDLARHYDNEVELAVEELTEWIGPILIMALGVVVLFFALAIFLPMWDLVLDLVIKAEAPDAWQKEALLSATDPSGFKRVKYCRLVRRMIRGRMRYFVQLIVEGVPPVKHVYAPKDLKVAVDPGPRTMTFYSPEWQQKILVSAGTVSQEKEIARLLRAMDRSRRDTNRECYNADGTVKAAGKKIVWKESKTYKATKAKLADLYRRQAQTRRCLHGEVINQVFGRAGTVIVEKNSYKAFQRAGYGKSLGKSGIAGLITRMTSKAESAGCCVVEVSPRKLRPSQHDPETGTYRKKALWERSHQLGDTDWYMDRDLAAAMNLYFADPATDSYDLKAEQSALARLKQVSGNAGSIVQYKPANRQDEAVLRRNRRIELMKPVPVERLRFKCSCGAGDARADKASKTLPVTGKPAPCQQTPRFQARVV

SEQ ID NO: 45654 - protein, 367 aa, unknown
  TnpB Polypeptide
MLKAYKYRIYPDKEQKVQIAKTFGCCRFVYNQTLAYRKETYEKEKKYISKTSCNNYCNRELKKKYEWLKEVDKFALTNAVYNMDYAYQKFFKGHAGYPKFKNKHSNHKSYTTNFTNVNIVVDFEDGKIKLPKLKKVKAKIHREFVGQIKSATISQVPSGKYYISVLVETGHMELPHTKQETGLDLGIKDLCITSDGKKYRNPKTIKKYEKKLAKLQRQLSHKEKRSRNYYKQKRKIALCHEKITNTRKDYLHKLSHGIISENQVIISENLQIRNMVKNHNLAKSITDASWYELTRQLGYKAKWNGRKYIKIDTFYASSQICCACGYQNIKTKDLSVREWTCPICGAKHDRDVNVAKNILTEGLRQIT

SEQ ID NO: 45655 - protein, 469 aa, Hamadaea sp.
VPVVIVHQAYRFALDPSAVQVQALMSHAGASRKAFNWALSFVKAQLDQRAAEKTYGLSDDQLTPLVGWNLPALRKRWNQVKDEVAPWWAQNSKEAYASGIANLVAGLDAWRDWKSGKRKGRRVGFPKRKTKHRDAKSCMFTTGVIRVEADRKHVTLPRLGRIKLHESARKLARRLEAGTARILFATVKLQGGRWYVSFTVEVDRTIRTPARPDAVIGVDVGLRHLAVLSTGEVVDNPRHLAGAAKGLRRLTRRTSRRVGPDRRTNSKGSNRWYKASRQLARAHARVANKRRDGLHKLTSQLAATYGTIVAEDLHVAGMVRNQRLAKAVSDCGFGRIRTLLGYKTTWNGGRLVTANRWFPSSKTCSGCGAVKAKLPLRVRTFICDECGLTLDRDLNAARNLAALVSVTVNGAGVAVHPQPQGSNGRGADHRTPLAGPVAVKRSPGTASAGKTGTVPPQGGTADHSLTQAY

SEQ ID NO: 45656 - protein, 387 aa, unknown
  TnpB Polypeptide
MKGGWHMTVVKKGVKVRLYPTEEQKILIDKTFGCARFVYNQTLSDCKRSYEQSKHFPSKNERVKNLVSLKEKYEFLKEVDSSALQQSVRDFNKALDSFFKNRNRFGFPKFKSRRRNKQSYRTPYNDCNSKVLDTRHLKLPKLGRVKTKHFNMPKVYRIFNITVEKKPSGKYYASICIETEVQLLPKTGKRIGFDLGLIDLLIGSDGTRVERPKFNYLYKDKLAKEQRKLSKMRTKLERAKLNLDECKNYQKQKHRVAKLHEHIANCAKDFNHKLSRKLVERYDLIAMEDLNVEGLLKNHKLAYSIADVRWLQLTNFVRYKCNWYGKEFKQVDRFYASSKICSCCGAYHKDTVNSLSIREWTCPDCGAHHDRDINAARNILIQALSVA

SEQ ID NO: 45657 - protein, 305 aa, unknown
  TnpB Polypeptide
LPQTIRLIVRQNDPLRPHAGLHLALGLVVDHAGKRAQERATYTPVRGKTVAFDLGVATLLATSEGDLLGRDWRARLERLDALLQGIARGQQKRGLPVATPRYRALTQQLDGWLKTEIFRLVNAWVARVRPEKIVREAVDFHLQPGLSKRLNRLLSRFGKRYLDLALQRLEATHGIVVECREAAYSSQQCHACGYVDAKNRLSQSQFQCRFCNTHVHADVNAARVVCHRRSVVASPSTAASRKRLLHAQVVQFMADFPVSRADSSRVQPLMCGHKDDPRLGNPYFSAVLEAALKAERPAPPSVFAA

SEQ ID NO: 45658 - protein, 585 aa, unknown
  TnpB Polypeptide
MQAVTKLVLTMRSGEIQMQKTLFSRHIPKDKMRSEDAKNVSADLVLFNRMKQASVRLQLRGSKPEIPEGVDLRKKANKELKEKLAPSFHMQLKNRFGTNTYFINSATQEAAASIKSVKELRSDYISEQEEKLDQVKDKLKQTAKQREELEKVKAKLIERSKARKVQKKTLPKPRLLKGGQITFDKESGVYTIWHTNLRTMKRTVISTYKDDYCFETQYVVPTLKKLNATISGLEGRIAHIEAKIRHLKEDVPSICFGSKDFFRKQNTVYADKHDVWQHAFRKRRCRGMTISGRKDSKDGNFVFWYNIATHDLHYRAMNGSDIVFPNVVFPYGQKLLETYIRNQTDEQLSPIAWRIEETGGSFLIKCIITLSDVDMNTDCSDGCIAFDTNVDHLAVAELDRYGNLLDKTTIPFKLDGLTSEQAEHVLSHVLDQVFQKCVATHKPLAAEDLKDVATSELYGSAKRNRILSGFAHTKIRELTDSKSYKYHVAVKYVNPAFTSQIGKIRYMRLYGLSVHTAAAFVIGRRAMGFKEPVPAAYRISIPAEKLNKHHWGHWGSIYRITKNIKPHEMFAPVQNGASSISQAGA

SEQ ID NO: 45659 - protein, 389 aa, Clostridium sp.
MKLLKAYKVEIKPTQEQIIKIHKTIGVSRFIYNFYIAHNKEMYEKEKKFVIGMQFSKWLNNEYIPNNQDKIWIKEVSSKATKQAIMNGEKAFKRFFKGLSQFPKFKKKKNQDVKAYFPKNNKTDWTIERHRVKIPTLGWIRLKEFGYIPTNVKVKSGTVGQKANRYYVSILIEEMSIQSHQLTNEGIGIDLGIKDFAICSNGNKFKNINKTSKIKKVEKKLKREQRKLSRKYESLKTKNKNIKKGKATRQNIQKQIVKIQKLHQRLTNIRTDYINKTVSSIVKQKPSFITIEDLNVSGMMKNKHLAKAVAQQKFYEFRTKLTSKCNQNNIELRIVDRFYPSSKTCSCCGSIKKDLKLSDRVYKCSCGLTIDRDLNASINLANVKKYKIA

SEQ ID NO: 45660 - protein, 585 aa, Clostridioides sp.
  misc_feature (305)..(305): Xaa can be any naturally occurring amino acid
VIAVKKAYKFRIYPNKKQQELINKTFGCCRFVYNKYLAKRIDVYKNDKETFTYKQCSSDLTNLKKELNWLKEPDKFSLQNALKDLDNAYKKFFKEKAGFPKFKSKKINRFSYKTNFTNGNIMYCGQHIKLPKLGMVKVRDKQVPKGRILNATISKEPSGRYYVSLCCTDVDIEAFENTNNHIGLDLGIKEFCISSCGEFIENPKYLKKSLNKLAKLQRELSRKTIGSLNRNKARLKVARLQEHIANQRKDFLQKLSTKLIKENDIICIEDLQVKNMIKNHKLSRLISDVSWSEFIRQLEYKANWXFKEKAGFPKFKSKKINRFSYKTNFTNGNIMYCGQHIKLPKLGMVKIRDKQVPQGRILNATISKEPSGRYYVSLCCTDVDIEAFENTNNHIGLDLGIKEFCISSCGEFIENPKYLKKSLNKLAKLQRELSRKTIGSLNRNKARLKVARLQEHIANQRKDFLQKLSTKLIKENDIICIEDLQVKNMIKNHKLSRSISDVSWSEFIRQLEYKANWHGRQIVKVGKFFASSQICNKCGYKNEEVKNLNIREWICPSCNETHDRDINASINILKEGLRLITIQNK

SEQ ID NO: 45661 - protein, 377 aa, unknown
  TnpB Polypeptide
VIRLLADHCDLYNAALQERREAWRMRKVRVAYGDQSVQLNEIRAADPDGQGRHSFTAQQQTLRRLNATFGAFFNGVHHAKGRQRRVGYPRFRPYQRFDQVLFIAGDGARWEPANGGRGGRWAYATFQAVGRIKVRQHRPVVGRVKTLQVKREGRRWFVVVVAETETVPLPPTGRSVGVDVGVARFLTTSDGEIVANPRFLDAAQQRIADLQRRKEHARPGSGNRRRLRRAVAKEWRRVRNQRRDFHHKTSRRLVDTCDGLALEDLRVAAMTASAAGTVEYPGRNVAAKAGLNRSILDAGWSQFMRILVAKAESAGRRVILVNPARTSIECHICGAGCTRPRQDTVICPVHGVLDADLNGARNIAARAGLGSGQASAA

SEQ ID NO: 45662 - protein, 393 aa, unknown
  TnpB Polypeptide
MLTLKIKLNPEAEIANAIDTTLEAYQASYNRAIAFAWPDIGSRVNGVAIHHGTYYLEKQYGLPTALICSARVRATETLKVVKTALEKRRKKDPSTVFKQPAAKKPIPMRYNNTCMIVQLTKGLVSFSTLQGRKKLAFKVPSCYENKAILDVKSTELWKDKNGKYFLSVVVEYEDIKFESNSNVVGIDLGIKKPAVTSLNKFYGIGYWNQVGRRYFENRKSLQAKGTNSAKRRLRLLSGKENRFRKDCDHVLSRRLVDAVESGTVLVLEDLTSIRGKSYGREFNRKLHTWSFYRLSSFIEYKARMEGVSVVFVNPKYTSQECSCCHHISRANRKTQSRFKCTKCGFQLNADLNAARNIASRYSSKQISSGIPLTNGVQSITPYAATQVAASPCL

SEQ ID NO: 45663 - protein, 491 aa, Ruminiclostridium sp.
LGLRTIHLKLHKPSKLKREIIQKAFENYNNAFNYLLKTAFDNIDEIESNYKSPKGTYSTLSLSKWIDSKRSKELNKFDVQPFKDSLKFDFGMTMASYFAQKQTNPDMVFPNFKQDNTQGNEKLRPIYFCRYDTKRSFCLLYDPDDNKYFAKLFLMNVKNAKVRNISANKRELIYISKKPEPAKSLKRETFIVVPLSFGKWQENMLRQAVEKPEILRTARLLCRNNEYFLSMSINLPEEQEVKTTTFMGVSRGIKNDINYTIVDEKGNSIIKGSLQNCRESKDRKQIICKMANAIADIALKNKSMVILQNLVGKGDKLSWSEGGTVHKPVYGCKMYNDLVRVLEYKLPQKGLPIPAKVSSVDIFHTCCVCGSNTRKNRFSENMFICTTCGASYSIDELGSRNLAVKLIKYENTTFKLKARRTSEGMYLNNELIGLDIFVHKNENPYERLKEEIRNLLEKKEDNYINSKLNFKDIKSIIDKLVKSNFANIEII

SEQ ID NO: 45664 - protein, 436 aa, unknown
  TnpB Polypeptide
MMTKVLRVDCIELPFNPILSKLCHQIKNLYNRANYLVKQALNNREKLLQYYDLNTLLKEEECYLVLPVHTAQHTLKLLSRNWRGFFRAIKEWKAKPERFFAEPNQPRYKPKNGECVAIFSNQQAKIRNGWLVLPKKVGLNYKTRLTASTRLKEVRFIPRRVGYTLELVYEKFIPKQRKKLTRKGAIDLGSVNLVTFVDNLGNQPIVIKDHGKGIKSIIQYYLKVQTKLRAQYVQQQKKQLKQQNRVIYGQAYYRLREKFRKKLKNAIHHLTKFLVDLWVERDLHEVIIGYNPTWKQQMNLGKKTTQIFVTIPFLQIINQLKYKGKERGIHVDLIPEEYTSKSSFLDNEFPQKRENYAGKRSSRGLFSSAQGHKINADINAAYNILIKSDPKALPLRSVNGVGGYVMYPRRVCVDPQGMTLTSSTKYAQPCLLTMQT

SEQ ID NO: 45665 - protein, 381 aa, unknown
  TnpB Polypeptide
MTTVKKGIKVRLYPTENQKVLIDKTIGCARFVYNQTLADCKQFYEQSKHFPSQNDRIKNLVPLKETYEFLKEVDSHAIQQSVRDFNSALNNFFKNRHHFGFPKFKSKHHSKQSYRTTYNERNAKVLDNRRIKLPKLGITKTKHFDMPKVYKIFNITVEKTGTNKYYASICIETEVPPLPKTGKQIGFDVGLVDLLIGSDGTRFKRPKFDYLNKDKLAKEQRKLSKMRIKLERAKLNLDECKNYQKQKHKVAKLYEHVANCAKDFNHKLSRKLVEEYDFIAMEDLNVNGMLKNRKLAYSISDVRWTQLLNFIQYKCNWYGKEFKQVDRFYASSKICSCCGAYHKDIVNSLLIREWTCPDCGAHHDRDVNAAKNILAQALSVA

SEQ ID NO: 45666 - protein, 222 aa, unknown
  TnpB Polypeptide
VFLLRKVSDKGYNNRPAIHTIDFEPEPRPNQGGTIGIDVGIKTFYSDSNGNTVSNPKYLERAMQKLVREQRRLSRKQKGSHNRNRQRIRVARVHEKVTNQRNDFLQKQSTMLVRENQTICIEDLHVKGMIRNHKLAKSIASVSWAKFFEMLEYKAVWYGNELRRVPTMYPSSQTCSACGYQNPLVKNLRIRIWECPICHAVHNRDTNAGINILKKGLQMQSA

SEQ ID NO: 45667 - protein, 269 aa, unknown
  TnpB Polypeptide
MLVVVFQLKSANDLFESKIAHVRIVPQSDSYKIEIVYERQEKEKIETEKWSSIDLGLNNLATVALEKPIIINGRPLKSINQYYNKQRAKIQSQLEKNHGNKSSRKLTRLTNKRNNKIEDYFHKSLRIVVDCLVKNNVSDLVVGYNKEWKQDINIGKRNNQNFVQIPFYKYIQMLEYKCKLEGIGFHTREESYTSKYSALDREDIKKHDTYLDRRVKRGMFKSSKGIRINADLNGALNILRKETGDKAEAILQTLSGRGQVVWPAKVNLC

SEQ ID NO: 45668 - protein, 427 aa, unknown
  TnpB Polypeptide
MKGGIIMYLTQKNQLRNLSKTEYSALRSLCALSKNLYNSTLYAVRQYYFAEKKYMRYENAYHVCKDNENYKLLGTDLAQQTMKVVDRNFKSFFALISKAKSGSYQFNAIHIPHYLPKNGIFSLIIPRIRIYRTKFGRDGYFDIPTSHAFRREHGKITIQFPTNLKPENIKEVRIHPKFDGEYFDIEYVHEAEPETKTLNSENALTVDLGLDNLATCVTNTGASFIVDGKKLKSINQWWNKENARLQSIKDLQGIKGTTRKQFLLARKRKNRMNYHMCKTARIIVNYCLEHDIGNIVVGYNPEWKRNIEIGKQNNQNFVNIPHGNLRQKLNYLCEYYGINYVEQEESYTSKADFFANDNLPIWNADNPKDYIFSGKRISRGQYKSSNGTTYNADCNGALNILRKSKLIGLTALQNSGCLDQPKRIKIV

SEQ ID NO: 45669 - protein, 445 aa, unknown
  TnpB Polypeptide
MKRTNQFNVHPRSTKEREVFVRWLDASASLWNETNYARRQAFLEDDRSVWDADTGSLEGKYKDVLSSSVAQQIIRKNSDAWRSFFSSNEKYHAGKLDERPSPPGYWGNEEDGRVLRTYVRNDQYTIEYGNRSRLEVPIGSELKDELGLNRNQRLRVEVAGDPKWNGEQGRLELVYDELADTFRAFQPVTVPDSRLDSPLASEKAALDVGANNLVACTVSTGQQLLYEGRDLFEQFRETTKRIAYYQSLLENQRTSSKRIDRLYRKRTNRRDHAQDALVRDLVERLYDERVSTLYVGDIKGVLSAHWSPRVNEKTHNFWAYRRFIDRLKDVCKEYGIEVEEESEAWTSQECPKCGEQDETVRHEDSLTCPCGFEGHADLVASESFLRQQNNAVGSMARPVYLKWNNHKWRDNHSPPSIAVEPTANEEYTDRSTAMRGKVASVDSDD

SEQ ID NO: 45670 - protein, 371 aa, Trichococcus sp.
MATVTAKIQIYVSDSDTESLILTSNAYRKACNWLSGKVFESKELNQRNLNALYYKELRNAFGLKSQMAQSVMKTVLARYKSAKSNGHNWSQVIFKLPEYDLVWNRDYSLNQNRFSVNTLDGRLRVKFEKKAMNRYFDGTWKFGTAKLVHKAGKWFLHIPMTKAFAELDPADTNNIVGIDLGINFLATAYDSQGKTTFYSGRTIKHKRAQQKAVRKQLQQKQTASARKRIKETGSRENRYVTDINHQITKALVEQYPVGTCFVLEDLTGVRNATEKVRTKDRYVSVSWAFYQFRTLLTYKAQLNGQCVLVVNPKYTSQTCPKCGHVEKANRNKRTHTFCCKNCRYTSNDDRIGAMNLHRKGVEAISAGAAPA

SEQ ID NO: 45671 - protein, 413 aa, unknown
  TnpB Polypeptide
MQKTETHIIKENHPNYAIFHELSKKTKNLYNAGLYSIKQHYKETGKFKSWHDVRKEFVANDNVDYRALPGKVAKDVIRGLGQDMSSLFGLLKLKKQGLYDKDVKMPYYKDKNGKHIIEFEKQTISKNVNQLSSGMYEYTLCIRELNIKILSKYPEIDCVRIKPKHRSFEIQIIYTVDIPKLKEIKKKNMRIAAIDPGVRNLITMVFNTGDNPIYVSGGLTKSINQYYNKEKARLQSLLPKKQKTSNRIKVLTNKRNEKLKWVFHNTSKSIVNFLVENNIDTLIIGKSNGWKDETNQGRQNNQNFVNIPHNKLIQQLQYKSKEVGINVIMQEESYTSQANFLNGDYIPTYGVDDHRKNEFTGKRNKGLYETNLNRVINSDVNGAYNILKKAFPKAFRGYGIEALPGTPSLLKAM

SEQ ID NO: 45672 - protein, 299 aa, unknown
  TnpB Polypeptide
LFNKKDFNNLIYTNQACSIKNNKIFLSKQISIDIPQFKNQFNTFNQVRIIPKQKFIEIEIVYQYNEINHELNKESYSSIDFGINNLIALVSENNPLIISGKQIKSINQYYNKTKARLLSIKDKSKIKGYTKQLYNLELKRNEKLKDLLHKVSRYLVNYLVKNKIGNIVIGYNKSWKDSINLGNKTNQTFVSIPYLKLINYIKYKCKMAGINFVLHEESYTSKCDSLVLEKLGKQDVYLGKRIKRGLFQSSIGKLINADINGALNIMRKVVNDSYASKIINSGLLFNPIKIRDIYSLNSL

SEQ ID NO: 45673 - protein, 268 aa, Oscillatoriales sp.
MLVFEFKTYEKKSQFSAVDEAIRTAKFVRNSCLRYWMDNKKVDKYDLNKYCAVLAASFPFASELNSQARQASAERAWSAICRFYDNCKKGTPGKKGYPKFQKDCRSVEYKSTGWKLAIDRKSIKFTDKKGIGKLKLKGTRDLHFYQINQIKRVRLVRRADGVYVQFCIDVDRKENIEPNGDTIGLDVGLKEYYTDSNGVMVENPKFLLRSEKVLKRCQRRVSRKIKGSKNRGSSRQILGKRHLKISRQRKDHAIKLARCVVQSNDLIA

SEQ ID NO: 45674 - protein, 369 aa, Actinomadura sp.
MIQSHIVKLVVQVKLLPTPEQATALAETLHACNSAAAWVSRVAHERAVFSRTGLQKLLYAEVRARGLSAQPTLHVIRKVADAYTALRGQIRAGLLGGKCSARRSQAEGKPIAFRPQAAHPFDDRCLSWQIDARMVSIWTTHGRMQNLAFTGEPSQLKTLAEFRQGESDLVYRGGKWFLIATCEVPENPLNSHPRDWIGVDRGIANLATTSDGDNHQGRGLERYRRRMTRVRTQLQSKGTKSAKRKLKKRARREARHTAHVNHKIAKTVVADAQRTERGIALEDLQGIRDRVRLKQHQRATLSSWPFHQLGEFIAYKAQRVGVPVLVVDAAYTPRGVHAAGTSHARTVPRGTTSPVWSAGSLAQPTTSPP

SEQ ID NO: 45675 - protein, 297 aa, Actinomadura sp.
LHVIRKVADAYTALRGQIRAGLLGGKCSARRSQAEGKPIAFRPQAAHPFDDRCLSWQIDARMVSIWTTHGRMQNLAFTGEPSQLKTLAEFRQGESDLVYRGGKWFLIATCEVPENPLNSHPRDWIGVDRGIANLATTSDGDNHQGRGLERYRRRMTRVRTQLQSKGTKSAKRKLKKRARREARHTAHVNHKIAKTVVADAQRTERGIALEDLQGIRDRVRLKQHQRATLSSWPFHQLGEFIAYKAQRVGVPVLVVDAAYTPRGVHAAGTSHARTVPRGTTSPVWSAGSLAQPTTSPP

SEQ ID NO: 45676 - protein, 433 aa, unknown
  TnpB Polypeptide
VLSAASSAPWVFRWGWGEALPGPARCCYVPAVHKAFRFRLYPTSEQEQQLAETAGTVRFVYNLALEQRRDFWRQFKRVTGSVLNFASQGREVTALRREFDWIQAAPSNALTQALRDLDKAFSAYFKGNAGFPQFRRRGVNESFRVQSNQCAVRPLNTKWSAVRLPNIGWVKFRLTRHITGTQQSITVSRDALGWHVSFACCNVPPAVTSDRAPIVAIDRGIVRSLTLSTGEVFNLPQSVSALELLSRHKRRSASKKRRGSNRARAARKQIARVLARIARIRSDWRHRVSTHLASRFEAVAVEDLKVRNMTASATGNGRSAKAGLNREIRAQGWSAFETTLAYKLEERGGTLIKVHPAYSSQECSACGVVDKRSRKSQAAFSCVHCGFALNADHNAALNLLRRSTALMGVEGPGCRPAETSTGGRLRPVENLAA

SEQ ID NO: 45677 - protein, 405 aa, unknown
  TnpB Polypeptide
MLRTSKHSLTKHTNTSKIDVLDELFVLYKKDLIIYINYIIDGILPLGKNISSKDLPIENISHSRYRQLIYKQASEIVRSQLKQSKERRFIRYQKVYSYFANNGRQTKFVNTKFSKLKLKDIMDTRFFTVPTVKNVTINLDERFFDVSYDSSFDGFIKIILPLFNDKGTRALNIKVPFNHHKHSKKFKENNFTLRKVIQLKQIGSAMYASLVWEKEIPLVYEGIDLGIDVGYRKLIATSEGQLLGTEMTDIYKSIVNKEKNSKNHKRGLRERDNLIKTFVAQIELQGVRRVMIEDLCNVKYKSDFHNTVNDLLARWTYRPLLERIIMTCEAKGIIVVKVSPQFTSQTCCKCGSVHKESRNRDEFNCIDCGYTADADYNAAVNIRNKGAIVPLSEKPILEDNFIIIP

SEQ ID NO: 45678 - protein, 415 aa, unknown
  TnpB Polypeptide
MLRAYKYRIYPTDEQKVLFAKTFGCCRFVYNWALNLKITAYRERKETLGIVLLTNLMKSELKTEYKWLSEVNSQSLQSSLRNLDTAYTNFFRNTKAVGFPKFKSRKSRQSFLCPQHCRVDFGMGTITIPKAKDIPAVLHRKFSGTVKAVTVSMTPSGKYYASVLVDTNLQELPPMEKDASTTVGIDLGIKSLAVCSDGRTFDNPKNLQNSLQRLAMLQKRLSRKQKGSANRDKARIKVARLQEHISNCRKDNIHKITHTLTHDSQVRTICMENLNVKGMQRNHHLAQSVVDASFGMFLTMLEYKCRWYGVNLIKIDRFAPSSKTCGKCGYIYKGLKLSERSWTCPECGTHHDRDLNAACNIKEFGLKALPAERGKVKPVDCPTVDERPRALKSRGSKKQEKRELSVSDAHAFRRG

SEQ ID NO: 45679 - protein, 410 aa, unknown
  TnpB Polypeptide
MNLIYCFYIPQTEQLVNLCKVSNNLYNQALYLFRQSLKNENKWLWNADIEKLMKTTPNLEVEINYRLLKAQVSQQILKVLDKNIKAYCKTIKDFKAHPAKYKGMPQLPSFRKRGSLFNLYYTYQSARIKDGIIRLSKDLFISIPQWDKYKERIQNFQQVRIIPSGKKLKIEIVYRYEAKNLDLDKSRYASIDLGIDNLATMVTDKGTFLYSGKFLKSYNRNFNRQLAKLQSIKDKQGIKKATKRMKGLYEKRDKYIEDAFHKYSRMIVNHLIENRIGNLVVGYNTGWKQSVNIGKRNNQKFVQIPFARLVSYLKYKCEIAGIRFIENEESYTSKCDALAKEEIGKHELYLGKRVKRGLFRSSTGKYINADVNGAVNIMRKVVGDSDCINQIIDSGRLLRPIRYNNPFGIA

SEQ ID NO: 45680 - protein, 370 aa, Bacillus sp.
MPKHNKVYKFRLYPTEEQAYLMHKTFGCVRFVYNRMLAERKEAYEKYKDDREQLKKQKPTTPAKYKAEFEWLKEVDSLALANAQLNLQTAYMNFFSGQNDFPTFKSKKDRKSYTTNVVNGNILLLNGHIKLPKLKMIRIKQHREIPQDYRIKSCTISMTPTGKYYVSILTEYEKEMVQKEVETVVGLDFAMDGLYVSSEDERANYPNFYRNMLDQLAKARRVLSRRNKGSERWHKQRIRVAKLHEKVANQRKNFLHHESKNLATHFDVVAIENLNMKGMSQALHFGKSVTDNGWGMFTSFLAYKLNEQGKQLLKIDKWFPSTKTCSNCGNIKNMTLSQRIYSCICGVNLDRDYNAAINIKNEAIRLLALG

SEQ ID NO: 45681 - protein, 432 aa, Nostoc sp.
MSNWIDMLRSHYNWCLNDRLTQYAQQFIMGEYCDIRTKAEACPLTCFVNKNSATGEPWKDSKTDKDGKLRNPRRFAGDIQITALPELKKARPWYSDIDSTVLQQNVKRLDTAYKNFFEGRGFPSFKNRSNFTSFTFAMGVKAQGNKIYLPKLGWMRFHNSRLIPNGFTIKAATVRKRQDGWYVSLKIEDKTVPDYIARPLTEVTSIIGCDLGLTKLVHLSDNHQIHNPRFATNKKTKRVLKLRQRRVSRKSKGSVNRKKAAKKVGRLHKKITDKRQAYQWKVANKIVSRNVDAIAIEDLNVSGMMRCCKVKVDSLTGRFLSNGQSRKKALNRSIADASWSDLTLKIEYLAAKQGKVVVKVNPRHSSQECRNCGHVDKSNRDGEKFICVKCGHIEHADIGAAKTIRDRAFDMVRGDSAKPKRPKQPKETSTRT

SEQ ID NO: 45682 - protein, 418 aa, Scytonema sp.
  misc_feature (418)..(418): Xaa can be any naturally occurring amino acid
MYSLKLELKLNNQEKSKLAGCAGFARFVYNFGLSMLANSWDFEGIKATDSKRLTAIEKVFTNHVKTNPEFAWMRQYPSAIYSCALRNLAKAVERWRKGDSGFPQMKSKRRGDSFTVLKKAGTYQALGEPMLPFTNKQVLQSGKRITIPGLGEFRLKRPIPFLCSSQSFTISRTADKWYVSFSLDIEKIPPVIHEMESVGIDLGVKTFATLSDGSTIVAPSSLKKAKTKLSKLQWRHRRKQIGNHRQGIRASKNALTYFEQVAKSHAHIASIRRDFLQKTTTEISRKYYRIRIEDLNISGMIANGKLSEAVSSLGLYEFRRMLTYKEAFYGTKVELVDRWFPSSKTCSRCGSIQPMPLSERVYKCGAGCGHIMCRDLNAAINLDNAPTKKIRAASAKSTPVDRSGADSPERSRKQTSIX

SEQ ID NO: 45683 - protein, 360 aa, Alloscardovia sp.
MRDSCATGDIMIEAVKVMLDPTAKQARMLTEHTGVARFAYNQALSHVFDQLNNGQKPECSYYGLRKWWNQNKNTLAVGADERVWWSRNSKEAYNTGLENLSRALRNHADSKHGKRRGKRIGFPRFKNHSRCVSGIHFTTGYRLVPDDSHAIRLPRIGRLHRMENVMHRIGHAHVLRIIVTRSADRWYASIGIEHETSPIRARCKRTSVGIDMGVKNLVTLSDGTAIPNPHPFKRVEKRLARAQRMLSRRKKGSHRRDKARLYVARLHQRIYQLRQDALHKITTEPTRAYAHISIEDLSVAGMIRNHHLTKSLRDASFGEFRRQLEYKSIKNECTLHVVDRFYPSSKKCSDCRMAKAKLSQ

SEQ ID NO: 45684 - protein, 392 aa, unknown
  TnpB Polypeptide
MKKTFKYRIYPNKAQQALLQATFGCCRFVYNKTLDIRKTAYETDKMKLSKFDCINRMTALKDEYTWLRAVPAVCLVQAVDNMDTAYQNFFKSGKGYPKFKSKHRSRKSCKFMVPKCVVLQDISRLKLSKLGLVKYKKDREFVGALRHIVVTQENDGKYYASCLVETGVEAPKPKPVDDSTTVGIDLGLKDFIVTSDGRKIPNPRFYATIDRRIARLQKHEARKTKGSKRRARIRLKINKLYIKKQNLIKNYIYHAVKTLLRESQTIVMENLNVGGMVKNHSLAKSIQNICWGELRRVLEYKSQWLGHNLIFIDRWAPSTKTCSCCGFHNSTLTLSDRSWMCPGCGTQHDRDVNAALNIKRMGLETLLPAVSGFDGRGEVGYGFDEASICASY

SEQ ID NO: 45685 - protein, 408 aa, unknown
  TnpB Polypeptide
MIHTRVEKYKIKKSDKYFPMLIDFCTKSKLLYNHANYIVRHEFIDNEKWVRYAELDKILKADKEYPDYRNMPTAQSAQQILRLLDKNWKSFFTSIKDWAKHKDKYLGRPKLPKYLKSGSQYLLILTNQDCKIVDSKIRFPKVFCGFSICSKFLDKPNYKAFQQVRFIPHKNYITAEAVYTIDVPDVCVQTERYIGIDIGINNLATVCNNFGASAFILNGKPVKSVNQYYNKTISHFKSVTKSVNNQDFSNRMRYMTSKRNAKIDDYMHKASRKIIDFCIQNQVSKIVIGQNKEWKQSVNIGKRNNQHFVQIPFARLISMIQYKAEEIGIAVVLTEESYTSGTSFIDNEDPVKENYNKSRRKSRGMFVSNNGIKINADLNGAYQILKKVFPIKWDRGCVLHPVVVAVWQ

SEQ ID NO: 45686 - protein, 565 aa, Streptomyces sp.
VARKRGKKRELRALQAPFTVAAPSGARIRDRLRLTVADERVLCLVGEHLGRHQRADLAERVRLGQVPAKNTQRAERKKRLTAVSSSRWAGAMTRASEDQYQLSMRCLYDERAGLRRAIRTISRRLAAPCGKRSKDGARGYADQNERAQKQRRMQVLKARLALVEQQIADGRPSITAGGRRLAGLRHHLADAQLTESEWRQRWQAARLFLTADGESGAPHGNYTISADPADGSVTLVLPEPLRHLANAPRGRYRLSCTVGFSHRREEWLDRVTAHRAVRYDIVCDRVSGRWYLDASWSTDKAVLPAPDELTARGVRLLGVDLNADHLAACVLDPHGNPIGDPITVPLDLTGPTSTRDGRLRTAISALIALARQHGCAGIAIENLGFADARATGRETMGRGRRGKTFRRTVACLPTARFRERLRGMAHHAGLVVVAVDPAYTSRWGAQHWTKPLQHQTRKSTVTRHHGAAVAIGRRALGYGMRRRPGVTGHHRRMVARRATGQTVSLPRACGTASPPRTAGTPTPGGKTRPCQGDQLALFPGPQDRSGGHRTARPDYGELASTGQQP

SEQ ID NO: 45687 - protein, 416 aa, unknown
  TnpB Polypeptide
MKVPRTVRYRLHPGSGSKNRQLHGTAGACRFVWNHMVEKLRDEYEYGIKPDFRHYSLCQVFTVMRRDDGTTRWLQDYSSKVVRISLKPIETTYKEFFKDVETGRKLNRKPPRFHGRHITPPSFPIDYQSSKVAGSSLYVQKVGWMKMVGNNPYPDGEFKSGQIRHECGNWYAYLTYEVQAEASLPHSIKEVGIDRNIAAGRLAVLSDGTKHGGPDLALKVARRKRYQRKMARQVKGSNRRKVTKVRLQRAFQAERFARLNWAHHVSKGIASEYDLAYVEKLNIRGMTKSAKGTKQNPGRNVKQKSGLNRQILASAWGTLELCLNYKTEVRHVNPAYSSQTCHSCGHVDKDNRKGIKFKCTACGHADDADVNAALNILAFGNGAAGRGGGDTGRASCHSRPEKRQQMGKESSADFAT

SEQ ID NO: 45688 - protein, 370 aa, unknown
  TnpB Polypeptide
LKPSKEQAATLESWRVACQQLYNGALQERRDAWKRAKVSIGYNDQTKSLTELRKADAEWQAVPALVARSALARIDRAFSAFFRRVKTGDKPGFPRFKSRAQYGSIGIGNATIKDSKVNVPKLGPVPFFEYRALRGTVKNVELRKEPDGWFVCIQSDLGPAPAKAEPLTETGIDLGLTSLAVLSTGEAVANPRHLANAQDRIARLSRDLARKQRGSVRRHKARAKLARAHQHVANCRKDFARKLACDLFSRFDLVAHENLNVKGLAGSVLARPIHDAAWTQILRCLSDKAESAGRHLVGVDPRGTTIECSGCGNPVPKLLSERMHVCTVCGLVLERDHNAAINVLNRVPAGLRVHARGGRPASCEASSLIY

SEQ ID NO: 45689 - protein, 544 aa, Streptomyces sp.
LGGLREVAAPFVVPGPSGVAVRARLRVSETDAAVLAEVGMFLGALASRDLAVRSRQGLAHDAAMWAARKREISGGSSARWAGSITKATHDQWALARRGQVAQMGWLRGQIAAIEARLARPLRAKADKRAGLVRGYGSRAEWHAKARRLHGLKDRLGRLEADWAAGRVRVVRGGKQLARLRHHLDEAGLDGQAWRKRWQAARMFLSADGESGKRFGNETIRITPDGSVSVRLPAALAHLASAPHGRYLLDATAHFRHRGEEWADRITAGRAVAYRIHHDPARGRWYVTACWQRTPASVLPLNAALAGGVVAVDMNDDHLAAWRLDVHGNPVGEPKRFSYDLSGTAAHRDAQIRHALTRLLHHTQQCGSAAIAIEDLDFAESKTREKHGRNKRFRRLLSRFPTARLKARLVAMAAEQHIAIVAVDPAYTSRWGAQHWQQPLTTSTRKTTPHDAAAVAIGRRALGHPIRRRTTPPPHDRSDRVGHRTAQAGPESRRREEPRPRIPGPRSRVVPPGHGENAGDQRAQHRSEHATEHASWQQDSLPLSF

SEQ ID NO: 45690 - protein, 338 aa, unknown
  TnpB Polypeptide
MILTKKIKHCRDFTDELRKAKKVAEFAIKYRSRSSKDVKHLGLKSLISNAILKKYSRNKKVKNVKSVKLTIPNQGIKLKENQIYISCLKLHIPFDIKTEKINQVELDNTYAYVSYSVPEKKEYIPGSWIGIDRNTTGHCIVAANPSTGKVFKLGKKANHIHTKYKSIRRKLQKGRKYKNVKRVKNKESRIVRDLNHKISRNLVTEAKKKNAGLVLEDLKGIRKNVNKKLKKRNKSFKGSLNSWSYYQLAEFIKYKAKILGVPVVYVDPHYTSQQCSRCGLLGSRNKKEFKCPHCGHVENADVNAAFVIARRHINSDFRLLLDRDISKSTSVSAQESTL

SEQ ID NO: 45691 - protein, 359 aa, Escherichia sp.
VERLQAFKFQLRPGGQQEREMRRFAGACRFVFNRALARQNENHEAGNKYIPYGKMASWLVEWKNATETQWLKDSPSQPLQQSLKDLERAYKNFFQNRAAFPRFKKRGQNDAFRYPQGVKLDQENSRIFLPKLGWMRYRNSRQVTGVVKNVTVSQSCGKWYISIQTESEVSTPVHPSASMVGLDAGVAKLATLSDGTVFEPVNSFQKNQKTLARLQRQLSRRVKFSNNWQKQKRKIQRLHSRIANIRRDYLHKVTTTVSKNHAMIVIEDLKVSNMSKSAAGTVSQPGRNVRAKSGLNRSILDQGWYEMRRQLEYKQLWRLLFRQRTQASVARAVVIQRKKIACHKVNSDARYVDIQRTPM

SEQ ID NO: 45692 - protein, 372 aa, unknown
  TnpB Polypeptide
MEKAYKFRIYPNKEQQETIQKTFGCCRFVYNHYLARRIELYKEDKSTMNYNACSADLKEFKKSFEWLKEVDSISLQSSLKDLEFAYQNFFREVKKGNSNQGFPKFKSKKNNHKSYKTKYTNGNIQVLDKNIKLPKLGLVKAKVSRVLEGRIINATISQEPSGKYYVSICCTEVLKPQTIKTGAIVGIDLGIKEFAITSDGQHIENPKYLRKAEKKLARLQKELSRKTIGSSNRNKARIKVARQHEKIANQRKDFLHKTSTQLIQDYDIICLETLKVKNMVKNHKLAKAISDVSWSEFVRQLQYKADWNDKIVQQIDSYFPSSQLCSVCGYKNINVKDLSVREWECPECGTIHGRDENAATNILNEGLRLLSA

SEQ ID NO: 45693 - protein, 386 aa, Euryarchaeota sp.
VLSEFRLLVNESIRVALREDLRSRARLARAAYQVLSCGHAVYKQYIPSAFEVALAVLKAHRRRLKRTKRSSVPYMRKLMLKAENQSYRLDRETGRLRIPVRGTEGVQLQLPLSEWHRSFLSDPAWGLGSLTVVPGKIILVVRREAPKAYEPEGAIALDTNEDSLDGVVASDEGMVPAMLPLGGVRQIQQTHFRRRRRLAAKKAGDRRVMRRLLNREGRRERSRVRQRLHLVSKGLVQFAKNGQAAIILEDLTLHGARGRSHRMNRRLSSWPRREIHRQIEYKTALAGVPVIKVNPQWTSKTCPVCGARRRDRVGQVFVCLHCDWEMDRQINAGMNILKTALASNEALARAVRFQPGALRHDVVSPLYDLVRGGPSARDEPSGVERC

SEQ ID NO: 45694 - protein, 374 aa, unknown
  TnpB Polypeptide
VTRLTYKYRLYPTKAQVLALEGNLMLCCELYNAALQERRDAYRIERKSIQLSSQNRQLPKIKEDRAELNSVYAQVLQDVLRRVDKAFVHFFRRVRLKQKAGYPRFHSKRRYDSMTYPQGGFSINGRHLKLSKIGNVKIKLHRVLEGKIKTLTIKRQAGKWFAYFCVEINPLPLQLSHDAIGIDVGLSSFATLSNGEEIRNPRYYKKSQAKLRCAQRKVSRRKNKSSHRRFKAVMILQHVHLHIGMQRLNFHHEESRRLINRYGLIAIEALNIQGLARSMLAKSVYDVGWSSFISLLVYKAENAGRVLEKVDPRGTSQTCVCGTRVTKTLADRWHYCSYCGLTGPRDHIAAQVILSRARTEPSGVNVEVVNSCVA

SEQ ID NO: 45695 - protein, 595 aa, Bacillus sp.
MIISAINQILLHRKEKHKMTNKVKKRQRKPKSEFQKQLDVIRKFSPSHVLEVELHVWEFQHWKMERIGEQLRIIRNTVLGELLKNYKQMVRTKAYKRTMKLYHFLSEQIDKEKDARELKKLEQKKKELTDTLENLRNTHHVTFDFARKYGEQIRKTTFGLPDAVTVWSACEMSWNSMETILFKGAENPYFYKRNDLITFQGKQAERCIILKHNEKKNNFYIHFHDMQFPLMIKKDDVFIQETLSSIAYYMKHGEEIDKQNVERHPLGLPLLSTSRIRNNRIVRKNIREKVRYFVQIVLEGIPVAKRKKDGSFRHTYGVGRVAGDIGTQSLAVVSKDKVFLKNLAERSDHTFVYERKLYLLQRYLERSRRAMNPQYFDEKGRITKGKKVWDFSKRYLKSQKELRDLHRKAAESRKYAHNEEVNRLRSMGDEFIIEQMSIKALQKKAKEVTVNEKTGTFNRRKRFGKSIGKRSPGYFIQQAKYRFIVTDGTVKEANTWTFKASQYDHILDDTSKKQLSKRWHTLPNGIQLQRDLYSAFLLFCTEHDLQKPNKQICDSFFHEFLILHNQCIEEIKNKCKVVLNSGITCNKGKIVVTSA

SEQ ID NO: 45696 - protein, 372 aa, Deltaproteobacteria sp.
MSSETIKLTAKFKLKEVPEGLDDLFSVYCEIVNFLISYAYESNITSFYRLKKETYKSLRERHPELPSHYLYTACQMATAVYKSFRKRKRRGKASGKPVFKKDVIMLDDHLFKPDLEKGVIKLSTPKGRIALEFYPAKYHEKFKDWKVGQAWLVRTPKGVFLNVVFSKGVEIKEPETFVGVDLNENNVTLSLPDGEFVQIITHEREIRTGYFVKRRKIQQKLRAGKRKKELLEKYGERERNRLTDLYHKLANKIVELAEKYGGIALEDLTEIRESIRYSAEMNGRLHRWSFRKLQSIIEYKAKLKGIKVVFVDPAYTSSLCPVCGVKLSPNGHRVVKCSNCGFEADRDVVGSLNIRLKALRMWGVPFPPKALQ

SEQ ID NO: 45697 - protein, 292 aa, Tolypothrix sp.
VLVLEYKVKGKQEQYRAIDEAIRTTQFIRNKAIRYWMDALPEQKVDKIALNNYSTALRKEFRFVKELNSMACQSATERAWSAIDRFYGNCKSKKPGEKGFPRFQKDNRSVEYKTSGWSLHPTKRRITFTDKKAIGEVKLLGKWDIHTYPVKSIKRVRLVRKADGYYCQFAVDIELLPEPRTGDGELGLDVGLEYFYSDSNGHHEENPRFLRKAEKAIKHAQRQIYKKEKGKNQRRLARARYAKKHLRVSRRAIRWSLNHGNSPYISYPRRNPRVTLNSRYDVGESPTYQTQA

SEQ ID NO: 45698 - protein, 489 aa, Tolypothrix sp.
  misc_feature (267)..(267): Xaa can be any naturally occurring amino acid
MATLTYVKGLPTPAEELNSLGLTELEMFLAAYSPVFQKAACETANYLLSGQPFNKSSWNTHLQKTYGISKRHAGGVIAHSLGAVDASKEHRKRHIKTLEGKLKSIHSWITKSEKKLSDSTKFYSKKNWQKSKTGCRFPLSCSVQHRDTNWQNLKFQIHNKKRRAHQLSKQIEHLKVTPIQTVIPKDQAFVVGSKDESFGNQVCQWDGDTLKFRVPACLESRFGKYVQTKLGNYDRNINRLPTDGSRTWHFYRKDGKWNVALQFTPAXVKRISRHSAYGCIGIDMNPGSIGWAYVDGDGNLKAHGQIPLQMGLPSGKQDAQIVDACLQLATLADTFSCPVVCEELDFCAKKEQLSERGRKYARMLSGWAYSRFYELVESILSNRGIYLMKVNPAYTSVIGLVKYARRYGLASDEAAAMAIARRGMRLTENIPDSITAYLSMKDGKHVWSLWNQLNNLIKKSSIKRHNFYAISNWESLVKQWSEQSAKEQA

SEQ ID NO: 45699 - protein, 455 aa, Acinetobacter sp.
MISGVKFRAYPTMEQKVILSQWMGCARLIWNAKCDEDQYFRSFANKFYPFREYFATQDQKYSQFKSKELTPWLFDCPSTILKNSTVNWFNTLKKSIKGTCGRPKRKVKTDKGNIYLTRDLFSFERDPFGKVRLKIGGKKYNIGFLAFKAHSDFKEPNSLYIRKERGQYFVSFCYEDGLDNPVFTPEEHLEHLRGMTAAQLQEIVVGLDRGISIPVHSGDAEFDFSKAQKNHLSKADRYIKRLQRKLARQQKGSNRRAKTKHRIATHHAKKANIRADFAHKTSRSLVDSDKRVFVLEKLNTKQMTRRPVPKKDEDGHFIPNKAKAKAGLNKAILNVGWHQIATFLKYKAARLGKAVLSIPAAYTSQECASCGHIHPDNRKSQERFKCVSCEHIDNADHNAAIVIKSRAIKLILDTGTVLSEDHLISDSGRRGSRKSVKGSALNRIVDEASKEKCAA

SEQ ID NO: 45700 - protein, 411 aa, unknown
  TnpB Polypeptide
MQLVEQHVINRQDPYYSVIDEAAFKSKNLYNAALYEIRQAFIHEGKYLNYNEMDRRMQSHEAYKALPAKVSQQVLVLLDKNWAAFFEAREAYEEDSSKFTGRPHLPKYKHKTEGRNILVYTVQAISKKGLKKGLIQPSMLPISVKTKQKDIDQVRIVPRNGHYVVEVIYTKEPVQANVDPSFCVGIDLGVTNLAAIASNREGFVPRLVNGRPIKAWNQWYNKHMKELKKLLPKADRERVTKQMERITNTRNRRINHYLHASSKRMIDFLAKEGVGTVIIGKNPLWKQETGMGRKNNQNFVSIPHARFIDMLTYKAALAGIQVEVREESYTSQASFLDLDPIPTYKPNDEEEHTFSGKRIGRRNRLYRTKDGRKICADVNGAYNILRKSRPDAFSKAKGVAGYVVHPVRLAV

SEQ ID NO: 45701 - protein, 260 aa, unknown
  TnpB Polypeptide
VEKVKEKYRVRFCFEEKRQLVQNECPLKYRILVVDLGINAPASWSVLTADGTVHARGVIHLSRDEDRLNRRINRKRMYQQAGKKSKNIYRAITSANQQLSIDTAKAIMDTAVAYDVDCIVFEYLDFTGKKKGRKYRERIHMWRANDVQSRVKLQAHRMGMRISRVCAWGTSKYAFDGSGTTNRRSVYHYEHGNKKYNYSVCKFQNGKIYNCDLNASYNIGARFFLREYEKLDGCPKLPPVPMRTLDTLLTLLYSSGEKAA

SEQ ID NO: 45702 - protein, 466 aa, unknown
  TnpB Polypeptide
VSYRYRAYPGEDQESGLFTHASHARFVWNLACEQQSYYRVAGRISSPPNSAARFRQLAEARADNVWLAAGSSSVQQQALRDYDQAVRNWLGHRSHRKPTWRKAGRDEGFCIRDVKVEKCSRRWARVFVPKVGWLRFRLSRALPAGTGMARVTLDTAGRWHVSFTATQPAINREPADSAVGIARGVATTVALSTGQHYQIPHSRKADREARKLAARMSRQKRGSIRREATKRAAGKLHAQAADRRKDWIEKTTTTLIRSHDVIVLEDLRIQRRTSRFGPRAPRPCAYPWTWGARPANRVCARKPREIGSANHPDEGSRVSDRQPRESDDLQSSEEVNGSTSSCDVRSGPIDGEALTVAHHDGATLDDALEIRCIYSAFAATDDDVVAGIEIVSDDLVVTSERRRELRPADIDQHGAAIGQVATEAIGQDLQGWRIAGHALTVTDCGSERTDRHRGSRIRRSALQNEK

SEQ ID NO: 45703 - protein, 161 aa, unknown
  TnpB Polypeptide
MARRVKGSRNWHKAKARVNCAHRKIANIRNDFLHKTTTAISKSHAIAVIEELEVWKMSRSAAGTKENPGRNVKQKSGLNRAILDQAWSEFRRQLEYKQQWRGGRVVLVPSQCTSQQCPRCHHTSPCNRQTQALFCCVSCGYTGNADDVASINILSRGSELL

SEQ ID NO: 45704 - protein, 194 aa, unknown
  TnpB Polypeptide
MWRCRWRSSHRRVLLHSASTWASRNAPPHRRARSSLGAGFGRTRKRWSMRSAPGKKARPGPSTPRSKNQRKDALHKFSTQLVKENAAIFVGDVASSKLVKTKMAKSTLDAGWSMFKAMLEYKGHQAGVVFEEVNEAYSTQACSQCGSIEGPKVLNGLQIRQWTCGCAAVRDRDVNAARNIAARGLARLAEGTPA

SEQ ID NO: 45705 - protein, 347 aa, unknown
  TnpB Polypeptide
MIRRSSLNINQANKGKIATLNLLVEEMTKVVNLYINEIWNQKDFSSKFITFKVETYLSARLQQALGKQALEIVKSQRKRKKKIKPTFTGTVFNLDSRFVDFQYDNNSFDIWIRLKSLGNKIQLKLPTNKHKHYNKFKNWNKNKSIRLVKKHEEFFIEVFFEKEAPKLKKKGKTIGVDCGYKELLVSSNNLSYDDGLEKQYEKIARKKQGSKAFKRALIERNNLINQSLNHLDLNNIKEIVAEDLKDVKKGKKNKKRKISKKFMNKLQRWSYPKVLGKLQQMTEEVGVLLTKVNPAYTSQKCCNCGIICKSNRKGKIYKCICGNEIDADLNASINLSHMGVYSPHVSY

SEQ ID NO: 45706 - protein, 343 aa, unknown
  TnpB Polypeptide
MSKHAGIARFTYNWGLATWQSLYKDGYKPNQRLLRTFFNNHVKTNPDLSWLKEKGICQKITEFAFENLGDAYQRFFKGLADYPNFKKRSKSLGSFTINSGGKAISVGGTRVKLPTIGWVRTYEGLPHTSTTKFTISERAGNWYISFPFEQELPKPSVKVAVVGVDLGIKVLATLSTGVVFDNPKARDKMKNKLAKQSRQLSNKVRGSKRYLKQKLRVTKTHKRTSDIRLNATHKATTTISKNHAKIVVESLNVKGMMSNHKLARAVGDANFYEFRRQLEYKSNKKFGSEIVFAHPFYPSSKTCSSCGHVQDMPLAVRIFDCQSCKISLDRDQNAAKNLEKLLV

SEQ ID NO: 45707 - protein, 355 aa, Bacillus sp.
MSQTITVQIKILPTKDQASILERMSKTYIQTINTLVSEMITEKKSTMKSSKDIHALLPSAVKNQAIRDAKSVYKKAEKNKYKNVPVLKRPVCVWNNQNYCFNNTHISMPIMVNGKASKTPIRALVVDKDHRTLELLKHKLGTLRITKKANKWIAQISVTISTVQDIGTKVMGVDLGLKVPAVAVTDDEKVCFFGNGRKNKYMRKKFLSKRKELGKKKKLNAIKRLKDKERRWMRDQDHKISRSIVNFAKENKISVIHLERLANIRQTTGTSRKNEKNLHTWTLYRLSQFIEYKAKLEGIKVEYVNPAYTSQTCPKCAKRNTAQDRKYKCKCGFEKHRDFVGAMNIRYAPVVDGKS

SEQ ID NO: 45708 - protein, 404 aa, Leptolyngbya sp.
MLILEFKVKAKPAQYSAIDEAIRTAKFIQNKCLRYWMDNRGVNKFDLNKYCAVLASEFSFADELNSMARQASAERAWSAISRFFENCKKKVSGKKGYPKFKKDCRSVEYKTSGWKLSKDRKRINFTDGKKIGLVKLLGSRDLNFYQPNQIKRVRLVKRADGYYAQFAIQADRVEFIEPSGKAVGLDVGLNEFYTDSEGDKIENPRFLRKGERAVKKAQRRVSKRVKGSKNRGKARQILGKRHLKISRQRKDWAVKLARCVVTSNDVVAYEDLRIKNMVRNHCLAKSINDAAWYQFRVWVEYFGRVFGKITIAVNPAGTSQDCSNCGVTVTKGLSTRTHVCQCGCVLDRDHNAGRNILSRGLSTVGHTGTFGLEPSNASGEITTTLAGIILSGQVASMKEESPVL

SEQ ID NO: 45709 - protein, 391 aa, unknown
  TnpB Polypeptide
MVQQKSYKFRIYPNKTQEVLLNKTFGCVRYAWNSWVSLFNNKEVENKDKHYNTPKEFRQVLNWMQEISSASLQQKERDFISFKKQFFNKKRKKRLGSPSFKSKHKRQSYRLTNRRFAVLYEEKQIRLEKIGRVKAVFDRVIPEGVKFLNVTVSKDLCGSYFVSVLVEENIVAKAKTNKEVGIDVGLKNFAIMSSGEIVANPKFFRENQSKLKRLQQHFSRKVKGSARRSKTKLKIAKLHRTIGRQRDYFLHCLSTYLVTNFDMIGIEDLNVSGMIKNHKLAKSIADASWSKFFSQLTYKSSWYGKELVKIGRFFPSSKTCTVCGWRKSDLKLSDREFICECCGVAEDRDINASKNILKESVRVSTELQTWRDRKTLSKASTASPCEALKVL

SEQ ID NO: 45710 - protein, 244 aa, Actinomadura sp.
VVLPRRRESGKRYGNETIRVTPDGEVSIRLPAPLAHLANAPHSRYVLAARARFAHRAAEWADRICADRAVAYRIHHDPDRDRWYLTASWQRPAIPTVPLEAARTHGIIGVDTNADHFAAYRLDTHGNPIGDPVRFGYDLSGTADHRDAQIRHAITALLHWARRCGVAAIAIEDLDFAQEKTREKHGRRKRFRQLISGFPTGKLKARLVSMAAVQGLAIVAVDPAYTSSGATSTGASPSPAANVQ

SEQ ID NO: 45711 - protein, 533 aa, unknown
  TnpB Polypeptide
MPKSANPKLYLGVHARLVFLKKEDERAVLDLMRRFSSATRYAYNRLLEGQDRKELKREDSPLCRLFGLNTRYADGAIEKAQATLDSARELGQDPRKVIFGGRKLFEQLKRKHLSGKALLALKREWKEKRQGFLYSRGDAAKKGNANLRLEPKDGVLWLRVNLGNGGHVRALVKTAHPQLKALIERAYVSLPYNVTLRLEDGEVYARFSWSEELPPPVHTKANGVLGIDANGDPYHLALAVVSPDGNLRRYLTLSLEEVDRAPNKGTKELILWKIAHQVVAVAEEHGVAIATERLKYLRKSKGGDGSGRHFRRKQHRFAYRSLLAKVHSLARKRGVGVLEVNPEDTSAIGALKYAPQLHLSKDVAAAYVIGRRALGYEERLPRVYQALLKDDAFYANAQGFYNTRLQELQKLREAEKNPYHRRKLSREIGKARRALSFLSSFPGRSGQKASPRSSSGSQKGSTDGRNLFGANPWRVLRVGLLLPLLGLEAPRDLSRLKPILHFTSPPVGSWKGWKVGSGPPPGGGPGCTSVRFC

SEQ ID NO: 45712 - protein, 364 aa, unknown
  TnpB Polypeptide
MPSYLRRSAIQHALGSVSSYETRLGQWKETGVLSGRPKLTCRNHAMPVFYRDVMYREGAEGKDEAYLKLYDGHDWKWFRVYLKRTDMEYLPRNWKGKKTSAPALEKRHRRYFLRFSCTEEVTLTKTPVKEQIICSVDLGINTDAVCTIMRSDGTVLGRRFIDHPSEKDRMYRTLGRIRRFQREHGSAQTQGRWAYTKRLNTELGKKTAGAIVRYAEENHADVIVFEYLEMQGKISGKKKQKLHLWRKRDIQKCCEHQAHRKGMRVSRICAWNTSRLAYDGSGAVTRDWENHSLCTFQTGKRYHCDLSASCNIGARYFIRELLKPLPATERSLLEAKVPPVKRRTSCVYADLRKLHSEMELLKAA

SEQ ID NO: 45713 - protein, 465 aa, Cyanobacteria sp.
LLTNYVYKLRPNITQSSKMEQWINMLRYHYNWCLGDRISQYNQQFIQGEYSDLRTKVSASPLTCFVSKNGATGEPWKNTGNAKNPRRSAGGIQITALPQLKAARPWYAAIDSTVLQQNVKRLDIAYKNFFEGRGFPKFKNRSNFTSFAYTMGVKAQGSKIYLPKLGWMRFYNSREIPGGFTIKAATLRQRQDGWYVALRIEDKTVPDLVAKSLTEVKSVIGCDLGIAKLVHLSDGCQFQNPKFGNNKKVRRLLKVRQRRVNRKVKGSNNRKKAARIVGRLHKKIADKRQAYQWWVANAIVSRRVDGIALEDLNVSGMLRRCRVKKDEESGRFLPNGQSRKKGLNRAISDAAWNELILNIEYLAAKQGKIAIKINPKHSSTECRKCGQIDRENRDGEKFICSACGFFAHADISAAKNIRDRVLEMVRRDSTEPADKTAKRPKKCKEKSPRPGGKGGEPGNLAMQGY

SEQ ID NO: 45714 - protein, 441 aa, Haloferax sp.
MSTTQTANKTLEATLAPPTRCKEQRLQQTLSEYRDALNDAFEQDCTSMSATNDVVTPYSLPYQAKDALKSYVPKLHNTYNANELDDEHPLRFVNRAGKFDRDSSREYEICWDVPQPGRGTNFWIPLRLNPKQEGLWDDLLDDESSTKVGELRLQKYRKTWTLHVTVEYEVEDTTEMPENPTRVGFDIGESMLVTGCALQHDTPTNPLLINGKEAKRLRKEMFTTLKRLQERDASEWRVEEHFSYYQNRLTDIIEKASRQSVEYARQFENPVIVMEDLTYIRESLDYGKYMNRRLHSWAFARLQGRIEDKAKDAGIPVRYVHPQYTSKTCHSCNHIGYRPRQAEFKCKNPECHVSTFQADINASANIARRVDPWGESLPVKQVGDDSPQDGSGCDTATTQCEQSEIPSQMTLTTFQESKPTASVHETASREPTRTSGSGDDD

SEQ ID NO: 45715 - protein, 581 aa, unknown
  TnpB Polypeptide
MGVFSSLLLRRAVAVELEVTEELNKLLYSIEFAYLSIVREVIEYAVKNNVTSATQLHGLFYSKYRQEYPSLNSQLVIQAIRQASEIAKSFIERKKKGSTDKPYPEVKTMSIRFNEIAWGYDEFIRSIAPVRIAISPISTGKRGRGGRRFEIWLRPHKRFWQYWWRVLTGEAELASTLILKRKGGKWYAIFIFKLKPKKEEPKSIVAFDINENTVAVSRIDIETTVDKVADWNRQYVTPELYMIRTDFGRLARRYERIRNAIIEKLKPKFALPNGKYINITNTREFRKQVKRLRERGRKVGRVRHVANELTKTPAIIITEELGEKPQESMIEDVGRSELRHRIKQTPFKALEKAVEDKALERGSKIFRVSSYRNSRVCPIHFVRLEKTDDWHTLYCPLGHYVDRDYASVMNMTWKATPESWTKGVWWDLRREMDWGEYEGKSNPLVPHPIMQYLHATLKEFMASLEKSPAVLARGGPMNPAGGANEGWARKPPQHGEEASEESYRESRKATPCPEPSIIIDVDNEFGNMLIKANNRMPKRSSEGMAFVTIGVDENGEVAYISIEPEDEELAKFIQGIRTKHQ

SEQ ID NO: 45716 - protein, 389 aa, unknown
  TnpB Polypeptide
MGRLLKSFKTEINPTEEQKVKIRKTIGTCRFIYNFYLAHNKELHENGEKFMSSHQFRVWLNNEYIPNHPEYAWIKESYSKTVTQSVNHGETAFKKFFKHQSGFPKFKKKGKSDVKMYFVKNNPKDCRCERHRINIPSLGWVRVKEKGYIPVTKDGYVIKSGSVSMKAGRFYVSVLAEIPDSKITTNDYSEGIGIDLGLKDFAIISNGKTYKNINKSARLKKLEKRLIREQRCLSRKYENLKKGESTQKANIQKQKLKVQKLYHRIDNVRTDYMNKTIAEIVKTKPSYITIEDLNVSGMMKNRHLSKTVASQRFYEFKVKLQAKCKENSIELRVVDRWYPSSKTCHCCGVIKKDLKLSDRIFRCNCGYVENRDMNAALNLKDAKTYEVAS

SEQ ID NO: 45717 - protein, 379 aa, unknown
  TnpB Polypeptide
MQRTISVVLDKNPAIADTISQFNECCNFFLKLGFENRTSSKRKLQMLGYFEARKRFPKLPSALVQGARDCAHDMLKREKLQRLPTKRPYSSARFDRRTAKAFLESGTLSITTVNGRLKVPLRVARYFDKYKGGKVISLRVRNDRGILRADLIVDLPDVPIKAVHNPKVIGMDRGIVNTAVLSNNVFFNSKTVRNVRARYTYLVRRLQSAGTRSAKRHLCRLRGRERRFRADVNHRIAKSVAAMEFDVLVLEDLSVKKDKKFGRRFNRKLGGWSFFQLERFLAYKLEEVGKCLVKVPPEYTSQMCSRCGNIGVRNGNNYRCGACGLRLNADLNAARNIAKLGKALLGRPIVNGPIVASDDAGHGTSDELSYKPPILMGGS

SEQ ID NO: 45718 - protein, 425 aa, unknown
  TnpB Polypeptide
MSEATKTLRINLGVPSARKASAFRKTAMNYLRAVNLCKDAIEYWEAISDKPITRTNLHHLCYKTIRKYLPAQLAADAITDAWANRNDPCARVRTMSVSFNVPRSGNVGKTARNNPIIRIRLDGERIAIPIEMDGAWERLQKHLDGGWTFTRFRVNDDWTASIVLRKEVPERNTNGTIGIDVGSNHLATLTVADASGAVARQLYLGRDVALTQQRALERRGRLQSRSDKGSRRAQRSLARLKGYEANFTKTRCYQIAHEIVKLAIRYKTSISIENLSHLRDTSLHRAANRVVKRLPYHEFRAALESVAGQAGIPVVVVPAENTSRTCSRCGHVAKESRRGSLFRCVKCGFTLNADRNASLNVARRGLSLERQKTEDILADSSVGSQHSSDGGRVNDPVRNHDGCVSSCSQHAHLPEFKPPNLLGGS

SEQ ID NO: 45719 - protein, 244 aa, Lactobacillus sp.
LKRICETRIGTVTLTKDSADRFFLSMQLASDESFVKVSKATHGHVGIDLNTDNFLTDSEGNIIPNPRYYRTIKGKLAKEQRILSRRQQRAKKEHRSLRDSKNYQKQRLLVAKLHAKVMNQRHNFLQQISTALIKNHDLVVAEELRSKNLLKNHALALSISDVGWRTFLGMLAYKAKLYGRQFITINPRNTTQTCCDCGFVMGTNGTDKLTLDDRNWTCPNCGIHHIRDWNAAKNILDKGIAKLA

SEQ ID NO: 45720 - protein, 347 aa, Lactobacillus sp.
MRQNAKQMSNHYQFLEDKRIDSLTKANAIQNYRKAWNAFRKVHATGVPKFHRKSYHWRYQTNCQYPGQKTALLTNGTVCFLDNSHVKVPKIGLLRVAGSQARLLKRICETRIGTVTLTKDSADRFFLSMQLASDESFVKVSKATHGHVGIDLNTDNFLTDSEGNIVPNPRYYRTIKGKLAKEQRILSRRQQRAKKEHRSLRDSKNYQKQRLLVAKLHAKVMNQRHNFLQQISTALIKNHDLVVAEELRSKNLLKNHALALSISDVGWRTFLGMLAYKAKLYGRQFITINPRNTTQTCRDCGFVMGTNGADKLTLDDRNWTCPNCGIHHIRDWNAAKNILDKGIAKLA

SEQ ID NO: 45721 - protein, 244 aa, Lactobacillus sp.
LKRICETRIGTVTLTKDSADRFFLSMQLASDESFVKVSKATHGHVGIDLNTDNFLTDSEGNIVPNPRYYRTIKGKLAKEQRILSRRQQRAKKEHRSLRDSKNYQKQRLLVAKLHAKVMNQRHNFLQQISTALIKNHDLVVAEELRSKNLLKNHALALSISDVGWRTFLGMLAYKAKLYGRQFITINPRNTTQTCRDCGFVMGTNGTDKLTLDDRNWTCPNCGIHHIRDWNAAKNILDKGIAKLA

SEQ ID NO: 45722 - protein, 544 aa, unknown
  TnpB Polypeptide
LCDGGARFRPPSGAFSIAARVFFILFFNFLFRNFYFRSTLGKLYKAPVHPEPVSRAGNAVRADAMRGPEPRVLELESPRPLGAARVNQAEAVEEQKVTKIKNKSKNKNIGNGENGIVLLNVWAENPNCAEAVVWRADTVKLLPTPEQVDLLLRLAKATRALINIEHARRRALYERLGIIDCSVKGAYHDPSYAGFKEVLGSKNFDEALCLAAESWKSFKELLELKEQGRLPAWLDPKPPKRLKRLLIAVKHDNYRVDAQNKVIRLGYYNTEIRFQGELRWWWQRLQQGRLIIAYDDVKCAWYAHIASEVKLKRDMRAPLKCGIDLGQERLAAAVTESGVALLYRGTVLKSEYHFLKMEVSELDKRARFADFDVQVWLEKRRWLYRRFRVRKRELIKSMAAHLVKMLRELGATEIYIGYPRDIKRDKPTEGNNAWPYWQTIEEIARAAENYGIAAYLVPEENTSKTCARHGCEVVREPRGLVRCPYGHIMHADLNAAMNILKRGGGRVPEQVKVLSFTPTPDGVYERRKRRENRAEPDSPAQRAG

SEQ ID NO: 45723 - protein, 387 aa, Tissierellia sp.
MRAYKTEINPTPEQKRIIQQTIGTCRYIYNFYLAHNTEIYEKEKRFVTANEFSKWLNNDFIPNNPEYSWIKGVSSKAVKQSIINAEGAFKRFFKGQSKFPKFKKKNKSNVKMYFVKTDAKTIIPCERHRIKVPTLGWVKLKEKGYIPTNKIIKSGTVSIQAGRYYVSVTVEEQTKENNQKSTEGIGIDLGLKEFVVCSNGLVKRNINKTKEVKKLEKKLKREQRCLSRKYEDFKKRNKNNEKGGATRQNIQKQALKVQKLHQKLTHIRIDYVNKTISEVVEQKPSFITIEDLNVSGMMKNRHLSKAIAQQKLYEFRNKLTTKCKVLDIELRTVDKFFPSSKLCHECGQIKKDLKLSDRKYICDCGYVEDRDYNASLNLRDAKIYKVA

SEQ ID NO: 45724 - protein, 389 aa, Nonomuraea sp.
MDLKVMCSIVRLVVRVRLLPTPEQAAALEATLHAANRAANLVAALAFRHRCFRNFDLRKHSYDRIKAEFVLAAQAAQHVIKKVCDAYRTLHANLAAGNLGEPGSARRIKVESKPISFRPLAAQPYDDRCLSWQHQARTVSIWTTAGRLKGVAFTGSAEHLALLAACRRGESDLVCRDGMWFLHACVEVADAPTARPDGFLGIDLGIANIATTSTGIRHSGKHLNAVRHRNRELRRRLQAKRTKSARRLLKRRRRKEARFAANVNHRIAKQIVTEAERTGRGIALEDLQGIRERVRLRKPQRVTLHSWSFHQLGSFIGYKAVRAGVAVIHVDPAYTSQQCSHCGHVDKNNRTSQETFVCTSCDFAEHADVNAARNIASRGAAGWAVSHAA

SEQ ID NO: 45725 - protein, 383 aa, Nonomuraea sp.
VQLRYNFRLHPSAGQRQALARAFGCARTVFNDGLRARREAHAGGLPYISDADLSKQVITQAKKTPERAWLGEVSAVVLQQALADLNTAYRNFFASLSGERKGPKAAPPRYRSRKDNRQAVRFTKNARFTVTAGGKLRLPKIGDVPVRWSRDLPAEPSSVTVIKDAAGRYFASFVVETGADPLPQAPDEVGIDLGLTHFAVLSDGRKIDNPRFLRRAGRRLKKAQQALSRKAKGSANRKKAAARVARAHVRVADARRDFAHKLSTRIIRDNQAVYVEDLCVKGLARTRLAKSVHDAGWSQFVTMLEYKAGRYGRGFAKVGRFFPSSKSCSACGAVAGTMPLNIRSWICPCGAVHDRDVNAAINILAAGRAERLNACGGTVRPAA

SEQ ID NO: 45726 - protein, 400 aa, Nonomuraea sp.
LIGVSRYRLQPSPVQEQALLEHCGHARYVWNLAVQQHACWKSGRKSAPGFAEQCRQLTEARAAFEWLRAGSIIVQQQALKDFAQAMSNFFGGSHRRPTWRKRGRSEGFRIVAVKAGDVRRLSRHVGEVKVPKVGWARFRWSRAVPEGVKSYRITRDRAGRWHVAFAVIPDPIPVPGLGEVVGVDRGVAVSAALSTGEMLDAPGLRKAEKARLLRLLRKLARAERGSNGRGKVKAAIARLKARESDRRKDWVEKVSTDLARRFDVIAVEDLKIRAMTRSAGGTVEAPGRNVRAKAGLNRGILAAGWGALVERLGHKAAGRVLKIGPAYTSQRCSACGIVDREARESQARYRCRSCGYAGNADVNAARNIAHAAGHVVSAREGPWNAGPVHREPQRDLLLVG

SEQ ID NO: 45727 - protein, 383 aa, Nonomuraea sp.
VKLVVQVKLLPDAATEQALRETLTLCNRAANHVSRRAHATRIQEKTHLQRLVYGELKAMGLSAQPTIHTIRKVAGAYATLNGHLTAGNYGPQGARQRARVKASPIRFRKDAAQPFDDRCLSWQLQTRTVSIWTVRGRLQRIPFACSSEQAELLTRHRQGESDLVLRGGCWYLYATCDIPEPEPYAPDGFLGVDLGIANIATTSDGLRHAGKHLNQVRHRNRGLRKRLQAKGTKSAKRVLHRISGREARFAADVNHRISKSIVTEAERTSRGIALEDLGGIRERVRLRKPQRVALHSWSFQQLGAFIAYKALRAGVPVEHVDPAYTSQRCSACAHTDRRNRPDQASFVCTSCGFAEHADVNAARNIALRGAAGWAVSHAADDAA

SEQ ID NO: 45728 - protein, 390 aa, Nonomuraea sp.
LKFLLRPTRHQEIALTACLEDHRQLYNAALEHRRTAYAKAGVSVRYGDQSAELKHIRADDTGGQGRWSFSSQQATLRRLDKAFAAFFRRVKAGRTPGFPRFKGRGRFDTVEWPKDGDGCRWDSQPGHPSATYVRLQGVGHVRVHRHRPVKGRVKTISVKREGSRWYLVLSCDNVPAEPLPATGAMAGIDLGVASLVTTSDGVRVANPRHLAAGAGRLADAQRDLARKRRGSRRRRKAVARVAALHGKVRRQRLDYAHKAALVLVRAYDVIVHEDLRIANMTRSASGTVEAPGRNVAQKSGLNRSILDAGWGVFLTTLSHKAESAGRELIAVNPAGTSRTCSRCGHCAKANRVTQAEFRCVSCGHAAHADVNAAVNIVRAGLALRQAAEAA

SEQ ID NO: 45729 - protein, 653 aa, Nonomuraea sp.
VPPPGPPGSPVPAQPDEGDRVGREVVGERAGEARHPLLHRRDPVRVGDGVDVRGRAGQRGDRGRAPDARPAQVHRAAHRGVLRVDGLDHQVARLRVLRDHLVERLHHGVVGELVHLLPVQPERDLPAGHLHLQPVVAPGLDRGGGGRDRRLGAVNRLLHRRLGVVPAAEVPPVEVSAVADPEHHQEALRSAHLAGGQLHQILPRGPAPSGGGGIGSGRAAKARACPDLSGPRITDVLPGYVGASRYRGVVVTERDRGWGVRRSFKFLLRPTRHQEIALTACLEDHRQLYNAALEHRRTAYAKAGVSVRYGDQSAELKHIRGDDIGGQGRWSFSSQQATLRRLDKAFGAFFRRVKAGETPGFPRFKGRGRFDTVEWPKDGDGCRWDSQPEHPSATFVRLQGVGHVRVHRHRPVKGRVKTIAVKREGSRWFVVLSCDDVPAELLPATGAVAGIDMGVASLVTTSDGVHVANPRRLAATADRLADAQRDLARKKRGSRRRRKAVARVAALYGKVRRQRLDHAHKAALVLVGAYDVIVHEDLRIANMTRRASGTFDQPGRNVAQKSGLNRSILDAGWGVFLTILSHKAESAGRELIAVNPAGTSRTCSRCGHVAKENRLTQAEFRCVSCGHVAHADVNAAVNIVRAGLALREAAQAA

SEQ ID NO: 45730 - protein, 380 aa, Nonomuraea sp.
MKLVVQVRLLPTPEQAAALEATLRAVNAAACQVSTLAYDQRVFRNYDLRKHAYTSIKDHYGLAAQAAQHVIKKVADAYAVLHANLRAGNLGKPGSARRLKAESKPIAFRPDAAQPFDDRCLSWQIDARTVSIWTVAGRLKDLTFTASAEQLKTLSAYRKGESDLVCRDGVWFLIATCDLPDRPVSLPDGFLGVDLGIANIATTSTGTRHCGKRLNAVRHRRRELRRRLQAKGTKSAKRLLKKRRRAEARLAANTNHVIAKQIVAEAERTGQGIALEDLQGIRDRVRLRKPQRVTLHAWSFHQLGSFISYKAARAGVAVIHVDPSYTSQQCSACGHVDKNNRRDQETFSCTSCGFAEHADVNAARNIASRGETGWAVSHAA

SEQ ID NO: 45731 - protein, 374 aa, unknown
  TnpB Polypeptide
MKGSDIMAEKAYKYRIYPNKKQQELIQKTFGCTRFVYNYYLDKKIKTYEQDKMTFTYNMCSKDLTQLKKELIWLKEVDSVGLQSSLRDLDMAYQKFFKEHSGYPKFKSKKNRHKSYKTKNTNNCLGFENKHIKLPKLGLVKVRDKQIPQGRILNATISQESNGQYYCSLCCTDITFEQLPKTNRNIGLDLGIVDFAILSDGTKIDNPRFYEKSEKKLAKLQRELSRKTIGSNRWNKARVKVAKLQKHISNQRNDFLQKISTSIVQNFDVISIEDLDVKSMRETDSNTRNKRVGDVSWSEFRRMLTYKCEWYGKTLSVIDRYFPSSQICHCCGHRDSKKSEDIRIWSCPACNSELDRDVNAAINILNEGLRLVNN

SEQ ID NO: 45732 - protein, 241 aa, Kandleria sp.
MVVRYIMEKMTVTAKIQISVNADSKALLDETMSVYSDACNYVSDYVFRTHDLKQFSLNKILYSTLREKFGLKSQMAQSVFKTVIARYKTILENQNEWIQPSFKKPQYDLVWNRDYSLTQNCFSVNTLNGRVKLPYFSEGMSKYFNHNIYKFGTAKLVNKHGKYFLHIPVTYDIEESNISDICNVVGIDRGINFVVATYDSKHKSGFVSGKAFVKNSKCVRPHHQDVGLKLSVNEKTVGCRM

SEQ ID NO: 45733 - protein, 204 aa, Methanomicrobiales sp.
MITGRSMVSTGDDPQSVDWIGVDLNTTGHLAVVAHPASGGVVMLGRRPEHAEGERADLTRRYSSTSKYREIRRRKERERSIQGDRNQKIAKEIVKMARQLWCGIKLEDLTGAGFAGRKEPNTPLLLSRHEGSFHHLQGLIEARAQNAGVCVVYVDPALTSRRCSRCGEPGVRRGKKFLCRRCGYAIHADANAAFNIAAAPPSRA

SEQ ID NO: 45734 - protein, 301 aa, unknown
  TnpB Polypeptide
VLKTLQIKLLPEDNQKDILLGTFKKFNEACNFVSRIAWDNKIYNKISLQKLVYYDIRNKFGLSAQLTIRVIGKVVDTYLTDRSVFHEFREYGSIVYDQRVMSFKSMDEVSLNTIKGRIRIPVTIGKYVEIPFNRMRGQCDLVRKHKLFYLMVSVDVPEQPVIEPKNVIGVDMGIANISVDSTGKYYSGEKVKEVREHNLDLRSRLQSVNTKSAKRHLKKLSGKEHRFATNTNHIISKEIVNKAKGTSSAIAIEDLSGIRMRETVKKGNRYMHNSWAFYQLRLFIEYKAKRSRHSGNRYRPT

SEQ ID NO: 45735 - protein, 419 aa, unknown
  TnpB Polypeptide
LQKLDELAAEYIRVTQMYVHWLIDREIKEPDKYAPVPEQEVSTPLSDRWQRCAWMQACGLVRSWYSNERENRPVLQNICLQANANVVVIETSDTPQFDFWLLISTLHKGRPIRVPITLYGRAKEAIAQFPKLCTGVTLNKRDDGWYATFVVERKGKKARSSQVVGVDIGMVSIVSTSTGQRYGQISPELRQRVEKATAKRRRKQKLNACLKRKDKPTVDLSDHKAEAFARNEIGRALNQLLADLPQKTNVALERLSVKDMRFKSRQMNRALRAAQLGYVRDKLKFKLDERGIRYRSVQPAYSSQECSHCGFVSPMNRRSQANFECLWCGYQANADENAAANIAKRFGDEALNTLPFRDVEAALAIRFMRQLPDTRSVSAGLELQPNVLWLPRGKVVATVGSVPPPTVNQPGQDPCHICL

SEQ ID NO: 45736 - protein, 468 aa, unknown
  TnpB Polypeptide
MSKIQKLNIFYKSSTKTNNDDEKIGHSFELIKDKKYSCSGCSECEWVHKYLSKETQSFMFGRNCVLSSLLSPLFVDILHIIWYYMNMKLVRAVKIKLNVDPKVFEKTINVYTKAFNFVCQTGWDDKDFNGVSLHHKTYKVIKENLPSQLAVSARMKATESLKSVRAKLKKKKKTSCPQSKQISIRYDARSYNMWFDRNEISILTVEGRKKFSINIPEYFKQYISWKRCSADLFIRKGKVFINIVFSKEISDTEFNGNVVGIDRGINKIAVTSQNVFYDGGEIKRISKRYERLRKNLQSCGSKSAKRHLRKISKKENRFRADVNHCITKKIVKSLEPGTIISLEKLTGIRQNVKLRKNQRKELHKWNFFQFEQFITYKAEREGIKIEYVDARYTSQKCSVCGHISRSNRQYQCLFKCKQCGFSLNADLNASRNIKQNYLNAICYSDRGAVNHPNVENDVSKAVRNCTNA

SEQ ID NO: 45737 - protein, 317 aa, Acidilobales sp.
MHIPTIQRNSGFRKHLREELMRNKPYASQWIDAVIRTAYSIIESWRKRYLKGKARKIKPKIRRRFARCKITLMKIDYQSKTIRITLKPGEYLAISWRSAWFEHRVRGWIVGEAIILDNRIVISFKSSEEIKVMRVIGWDSSEPSLDGYKPIIGFIHVDLRPLQSMKIVYERKKAIAQRKGIRELYERYEARERNRVRDFINRLAAGFRRLFPNTIHVFEDLDKGDMVSRKKRGKKRRKRNYRTPWRSIHRRISEIALTASVDPRKTSRECPRCGFLAKTQEGQIFKCSRCNLEMDRYKVASINIINIRSRHLEGRKR

SEQ ID NO: 45738 - protein, 494 aa, Gracilibacillus sp.
MPRKRTPTYTIEFPLHIPIWQQHRLEKKFHIARMVYNACLGEALKRHKTVKADKRYRTLLHEPKSKERSKELMAIRTNHGFSEYGIHQFVKAVQHKFKEHIGSFEAQKLATRAFQTVEKLHYGKSKRVHFKKYNDDISVENKSNKTGLRYIEGTIIWGDKPTKKNPKPKNRLCMPISPKPDDEYAHVALLDKTKYVRILKREIRGKIRYFVQLIQEGYPPEKRNRNVADEETKRIGLDIGTSTIAISSESKVELRELAPACHHDEKEIRSIQRKMNRSKRSTNPTNFKSNGTIKKGRLTWKYSKRYERLRQKRKELYRKVAVGRKMAHEKLANDILALGSDIRVETMRFQSLQKRAKNTNRNHTNGKINRKKRFGKSIANRAPAILLTIIERKLNYQGKSIKKIDTYATKASQFNHITGKYHKKQLSERWNDFGEFRIQRDLYSAFLIANTNETLNSVDIDLCHAKWNDFIELHHCEIARLKQSTSKTLRWFVA

SEQ ID NO: 45739 - protein, 442 aa, unknown
  TnpB Polypeptide
MRTVRLRLLPNGTQERKLRRIADAAPKLWNGLNYTRLMQFRASGRVDFKGTGHEFYHRYKGRLGVNAGQVVRLSNRAWNSFFETLRLYRQGKLPRFNSKPSPPGFWKDKLLGKRRLIILVRNDRYYLEQVNGGEGYLVLKDWGLRIKYAGRVKWSGRQGMLMIKLEDNRWFAYVPIEVGSKPVRSNPRGYVMGVYEKVQIEKPRGSNKAFIDIGLNNLFAVAFTHPDVAILIKGSTIKAEYYWWKREIKTYQSIRDWLRNHGFESWRKYHAFYLHAEYKKRERLRHYYRTAIRFLARTLHEMGANEVFVGYPYLVSQDDGNEYNVNIWWFNKIINWLKDVLEEYGIKLSIVNEYGTSRQCSICNANHENGRIKRGLYVCPVMGIGINADLNAARNIAKKADYETPIPTKILSYIITTNGVKPLTPKEGETTKTPKINPTSPR

SEQ ID NO: 45740 - protein, 326 aa, Actinokineospora sp.
  misc_feature (182)..(182): Xaa can be any naturally occurring amino acid
RVSAVKPEDVRRVSRKVAEVRVPKVGWVRLRWSRAVADGVKSYRVTRDRAGRWHVAFALVPEPISAPGTGAVVGVDRGVAVSAALSTGELLSVPTLRASEKVRLLRLQRKLARAQRGSNRRGKVKTAIARLGARDTDRRKDWVEKTSTCLAREFDVIAVEDLKIRTMTQSARGTLEAPGRGXCLAREFDVIAVEDLKIRTMTQSARGTLEAPGRGVRQKAGLNRGILANGWGLLVTRLEQKAPGRVVKVDPRFTSQRCSACGVVDREARESQAVFRCRSCGFACNADVNAALNIRLAAGHAVTARGGLPLGEPANREPQRDFLLVR

SEQ ID NO: 45741 - protein, 328 aa, Actinokineospora sp.
VEQHAHWRPDRKTAPGYIEQARQSTQARAANPWLAAGSVIVRQQALRDFAQAMTNFFRRTHRRPTWRTRGRGEGFRIVSVKPGDVRRVSRKVGEVRVPKVGWVRLRWSRAAVDGVKSYRVTRDRAGRWHVAFAVVPEPIAGPGTGAVVGVDRGVVVSAALSTGELLCAPILRGSEKARLLRLQRKLARAHCGSNRRGKAKTAIAKLKARETDRRKDWVEQTRTRLAREFDVIAIENLKISNVTWSAKGTQKAPCPGVRQKAGLNWGILVNGWGLLVTRLERKARGRVVKVDPRFTGQRCSACGVVDREARESQAAFRCRSCALPAMRM

SEQ ID NO: 45742 - protein, 415 aa, Actinokineospora sp.
MCAALVGSAVSKQGFRVELAPTDEQRVLLGQHAGLSRLVENFALERVKAALDQREAEKTYGVAEGGLTPVPWSAPALESAWRAAHPVRFPWFTEAGLSSRVPKEACRVRAAGFRTFFDSRSGKRKGPKVGFPSWRKRKHGGRFRYDADRAKPVDTRTVRLPGVGSIATREDMTWLVSRLAESEARVLGATVKERAGRWWISFQIEVDRAELDQRRAAPPDAPACGVDLGLTTFATVVDSDGTVTEIRAPKLLKAALRKLRRANKALARSRRGSANRAKRRAEVARVHLRVAHRRTDFLHKTTTRLARTKSAVAVETLNIVGMAGNRRLARAISDAGWGEFTRQLDYKARWYGSRVWKADRWFPSSKTCSTPGCGQRHGGLTLAERTWTCTGCGTVHHRDRNAATNLLAAMLADAA

SEQ ID NO: 45743 - protein, 508 aa, Nostoc sp.
MLVRWNFKLKPCQLQQAKMLQWLITLRKHRNYALREREIGYNTNNQNADQPVNYAFGSYCDLKARVEYGGYCPLTCPVLKHGVIPTDLNIALKTSSSIIKWDSASNIQIKVTTRLRRKLKHFSEISTVVLQGNILKLDTAFTNFWRHGKGFPHYFRTLNSFDYSPGQVKLKTIKDNKDNYAIVYLPGIGNVKMHNSRDLTSIQSVRTCTIKRAGGYWFLSMLVQIPQELPKEKSISQIKSVVGIDVGVNKLVALSDGSFVENIRVTTNIKTSRRLTMRQRAISRKRQGSQNKNKAYARIARTQHKLAQHRDGYNWQAASKIVKTADAVGREDLNIKAMVKRAKPKHDGKGGYKRNGASRKSGLNKAILDCAWGDLFAKIAWLAAKSGKPVILVNPKHSSQECPQCRHTDKSNRSGEKFLCTNCGYTQHADTKASRTIVKRVGLVFPKNIKKTLPGDSRKVMPVKISLPMGGESRNHAYESLNIQLSLFDLTQYTVADNRISKRYGKSS

SEQ ID NO: 45744 - protein, 719 aa, Streptomyces sp.
MAAELRELVPVSDTALPARRFRGKNKGKRWTRGKDAELAVIRLPLDVLDPGIRHRTEDLYSAMWSVKQALQRDARDAVDVYWAGDVRRATDAQAWRLELGLSREGMQRRAYRHMENSKHLAHHVTKALVMHQADEVFETSVSRHLFPDASGRRCGRPKTGHWWDYARIPGRARSHTTPRKWETFRLHGTLAGHLDAYRHRALDPKVATPEQAAALPPDVQVLEQPRHLSAPVRPSGRIETGEVTPNGTPKKRAATWWDHTGPLVVVFAGGADSNRGELVLPVRLPSGSGRWPRLLHFLNNPDTWHKIDLVRRRDASAPGGWAYEAHLMVLTGGYASPATKARRTAAAMRERIGGIDGNVSNLSIVSFPDSFNPADGDIKSTRVEPSDEELAVLAKARRKERGRKRALDRSRRSSNPTQYRPSKRQQDRAKRRQAAGLPARAVQTPSGARVSNKAGIPKQAYQRDTLSAGYRLNRARLAEAAATQAAAKDHRARRMAEDIIADHGANLVVEDCDIRTWYRLWGKALQATTPGRLITAISRECEKTGGRMLRASTFTTKLSQTCFCGAAVTKTLGDRIHVCHACGLVGDRDMVSGALGAHVRLTDPDDPSTACLDEVQARHTQILFHDGLQEALSSQPQRGARPTRGRTHAAATGPDISGPGPLLDETPPPGTGPTPNETRPANARHKAHVGAAGCTDSTPPGCARSVQTPADITALRDDS

SEQ ID NO: 45745 - protein, 416 aa, unknown
  TnpB Polypeptide
MGTIHVVRSLAFPVEGLPTPLLGLLGEFRLIVNKSIRIALREDIRSRFRLSRAAYAGLSAEHDVYKQLIPSAFEVALASLKNYRRRIRQGKKTNIPYLRRLLVKAESQSYRFDRSTGRLRVPIRRGEHVDVDLPISEWHRSILSDPSWGLGSLTVTPALISLAVRKAAPKAYEPTSAIALDTNEDSLDGVVAASVDAHIVTLPLGGVRRVQATHFRRRRRLAEKKAHDWRVRRRLLAREGRRERNRVRQRLHRVSKSVVVAAKGQGAAIVLENLTLQGAGGRSRRMNRRLSSWPRREIHRQIEYKAALAGVPVIKINPAWTSKTCPACGARRRDRVGKDFVCLVCDWEMDRQHNAALNILKTALASNEALARAVRFQPGALRHDVVSPLYDPLRREGGAREEPSGAESLQATVITR

SEQ ID NO: 45746 - protein, 405 aa, Cyanobacteria sp.
MIEKAYRYRFYPTPEQEKLLRRTLGCVRLVYNKALHTRTEGWYSRQEPIDYKQTSAMLTQWKKQQELQFLNEVSSLPLQQGLRNLQKAFANFCAGHAKYPNFKKKRSGGSAEFTRCAFRWKDGQLWLAKCAEPLPIRWSRTLPENCEPSTVTVRLDASGRWFVSLLVDDHTVKALPQIDKAVGIDLGVTSLIISSDGEKVANPKHFKRLRHKLRKAQKVLSRKVKGSNNREKARQAVARLQAQIADSRKDFLHQLTTRLVGENQTIAVEDLAVKNMMKNHKLAPAIADVSWFELVRQLEYKCQWYGRTLVKIDRWFPSSKRCGNCGHVVDELPLDVREWDCPECGTHHDRDINAAKNIKAAGLAVIVCGANIRPERRKPIGQLRNSRSAAEGSVVEGERSRNLSR

SEQ ID NO: 45747 - protein, 410 aa, Campylobacter sp.
VQRVERHIIQPNDKRFNSIKEICHKSKNLYNYANYIIRQDFIANESIPKEYDLTTKLAKEKQADYISLPAQSSQQTIKLLYKNYKSFFKALKSYQKNKSKFTSNPKLPKYKAKNGVSIVVFTNQQAKIKQGKSLNKIHFPKSTNLKPFITKIDNQTSTLKQVRFIPKSTCFIVEVVYECLAKATNLIENSFLSIDLGLNNFVTSIDNQSKQPFIINGRAIKSVNQFFNKLRAKYTQTLKLSNNKFHSKKLANLALKRDCKINDFMHKSSDFIIKHCVEHKIANIVIGKNKEWKQEIDLGKKTNQNFVSIPYNSFIEKMAYKCENYGIKLHLTEESHTSKCDHLANESLGHRENYLGKRIKRGLFKSSTGKFINADLNGAIGIARKVFPNAVQTLRDRGTAFVPIKISIGF

SEQ ID NO: 45748 - protein, 413 aa, Campylobacter sp.
LLSAVKYRIYPTKAQKELIHKHFGCARVVYNHFLDYRQKQFAKGIKETYFTMQKELTLLKKQDEYKYLNECASQSLQMALRQLVTALDNFFAKRAKYPNFKSKKNARQSYAIPQNIKLDNKKVYVPKFTEGIKTKIHRKLDKDCIIKQAFISKIADEYYIAISYENNKSLPKPKVIENAVGLDMGLENLIIRSDCVIYKNHKFLQDKENKLIKLQKQLSKKQKGSNNYAKTKLKVAKAHQKITRARDDYLHKISDEITNLYDFIAVENLNIKGLIKNKHLSKSIANASWGKFINLLTYKAENKGKTLMQIDKFFPSSQICSNCGSNTGKKPLHIRSFTCPNCNTKHHRDLNASINIRNYALGIIDDRYKIKLDKSRVGITQSYACKDSSSGVSKYGYILDTSYLSLKQEAHLL

SEQ ID NO: 45749 - protein, 249 aa, Campylobacter sp.
VQRVERHIIQPNDKRFNSIKEICHKSKNLYNYANYIIRQDFIANESIPKEYDLTTKLAKEKQADYISLPAQSSQQTLKLSNNKFHSKKLANLALKRDCKINDFMHKSSDFIIKHCVEHKIANIVIGKNKEWKQEIDLGKKTNQNFVSIPYNSFIEKMAYKCENYGIKLHLTEESHTSKCDHLANESLGHRENYLGKRIKRGLFKSSTGKFINADLNGAIGIARKVFPNAVQTLRDRGTAFVPIKISIGF

SEQ ID NO: 45750 - protein, 345 aa, Campylobacter sp.
VQRVERHIIQPNDKRFNSIKEICHKSKNLYNYANYIIRQDFIANESIPKEYDLTTKLAKEKQADYISLPAQSSQQTIKLLYKNYKSFFKALKSYQKNKSKFTSNPKLPKYKAKNGVSIVVFTNQQAKIKQGKSLNKIHFPKSTNLKPFITKIDNQTSTLKQVRFIPKSTCFIVEVVYECLAKATNLIENSFLSIDLGLNNFVTSIDNQSKQPFIINGRAIKSVNQFFNKLRAKYTQTLKLSNNKFHSKKLANLALKRDCKINDFMHKSSDFIIKHCVEHKIANIVIGKNKEWKQEIDLGKKTNQNFVSIPYNSFIEKMAYKCENYGIKLHLTEESHTSKCDPFSQ

SEQ ID NO: 45751 - protein, 351 aa, Campylobacter sp.
LLSAVKYRIYPTKAQKELIHKHFGCARVVYNHFLDYRQKQFAKGIKETYFTMQKELTLLKKQDEYKYLNECASQSLQMALRQLVTALDNFFAKRAKYPNFKSKKNARQSYAIPQNIKLDNKKVYVPKFTEGIKTKIHRKLDKDCIIKQAFISKIADEYYIAISYENNKSLPKPKVIENAVGLDMGLENLIIRSDCVIYKNHKFLQDKENKLIKLQKQLSKKQKGSNNYAKTKLKVAKAHQKITRARDDYLHKISDEITNLYDFIAVENLNIKGLIKNKHLSKSIANASWGKFINLLTYKAENKGKTLMQIDKFFPSSQICSNCGSNTGKKPLHIRIGVLLALIAIQNIIET

SEQ ID NO: 45752 - protein, 379 aa, unknown
  TnpB Polypeptide
MQRTYKYRLYPNKEQIRKFEQTLDICRNLYNNALTQRRKYYQENGKGLSRIKQQEFLKERKDEDIYLTQVHSQVLQDVLFRIEKAFTLFFVRLKAQNGKAGYPRYKSRNRYHSFTYSQQPGFTLTDKGLKLSKIGVIKIKLHRPIQGEIKTCTIKREVDRWYACFSCQVNSLNKLVPQKAVGIDMGITHFAYLSNGEVIDNPKYLIKQEPKLKRAQRKISKGQKGSKNRNKQKIKVAKIHRKIKDQRSDFLHKLSRKMVDNFSFIAVEDLVISNMIKNHYLAKSIADASWGQFFNYLAYKVEETGGKVVRADPKGTSQVCSRCGSLVPKSLSVKIHKCSYCGIVLDRDYNSALNILQRAVGQELSELTPLEIAIRQSLN

SEQ ID NO: 45753 - protein, 500 aa, Vulcanisaeta sp.
VFSLPLLLRRAVAVELEATKELNKLLHSVESAYLSIVREVVEYAVANNVTGANKLYELFYSKYRLEYRDLNSQLIIQAIRQAAQITKSFIARRRMGLVSKPYPEVRSVSIRFVVTTWSYEQFIRSTAPVRVWISPISTGKRGRGGRRFEVWLRLHKRFWQYWWKVLRGEARLASTLLIKRKLNKWYAIFIFEIKPRVEKPQLIISFDINENTVAVGKIDIKTTVNKVTGWNRQYIMPQLYMIRTDFGRLARRYERIRSAIIEKLKPGFALPNGKYMNITNTREYRKRVKKLREGVRKLGRVRHVASELTKTPAIIITEELGDNPQESMIDGIEKNELRHRIKQTPFKSIEEAVEDKALERGSKIFRVSSYRNSRVCPIHFVRLEETDDWHILKCPLGHLVDRDYASVMNMDWKITPEAWVKGVWWDLRKNMNWREYEGKSNPMIPQNIVQYIHATLKTFTASEQSPAMLARGKPMNPAGGANEGWARKPPKKGGGQEVCK

SEQ ID NO: 45754 - protein, 795 aa, Vulcanisaeta sp.
MLRRAVAVELEVPKDVSKLLYSVESVYLSIVREVATYAVTKNVTSAAQLQRLLYHKYRQEYPDLHAHLVIQAIRQAVQIARSFITRRRRGLVDKPYPEVRKVSIRFTEDAWSYDQFVKSIAPVRVELSLPGGRREVWLRLHRRFWWRVLSGEARLASTLVVKRRANKWYAVFVFEIKPRQELPRAIVAFDINENTVAVGRIDIIATIDKIASWNRQYLTPQLYLIRTDFGRLARRYERVRNTIIERLKQSFTLPNGKYINITNTREYRKRVKRLREEDRKLGRVRQIANELTKTPAIIITEELGENPQKSMISDVGKNELRHRIKQTPFKALVRTVEDKALERGSKLFHVSAYRNSRICPVHFTKLERTDDWHSLYCPKGHYVHRDYASVANMMWKVTPEGWVKGVWWNMKSLSKNMDWRKHENKSNPLIPYKIVQYIHAVLKTLKASEQSPAMPARGNPMNHHRMQNEGGGEETTHTLSRQGGGQLQLGVPKLNEGVIGEIVNELSKSLNNLTIGATYLGIIIALRDIIASVIKIIERYNLRGKRVVVIYDDIDKYVGKHDQDALMAAANAIADKIVHEYIPRRLWVKVIFAVSDNAASRELDRLGSKGGYTPYLLWNLPKRAFREVVDEVVMKTGIKDVDFDLLWNLLGGNVRELGIIITGYNWNMKAWLQDIVINRIKETFKRHAESSGFGSVEKALAWLIKKGRVAARDYGLGEFTGQPDAVEGVLGLLENNIMIDVSPPGVWHLSELPSEPWIGKDYAYQIPAYYWAIRAMVEAGKANVTPEDLLKIMQH

SEQ ID NO: 45755 - protein, 408 aa, Haladaptatus sp.
MRYNYRYRITPSDDLHERLAWTVDTCRQVYNHFLHRLNRNSGTTAYKEQSLLPDLKKWWSDLKQIHSKVLQKVVQRLYDNLSTLKSLKENGRTVGTLNWKGPREYRSIKYSQTGFELKKTSGRTVLSLSKIGDIPIVYHREIPDDATIKEVVVKREPTGKWFAILGIETTDATPTKPENPEKCVGIDVGILKYAHDTDGTAVEGPNLSAERERLEREQRTLSRKDHGSANYRTQQRTVARRHAELKRKRRDFLHKLSNYYTREYDLVAVEDLDTKELMELPDNSRNRAGAAWGTFLRMLEYKCEREGTHFVAVNPRGTTKECSQCGVKTDKPLWVRKHSCPACGFACDRDANAAYNILSRGLAKVGVVHSESTPAETALPPDTVVSAKRVIETGSPVLSEAVKPSRAG

SEQ ID NO: 45756 - protein, 337 aa, Haladaptatus sp.
VSQIQKDQKVLKEHRKNGRKTGRLKWQGAGEFRSVAYQSEGFNVNHTTGHDFGTLTLSKIGEIPIRAHRDLPNTENIKRAILKKERTGAWFACFVVEVESPAKPDSEDIDSADCIGVDLGVLSYIHTSEDLSVECLHLESEYDQYVREQRALDRTEHGSENWENQRQNVARAKRQIRWKVLDFQHKLSTWLVKAYDVVAVEDLDVKSMLETSQSAKNKQDAAWSRFLDMLEYKGELHGTHVVRVDARGTTKECNQCGVETSKPLWVREHSCPACGHTEDRDLNAAKNILDRGLNKLSLQVGPGRSESTPVQTVLPAFAHHSGRMDAKHVVEAGSPAA

SEQ ID NO: 45757 - protein, 371 aa, Haladaptatus sp.
VYNHFLHRLNREDETTKYGEINQLPSIKKWWNDLTDLYSRTLQNVVERLYTNLSRLKDAKDAGRKVGLLKWKAPAEYRSFTYRQSGFELKNTSGQPVLRLSKIGEIPVRMHRDILDGAKLKQVTVKKEPTGEWFAVFGIETPDDPPEKPDELTDVVGIDVGILKYAHDTDGTAVESLDLSNERERLERAQRDLSRKQHGSANYCKQQRVVARRHAELKQKRRDFLHKLSNYYAREYDLVAVEDLNVAGMMQFDSNSRNRASAAWGTFIRMLEYKCEREGTYFVAVDPRNTTKECASCGVKTDKPLWVREHSCPSCGFEADRDANAAWNILSRGIKKVGTGCPESTPAETALPTDTDSVSAKRVVETGSPAL

SEQ ID NO: 45758 - protein, 404 aa, Haladaptatus sp.
MQYNYKYRLQPTDAIREELLRHIDICRQLYNHCLFKLNESDDIPARYKVQGTLPDLKSWWDGLRDVHSKVLQMVVKRVYDNLSTLKAQKENGRAVGMLKWKRPRDYHSLTYNQTGFKLKNTSGRPVLWLSKLGEIPIHLHRDVPENATIKQVTVKQEPTGEWFATFAIDVDEETPEKPKAPEKCVGIDVGILKYAHDTDGTAVESLDLSNERERLERSQRDLSRKQHGSENYRKQQRVVARRHADLKQKRRDFLHKLSAYYAREYDLVAVEDLNVVGMMQFDSNSRNRASAAWGTFLRMLEYKCEREGTHFVAVDPRNTTKECASCGVKTDKPLWVREHSCPSCGFEADRDANAAWNILSRGLKKVGVVHSDSMPVETALPVDTSVSAKHVLEAGSPVLNARSA

SEQ ID NO: 45759 - protein, 426 aa, Haladaptatus sp.
MRRVNSFEVAPRTNEDEELLRRLLDASASLWNQLNYERRQNFTDPDIDKSVWDTEDYRKQYVSVLGSATAQQVIRKNSEAWRSFFSLKEKGEDNGLPGYWGNEEKGRILRIYIRNDQYSVRWSNRSTVELTVGKALKDEYDMGYREKLCLNVKGKPKWSGDQGRLELYYDETSNQYRAIQPVTIDDSRLDSPLADHSAALDIGASNLVACTTTTGQQYLYHGRDLFERFRETTRRIAELQSKLRNGRYSSKQIRSLYRGRTKRRNHAMDALARNLMGLLYSEGVSTVYVGDLTDVLETHWSVQANHKTHNFWAFRAFINRLTCTAEEFGITVEVRSEAWTSQTCPNCGSTTDTTRHQDTLTCPCGFEGHADLVASETFLRRYENVVRPMARPVRFKWDDHSWSAIPHAHRPNEQRTHPKVTTGESA

SEQ ID NO: 45760 - protein, 251 aa, Haladaptatus sp.
VYEHDIWRLHFVCRVTINEAESPGDGVAGIDLGICNLATVSYGDESVLYPGGALKEDEYYFAKKRAETDDSASHEARRLDTKRTDRRTHFLHTLSKDIVSECSKRGVGTIVVGDLGGIREDENGDARNWGKHGNLDLHGWAFDRFTSMLAYKAEERGISVVTKSERNTSKTCSACGQSDDRQRVQRGLYVCECGLVANADSNGAENIRRKVLPNPPNEDRDNGWLAQPAVRLFDCSEGRFAPREQVVNREP

SEQ ID NO: 45761 - protein, 411 aa, Haladaptatus sp.
MVETVTKTLQATFAPPTQGKAVRLRRLLTTYREALDEAFDSGADTMGGVSDVVTPYDLPYQAKAAMCSYVPKLRKTYNAREIDDEHPLRLTNQAAKFDRDESRHYEICWNVPQPGRGTNFWIPLRLNPEQESLWNCLLEGDAKAGQIQLQQNRRSWVFHIAAEYEVDEPDTDGDETHIGFDIGESALITGCALKRNTPTKPMLESGSRARHLRKEMYTTLKRLQQRDASEWRIDERFDHYQNALTDIVEKASRNAVEYARQFENPVIVLEDLSFIRERLDYGKYMNRRLHAWAFARLQGRIEDKATELGIPVRFVNPAYTSQTCHACGHIGRRGSQAEFRCTNDGCHVSTFQADINAAANIAGRVDPWGESVPWKPERDDTPQDGSGCDTATVHRKTSAKPAQMTLSAYSD

SEQ ID NO: 45762 - protein, 412 aa, Haladaptatus sp.
MRTTYRYPLSPTDKQRSVMDSHRDICRQLYNHGLYRFEQIPESSGTLKQRVRSVRDEIPDLKKWWTALTDVYSTVLQTAVMRITDSIKALGRLKEEGFKVGSLNWKRPRDFRSFTYTQSGFKLDKKSGQTVLHLSKIGDVPIQMHREIPDEATIKQVHLKKEPTGEWFASFSVNVDRELPKKPETLETVVGIDVGILKYAHDTDGTAVESLDLSDERERLEREQRKLSRKQHGSNNYEKQRRRVAECHADLRRKRRDFLHKLSNYYAKEYDFVAVEDLNVAGMMQFDSNSRNRASAAWRTFLRMLEYKCEREGTHYIPVNPRGTTKECAACGVSSDKPLWVREHSCPSCGFTADRDWNAAYNILVRGLKKTDIGAGCSESTPVETALPTGTTSVPAKRVLEAGSPVLTARSA

SEQ ID NO: 45763 - protein, 163 aa, Halophilic sp.
VSVGAVGLPFGFGSCRGKHRINCQFPAHNPLHTVWDCETSDTRERETMTAIQPRRKRRGILACNLYKAKEHGVEVVQVDPRNTSKRCSTCGFTHDDNRSGEAFECQKCGYVNYADYNASKNIGLQYLRRRQNADDGGAPVDVRLNRGTLNVSGEYVPPAAGEA

SEQ ID NO: 45764 - protein, 301 aa, Halophilic sp.
VRKIRDELPDLKEWWGELTDVYSKVLQPTVMRLAHNIKALGKLKEQGYNVGELRWKSPREFRRFTYNQSGFELDKKGGQTVLSLSKLADIPIQLHRPVPDDATLKEVTLKKEPTGEWFAIFGIERNCEPPAKPENPEQCVGIDVGILKYAHATDGFAVGSLTLSDERERLEREQRKLSRKEHGSANWETQRQRIAECHQRIKRKRRDFLHRLSAYYAREYDLVAVEDLDVTGMLESPKNSRNTASMAWHTFKQMLEYKCEREGTHFVAVEPEGTTKECASCGVETNKPRWVREHSCPACGF

SEQ ID NO: 45765 - protein, 361 aa, unknown
  TnpB Polypeptide
MKLVAAIKLKPTHEQAAILKATLQRCNEACTAIAARGFTVGIFRQFDLHKLVYVDTRANFGLAAQATVRSIAKVADAFKVNSAVAPVFRALAAQPYDDRIFRFCGDDMVSIWTIEGRIKIGFVAGHKQRELLAFRKGETDLCFVRGKWFLACTCDIPETKGFKASDWLGVDLGIVSLAADSDGKTYTGEKVELIRTKFAKRRKGLQRNGSKAAKRRLKKMSGKQARFQRHTNHVISKAIVIDAERTLRGIALEDLTHIRTRVTAPRKYRARLHNWSFGQLRAFVAYKALRAGVPIAYVNPAYTSQGCSCCGLIDKKNRPDQATFSCISCGHSESADLNAARNIRARATITTPESSQAAQAA

SEQ ID NO: 45766 - protein, 485 aa, Kribbella sp.
LSRFPAHAHPSKPSTWPRHDRRPQRARDTAAGTHTPAARCTRTRRTRLQVWWSSGWSRAHQVAQGGEPRLPPFGHRGLSVMADWISAVSRFRMYPTPAQQDALIDQCRHARSVWNLALEQWSMWTRDKGPTPRFPEQCRQLTEARAVFGWLRAGSNTVQQQALRDFDQAVKSFYAGTHRRPTWRKAGLHEGFRIVGAQAIRIEQVSRKWAQVLVPKVGWVRFRTSRAIPAAKSYRVTRDRAGRWHLAFAAIPEPIRASGAGRIVGVDRGVAVSAALSTGELLSCPGFSDRELERLKHLQRRLARCRPGSNRRLRGKMAIAKLYARARDRLKDWAEKVSTDLARRFDVIRVEDLHIPHMTRRPKPKPDPERPGAYLPNRRRAKARLNRGILANGWGALVRRLEQKAPGRVEKVRPAYTSQTCSVCGHCTPENRKSQAVFRCVACGHQAHADANAATNIAAGRAVGARRETPVRVSPKREPQHATSA

SEQ ID NO: 45767 - protein, 374 aa, Lachnospiraceae sp.
MPMRNKAYKFRIYPNDRQRNKLARTFGCVRFVYNYYLDRKIQRYEEDKKAISYTTCAKELAEMKKTDEYSFLKEVDSIALQQSLRHLDTAFQNFFRLPKTGFPKFKSKKSNKDSYTTICVNGNIRISGGYLKLPKLGEVKVKQHRHIPEMYSLKSVTVSRTPSGKYYASILYEYEERVQEKESKDLIGLDFSMHELYVDSNGNEPAYPRYYRQAEKKLKREQRKLSLMQKESNNRKKQRVKVARLHEKVANQRKDFLHKQARQIANAYDCVCVEDLDMKEMSKEMGFGKSVSDNGWGMFVSFLKYKLEEQGKRLIKVDKYFSSSQICSCCGYKNDKTKDLSIRKWICPNCNTQHDRDENAAINIRNEGKRIVFA

SEQ ID NO: 45768 - protein, 481 aa, unknown
  TnpB Polypeptide
MITKPAALKLDKNGPDVVVRSYKFALRPTVVQEQKLRQHTGAARFVYNYLISQWRDDIHTRTEEKERGVPEDELTPFAFKLSAYDMRNYWNRTKGECAPWWPEVSKEIGNDAARRAHDSIENWHDSKGGKRKGRRVGFPRFHKRGCHESCTFSTGTIRVNPDRHSVALPRIGTIKTRENTRELQRKIAKGTARITQATISRGFNYWHVSFTVYEKKHIPETHAHSGSVVGVDMGVGDHVIVAATPNGDEVMRRGLPQSVKKDEARVRHLQRKLSRKHGPDKRTKTTPSNRWIRANNQVNKYRAKLANIRRDLAAKAAHGLATNYETVVIEDLNVQAMMTRGGAHKRGLNRAIAQASFADVRRRITYKTRWNGGRTVIADRWFPSSKTCSECGEVKSKLSLSEREYICHRCGVVVDRDLNAATNLAKLAAPKSGVDFHGTGSSPGMGRGGAGKTNSSSGELAPAGEASMARKDLSGRKAGTR

SEQ ID NO: 45769 - protein, 367 aa, unknown
  TnpB Polypeptide
MRTYRFKLYNSKRNRKLHRQINAAGLVYNHCIALHKRYYKIFGKSLNMYQLQKHLTKLKGISRFAYIKEIGSQAVQDVTQRIDRAYKLFFRNLKSKIRTAPPSFKKIKKYKSFTLKQAGWKLDEDGNSIKIGKQRYRYAKSREIDGKIKTLTVKRDALGDIYLYFVCETSENKVLARTGKSVGFDFGLKIFLNASDGRDIASPLFFKQNANAIKMANRNLSRKSKGSNNRKKAKIALARLHKKVANQRDNFHWQTANKLVGEYALICIEDLNLKAMQKRFGRKISDLGFADFVNKLKYKAHRAGASVVEIDRFFPSSQLCSECGYRNTETKNLKIRKWTCPKCCNIHNRDRNASINIEREGSRIFFA

SEQ ID NO: 45770 - protein, 401 aa, unknown
  TnpB Polypeptide
MQRLQAYKFELIVTGEQHRQMRRFSGACRFVYNKALALQKTRHEQGEKKLSAFELNNLLPQWKAEPETKWLSDSPSQTLQQALKDLDRAYKNFFAKRSDFPRFKKKGSGDSFRYPQGIKLEQGNNRIFLPKIGWCRYRNSRMVEGKIKNVTISQSCGKWFAAIQTEREAATPTPNGDMIGIDVGIARFATLSDGSFYEPRNSFKTLESALRKAQQAMSRKVKFSNNWKKAKAKVQQIHVKIGNSRRDYLHKTSSDISKNHAIVCIEDLQVKNMSKSATGTMEQRGRNVRAKSGLNKAILDQGWFEFRRQLDYKLAWNGGHLIAVPPKNTSRTCPCCGHISKDNRMTQARFACVECGFEENADVVGAINVLRAGHARLACEVSGATMPPAAGTHRSESGVYA

SEQ ID NO: 45771 - protein, 363 aa, unknown
  TnpB Polypeptide
MELQTKTISVRVKDKHAKVLSQMAFDCNQVWNAANELSADYSWVPVPGVGYLNLQTSGFDLMKELKGILKERNMIIGAATAQEVIGQHAQSRKQFKKNKLQWRCSGGSKRALGWVPFKTSGIKLVNGQIRFCGKFFGVWDSYGLKDYELRTGSFSEDSRGRWYFNATVKYQKKPNTSSVSVGVDLGLKTTATLSDGVTLNRRRITDEFAKELATAQRANKKKRVKAIHAKIKNTRKDALHKFSTAMVEDYGAIFVGDVSSKALVKTNMAKSVLDAGWGMLKTQLKYKAMARSVVYEEVNEKYSTQACSSCGSISANSPKGRAGLRIREWTCPDCGVAHDRDVNAAKNILRRGRATLDVGIPVL

SEQ ID NO: 45772 - protein, 401 aa, Actinomadura sp.
MSGVRTAYKCRAYPTSEQMAVLNRTFGCVRVVWNQTLAWRHSRWRTEQVPTNVSQASAFLTRLKQSEDHAWLNEVSAVPLQQVLRTQQRDFANFFAHRARYPRYKSRHGRQSAEYTRSGFRWKNGRLWLAKTDAPLAFVWSWPDIDPAELHPTTVTISRDPCGRWYVSLAVEAADPDRVPPTGAMVGVDLGVKDFAVTSEGERITKPRLLERKARNLARYQRRMARKRRGSNNREKARAKVARAYRKVGASRSDFLHKTSTRLVRDHDVIVIEDLNVKGMVRNRTLARAISDCGWGEFRRCLEYKCERAGRTLVVIDRWYPSSKTCSACGHVLAELSLSSRHWTCPDCGTRHDRDVNAAENILAAGRAVTACGGEVRHSGDRVHSPVKQEHRPARVGIPRL

SEQ ID NO: 45773 - protein, 267 aa, Actinomadura sp.
VGFALGAGTVSIWTVNGRLKNVPFACSTSARKTIAECPRGESDLLHRDGAWLLLVTVEAPEEPLNEEPGGFIGVDLGVADIATTSTGYRAAGRGLNRHRQRMRDLRTKLQAKGTKSAKRVLKRQRRREQRRARDVNHRVSKRIVAEAERTGYGIALEDLTGIRDRVRHRRPQRAAFHSWAFHQLGAFIAYKARRAGVPVVLVNPAHTSRTCADCGHRERANRVEQAVFMCRGCGVVAHADHNASRNIARLGIVVWDAGRQSSAPALR

SEQ ID NO: 45774 - protein, 414 aa, unknown
  TnpB Polypeptide
MEKRRTVPVKIDVDSDDTALLEDTVDEFLWAAKYVTHHAFEGEYVTTSKTTLHDDTYEDVRDETALHSNHVQAARNTAADACKSVVEKWKQGKKASMPHFTSPHVVYDHRTATFHNEYVSLATIDGRIEADYVLPHDERETPHADYFFSDEYETTGAELHYTNGNWMLHIHCIQEVKSDTLEQGATENRTVLGVDLGVNNLAVTSTGAFWTGDEFDHWRREYEKRRGDLQEHGTRWAHENVQAVGRKEEGRFKITLHRISNELVAEARDHGCTVIAFEDLTDIRERTGASWGHKWAFNRLYEYVEYKAAEYGIDVQQVDPENTSRRCSTCGFTHPNNRDGEGFECLKCGYENHADYNAAKNIGLRYLRRNQTGSGGGAPVGVRLNSGMLNANGEFDPPAEDSARAGVHAESPPL

SEQ ID NO: 45775 - protein, 447 aa, unknown
  TnpB Polypeptide
MIKTYRYRLYPTKNQEKILDKTLNLCCWLYNSALQERVDIYKKYKKSITCYYQINELPNCKKEIPELDLVFSQVLQDVIKRLDKTYQSFFKRIQRKEKSGFPRFRSRSRFDSFCYPQGGFKFVNGKLRLGKIGDIKLKLHREFEGKVKTCTIKKDIDRWYACFSVEVENEILLKTGREIGVDVGINNFAVLSDGNIIENPKFLKKSEKRLRRKQRKLSSKQKGSQNRNKQRVIVAKQHRKIREQRKDFQHKESRKIVNNYDLIVFEDLRILNMMKNHKLAKSISDASWSQFINFVSYKAEYAGKEIKFVYPRNTSIICSGCGEKVPKTLADRIHCCSHCGLEIDRDLNASINILRKSTVGITGFKAWGEILAQVGSMNQEAYVFRRRQFTDIMNGVYEEEKRIQLIEDLSEIARNHENNAKRLFRIVERLLEEHRKNYPRQETDDTK

SEQ ID NO: 45776 - protein, 479 aa, unknown
  TnpB Polypeptide
MQYGRLFSCKPSKALANTLISWIGAQEYIYNSKVGEDRYYRTFARKYLPIGTYPEVNQQYSQFKGEDNQWLKTIPSQILRNGAVKWAQSYQRFFAKLGGRPKIQKKSSVKRAVWITKELFTFKERVSKDGVITHTILLGTKKNPVGELSFVAHTAYTVPNSIHISVRAGKWFVSFCNDMPDAIEPTDEEITNHLKTFTSDELSSLTIGIDRGIVLPIAKSDCTSNDFSAAQRTRMVKKELQKKRWQRIQARRVKQSNRWKKACQRAAHYQQYGVNVRKDFAHKVSYQLANSQNILFGIENLLIKNMTASAKGNVDNPGKRVAQKSGLNRSILGAAWGQVGVYLSYKARRKGKLVVKVAPHHSSQECSGCGHTHPDNRQMQSLFICQACGFTANADYNAALVIKKRAIALVLSEEFTGKVNKKTITRKKVGQVMSELSVETPTTSQEVTHKETLLDMDGKLLSMQSSANCETPTISALAA

SEQ ID NO: 45777 - protein, 386 aa, Lentzea sp.
MFYTGKVKIVVQVRLLPSAEQAAALATTLRVCNAAANEVSRVAFEQNVFSRNDLQKPVYSEVRSSGLGAQAAVRTVKKVVDAYTALRAHIRSGILVGARRAKAEGKPIRFRDEAAQPFDDRMLSWQHAAKTVSIWTSVGRLKGMRFTGHPDQLRTLASSRQGETNLVVRDGKWLLIAVCDLPEPAVFEPVDWLGVDRGIVNVATTSDGTNFQGRRLRRYRRWQLRKRAELQAKRTKSATRRLRRRARREHRHVTHVNHTIAKELVAVAQRTGRGIALEDLSGIRDRVRPRRDQRATHSSWPFHQLGTFVEYKAKRAGVPVITVDARHTSQMCPRCGHTARNNRSDRDHFCCRRCGLAGPADHVAGVNVRNRARSAWVLVNVPEPAS

SEQ ID NO: 45778 - protein, 429 aa, unknown
  TnpB Polypeptide
VKQLRYKALKTRLYLNKDEHDFLLYLMRASKNLYNEALYNVRQHFFNTRQYLTYNENYHVLKDSENYRILNTSLGQAVIQKADEAMKAFFGSIKVKSSQKVRLPGYLKKDAYYSLIDRAVYKPSNKYYQLPRGNFIKKVSKLFKVKKKLFNIIDSLDIFIPLNIRIKTPKCIINKQIKEITIKPQFDGQYIEVIHTYLDEDVLELVNEKINTMGIDLGFNNLAFCALTNNNHLLLDGNKLKSMNQWYHKRMSELSSKRPNQKVLTKQMIRLMIKRNNQMAKSIPLARLLIINYAITNDIGQIIIGYNKGFKDIILRDQYNQMAKSIPLARLRDKISYLAKEQNIEVSIVNESYTSKASYIDNDEIPELDYNKHQFSGKRVKRGLYRSKEGILINADLNAALNILRKGKPDAERIGNRGWNTPKRTYLFG

SEQ ID NO: 45779 - protein, 431 aa, Haloplanus sp.
MGDMIRTVQVKLNVPDERCDDLHRTKDQFLYCANTTAEWAWGCQNVYSITSKQKAESALYDQLRGETELTANLVQKGIRRAIEATKSGVARLKNGENTSQPHFDAWSIVYDKRSATFHRDHVSLSTVNGRVECDYIIPDDTAGTPIGEYLLNEDYEFRMSTVQYDRPTESFYLHARMRRVERDEQEQSTTDSSDAKHRTVLGIDLNVDGSLAVTSTGAFIGNADEMNHRRREFEKTRGSMQQTGTRSAHLSIQSMNDREHRWMQDELHRASNRILDEARDHDCTHVAFENLTDIRNRMAGAKRFHAWAFRRLCQYVEYKAEMSGIEVAQVSPAYTSQRCSSCGFTHENNRRSKHQFVCQKCAYQLNADYNASKNIARKLLKSLHSGQKSSGGGAPCQCALSSGTLNLNGEFHASVNTTAEGESTDKPRLQS

SEQ ID NO: 45780 - protein, 451 aa, Actinobacteria sp.
MRRSRESDWGSGRRRPARKAKTGWDRAVTYRIYPTARQREALVELLACQRELYNAALEERRGVWRWERRQVTLYDQFGQLSGDREGFEWLARFGIAVARGTLVRLDEAFRNFFRRLRDGERPGFPRFRGIGSWSSVQWADTGGWKLNHFEQRSYGRLCVKGVGQIRVKVHRVFGDGAEARKLVVHRRGARWEATVFWRNVSLPMLAPTGRACGIDVGIDVLAAVADDQGEVELVANPRHFQRRQDKLAAAQRALARCAKTGRREGGRRNRAKVRLVRLHTKVRQTRRDAAHRLSARMVRDFDLIAHEDLEISTMTRSARGSADDPGRNVAAKGGLNRSILDAGWGQLLRFITYKAASAGRMIQRVPAAYTSQTCARCGHTARENRISRGNFGCVVCGHHAHADANAAAVILAVALGKLTIRAPRLSAQHHRPEPGHQPVTAGRDAATSCGS

SEQ ID NO: 45781 - protein, 251 aa, unknown
  TnpB Polypeptide
VAIYRKAIAFLIDVYNREWSKLSVIEKKYDRFVYAENLVHSTKNNKAKYDFDKLFYKFPSYLRRAAINAAIGAISSYITNYQNWEASQIGKPPRLQVDRNVLPVFYNVSMHTVDEAGTHYIKLYQNNDWVWVPLKLRQTDVRYINKYWSHVKASAPILEKRYGRWYLRFAFEEIQKLSNTPIQSQRICSVDLGINSDAVCSIMTADGTILQRKFINFAAEKDHLYHVLNRIKRQQRENGPRSIRSFWQYAR

SEQ ID NO: 45782 - protein, 360 aa, Alishewanella sp.
MERINAQFHLEKNGYANHAEWKEDWQASRNNQFYVLGSKDETTGCQGCTITECETGFVLRLRLPDSLITDNKHISIPIELAYGSEAVRQALKNKQAISYRFMCDEKGWRVFISTDAIQKSSMTHKEYGAIGVDVNEHHLAVTETDRFGNPINSLSIPLSTYGKSSDQSKAIIGDAVKMLMDFVHGKQKPVVLELLDFRTKKANLEGQSAKRARQLSSFAYHHILSVIKARCFDSGIECIDVNPAYTSVIGKCKFMNRYGLSSHQAAACSIARRGLRLSERPNRHDSLASSLPAWNRNEHVLSFWRKVATSKTVHVALSLLSNPQSSGARKPAIVMQARNDMAGKPCHVSQKNCSSGEILA

SEQ ID NO: 45783 - protein, 386 aa, unknown
  TnpB Polypeptide
MKKTYKYRLLGNKQTFAKTEEWLMLCQRLYNVALEQRISIYRQNKGSITCYDQIKQLPELRAAFPEYQAVNSQVLQDVIERLDRAYKAFFRRVKSGTGKAGFPRFRGRDRYDSFTLKQTGWKLDGKYLSIRNVGRFKLRLSRPIEGNIKTVIVRRESSGHWYICFSCDKVPEHKLEPSDKSVGIDVGIKSFCVDSVGGYESSPAYFRKAEKQLRVRQRTLSRRTKGSKRRKDARILVAKSHEKVANQRNYFLHKITNQYIANYGVICVEDLNIAGMGRNHHLAKSIRDASWGKFFELLDYKAEEAGRTIVRVPRFEPTSKRCSACGAINQDLTLNDRQWVCKVCGTLQERDINAAKNIHVEGMKIFKSGVGQTLQEQTYGTSQSVS

SEQ ID NO: 45784 - protein, 386 aa, unknown; identical to SEQ ID NO: 45783
  TnpB Polypeptide

SEQ ID NO: 45785 - protein, 372 aa, Enterococcus sp.
MKKAHKIRIYPNSRQEIQFQKTFGCVRFYWNFLLDQRITNYKQKKENPEYIENKLTYAGLKKQEEFAWLKEIEAQPLSQVNMDLNKAYKNTFNSKFGFPKFKSKKYSKKSYRTAVGMKVNGRYFYVSKVGWVKMAEALRFKGKLMNVTISQSKSGKYFATFLVETENSLKEPVANSIGLDLGLTHFCITSAGEKIDSKRFYRSLEQRLIREQRKLSKRLEVAKQHNRKLDECRNYQKQKVKVARIHEKIANQRIDFLHKLSSRLTDENQIICVEELNVKGLVKNHKLAKSISDVSWSEFVRQLDYKCQWKGRTLVKVDRFFPSSQLCSSCGHNDGKKELNIREWVCSHCGTLHDRDINASINIKTEGLSGIA

SEQ ID NO: 45786 - protein, 431 aa, Lentzea sp.
MVQARYRYRVEPNLVQQRLLARTFGSARVVFNDAIRCRDDAYRAGERISPTEVQRRVITEAKTREERAWLAEVASVALVQSVRDAHRAFSNFLDSVTGRRRGRKVGRPRFKSRKDNRQSVRFTRNGFTIRPNGRLYLAKIGDVKIRWSRELPSEPSSVTVIQEPDGHYYASFVVGIAQVPLAALEQEAGVDLGLARLVTVADTTGRRRHVANPRNLARKQRKLARLERERARRVKGSANRAKSRRKVAILYNKVSRTRRDHHHKEALALVRENQAVYVEDLNIVGMVRNRWLARSIHDAGWGQFVRLIEEKAERYGRILHRVSRWLPSSKTCSTCAHVMDAMPLAIRDWTCPLCGVAHDRDHNAAINILAAGRAERKNACGAGVSPPPVEAVGDEAGSTPDAAQPPGDPRPSDRGARQTRDGGRRGTTGRP

SEQ ID NO: 45787 - protein, 408 aa, unknown
  TnpB Polypeptide
MKIIRGFKTELDLNNKQRTACLQHAGAARYAYNWALTKKIEAYKKGEKVPTAIDLHRELNKLKKTELSWMYQVSKCAPQEALRHVDKAYDNFFRKVKLKKQGKFTGKVGFPKFKKKSRGIGSFRFTTGAIKVFPDAIQLPRLGKLRLKEHNYLPFDAHILSATVSEQASRLFLSVQVEEEQQEPVKAATTAIGIDLGILTLATCSDKVEFANPRALKKKLKKLKRLQRSHSRKQKGSKNREKSRKRLAVLHARIANIRKDALHKFTTHVCKNHAHIGIEDLHVAGMLKNHHLAQAIADSGFGEIRRQLTYKAVKFGTRLVVIDRFYPSSKTCSVCGYILEKLDLKVRVWTCPNCGTVHYRDDNAAKSILAVSLTDSLNACGAGSSGSLVTVSETTRVEAGTKQQLGLS

SEQ ID NO: 45788 - protein, 418 aa, unknown
  TnpB Polypeptide
MYRTQSNVIRGLSKDEYKMLREMCQYSNNLYNVALYNIRQYYFHEKKFLKYEENYHVCKENENYGLLQAGVSQQILKVADRSFKSFFNLIKKAKKGEYHFKDIKMPHYREKGGLFNLILSTNAINIKDGFLTVPMSREFSKLHSGKQIRIPFPARLEDKIIKEVRICPVYSGRYFKIQYCYLQEEERQDVSANKVLAIDIGLENLAACVTNIGTTFIMDGRKLKSINQYWNKRKAYYQSIADKQGQKMTHRLYALTRKRNDRTRDYIRKTARYIVDYCIGHHIGTIVCGYNGDFKRSMGLGRVTNQQFTQISFGALRETLEGLCERYGIKYIEQEESYTSQASCLDLDEIPVYNPEQPYGGVFSGKRVHRGLYRFADGRIANADVNGAANILRKSKQNFDFGELCRGLLASPLRIRVS

SEQ ID NO: 45789 - protein, 278 aa, Mycobacterium sp.
VKPNGRLFVAKVGEVRVRWSRDLPSVPSSVTIIREPDGRFYASFVVDVPASPLPAVEREVGVDLGIARLASTAATDGGRSDIANPKHLGRKMRKLARLEREKSRRQKGSTNRDKSRRKVTVAHNEVTRARRDYHHKQALALVRDNQVIHVEDLNIAGMVKNRRLARAISDAGWGQFVRIIGEKAERYGRTVHTVSRWLASSKTCSTPGCGHRLDELPLQIRQWMCPLCEVVHDRDHNAARIILAAGRAERLNACGAPVSPPAHREARGDEAGSTPTAA

SEQ ID NO: 45790 - protein, 423 aa, Giesbergeria sp.
MSEARNLRKTTYRLYPTPKQAAALGALLRSHQQLYNAALEERISAWSKAGKSISYADQCKSLTLLRRDLPEWADAANCSSQQMTLRRLDKAFAAFFRRIKAGQTPGFPRFKSLGRFPGFSFKSHGDGWRFTPEEGWRHGSLRLSGVGQIRARGQARQGGDIRASDILHRDGRWYLSLTVAVASPERTRHADGAMAYDWGVETFLSGVTHADETIQINNPRWWQQEKDQIIRLQQAVSRKSNKRSNRRKKAVRRLAAARAKVARKRLDWAHQKTAALAGKYALVATEELTLKNMTRSASGTVDEPGAMVAQKAGLNREILDTAPGLFTSLFRYKVLETGGEWVDAPTRKLKPSQRCPQCWHVTKKQLSQRMHCCEQCGHQENRDTASARVVLRWALESISGQELAETGVYSSRETPSFAKHRVE

SEQ ID NO: 45791 - protein, 363 aa, unknown
  TnpB Polypeptide
LNKSFKVRFYPNKEQQILIDKTFGCTRFIYNFMLNLKQKLYKNFNINLNYNNMCKILTELKRHKLWLYEVDAIALQQSLKDLDNAYQKFFNGSGYPKFKSKRDKNSYRTNGKTIVLDQNNHKIKIPKVGWIKFKDKSNFSSLTKINNITISKNSNGKYFASVLAEVDIETFAKTKKSCGIDLGLKDFCILSDGTKFKNPKFLEHSEKQLRLLQKSLSRKIYGSKNYLKAKIKLARFYEYIANCRKDFLHKISIFLIKEYDVICVETLRIKNMLKNHKLAKAISDVSWHEFCRQLEYKCLWYDKKFVKIDTYFASSQICSNCGFKNIDIKDLSVREWICPECDEYHDRDINAAKNILNEGLKLI

SEQ ID NO: 45792 - protein, 362 aa, unknown
  TnpB Polypeptide
MEKRFLLRIYPTREQEKLIQRTFGCVRFVYNYFLDYRIKKYNEEKISLNANDCSKILTSLKQEKDFLQIPDKYALQNAIKDLDSAYRRFQKGISKYPKFKSKTNYRTYRTNRSGNKIRFISNNKIILPKLREVKFRNNIVPDGEIINVAIIQKPSGKYYASVLCKNFSIKNVNKTNKSIGLDLGIKDYIITSNGEKFSNNHFLKNKINKIKEMQLKFELKKNGSNNKEKLRIKIAKQYEKIYNSRKDYLNKLSFEFINKYDHICIEDLKIKDMLKDKILSFEITDASWYELRRQLEYKSKFYDKEVHIVDRFFASSKICSNCGYKNENLSLNDREWTCPECNEHHDRDINAAKNILKEGIKK

SEQ ID NO: 45793 - protein, 361 aa, unknown
  TnpB Polypeptide
MKLVIQLRLLPNAAQTAPLLKTMERFNEAASFAARAGFEAGVFSQPSIHKLAYREIRERFDLSAQMAVRAIGKAVECFHRDKTVCPVFKPHGAVTYDERILGFKGLDKVSLWAMGGRQVVGLVYGEYQRERFDRIKGQCDLIYRKGAFYLYATVEFAEKPPVVVTDFLGVDLGIANIAFDSSGGQHTGKEVERVRRKHNLQRKRLQRKNTKGAKKKVRRIGGKEARFRRHENHCISKALVTTAKDTGCGIAIEDLNGIRDRLPVWSRDARSRLSGWSFAQLVAFLTYKAQQVGIPVVLVDPCNTSRTCSVCGHCDKANRTSQENFLCVLCGHRMHADQNAARNIRALAASKSAIELVSLTA

SEQ ID NO: 45794 - protein, 391 aa, Pleurocapsa sp.
MTYLAYKTKLNLNNQQKTLMRQSAGYARWVWNWALDFKQKAYQDEIKLNKSQLRKYYTNHVKPSYSWQSQLSSKIYQYVFISLDEAYKRFFKGLAQYPQFKKKGKSAPSFTLDASGKPIIIHGKLHKLPFFGYLKTYELLPVCSTKKVTFSEQAGDWFISFFIEVDFLPTEKQRDRVGVDLGISKLATLSCGKVFENPKAYSKALKRLARLQRDLSRKVFQSSNWQKARLKVQKAHRKVADIRSNVIHHLTSYLAKNHGEVVLEDLNVRGLIKNRHLSKALSDAALGMIRQQTEYKCERYSSQLILADRFFPSSQLCSDCGHRQKMPLSIRIFDCEVCNNQKDRDFNASINLENYVAAGSVALRSVDGVLPTVPCEADGKHQQGMQCTVLS

SEQ ID NO: 45795 - protein, 412 aa, Cyanobacteria sp.
MIVREAKLLNGTIAQYQAIDDAIRTAQFIRNKALRYWMDNQGVSKADLYSLCKDLAREFAFAKKLNSAARQASAERAWQSISTFYSRCKKKEKKKGYPQFKKHCRSVEYKVSGWKLSADCKSIYLGDGFNIGTLSLYCDRTTRSDLFRLKINRVRLLRRADGYYAQFCFDAQRKEPGEFTGKVVGLDLGLKYFTKDQNDNAVIYPQYLRKSERRLKKLQRRLSKKFVKDKKPQSNNYHKARKRLGRLHLKIQRQRKDWAIKQARCVVRSNDAIVYEDLNVSNLVKNHHLAKSISDASWYQFTQWLDYYGKIWDKVVVAVSPHYSSQDCSSCGHRVKKSLSTRTHSCPSCGIEICRDTNAALNILKKGMEILGVEWQNNSTQGHWESGLENRKHGEKTASTVDGQPDIASGLL

SEQ ID NO: 45796 - protein, 372 aa, Actinopolyspora sp.
MQLRYRYRLYPTPGQRRALAQAFGNARVVFNDAVRARQDAHAAGEKFPTGTVLQKRLITDAKRTDERGWLGQCSNIVLQQAIRLHTGGFSVRPNGKLRLARIGDVKVAWSRDLPSAPSSVTVVKTADERYYCSFVVEVGDETLPAAVDQHGQDVELGLDLGLSAFAVDQHGRVLDNPRFLRRAERKLKRAQRELSRKKKGSNNRNKARRKLARQHVKVTDTRSDWLHKATTSIVRENQTIVLEDLAVSGLARTRLAKSVHDASWGTFRRLLDEKAHRYGRQLVVIDRWLPTSQTCSDCGRIDGPKPLDVRTWTCPCGATHDRDHNAAKNILAAGRAERQNACGPDVRPHTGADGDEAGSSGTPRGATAPHAA

SEQ ID NO: 45797 - protein, 420 aa, unknown
  TnpB Polypeptide
MLKAFKYRLLPDTEQAEYIKRTIGSARFVYNWLLNDYKEQLDIYNQNNKQGNKPIIKEVTEAKKDNYFLSGVDSLALANAKLNLNTALRNFFDSRNGKRKGRKIGFPKPHKKTKCRWSYTTNNQGGNIRVENGHICLPKIKWVKLIQHRELEGVIRSATVSMERNGDFYVSVLCNVEQAKKQRQKPDTIKVVGLDMSYTEFVVDSDTLSDDTKPKYVRQYRSNEKKRSRLNRAMSRKAIGSRNRDKARVRLAKLDRHIANCRTDFAHKMSRHYAENYDVIVIEDIDMQSQARKKMRGHGKSANDLGWGQFKSYLKYKCEIYGSLFVVADKWFASSKTCNLCGTVNHGLTLSDREWTCPECGATLHRDYNAACNLRDWYFERYNTVGTTGIHACGDSADTAGGTLLQAGSLKQEAPSFREG

SEQ ID NO: 45798 - protein, 398 aa, unknown
  TnpB Polypeptide
MQRTEQIWLKPSDELSKLCHLSKNLYNEAIYIIRQEFFKTGKWIRYNDLAFQLKTSENYKELPSQTAQQILKIVDRNWKSFFRAIKVWKNHPEKFYEMPRLSHYKNKDGEFMLIFTNQQAKIKDGVLILPKKGSVIGEIKTRLKNLKEVRIIPRAIGYVLEIVYEKTINVPKRDKTRIAGIDLGVRNLVTIANNIGKQPIVVKGGVAKSMNQYFNKRKTELQSKYDKQGIKNGVKMKQLQVKRDKKMHDYLHKVSNAIVNYLVENDIGTLIIGHNDNWKQNVNIGRRNNQNFVTIPFYKLTHMLSYKAEKEGVEILFKEESHTSKCSFFDDESIEHHDRYVGKRKRGLFKTRFGYIINADVNGALNIIKKAIPDAFMRLKADVIEDDVGHPLRLAVSC

SEQ ID NO: 45799 - protein, 376 aa, Aphanothece sp.
MEKAFSYRFYPTLEQESLLRRTLGCVRYVYNKALHERTQSWYEKQERVGYNQTSSMLTNWKKQEEFSFLNEVSCVPLQQGLRHLQSAFTNFFAGHAKYPNFKKKHQGGSAEFTKSAFKWKDRQIYLAKCSEPLPIRWSRQIPDLCEPSTVTVRLHPSGRWHISIRFDDPRCKPLPVSDKAIGIDLGIREMLVTSDGKKISNPKHLKQHYRRLRSAQKSLLRKQKGSKNRDKARIKVALIHAQISDTRKDHLHKLTTQLVRENQTIVVENLAVKNMVKNHKLAQSISDASWGEITRQISYKCRWYGRNYIEIDRWFPSSKRCSDCGYVVEKMPLSVREWDCPNCGTSHDRDINASKNILAAFSCGVSLWSECKTRTE

SEQ ID NO: 45800 - protein, 387 aa, unknown
  TnpB Polypeptide
MSIRTIALTLKPTLTEAAALTRLQAAFNDACNYVSGVAWDAQEFNSVRLHRLVYYDVRATYGLLAQHAVRAIGVVADSYKADKTKRHTFKPTAAVVLDTPRLYRIEHNRAGIATLDGRVKVELNIGGIQRRQLADAMKLAEADLVKDHKGRWRLLVSAHYPDPPTMDTNGVIGIDLGRIDIAVTSNGDTFSGTHVTAIRDRYARNRRSRQKKAAKGTRSTRRRCRQAQKRLSGRESRFQRNINHTISKRIVANAVEFERAIACEDLTGIRERTNTQARNKTERRRSNSWAFHQLRSFLAYKCQAAGVPFVLVNPAYTSQMCHCCLHIGERCGKRFVCINHTCCWAGDADYNGARNIALLGAAVTSPGGPALCCLYQPDARATESPRL

SEQ ID NO: 45801 - protein, 269 aa, Microcystis sp.
MLVVEAKLKNGTPEQYHQLDEAIRTSQFVRNSCVRYWMDNKGTTRNDLQKLCAVLANNKETPYVNKLNSQARQSAADRAWQSINRFYQNCHAKILGKKGFPRFKKHSRSVEYKLTGYQLSDDRRKIKFSDGFKAGEFDLWCSQKTLVYYSEQQIKRVRVVRRADGYYCQFLVAVERQEYHKPTGQITGIDLGLKEFYTDAQGNTVGNPRYLSKSEKRLKKAQRRLSKRFCKGNKQSKNYHKQRIKVAKLHLTLKYQDNVKTKQLKTLWH

SEQ ID NO: 45802 - protein, 439 aa, unknown
  TnpB Polypeptide
VVEEAFQYAARPEDASTGESAWNAIQTCREVYNHALTQEYHPAPLHDKPSYTTMQNKLPDWKREWSEWSNVYSKCLQMAVRRIKNGESVLDSLKERGFNVGTLKWKRPREYRSITYNQSGFDVDSNTGRTGHAVVNFSKIGRFHVNYHRPLPSKADINEVILKKQKTGDWTVSIVVTYDAAYPEKPEVEDIDVEDTVGIDLGITKFVHDSENRAFARLDEHDGRERIEKRHRSLSRKQHDSANWSKARKSLARAYERLKNRREDYREKLACWYTQEYDAVFLEDLDVASMTQQDRNARNIAAMSWRATLRAFKRHGEKNGCHVVLVDPAGTTKQCANCGVESDKPLWVREHSCPSCGFTADRDHNASLEVHQRGLQQLGVAFEQSELGLGQSEVTSVETGVPAGRRYRDALLANTVVETESPLREHGSPTLNEAAQAAE

SEQ ID NO: 45803 - protein, 327 aa, Kandleria sp.
  misc_feature (272)..(311): Xaa can be any naturally occurring amino acid
MRNGACSNGEKIGYNQTSAMLTDLKKQADFAFLKDVDSIALQQSLRDLDRGFKNFFEKRARHPQFKSKHNNHQSYRTINQGDNIRIIGKYIKLPKLGYVKIRQSMEVGHINNVTVERTPAGKYFVVLNVDFEPELRPNAGCMIGIDVGIREFYSDSNGNVVNNPKYLEKSRRKLVREQRRLSRKQKGSNNRNKQRVKVAKVHEKITNQRNDFLQKQSTMLISENQTICIEDLNVKGMIRNHKLAQHIASCSWSKFFAMLEYKAAWYGNDIIXXXXXXXXXXXXXXXXXXXXXXXXXXXXXXXXXXXXXXXXIQAVRHAVAVGIRTRL

SEQ ID NO: 45804 - protein, 447 aa, unknown
  TnpB Polypeptide
MKKRRKKKQQRRTYRYQIREHPQNMRLGNMLDDLCDVHNHFLKLENRYYRIYGKYAGRYRLQPYLTNMLNRTHQHWAWIPRDTLDAVIINLHRGFENFFDIPKFGRPKHKRRGKLRSAKLQSGYLLEEGRVRISFKEWDEVSQSFKFNKRWFSFHHHRDWKGKVCYIQILRDAAGTYWLYVITDDVSKEVLPATDESVGADFGMETYLTLSNGEKIQHPHFLKQSLNELRTLYKALSRKVKGSGNWWRCLHQIVRLFRHITNQRKDWHFKLATDLCRRFDFIATETLNLDGMKRLWGRKVSDLAFYQFVKILKYKCLKHNREFHQVGQWTPTTKPCSDCGYPNKDLSLSDRQWTCPECGSHHDRDINAAINILRAARGPSVEQMSDVSSETRTATKHKPNPLGLGALTELYQPNRGASLPRHLFFYIDKERISTIQANFLQSPPSLD

SEQ ID NO: 45805 - protein, 573 aa, unknown
  TnpB Polypeptide
MFNKDKHNYEVNDYHTLCLELTCSTNDKNQILRISNVEHYLSNFLVGILNERYERLKDTRKYHRLRNAYQKIITKQKDLKDTDPNFDAKFEALETDRKQVVTKLNKLIKQYGLTYSDVQKLADSYIAKYDIHTVFVTTTVENVYSGLETVLYGDGKTLNFKSRKYDFPSIRAKEINRGISLKYNKKTDELNIRIGQSEKSKRDPIILNLKPIKRNDYFAQDEIALLKEYLYDKKGNDEKYKAIFDKTGIKQNTHRPCYVTIVIKPIRHNIKIYAHITIVGSPCRKLDHYGNLRHQKGSGTVACDLGPQSANIVAHNFVKAMNLAERNGKSTKDTASVDKKLQQKMAHSLRYSNPDNYNENGTIKKGAKKWIHSKNYEKLAYKLHEKRRRDSEFRHYATQEMVNDLREHGDVLVTEENRVEAWKRRSKKQTEQTNKEIEVTNKKGEKKKVKKCKKKRRGMAYSILHRIPGFFMAECEKKFKEVIHVDKMFRASQYDHTDGSYKKKKLSERWFVLSDGTLVPRDLYSAFLMYCADLGYKNPSQNLCNLRFDKFMKLFTDFNNWVKTNHIKIANYN

SEQ ID NO: 45806 - protein, 375 aa, unknown
  TnpB Polypeptide
MRKTFKYRIYPTKSQATLLNKMLEGCRYVYNETLSIRKNSYETSKKSISLYDTNKLLTQWKKDKPELTLSHSQVLQNVQVRVDLAFKAFFRRCKAGENPGYPRFKGRGRYTSITYTQYTGGNICLKESILTLSKIGDIKIICHRPIDGKIKTITLIKSATNKWYASISVEGFKLQIKKTLNKAIGIDVGLESFATFSTGEKIPNPRFFRQEEKALTKAQSKKDKFEKGSLKRKKKNKVVTRIYERISFKRVNFIHQISKKLVNEFSIIAIEDLNIRNMIKNHCLAKSISDVSWNMFFNILINKAEYADCQVIKVNPRNTSKRCSRCGTIVEKSLSNRIHSCPICNLVLDRDVNASINILALGIQGLDLIPRSPHL

SEQ ID NO: 45807 - protein, 486 aa, unknown
  TnpB Polypeptide
MSRLASEARGISAYATYVVRNDVALGERLALAGAVQPAVAGRRAGVAMPEFLVTGKSGRSRKEALIQHNVVTSYRSWEERIAAANGESDKYVSQGWKRTVDTSSPAYGEDYINLGAVNKQYAEIENNPFKDGEIVLKLVIQGVWYRLIFPFDNARFTEGKVTLPVIKVENNQPVFIFTVVTDNPIVQFSGDYIIGVDVGINDYATVAVRNSTTGQIVHQTTLSQRVHSLWNSVRASERQVRALNKKADKLLYDRQAHMCAIDEAQFHRKAASRKKHELAILAAQEIAHLSHFYDNAVVAVEDLSWIRNTMQNGRWNRGAFMQWLTHYVPQNGGWVVAVNSANTSQLCHVCNEKVTHPVHKVSICPRHGVMDRDVNAAANIAARAVPKVAKARKARAKNRKLQKKTNLKTPITRETLKYHGRDRMKNCPTPKRKKRIAREVNLPPSPARVIVTTVLADCGAYGAPETSKAAINQGNVAYGCRLCNLN

SEQ ID NO: 45808 - protein, 436 aa, unknown
  TnpB Polypeptide
MKLTGDLKALETSIGLYREALRVLIPIINDNWETLSEYEFVNQKYNCIEKWIHNTKEHQARYTFGEQFPKFPSYLRRSAIAQALGIVSSYRSNLANWDKEPKGQAPQLSLTHYAYPAYYKNNLFRNFDPVKQTIELKVFKNGDWVFEEYRLKTSDCRYYQKYLAGLKQNVPIIQKKGRRFYAAFSYEENVQLVKEDSIDKICAVDLGLGTDATCSIIGKDGTVYARRFISFSEEHDQLHTQLGRIKRNQKRGSKHNKTLWRKVAGIGQSIADKTARAIFDFGYEHGIDVFVLEYLDFKGKNPVKRTHFWRYKRIYNVLTHKAHRYGLRIARVNARNTSRLAFDGSGWSKRGREISPETPYSVMRFPTGKTYNADLNASYNIGARYFIRHLLKTVTVTQRLVLEAKVPQVTKRSTCTLSHLINLRSELAVLTARTQA

SEQ ID NO: 45809 - protein, 396 aa, Gloeocapsopsis sp.
MKQVLTVSCKLQVTQEQVTKLNDLLKVFADACEYVNRTVKEGLANELAMQSLVYNEVRALFGLPSQLAIHAIRRVAGNRKTAKQKGKPVKGFARSSATYDVRTFSFREKDWTVSLTMLGKRERFPLAIGNYQRSLLQGQNPKTATLVKRRDGSFYLNIQLESQPPKIEETNSVLGCDLGRTDICVTSSGDKYSGKQVTKIRDKYSDLRTKLQQKAARGTRGSRRRCRRLLQRLSGKERRFQSHVNHTISYRLVQKAKTNQQTIALEDLTGIRERTNELPRSKTERRKSNSWSFYQLRQYLTYKSVKFGVKLVFVNPAYTSKSCHCCGVIGNRNGKHFRCVNLACGWSGDSDLNGAKNIEAIGQLINLPGGSGALSCSWRDVVLRATENATLNRQVG

SEQ ID NO: 45810 - protein, 446 aa, Pelotomaculum sp.
MDNWKTQDIRLAVQGKFSLNSRQANDAVHDAQATIKSQKELVKLNHAGAANKVEFTQKRLEKARSSGKKAKLQRRLDKEERKLAFWQKHLDAGTFPPVVFGGKKLFHKRCKGNITHEAWQEARSSRYLSRGDKTKGGNLNIRLCIKDGNIYLDIAAEPVETEKSVRYSRITLPVYLAHKPSKKTGLINGRNYRQMVLDYLKTGSAYQVEIIRENGRYYIHVTIEEEIPVPYIPHSGVIGVDTNPEGLGIARADCLGQFKESLWLAQSEWTYARSNRRDNLIGGAASLVVKMAKQLNCALAVEDLEFKNDKSVTAKFNRMSHGFVWSSFLTKVERRAAREGVPLVKAPPPFTSIVGILKYQQQYGISNHEAAGYTIARHSLGYSNEKVPKQLVQKFIKKRDTFASLTNWKQWSSVKKAIIAAIKKQAKQEVKSLVSWQHHRKQLIAG

SEQ ID NO: 45811 - protein, 418 aa, unknown
  TnpB Polypeptide
MNVTLRFRAYPDEDTASEAWRHIELHRQIRNHAVRDYYRSARDDRPGKNQQVNEFPGWKRRWPVFAGVSAHAAQQSVRQIHKDLSVLREHRRSGRRTGRLKWQGAGEFRSVAYQSEGFNVDHNTGQRYGTLRLSKIGEIRVRVHRELPDTEDVSHVVLKKERTGEWYACFVVERDEPEKPDVANIDPNDCIGIDLGILSYIHTSDDLVVECVDLDKEYDRYAREQRTLDRKEHGSARWEQQRRKVAEAKRRIKRRVLDFQQKLSTWLVKTYDAVFAEDLDVKPMLEGSQSAKNKQDAAWSRFLDLCEYKADLYGTVFERVDARGTTKECNRCGVETSKPIWVREHSCPACGYEADRDLNAARNVLDRGIEKAEIGAGRPKLTPAETGVTTSTDGGHAAVRVDANTVIETGSPVSPDTG

SEQ ID NO: 45812 - protein, 380 aa, unknown
  TnpB Polypeptide
MELRMYEYRLYPSIKQVSRLNKIFTHCKFVYNELLGLNKTLWTTNKYDFDSLVMDLKICSPEIGEEVHSQVLQNVSDRLSKSFNNFFSRIKLKKKGNIIKAGFPRFKRKIGSITYPQSGFKFLSDKKLKVSKIGSIPIILHRVPKGKIKTLTIKCNSANQWFAVFSSEVEIPVVIHPSDKKIGIDVGLEKFLTNHKGESVVNQRFFLHAERKLAKLQRINSKKIRGSRNKEKARIKLARQHLKVFNQRTDFLHKITNSLTKEYKIICGEQLNIKNMVKTNLAKHILDVSWGRFYQMLSYKAVTCGGEIRKNPKTRGSSHRCSSCGHYVEEMPLRKRKFLCPKCGLSCHRDKNASMNHIKDTDGLSEINTPLEIQPLSLHL

SEQ ID NO: 45813 - protein, 173 aa, Moorea sp.
MYKADLYRIYPNTEQQQALALAFGCCRWYWNYSLDLCQKTYQKTGKGLSMGAIQSLLPGLKKEYPWLSDAYSQCLQVVALNLSRAYQNFFDKRAKLPRFKSKHGRQSMSYPANVKFEGDYLKLNRKIGKIYGRRHRDFEGTIKTVTISKNPDGKYYASVLVDVVVCPAIITCY

SEQ ID NO: 45814 - protein, 465 aa, Moorea sp.
MYKTIPVKAVLSDEEKAFWEFQCQHSNSLFNCAIYYSKQKHYKWLEDQEAYTTYWRGDELKAGWKTYKCGVKYPEIDKALKMSPHYKAMAAQSAQQTLKTVGEAIKSYNQLVGLYYKGEVDRPRFPRYRKSGGLFYVTFPRQALTYKRGLFYPSISKESKPELLTEIILTPPNFIDPDWVKEVTIRPCYGQLWIDWVIDDGKQPVKSNSSLDYSQALGIDHGGDNWLTCVSTLGKSFIIDGKKLKSMNQGYSRLVAKHKAGKPERYWDSILDRIQLKRNNQMRDAVNKAARFIVNRCLNDGIGNIVIGWNEGQKNRSNMGKKGNQKFVVIPTKRLIQRLEQLCLEYGIRLIITEESYTSKASFLDEDFLPTIGEKPVRVASALPKGWRASGRRIRRGLYQTASGKLINADSNGAANILRKVTTQPFDLAKVARGSLTVPHRYNLFSDLSKSYRYKGGAGRVYPPA

SEQ ID NO: 45815 - protein, 319 aa, Erysipelotrichaceae sp.
MQMPKIKKGFVIRLYPTAEQMQQIRRTAGCARWLYNEIVAVNQKRRDLDPKASLLYGRNLNYLLPRLKEEHPWLKEVDSTSLTGAVDNISNAYARWLSGLGRKPKFKKRSTHTDSFISKCVNGNIAVIDAHHIRIPKIGVIYYKSGRMPHGRICSVTVRILPSGNINASVLCDYEEEELLKTGKAIGIDLGLKDLAILSDGTKYGLPRWDKESADRLHYWQRTASRRLLRAKEAMKKDSALTLEDFRNYQKARRMVARIHEHIANQRQDYLDRLTTSLVRDFDVIVIENLKPSRMVHNHNLCGLGHVCSDAGVQVCILR

SEQ ID NO: 45816 - protein, 417 aa, Halobacteriales sp.
MSNQVVTRTLKASLTNHSQVCDGLDSHGFAASKLWNVGRWTISRVWDAIDHIPDADELCSYLKSHDRYADLHSQSSQRVLQELGEAFVSWYEQDDPDANPPGYRKHGEQHPRSTVTWKNQGFKLDTQYNRVRLSKGTNMKASRYAADYMLCEYTLQTDADQTLADVESVQTVRAVWTGDKWELHFVCKMRVETPETPGENTAGVDLGICNTAAVSIGDETLLYPGNALKEDAHYFRQEEYDTAGENGPSQHAQWARQKKSRRQDHFLHALSNDIVEQCAAHNVGTIAIGHPKQIHDDQDWGRHGNKRLHNWAFKTLLNHIEYKAEDRGIDVERVDEAELKTSKTCCECGTEADANRVERGLYVCDECGLVANGDLNAAENMRVTVTPNPVEDRSNGCLAQPSVRLFDKSTGRVRPQE

SEQ ID NO: 45817 - protein, 590 aa, Halobacteriales sp.
MSDHLSLPIRLPDEDKKRFERLATLSRRVANHALEDHWTPVHLDGIADASHQAWKHFDEHEPFEQLDLYLPSRFRRCVLQKVGETLRSHADRRDAFQSIQSMLPNHKIRRIHRRRIKERLWSDGDYLSSGYVDILIDQLNSYYDRHGTYPDTYFEMQDCPEYESGVLPFSADDGPTSGQAVNYQYDGDSETLTIRLKTPDRLSPETRGDWSWTEYERSGYESFHDLLSHGDLSAPEFQPSRRKSGDTYYELSFPVEVEHAEGTDGTGRVLALDAGMRKEMTAVVVTDDGEQLSTPHFIQFTERDGMRRLHRERTRLNDRLAALRRDGRAHTDEFAHIHSEYERANSKLQHKREQLTHDVANQVLALALLYDVDAIVHEDLRSLSPPRGEGTLSWELSSWARRDIIENIEYRAESAGVAVERVYPKGTSRSCPRCGSTGHTCKSPDHHHEQWWGGHFRCDNVRCGFEGDRDYIGALNVARVFFSETDELDYGFTSSYTGDSEIVLARRSAGERSVASRSTSELASDAGTRLTFGTGIVAYKPEQAAATTGGGSAVIAPAVAVPESNADGSDGRGPVVQQCTRFLRHTTESY

SEQ ID NO: 45818 - protein, 358 aa, unknown
  TnpB Polypeptide
MRAFNAACQYISDVVWGAQEFRRVPVHHLTYYDVRERFGLPAQLTVRAIGVVTDSYKADKERKHIFGQRSAVVYDERLCKVRSTTVALRTLDGRHTIKWASGGYQKAQLAAALRLGECDLLYRADKDRWRLTVTIDLPDVPTTPTVDAIGVDQGIVNVATTSDGDMYGGAGVVGVRRRYFHMRQKLQKKGTKSARRLLKRRSRKERRFQADISHTITKRIADHARATGRAVGAEDVKGIRSRTGHVRKAQRRTHSNWAFGQFTAYLAYKCQERGVAFVLVDPRYTSQTCSRCGHCAKANRHTQSSFLCRSCGFAAHADWNGAENIRVKALDVLSAGARSDARTSGVTRGVTCGQAHPL

SEQ ID NO: 45819 - protein, 255 aa, Microcystis sp.
MLYYFSKSEKRLKKAQRRLSKKFGKGNKQSNNYHKQRIKVAKLHLKVSRQPQDKAIKDALALVQCNDLVVYEGLKVRNLVKNRKLSKSISDASWYQFTEWLNYFAKIYRIVCVAVTPHVTSQDCSVCGTRVQKTLSTRTHQCPNCKTVLDREHNAAINILKKGWQYLGNPLNASTLRRRSGATSRFDFAHRRRLGIDTSTSLSVNGTVGQTETDPNALAESCLWVFSGDIENLSCLVEQGISNSNVERIPCHSVA

SEQ ID NO: 45820 - protein, 532 aa, Ammonifex sp.
LILTTSLRLPDGLVGPLKNLTALGLKVQEQVLGTYWSPGGLEAVASSPGKAWKLLDAELPRPQDVYIPSRVWRSILESAGRLLRSMAERKRIFELFLPYFSGQAKDAARELYELLKEDGEQEKFGYLFNVAEAMASFYAEHERLPQDFFELQKRPEPKKFTFTTSADDGPERGQVMKYECDGEVLRGRAKLPISPEPKKEEDWQWFSFEVGLPEELKEKLAQGGKLHAPDLRLKAKPSGKLVALLDVKVEVPEKAPSGERDRALGLDWGQRKLITGTVVSREGQLTPPFFVFWQALRAKLFRIRQEIRRLQKTRDQHERKSPEWKRYNRLFASAWQKYHRIQHQLAHQVSSLLVLLAKAFDCRYIFVEWLLTLRGKKGRPKDLNWWVTTTVRGLLFRLLRYKARLLGIRVIPVPPGGTSTACPRCLGRGKHVKSPGEPEEKDSGPWFVCPFCGYSADRDYVGSLNVGRTGFKLKRPLTYMVGRAAAQPFPSRGASREEAMTFTTLGYIKSVFVANFNTLTRLLDSAALPSIT

SEQ ID NO: 45821 - protein, 384 aa, unknown
  TnpB Polypeptide
MNTDHSVLTYNSELSFSDIADRDKLFQTLELSTTVWNRCSELIFNNKPLLRLKVVHHLCYYTLRVEFPNIPSQLIIQTEKSVTCAYRAAKSNKHVITKPFKRYNHSIQLDKRLYGFKKDGTLRITTIDNRVSVTFNIYPKLESMFSKYPMCDPLIFVKNGLIYISFPFRISVGNVLLTKLAIGVDLGIKNVATTSDGIVYSDKNYLANKRRIRYLKRCLRSKRTKSATKHLKKIRFKERSVTKNMVHCLTNKILSESMGNVIVLENLSKIKKNTKRNKEFNNKQSQVPYYMIRQFLTYKAPLVNKQVVTVSPAYTSLTDCRTGLRDGVRRRGRYVGNDGKVLHSDINAAINIAIKSKLPISCNYGSIYGQGIVNSPIVCKSINK

SEQ ID NO: 45822 - protein, 432 aa, Methanotorris sp.
MTNKNKLPTEIVLTYKVKHNYDLKDLPTEFIKIAQKAVDIIWKNIDWKETEVKHRYKVGNKYKYYKTIRLIPKIPKDKDFKRELRNYLLNGWKFASHYVDGAIKVSYSTIESWKSNYMEGIRSRKKPTFKRPFVRVKNTLIKYDKEKREVRITIKPREEYLILNIKDEWFYERVKDFDIGEIILKNNEALITFKKQLNFDKKVAIGVDCNLKSLDLYHPEKGWIRVNVEELHRIKRVYDVIVDKLKSIYKKAPKRIGRLLRKYYNRRKNRVEDYINKLTSQLSKLFLNAIFIFEDLDKFNMYDKNSNFNRSLDRTSWRKIAKRLEYKSIVFYVNPHYTSKTCPVCGSKMESQEGQVVKCNNCGAFNRQFVGCFNIFKRGIKLVKKILGGVGVPVSGVESDDLLPNEPRGELSSMKPNPDVVYIVNLNGKTLL

SEQ ID NO: 45823 - protein, 468 aa, unknown
  TnpB Polypeptide
MLAVVKRIERIRLYPTTRQAAALAVMLDVTRELYNALLQQRRDAYRLRKVTVTAKMQYTEITALRAEDRRLRAVYREAEDAVLHRLDLAMSAFFRHCKRGEAPGYPRFKSWQRWQQLEFPHGDRALRLDGVQQRVSIPDVGAVKLRKGRKVPAAYGRAWVVRKNNRWYSCFECERAVRPLPASNEMIGVDRGVHVLAALSDGRLIANPAVGEQRRAATARLQRELEAMTVRDRARRVINGREHRRVKARERLARAREREANARRDYARKVARRLVDGADVIALEKLSLRAMTRSAKGSVQCPGRNVRAKAGLNRVVLDSGFGLLRQMIVAKAEEAARTVVEVDCRFSSRECSHCGHIARESRRGRRFCCVRCGYRNHADVNAALVIRGRAQLARKSELDPAEEAGRRGKDAAAEAHTTKNRGFATASHNATATRYRSRCASIARGHVSKRPKASPSAPVALLLKYSSR

SEQ ID NO: 45824 - protein, 318 aa, Paenibacillus sp.
MSQTLTIKIKLLPTREQASMVKNQAIKDAKSVFKKAKKSKFTIVPVLKKPVCIWNNQNYSFDFTHISMPLMMNGKVAKTPIRALLIDKDNRNLGLLKHKSGTLRITQKSEKWIAQISVTVPTSEKTGTKIMGVDLGLKVPAVAVTDDDQTCFFGNERQNKYIRRKFQSKRKKLGQRKKLNAIVKLDDKEQRYMKDQDHKISRAIVQFAVEHQISVIRLEQLANIRQTARTSRKNEKSIHMWSFYRLSQFIEYKAKLAGVKVEYVNPAHTSRTCPKCSEKNKAQDRKYICSCGFETHRDRVGAMNIRYAPVIDGNSQSA

SEQ ID NO: 45825 - protein, 357 aa, Paenibacillus sp.
VLRAYKYRIYPTLEQKHYFANVFGCVRFIYNRMLADKIEHYKQTETMLNNTPAQYKKDFDWLKEVDSLALANAQLNLDKAYKNFFRDKKVGFPKFKSKKTNNHSFTTNNQNGTVAIENGTIKIPKLKTKIKIKLHRQLVGLIKSCTISKTPTGKYYAAVLVETGVISLPKLESKIGVDLGLKDFAITSHGEIIPNPKYLRTSEKRLVKLQKDLARKKKGSHNRYKARLKVAKLHEKIANQRKDFLHKLSTQMINDNQVIVMEDLRVKNMMQNHKLAKAISEVSWSMFREILTYKSKWYGRELIIAPKNFASSQLCSCCGYKNAEVKNLGVRQWTCPECTTLHDRDVNAAKNLLKLAM

SEQ ID NO: 45826 - protein, 489 aa, Paenibacillus sp.
MSDSTMMYRTHQVWIKPGHRLFTYLNEACQNARNLYNTTNFYIRQVFTSFGRNEPLQPLQQQVMNTLETRLEAMNERRSFQNRSRLFELPSQENPFVSYPFLDALFKVMDQPDYRALPTQSSQSIMKVVFQNWNGFFTSMKDYRKHPEKYTGKPNIPGYARSPVKEVVFSNQDCVIKERKFLKLPKTRLQLNIGKLGRAHGQLKQVRVVPSHGHYVVELIFACPMEEKEAAQENVLDVKPSDLLVDVNRSDYLMAIDLGVDNLATIVTTTGSKPMIVKGKIVKAINQYYNKMKAHYTGILRQGKEPREGLHTSKRMERLHRKRYLRIKDLFHKASHRLVRLAVEKRIGTIVIGHNDRWKQSSAIGRRNNQSFCHIPHQMLIRMIQYKAAEQGIAVILTEEAYTSKASFLDHDPLPRYGEEGTWTFSGKRIHRGLYRSNKGFIHADVNGAANIMRKVFPNVVAKSTDGIEELDGNQSVNVSTPLVLSILK

SEQ ID NO: 45827 - protein, 362 aa, Paenibacillus sp.
VQITYQFRLYPTPKQEQLMIRTLRLCQKLYNRAKEQRDTAYTQEGKPVTYAMQQDELPAFKKEFPEYKAVHSQVLQDCLRRLDDAYQRFFRGEAGFPHYKSADRYLSFTYPQPGAVAKTLAHEGSVYLSKIGWVRMHAHRPFDRANVTQINVKRYADGWMANIGVKLAAVEAGQSVDAAVGIDVGLRMFAALSDETKVDNPRHLRRAEKRLRRAQRRLSRKQRGSCNRQKAKRKVAKIHQKVARQRNDFLHKQSYRIVMKHDLIAVEQLKVKNMLRNRRLSKSIADAGWRKFMTYLSYKAERQGKRFVQVPAHGTSQTCICGADVPKTLAIRLHECKRCGWVQDRDIVSAKVILQRALKISA

SEQ ID NO: 45828 - protein, 288 aa, unknown
  TnpB Polypeptide
MQVTSSYGVEIRKQNIPIRHTLRIYRSAVSYLIQVYTQAWGELSEIPNAKKRFNEAEHLVHGTKKNQACYDFDLHFPKLPSYLRRSAIQHALGSVASYETRLELWKNGKLTGKPKLTQENHAMPVFYRDVMYREAGEKEEAAYLKLYDGHDWKWFRVRLLHTDMEYLRKHWAGEKASAPTLEKRHHKYFLRFSYTEEKNLSKTAVKAQTICSVDLGINTDAVCTIMQADGTVLGRRFISFPSDKDRLYRVLGRIRRTTACVLLQQENSITAICQQPIISERDILYVSL

SEQ ID NO: 45829 - protein, 399 aa, Microvirga sp.
MIVARGMTYRLYPTQTQAEALSRFAGTCRAVYNAALEQRTHYWRPFLRAHGKHISFASQGRELTQLRASFDWIEACPIDCQQQALRDLDQAFTNFFAGRAGYPRPRRKHANVSIRFPSCRLTVKRLNRRNATIRVPKLGRIRFRLSRPLQGHVANATISRDPLGWRVTFVTHVEIDTPPAADRIVGIDRGVTCSTATSDGEMPFFPREAITVSEAKARAHQLTASKRCNGSHRRAKALKFAARQRARAARQRKHANHVETTRIARRYHTVVLEDLRIKNMTRTARGTLEEPGRNIKQKAKLNRSILDTGWGQYETLLTYKVAERAGTLILVPARNTSRRCPECGHVSARNRETQALFRCVECGHKAHADVNAAINILRAGTRPSRGESSARKSRAAPAT

SEQ ID NO: 45830 - protein, 332 aa, unknown
  TnpB Polypeptide
MHVPIIPRDRAFKKRLREELMKDNPYAAHWVDAVIRTAYSIMESWRKRYLRGRARKVKPRIRRRFARCKITLMKIDYQARTIRITLKQGEYLTISWRSTWFEHRVRDWIVGEVIIKDDRIVIPFKSSEEIYVRRVIGWDSNELSLDGYEPSIGFIHVDLKPLQSIKIVYERKKAIAQRKGRRELYEKYVRRERNREKDFINKLSAGLRMLFQNTIHVFEDLDKEDLVSRKRAKNRRKRNARTPWKRIHKRMSEVALTAYVDPSNTSRECPRCGYVVETQEGQIFECPRCGLKMGRHKVASINIRRRYLEEKRRKKRRARMRGSPTAMNQRSL

SEQ ID NO: 45831 - protein, 406 aa, unknown
  TnpB Polypeptide
MEKAYRYRFYPTSEQESLLRRTMGCARLVYNKALAVRTEAWYERQERVGYSQTSSMLTSWKQDSALEFLNEVSCVPLQQGLRHLQTAFTNFFSGRAKYPNFKKKHNGGSAEFTKSAFRWRDGQVFLAKCAEALPIRWSRKIPEGCTPSTITVKLTPSGRWFVSLRVDDHTVKPFPKVDVLNEPLIGETTKTLPVHKSIGLDVGINSLIATSDGDKIANPKHFKQLRKKLRRVQKALSRKQKGSNNRHKARLQVAKVHAQITDARKDFLHKLTTQLVRENQTIVVEDLAIKNMVKNHKLALAISDASWGELIRQLAYKCEWYGRELIKIDRWFPSSKRCGNCGHIVDKLSLNIREWECPKCGTNHDRDVNAANNILAAGLAVSVCGATVRPEESKSRKAGVLKQKPK

SEQ ID NO: 45832 - protein, 623 aa, unknown
  TnpB Polypeptide
VAKTQTLSFPIRLPDNMQAEALRLLDESTPAINQMLTDLWPQLDRFAAERVGPAWKQVEKHLLRRSGHGSRQERCEMEQAGRILRGQASRKQVFLSILPLLSDGLIRPAEGKRPATKDYRAIKEQVRQLREASAEADAFMAMTNVVEQACNQFLQTGIFPTTYEELQRVPVLSAGQLTFAADDGMEQGQTYRAKVEVSRFCEVASRSEHEQATLGLKLRAPDEQGQWSWGEWSQAIPLPETVLRALDQGAHTQAPTLRAISGDDGSRVAVLDLILEVPAKYVSPLDQETRVLGWDWGIRSLITVSILEKPEGEEPYRQISRPVFLDSGGLDGRQARLRREIDRLKACQERYDKLVEQALNAREEQHVPLPPHFARWQAQSSSYKTRIQICWKKYERRNRELAHLASNVLILLALLYDCRLICGENLTTLKSEGRGRGVRGRWRNWRNNTTVRGELWRVLKYKCHLLGIRARQVEPRGTTHTCPHCGKPAHTYRSPAKADRNKALEWAPWLCCDNPRCLWNGARDYAASLNIARLGLAFLLTYHDTKRYQAYRMTDASVKPASYTGAGATLLLPSQGITPRPQEGKDIYYAGWSYAISLRTSQAKSLLSVLSTARLRKYLLKSA

SEQ ID NO: 45833 - protein, 418 aa, Halobacteriales sp.
MEARRTAPVKLIVPDEYYDDLHETADQFLYCANEASDHCWDNTSYEDCITSNVKARDVLYDRLRDETDLTANLVQEAIRRAVHAVDSGVDRWKKGKRTNKPEFTSWSMVYDKRSATFYRRKISLSTVNGRIECNFELPADSPTPYEEYVLSDNYEFRTSTLQYDQASDEFYFNITTQKVDDEGEPVEVEVSDDTGNQTVLGIDLGVNSLAVSSTGTFWSGDEYDHWIQEFEKRRAEMQQRGTQAAHNALLRLGKRERAWRKQYIHTVANEIVAEAVAHDCDVIVFEDLTDIRERLPHADWHHVWAFRRLVEYVEYKAPERSVAVEQVEPDHTSQRCSRTDCGFTHEDNRDGEQFRCLKCGYEINADYNGAKNVGLRYVRKRQHRLRSSPTSGSADAPVDVRVNGGMLNGDGYRPTADS

SEQ ID NO: 45834 - protein, 308 aa, unknown
  TnpB Polypeptide
MERRKVTFKLYPNAVEAERLTGWIRLHCELYNAALEERIDAWRKHGKSISYYDQQNVLPEIKAARAEFVELGSHALQQTLRKLDLAFQAFFRRVKAGQTPGFPRFKSSRRFSGFCYPDPAGWKVMQHGGRGATLRIGSGKHAMSIRARGQHRFGDGAKPNDLTITRRNGQWFASVTLRVPEQACARARTGEAQRGVDFGLNDWATFDDGETIANPRFVRNEMPRMADLQRQQARKKRGSIRYRRLGAQVAKLHERIGNLRRDFLHKETTRMAMSCAVIATEQLRTRNMTRSASGGRKSPAGWSGRKPG

SEQ ID NO: 45835 - protein, 467 aa, unknown
  TnpB Polypeptide
VQTTYQYRFYPDTKQKLELNEWLRISRYWYNRQLGDRFDWWSMNRTYVDACPLVSSIATVREKPNFYSQKAQLPVIKKDLVKVFHSGELLDFKRVDSTVLQEVSKRVGNAFERFVAGNSKGKKSGKPRFKTAADFRTMTFATAKNEWLKLIRKNWLYLRLPKIGAIKIRMHRELPSGCKLKQISVTRKADGWYIQMMLEDHTVPEFNPDEVVPTWDNSMGLDAVLHEDVYLATSEGKKLSSLKPLRKNQAKLDRISTKRNKRKRGSRSRRKLAKREAKQHQRIARSRKDFQYKTAHELVRTDKKVFFHEDLNLKGLTKRNKPKQAEDGTFLPNGQSAKSGLNKSWSDAAFGNFFTILDYIAAKAGAVVISKNPAYTSMVLSYRDEIIFTDCSIRYYWDEQESLMVDRDINAAINLKRLGLDIFPSIKRRSGKLFVVRTMDESTAKEILYTLHRAIKKPTSQAVFSLM

SEQ ID NO: 45836 - protein, 423 aa, Escherichia sp.
  misc_feature (338)..(387): Xaa can be any naturally occurring amino acid
MHQENTMLPRRISVSLFIDQSIIWPVKRLQAFKFQLRPGGQQEREMRRFAGACRFVFNRALALQNENHEAGNKYIPYGKMASWLVEWKNATETQWLKDSPSQPLQQSLKGLERAYKNFFRKRAAFPRFKKRGQNDAFRYPQGVKLDQENSRIFLPKLGWMRYRNSRQVTGVVKNVTVSQSCGKWYISIQTESEVSTPVHPSASMVGLDAGVAKLATLSDGTVFEPVNSFQKNQKTLARLQRQLSRRVKFSNNWQKQKRKIQRLHSRIANIRRDYLHKVTTTVSKNHAMIVIEDLKVSNMSKSAAGTVSQPGRNVRAKSGLNRSILDQGWYEMRRQLEXXXXXXXXXXXXXXXXXXXXXXXXXXXXXXXXXXXXXXXXXXXXXXXXXXQAALAWRSGACCSASVHKPALRVLWSYSERKSPVTK

SEQ ID NO: 45837 - protein, 400 aa, Burkholderia sp.
MRRLQAFKFELMPNGEQQRDMRRFAGSCRFVYNKALALQKENYEAGGKFIGYVAMAKHLMEWRNGGETPWLKDAPVHPLQQALKDMERAYKNFFAKRAAFPKFKKRGQRDSFRYPDPKQFRLDQPNGCIFLPKLGWMRLRLSRPVPGELRNATVSFNAGKWCVSIQTEREVEPPVPHATSVIGIDVGIARFATMSDGTFVAPLNSFKKHEARLRRCQRAMSRKVKFSNNWKKAKARVQRIHTRIGNARRDYLHKATTTISKNHAMVCIEDLQVRNMSRSAAGSIVAPGKNVRAKSGLNKAILDQGWFEFRRQLEYKLAWNGGWLVAVPPANTSRTCPACGYVSADNRTTQEKFACVECSYEENADVVGALNILARGHRVAACGEPVQSGRSVKQEPAGAI

SEQ ID NO: 45838 - protein, 449 aa, Lawsonibacter sp.
VEKDPAALTDNERGVLDEIARALPVMNAAGKQPTEAGDRYKMPAQGKSFLSYPFLEALLRASNNPDFLCGKLPRQAAQAVLKDCVQEMKSYYAAKREYKRDPGKFRGEPKFPGYNKPSGCCTTTLTNQDCILYDAGRGVHELKLPLTRERLSLGKAPIHGRLKQVKVIPTHGIFVISLTTEVKGELPEPAEVPQRIIGTDLGVNNFSAITNNLGKPCLLFKGGVAKSANQWYNKQMAALVSEQTSRTGAKFVPTPEARMLELRRDNYLSDYMNKVAKLVIRWCVENQVDTIVVGVNKDWKQGSHMGSQNNQSFVSLPFAKFRWQLQYRVERLGIRHIKHEESYTSKASFLDGDFIPVHGEAGADQVKFSGRRFKRGLYRSKSGQVLNSDFNGSAHTTRFARVATRSGRRSWMPLSGASCPTSAECGHPRLLILVTFGESHVASIETPSK

SEQ ID NO: 45839 - protein, 435 aa, Lawsonibacter sp.
MAVTATKVNGQFQFSGRAINITQAKNKALEPYNCIVHDYGITLELLPDAAQKQALAQQIGNARFVRNHYLSDRKNYYKATKKTLSVNEYKAKHLPQLKKDFPFLQESDKFALEAALEHVDAGYKNFFAGRAKLPKYASKWKPAGNSYTTKYTNGNIAILEENGLPYVKLPKAGKIRFVLPKGQTIASLIPEGTAILSAVVRRETNHHTVSLQLEAVIPKPEQLMEMHVSDILAADMGIKRFAVIGGQGWEEEVENPRWIRLHAKRLRRLQQSMARKQYDKKTHKGSKNWEKAKKRVTAEQRKVKNQRKDFQHKLSRKIADRYSAFLCEDLHIKGMVKNRRLSREISSVAWGQFFTMVKYKMQRQGKWLIQVDRWYPSSQTCSCCGYKNPEVKDLAVRAWTCPKCGVYHDRDINAKDNIFARGVKDLKAAGVTILP

SEQ ID NO: 45840 - protein, 392 aa, Mycobacterium sp.
MIVRMRSCAQAAKVAEATGGVQLAGKPKPDGTPTFSRYVEIGVDFEAHRPVVESVSVLFELYDGDANSYAATGGPGAQLPSGWMVTAAKFEVEWPADPQRAGLVRSHFGARRKAFNWGLAQVKADLDAKAADPAHESVDWDLKSLRWAWNRAKDDVAPWWAENSKECYSSGLADLAQGLANWKAGKNGTRKGRRVGFPRFKSGRRDPGRVRFTTGTMRIEDDRRTITVPVIGPLRAKENTRRVQRHLVSGRAQILNMTLSQRWGRLFVAVCYALRTPTTRSPLTQPTVRAGMDLGVRTLATVATLDTATGEQTIIEYPNPAPLKATLVARRRAGRELSRRIPGSHGHRAVKAKLARLDRRCVHLRREAAHQLTTELAGTYGQVVIEDLDVAR

SEQ ID NO: 45841 - protein, 379 aa, unknown
  TnpB Polypeptide
MQRTVKIRLDNNKALIKTIQTYSEIYKYILGVGLKSKTFNKVELHKLTYYKIRKKYPDFPSALIQTVRDVSAETLKRTKLKKNIKTKQYTSVRLDKRNLSIKFEDNLISISSGSGRLKINFKDNPQSLKYKEWKPIAGALLYKNSNLYLNVVVEKENPKVIEFTENEILGIDRGVNNILVCSNNQFFNSKHLKKVKGQYQYLKSVLQSKGSPSSRRHLKKLSGKEKRFVLDTNHCLGKTLANSDFKVFVLENLKRMTNKKLGKKFNKKIGNWSFKQFEMFLKYKCEALGKIVLNVNPKYTSQMCSVCNHQEKTNRKGAVFKCQKCGFELHSDLNASRNIANLGKSEISRLYVNQPIVASDETKKVVKDSYKPTIEMVGN

SEQ ID NO: 45842 - protein, 413 aa, Streptomyces sp.
MKLVVQVKLEPTPVQAAALEATLAACNEAATWVSTVAFEKNTKRTYDLRKHTYTEIRSRWGLGAQAAQHVIKKTCDAYATLKANLKAGNLGRPGSRRHVKATGKPVAFRPQSAQPYDDRMLSWQMDQHRISIWTVHGRIKDISFTGGAQQLATLAKYRKGESDLLVRDGMWFLQATCEIPEQPLNTEVDDFLALDLGIVNIATTSDGEIMAGRQLNRTRERDRKLRTKLQKKNTPSAKRRLKERRRKEQRRARDINHKIAKHVVAEAERTGRGIALEELTGIRERVRLRKPQRVTLHSWAFAQLDGFICYKSRRAGVPVVHVDAAYTSRTCAECGHIDKANRVNQAHFACRSCGFVDHADRNGSRNIRARACEMWRRRGVESTAPASPRKTRGGTGRKRSATTSGARCASPSL

SEQ ID NO: 45843 - protein, 374 aa, Lachnospiraceae sp.
MTGRWQSMLKAYKYRIYPNKVQEELLARTFGCCRFVYNQTLAYRKEKYEKEKKSMSRTDCNNYCNRKLKVEHEWLREVDKFALTNAIYNMDFAYQKFFREHAGYPKFKRKHDNHKSYTTNYTNGNISADFENGKVKLPKLKEVKAKLHRAFSGQIKSATVSQMPGGKYYVSILVETEHTAIPKKAGQVGLDLGIKDLCITSDGRKYENPKTLVKQERKLKKLQRQLAHKEKRSNNYYKTRKQIALCHEKITNTRKDHLHKISHEIISENQVIISENLQIKNMVKNHHLAKSISDASWYELTRQLEYKAEWNKRKYIKIDTFYASSQLCSVCGYQNADTKDLAVRKWICPKCGAEHDRDINAAKNILAEGLRQIA

SEQ ID NO: 45844 - protein, 628 aa, Micromonospora sp.
VDEESGEVLSQAVLAQRIGWCADLVAGMVSGLLAEHWNTADVDVLASGHDADGRKLPSNAWMALRRLGWTATTAEGVRVNDRIVRMAQEQAGRVLRSASWRAGLSAGVLATWPADPRKRTPQEWEQVRKAVPGGEHVPSSVIKSRTRQAAGFLAAHGRLPVDVFELEGVPRVPRMLLLAACDRQQATIERSDTAAGRVLLRLQLPSRPDPRAYADWTWVACPIVLPPTVPASAVLHLPTLRVTGRQVRADVAYSQAVPKARRTGHSVALGVDWGLNTLLSAGALRLHEDGRITALGAGGQFRAGGVLAKQHRLRRLSERLHAKADHYQRLAGVDSRHQLFGKHEVLRDEIRHVCARRRNLNVALAWAAARWAVDQAIASRATVVYVEDLRSLEARGMGATLNTRLSQQVRGQIVDRMRHLAAEAGIAVVTTPARNTSRHCPQCLTPLQHRKAPDKPTMAGWKWAICPHQSCRWQGDRDQGAWRRIAARGLTHQAKTAIDKTSGHMVIRAVVDKLEVSAVITKTRRWDRSKTGPTRHKPPRPAPRRRRAPSPTRPHGRAGKRPEGHAPTDRKLPRAAHRHQDVNTISTPTTGHQPRGAALGAGFHFHAHASPPRWETIPETQSDSGSLS

SEQ ID NO: 45845 - protein, 372 aa, Microtetraspora sp.
MMRGMAQAVKRAYKYRFYPTPGQAAELGRTFGCVRLVYNKALQERTRAYTLDGHRVSYEQSSAALTAWKQTEELGFLNEVSSVPLQQALRHLQAGFANFFAKRAKYPVFKSRKKSRASAEYTRSGFRWREGRLWLAKMDGPLDIVWSRPLPEGAEPSTVTVSKDAAGRWFVSILVEEKIRPLDPAGSAVGVDAGITALVTFSAGEKVANPRHERTDRRKLAKAQRALARKAKGSANRAKARITVARVYARIADRRRDHLHKLSTRLVRENQTVVIEDLTVRTMVKNHSLARAISDASWRELRSMLEYKTQWYGRELVVVDRWFPSSKLCSACGALQEAMPLNVRTWECACGAVHDRDVNAAKNILAAGLADK

SEQ ID NO: 45846 - protein, 395 aa, unknown
  TnpB Polypeptide
MTKRKKHQITEYEKCLREYHKTSPRHVIVLEAALLEDEKRHLFHQADLLRQCGNELLGIMKRHLDQLLRTKKYRGLRKSYGKISKSIKNLQQIKKLSNVQKQHLKDLQKDLRTISNLMNEMQKSYHVTWEYCRNTMKTLRLKYEQTSVIALSRAEDIWTAVSKVLYSDGERLHFKKRGDLSELRAKQFHKEIIGRVKNGFLEFRYGKVSLPVIRKETDLWLMDELEAVESYLKDPSFHDAYAIDQMKHGEIVSTYRPCYASIVCKTIRGKLRVYLHLTVEGLPFPKRTKDGVIKHLCGDGIVGCDIGTQTIAYTSDHVVGLENLAERGNSIRCVERQQRLVQRAMDRSRRAMNPNNYNDDGTIRKGKKTWIKSKRYQKLQLSYREPAGTSRGEAR

SEQ ID NO: 45847 - protein, 450 aa, unknown
  TnpB Polypeptide
MRGTTTLSNGARPWAPGCAWPWAGFSSFALMRRGARTSSPSTATRAGTSFLAGIINFPLPNLIVRKELVMLRTYTRKAYLSKSAHVNLADFFDQARYLYNESLAERKNAWEQEQRSVTYVDQQSALTVRRRDPSWSRFPSKAQRSILKRLDRAYQHFFKRGGYPRFRSWRTGIHSFEDTAPAKVKSSGKYFSYTVKGIGCLKFREALPDGKVKLVRVVRTPRRIKLQFVMEASEPEVLDVRPPVGIDLGIKDRATLSNGYKVPKNVLDRSEIKRRQRILSRAKKGSKNRDKKRLGLAKAWQRVTEREKGKVHALTSALVKDHSCRYVVEDLKIPNMVKNRRLSRSIIEQQWGFFVQCLTYKAESAGGWVIKVNPRNTTQQCSGCGSMPREKIGLGQRTYHCYACGLSLDRDVNAARNILHRGITSDSAGIIAEMKGGYINPGDKTPSPTS

SEQ ID NO: 45848 - protein, 406 aa, Moorea sp.
MISAYQYRLRLTKAQESEIEKWLDMLRCQYNYLLADRFNWYEQNRCSINSCPLICNLPDLRNNPDYFSQKKTLPQLKKDRPWYKVVQSQVLQDCVKKVDLAFKRFLKGDSNGKRSGRPRFKGKNRYRSFTFPSLSKTPIDGNILTLPKFGKVKMIYHRPIPEGVKIKTATITRKADGYYVTLSVQDDSVPDIIPIDSASNPVGIDMGLKSFLVKSDGSEVPIPQYYRKAQKRLKKIQKAVSRSKKGSNNRKKAVSKLGKAHKKVADTRKDFHFKTAKGLLDDHDIIAHEKLNIKGLAKTRMAKSVLDAGWGQFLSILSNKAENAGLVTIAVNPRNTSQNCSNCGTKVLKRLKDRIHSCPKCGYTEDRDVNAAKNILKLAVGHPVSSKAFRVSEPVGGVGKKPTLNL

SEQ ID NO: 45849 - protein, 410 aa, unknown
  TnpB Polypeptide
MYLHSMQRKPTLKAFKYRIYPTDAQAVFFAKTFGCCRFVWNKMLDKKLQAYKKKERIPQDTPAKYKEEFPFLKEVDSFALCNVQLQLEKAFKDHFRNRKQFKLPKFKKKRDKQSYTTNNVHNSIRVDFEKRLLYLPKLREGVKIELHRRFEGKIKSVTVSRTNEGKYYASILVETQNPRNKVSEPKSKVCGIDLGLEYFAIVTNDFGSYKVEHPKYLRLGEERLKRLQKSFSKKQKGSKNSEKARLRLGRQHAYISNARNDFLHKLSKAIIDENQVVVVEDINVKGLLKTRLAKSISDSGWAKFLSYLKYKAEWYGRTFIQVNRFFPSSKLCHRCGHKNDDLGLNDRMWCCPKCGETHDRDVNASINLYLVGLGRSEVTPVEQALVDDRSPHGLPKKPSCDEAGSSTAKD

SEQ ID NO: 45850 - protein, 377 aa, Acidobacteria sp.
MSKSRRTYKYRLWPNRKQREVLFSTLEVCRQLYNDALKERREAWKLCRTCVSFSMQSAQLPACKAADPALGNVYSQVLQDVLHRVDKTYQAFFRRGRGFPRFKGQGWYDSFTYPQAGFGVNGGQLSLSKIGNVKIKLHRWLQGEVKTLTLKNENGKWYACFSSILDSEPLPENHDAIGIDVGLEAFAVTSDAEMVDNPRWFRAAQKELRRKQRHVSRCTKRSSGWKRACRRVAKLHRHVFHQRNDFQHKLSRELVNNYGIIAVEDLNIQGLAGGTLAKSVHDAAWSGFIRKLSYKAESAGRWLVKVNARGTSQQCPCGRAVPKKLWDRKHHCSACGLETIRDHASALEILRRGLRLRTETPALAGVALEAPSFSYGA

SEQ ID NO: 45851 - protein, 423 aa, unknown
  TnpB Polypeptide
MCSEAKLFKNTVIFRCRQLLSANQKGYVGLQINEKTVLDEFKLTEGTFKKIDSKYYLPGYFHFDYLFKVTNNPDYYNHLPMQSNQQIVKEVLADFKSYFKGIKAYKKNPDSFTGKPKFPGYCKSEQVSFDITNQDCVVKTCKEGYSYLKLPKTKLTVNLGRLKLGRLKEVTIKPYYDTYKICIVSEEPDTEPIDLDYEKHLSLDLGIDNFAASGNDCGLAPFIIKGNEIKSYNQWFNKKNAYLHSQLPKEQHSSQQIQMLWKKRNHKMTDFYNKSASFVIQYCIDHKIGNLVIGKNPKWKQSLEMGKKNNQNFCYISHAHFIRKVTEMAEHRGIQVIIIEESYTSKASFLDNDEIPVYGKVNHFGFSGKRIHRGLYQSKDGLLINADVNAACNILKKSVKTAFDRVYDCTYLYQTVNTIHVNP

SEQ ID NO: 45852 - protein, 417 aa, Oscillatoria sp.
MLNMTWEFKLEPTAEQVSEIEHVLDVCRNVWNFALRERKDWLDSRKSRVNACSIRQEFILPADAPFPSYARQCKSLTTAKAHFPRLKTVNAQVLQQVIRKLEASWESWRLKRSGMPRFKKPNRMRSFVFPQMLKNSVSDEGIKLPQLGLVKVRWSRDIPEIFQVKQARIVRKASGYFVMLSLQADVDIPATMPHGHLVGIDVGLEYFLSTSHGEPVKRPRFFNNLHRKLKSLQRRLKNKQKGSANWLKLQKKIARVHQRIADTRKDWHFKLAHHLCESAGMIFVEDLDFRIMAKGMLGKHTLDAGLGQFTNQILPWVCFKRDVYYGKVDARGTSQECPDCGAEVRKDLSTRIHHCHNCGSIKPRDVAAAQVIAARGQRVVEMACGGDAAGAGVTQSSWHLLKQEIFGATQGISTHNL

SEQ ID NO: 45853 - protein, 328 aa, unknown
  TnpB Polypeptide
MVNWRFNRVFISVLTHKGWVEIPLRFTKQFIHYLYEGWRVSQELKLRLVGRKVLVWLTFEKEVEVDTKDGNYISIDVNENNVTLAVFENFKLKELRRYETGLGRIVMNYSLRREEITKGHSTKDELIKKKLRKLRERERKLDILRKTVKRVVELARDLKAKVIVGKFSSKVKDKMEGNKTAKLRHRIHQWSVIKFVDMLKTQPIDVDEVSESYTSSINPFNGEKLRKRKQIVEKVIKVLNPYLMTGTAHEGGGIRVFKVNTRYLESGEVLLERDSIAPLNLVRKVDGRVLVFPSTSPKDLRVTVYDPLRGVPVAELEVIKSKEKLRHG

SEQ ID NO: 45854 - protein, 262 aa, Caldanaerovirga sp.
VRELSIIYDKDSGRIEARLVVEVKACENNGTGKAAVDLGETVLIACAFDDGTVMLYSGRFIKSVRRYWQKVRASLRQNSRRWKEIAHRERKQVEQLLHIAASHFIAECIRRGVKEIAIGDLNGIRQGIDYGDRLNQRLHAWPYRKLIDMLKYKGALAGILVRDNVDEKSTSITCHACGKVVASNRRHRGLYVCSCGWRTQADINGALNIYERAYQVSPVKGSSGRVARPAVVSYLLGWHGVAEPKREGEPLRASVLGCPSIY

SEQ ID NO: 45855 - protein, 451 aa, unknown
  TnpB Polypeptide
MTMQITRGYRTELDLNNEQITLCKKHAGVARFSYNWGLKRKQEVYKETGRSISAIELHRELNLLKQTDLPWMYECSKAAPQEALRDLDTAFSHFFRRCQLKKEGKWKGKLGFPKFKTKRKGLGSFRLTGSIHVYERAINLPRLGQLRLKECGYLPTSGVHVLSATVSEEAGRWFVSIQIEERVPDPPPGTGEPIGVDLGINKLAVSSDGTTIENPKALRTNLKRLKRLHRDLSRKKKGSKNREKARKKLARKYARVAHIRRDALHQGTSRLTRASLSLEEQAVRSDEIASTLPEPKAKVKPRRGRRSQTAEMREAPTLPEKMAKRVKQKQIKRLTRRATEADATLRPSVVVLEDLNVEGMKRNRKLALSISDVGLGEFKRQMMYKCAWQGETLLIADRWFPSTKKCSNPKCGHVKEDMNLSERIYVCEKLECGLVIDRDLNAARNLVALAR

SEQ ID NO: 45856 - protein, 465 aa, Paenibacillus sp.
MYRTHQVWIKPGHCLFAYLDQACQDAKNLYNTTNFYIRQIVTAFGKNEPLQPLQEEVLDTLASHIDVMNERRRDKNCSHPFKLPSKESPFVHYNFLDALFKVMNQIDYRALPTQCSQGIMKVVFHNWNAFFASIKDYRQHPEKYNGKPNIPGYSRNKVKEVIFSNQDCLIKERKCLKFPKTKLQLNIGKLGCTDGQLMQVRVVPSHGQYVVEMIFAYPIEKKEAVQEHVLAIDLGVNNLATIVTTTGAKPIIVKGKIVKAINQYYNKMKAYYTSILRQGKEPREGAYTSRRIERLHLKRHRRIKDLFHKVSHHIVTLAVEHNIGTIVIGHNDGWKQAPGIGRRNNQSFSHIPHQMLIEMIKYKATEQGIVVILTEEAYTSKASFLDQDPLPNYGVEGRWIFSGKRVYRGLYKNTKGLVHADVNGAANIMRKVFPNVSAKGANGIEGLDGKQTINVSTPLVLSILK

SEQ ID NO: 45857 - protein, 370 aa, Solobacterium sp.
VKVYRGVKYRLYPNDEQVQIIEKTFECCRQLWNKTLEHKLELYEKYKKNININYTEHMDECTGYDEVDEMAFVNIYYDLENSFRKYMKGDGKPKFKSWKNPRRSYRTINKNESVMIEDGYIHLPVVGKVKARGWFGKENNGIYSVTVKRHGSGEYFASVNYIVDRNVKRVVPRKIIGLDYKAKGLFMDSNGRIAKGRDFNKEAVKKLRREHRRLTRRMGARKGEVKSKNYIKQERKYAKCCEKVANQRDDFLHKLSRRVVNENDAVCIEDMSMKDISKRKQKIRFAKSTYENGYYQFTQYMAYKLDDAGKTLVKVPKYFPSSQLCSKCGTRNDITLDQRVFYCPKCHKAIDRDLNAAMNIRNKGRQMLSV

SEQ ID NO: 45858 - protein, 502 aa, Lactobacillus sp.
MDGSKQVAVLELQLITNKYQARFLNELLWQHYDYYRAIVKYANHQIKYLRRNRDYQRLIKLKRSWKLKRTKQPTKANKKIVNDRLKVIMQAYGLDSDQGSKQRHSIGFNGFVKHHVNPRFKGLMSVAMQAIITDVWQGIDKVLYQGSRQLHIKRFTQFTIKSKQWNTQFAMDLNHRIFHFKRGKHRFKTARYQAYEREVLFSEYRQLKYIRLIQIAGNTHTKYAIQITYGGLPPRKRRTTRASSPVGLDIGPSTFAYYHHDKVNLSVLNPFFGDDTSKIKQLQRQMTHSQVENNPDAFELTANGKLKYIKGHKVRRTNNYKKLRRKLNYLYRLKSNHRKYYFETLSNELVALSRDIRMEKVSVAGWQAGLFGSSITNQAPSQLMAIIKRKLALFGYEPVLINTVKAKLSQYQHDTKQYYQANSDLDHRAKKINMNGTEYNAQRDVYSAFLATKVLDDCTISDISNDEFRHFLINQEQMVDRIKAEDNMILESMGISYHYAIS

SEQ ID NO: 45859 - protein, 653 aa, unknown
  TnpB Polypeptide
MTTPTKKKTTSLLQCEKLLCSLLCTPILFVSMLTRVKLSVSKLLPDKEESIKETCRNSVILLVLSFKFPKIRNRVLTLYTLASPLKNNWKTFIDKLNMSSNADLNMLHTLLFVMLLQELTLIEKDSKKFWTPAYKELSGNLLSPTKIDFAGLRSTSYSALYRKAEEKSPFWTTTSIKVRNKNLQRTYCPSSICSLIPKWENGAEEQHALKTLAVKLTPTSQQRKMLDEWLNTSRYVYNKTVQCIRAGDSVNFYNLRDKLVTADTKKHNAEYIELEQLKETKRTLQKEWNVLNAEIKEEKTKEYQYEITKINTRIEQCKRNLETVKKTLKAEKNKNIQEWELETPKYIRAAAVDDVCNAHKTALSNLKAGNIKHFNINYKRKTNARQCMLLPKSAIKNNEGELTIFKQFLKCSNSKFSMGKRTKKKYKDLVIEHDCRIVKDKNVYWLFIPVPLEMKLSKAPSEATVKYCGVDPGIRTLFTSFERDGCTEYNYKENLIRKLDEKIRYMKSVRCNKRRRVRKRKINKIETRKSNLINELHWKSINHLLKSNDVIFFGDIKSHSIVKGGKNRTLNRDMNNIKFYQLKQRLQHKAAERCKKLYFIREEYTTKTCSFCGEYNDPKASKEYSCSACKIIVGRDVNAAKNILMKGIFNLHK

SEQ ID NO: 45860 - protein, 307 aa, Haloarcula sp.
LRTTTSTSRRSSESSWTNLSKNASSAMYYAYKYRLKPSDAHREELDRHRDICRQLYNHTLYRLNEYQDEHGELPSMTTLRSELPDLKKWWDDLSDVYSKVLQTVVERLFDNLKGLSKLKENGYGVGQLKWKPPREFRSFTYSQSGFKLDKKGGQTVLSLSKLADIPIRLHRAIPDDATLKQVTVKKEPTGEWFATFGVEMNHEPPEPPETPEKCVGIDVGILKYAHDTDGTAVRPLDLSDERERLEREQRKLSRKQHGSNNYEKQRRRVAECHADLRRKRRDFLHKLSAYYAREYDLVAVENLNVRG

SEQ ID NO: 45861 - protein, 261 aa, Halopiger sp.
VTWKQKGIKHDDKHNRVRLSKGWNLKDGRSDFILAEYETRPDVEVENIQQVRAVWNGDEWELHLVCKKEIPVEDAPGEKTAGIDLGINNYLAIDYEDGASELYPGNVLKQDKHYFTREEYQTEGENGPSKRARKARRKLSRRKDHFLHTLSKHIVQRCTDEGVEKIAVGDLSDIREDENGDSRNWGQSGNKKLHGWEFDRFVRLLEYKAEEHGILVDRVDEENTSKTCSCCGQIRDSNRVERGLYVCDSCETTMNADVNGG

SEQ ID NO: 45862 - protein, 547 aa, unknown
  TnpB Polypeptide
VLTMQTSTYTTLIKSVDISPETERSLSAYAALFGRVERKLYASLCADKISANERKSHFIAKYQISARQYNAVLRTLTGKLDSKRELDKLYQSEKKERVEAVSKTIERLRGQSDMLSKTGGVKSEIQKIRFKAHQKSRYRARLTEQLGKIANNAGKIPAMCFGSKKLFDKQFFLKENNLKNHAEWLEEWQNARSSQFMVLGSKDETCGNQGAQLYVDDDGEFRLSLRLPDALGGGRAELSGFDFSYGKSNILAACAENERRRAVNAKELTRSSPWVPDRKTGELRPQTKNEVLASYGQPLTMRFMRHKFGWTLAVTVEEQAPEVTTGSYENGCLGIDVNADHLAVCVVTPDGNKRYVENVPCPASGRGLTTGQRMAMIGDAVKRIIEIGKTYGVGVGIEKLDFSRKKQALKETANKHHRTMLSLIERRCYREGLPCKAVNPTMTSIIGMFKYHSTQNTTHQAAAQVIARRTLGLKHDRIRFSVPHRVGTQLCSARSKTVSIDGGPLQRWGKVKAIVKKHAALFKQPEKTGPPVPLMVNEHKLKCVSLA

SEQ ID NO: 45863 - protein, 279 aa, unknown
  TnpB Polypeptide
MEYLRKNWSGVKASAPTLEKKHRKYFLRFSYTEERELPEKEAAGQRICAVDLGLNSDAACSIMEADGTVCARKFINFADDKDRLWKVLDRIRKMCRDHGPKSTGGLWKYAVRCNEELSKKTAAAIVRFAEENHADVIVFEYLDMKGKIRGKRKMRLHMWKKRGVQKISTHMAHRKGMRISRVCAWKTSALAYDGSGKVERDKENHSICTFTNGKRYNSDLSASYNIGARYYIRELTKPMPATAWSVLEAKVPAVRSRSTCVYADLVRLHAVMLENGWTA

SEQ ID NO: 45864 - protein, 398 aa, Geomicrobium sp.
MLTYKGIQFRLYPDAKQQKQMAQTFGCCRFVYNHFRASWENTYTETGKGLSYKACANALPLLKGEVPFLKDVDSTALQKSVRSLADAYQRFYAKLGKYPRFKSKRNPLQSYTTAIQGKSQVFTNTVTNNRIKLPKLGWVKIRGSRTIQGRIVSATITRKASGRYIVSLKVEADVQPLPSTGQSVGVDLGITDFAILSSGEKMDNHRFTKAMRQKLAREQRKLSRRAEEAKRRGTPLHMAKNYQKQKRVVARLHEKVANQRKDFLHKLSTDLIKNHDAIVVEDLHAKGMLRNRKLASAISDVSWSMFVTQLTYKADWYGKQLIKVDRWFPSSSSVRAVGTTTERKDYTFVSGPAQPATLITIATSTQRLTSSKRDSEPQELRGSPSHERNPLPSINDVR

SEQ ID NO: 45865 - protein, 247 aa, Crinalium sp.
MLVLEFKAYGKKQQFDAVDEAIRTVQFIRNKALRFWMDNEQVNKYDLNKYSAVLAKEFPFCDELNSMARQSSSERAWSAIARFYDNCKKKIPGKKGFPQFQKNNRSVEYKTTGWRLEANRKSITFTDKKGIGKLNLKGTRDLHFYQIDQIKRVRLVKRADGYYAQFCISVDRLETVEPSGKTIGLDVGLNSLYTDSRGETVENPRFLRKGEKVLKRSQERVSRKVKGSKNRGKARQILGKRHLKISR

SEQ ID NO: 45866 - protein, 401 aa, Crinalium sp.
MLDVLKVKIYPNKGQREALTKSFGCSRFVFNYYLNKTNTQYQETGKGMSYCDMALDLTQLKKLSDYEWLTEVTAATLQQTLKNLESAFKNFFFKRARFPKFKSKHRHQSIRYPESCSIKNGGLKLPKLGIVKASISKSINGKIKSVTVSINSTDKYFAAILFETDDLAAKKQGKISGIDLGLNSLVTVFDGEIYQKVDPIKPTRKYAKRLRRRQKALSRKVKGSNNRRLSVKKVAKVYEKITNTRQDFLHKLSRQLVDENQVIVVENLCIKGLARTKLAKSIHDAGFGMLLNFIGYKLERESGTFIQVDRFFPSTKLCNCCKFKNNSLNLSIREWVCPSCQTQHDRDENAARNIREEGLKILSNTVGHTELQACGETVRLNGACIKERVSLRQESPVTAQA

SEQ ID NO: 45867 - protein, 406 aa, Crinalium sp.
MLTCNYQFKLKPNKRQVFEIERYLDACRKVGNFALAERKDWSNSRKNNVDRCSLEKEYIIPADAPYPCYKLQSASLTLARKDNPDLSSVNAQVLQQVLRQLDRAFVEMKSLNKGFPRFKNKYRMRSFVFPQFKTNPITNNYIKLPGIGLVKMRLSRPIPQGFILKQARVIRKASGYFVNMSLESDVNIPTPFPHGNPLGIDIGLNYFVATSNNELIKRPRFFNKLHRKLKLLQRRLKNKQLGSNNRHKLNQKIAKIHQTVSDTRKDFHYKVAHRLCDDNGMIFVEDIDLRAWSRNMLCKHNLDASFGQFFEILSYVCWKRDVYFAKVNKNYTSQICPNCEVHKGKKQLSERTHTCPECGFSCNRDFAASLVIRSRGLNAVGQPVFQNACGDGLSGLGSNLRLDKNL

SEQ ID NO: 45868 - protein, 487 aa, Crinalium sp.
MPTLTYVKGLPTPAEELNGLGFTEFEMFLAALSSVFHKAACETANYLHRSESFNKSSWNTHLQKSYSISKRYANGVISYSQGAVDASREHRKLHIKTLQGKLKSISAWITKSEKKLKDAQKFYAKKNWHKSKNGCRFPLSCSLEYRDTNWQNLRFQLHNKKRRAYQLAQQIEHLKTVSIQVAIPKNQVYIVGSKDESFGNQVCQWDGDVLKFRVPACLEPKFGKYVQTNLGNFDRNINRLPNTGAKTGHFFRSCGKWNAAVQFTPAPVQRISRHSAYGCIGIDMNPGSIGWAYVDSDGNLKAHGKIPLLMGLPSGKQDAQIVDACLQLATLANTYACPIVCEELDFSTKKEQLGERGRKYARMLSGWAYSRFYELLESILSNRGIYLMKVNPAYTSVIGLVKYARQYGLASDEAAATSIARRGMRLSEKLPNSITAYLSVKDGKHVWSQWNQLNNLIKKSSIKRHSFYAISNWESLVKQWSEQSELL

SEQ ID NO: 45869 - protein, 514 aa, Crinalium sp.
VAKSKTLSFIAEILLIVDSKQGSELKSRFQAARQLYNACLNEAMVRMELVRKSEVYQTAKKLPREQKKQRSTMFSEARALYRYSDYDLQSYATLVSNKSSWIAKKIDSNTQQTIATRAFRASEKVFFGLAKKVRFKIVSRFRSVEGKSNKQGLRWKDNQLVWGKLKLNPIIDKSNPVIQHGLSCRVKYVRLLWKEINGKCRWFVQLINEGVPYQKPQNYVSNGVVGLDLNISNIAFVSDNHAGLLPFAENVPTFTKEITKLQRKMQRSQRVNNPNNYEADFLAKKGRKAVVKKGKVKKGSRNWKNSNNYRKTAQKKRELERRKTAYAKSQNRKLVNEILRHGNVIKTEKISVKGWQKRYGKAISAKSPGFVQSELKRKAESANGQFITFSTQKTALSQTHLDGTRIKKSLSQRVHRDVTGIVMHRDIFSAYLSRYVNEDDTLSLQDAVNEYPGLESILWSAWQQYQINCEQVSESESRLSHLSLEQFDLKAKTVNQIAVMGEKLTQSLPESTLL

SEQ ID NO: 45870 - protein, 407 aa, Crinalium sp.
MLVYESKLEGAKHQYEKLDEAIRTGVFVRNACIRLWVDGGAKSRNDLYKYCKILADNPEFPWAKLLNSQARQASAERAWASISRFFDNCRKKIPGKKGFPKFKKDRPNHGSIEYKQTGFKLSEDTKYISFTDGFKAGCFRLWGTRDLHFYGLDKINRVRVVRRADGYYAQFLIDHDRIEPREPSGTTVGLDVGLSHFYTDSNGKTVDNPRHLRKSEKRLKRLQRRASKKFKKGQSQSNNYKKAKKKLARSHLQVSRQRKDFVVKTALCVVQSNDLVAYEDLQVRNMVKNHCLAKSINDASWAMFREWVEYFGKVFGVATVAVPPYNTSQKCSNCSAIVKKSLSTRTHVCACGAVLDRDHNAALNILELGLRTVGHTGTQKASGDSNLCIDEGTCQDKLDRGKRKPQE

SEQ ID NO: 45871 - protein, 406 aa, Crinalium sp.
MLIYEMKLQGTDDQYGLLDQAIRTGRFVRNSIIRAWMDGKIKSRNDAYAYCKVLADNPEFAWASQLNSMARQAHAERAWSSIERFYRNCKADVSGKKGYPQFKKEHVRASVEYKTSGYKLSEDRRYLTFTDGFKAGTFKLWGSRDLHFYQLTQIKRVRVVRRHDGYYAHFLIDHTREENKELTGKQTGLDVGLNHFYTDSSGEKIDNPRFLRRDERKLKKLQRRLSRTQKGSKNRAKARNRLGRAHLSVSRRRNDWVCKLAQHVIQSNDLVAIENLKVRNMVKNHHLAKSISDAAWYRFREWLEYFGRGYGVPVIAVEPKFTSQNCSSCGEKVVKTLSTRTHQCPHCNYVADRDENAAINILKSALKQWANTVGQTEINASGETGLCLGGETQPSKSTHGKKKPKK

SEQ ID NO: 45872 - protein, 414 aa, Crinalium sp.
MINLTYEYKLIPTQEHTATFEHYLEVCRKVWNYALRERKDWFNSRSCLVNACSIKGEYIIPANAQRPTYHSQANALTKAKKQLKELGTVHSQVLQQTLRTLETAFLSMWERGFGFPRFKKEGTMRSLVFPQMKNGDICGDTIRLPKIGVVKMRMSRPIPDGFDLKQVRVVRRASGWYVMLTLGCDVDVPEPPTTGQPLGIDVGLHNFAATSDGDLIPRSRFLKEKQRQLKLLQRRLKHKKRGSKNWKKLSRKIARLHETIHNCRKDFHFKLAHRLCDGHGMVFVEDLSFKALCRGMFAKHTLDAGFGQFLEILKWVCWKRGIHFEKVDPRGTSQTCSMCYTHTPKKLSDRIHCCENCGYQQDRDIVAAEVIMHRGLVAVGLMVASQVAWEGVLSGASGDTASLGKSRSTRKSHS

SEQ ID NO: 45873 - protein, 383 aa, Crinalium sp.
MLVFEAKLEGLKEQYEKLDEAIRTALFVRNSCLRYWMDNRGMGRYELSAYCAVLGKEFAWAGKLNSMARQASAERAWSAIARFFDNCKKSKPGKKGYPQFKKLATHGSVEYKTSGWQLSDDRRYITFSDGFKAGTFKLWGTRDLHFYQLKQIKRVRVVRRADGYYAQFCIDHERVERREPTGKTIGVDVGLTHFYTDSNGETVANPRHLRKSEKSLKRLQRRMSKTKKGSNNRAKLRNKLARKHLKVSRQRKDFAVKTARCVVRSSDLVAYEDLQVRNMVKNHRLAKSISDASWSLFREWVEYFGKVFGVITVAVPPHYTSQNCSNCGQVVKKTLSTRTHVCAHCGHTQDRDWNAARNILEKALSTTGHVGINASGETGQYRK

SEQ ID NO: 45874 - protein, 421 aa, Crinalium sp.
MFGCQQVRINPSKEVNAVLEYLCGESNKLNNCAIYYARQVYFKTGKIVNKFALINELKQNSHYGAMHSQAAQQTIISVAESFSSFIGLLKGINNGAVIQKPKMPNYKKKGGLAVVAYPSQAVKFKAEGLRFPLGTKVKAWFGIGAFYLPMPSNLDYKNIREYRILPRNGEFYLELVYKAETVKAEVDNSSSLGIDHGIDNWLTCVSNTGTSFIVDGKHLKSLNQWYNKRVSILKENQPEAFWSKQLARVTEKRNRQVRDAINKAAKLIITHCLENQIGTVVFGWNKGQKDSANLGSKTNQKFVQIPTGRLKERIKQLCEQYGIKFVETEESYTSKASFLDSDQLPKFGEKPKGWKETGKRVKRGLYRTASNHYINADANGSANILRKVATTLGFDLGGVCRGALTTPLRFRLWTLKESHCL

SEQ ID NO: 45875 - protein, 294 aa, Crinalium sp.
MRSFTFPRVNCPKAGAHLNDGILKLSKIGEIPVIVHRDIPDGFNFKTATIVKKADGWYVSVSAEDETVPAIKPIVTVKTAVGIDVGLKEFLTTSDGETVPIQQIYRKRSGHLARQQMFLARQEKGSKNYKKQQNKIARIHQRIQRQRKDFHYRTAHKLVRKYDLIAVEYLQVKNLARNSKLAKSILDAAWSAFINILESVAVKRGVHIVKVNPHNTSQDCSGCGGKVPKTLSVRTHCCPKCNLTLDRDENAAINILIKALQAVGLIVSVGGGQEVTQPVKPEAWGFSGVQLALF

SEQ ID NO: 45876 - protein, 431 aa, Crinalium sp.
MIATRRTTFRLYPNQAQTAKLFEWRRLHCWLYNQALSDRQIAYKRDKKSVSYYDQQRAVKVIRQVLPEFKELGSHALQATIKRVDFAYNRFFQGLGKYPRFKSLRHYSGWTYPCNSGWKAHTNGVNGYLDISNLGQVQMRGSSRTWGNPTTLTIVYRNQKWYASITVACDVIRETGSGLIGLDFGCNIAVMGAIHLGDGEYEQVAIDNPRYLKQVQTKIKQANRQKRRKRSPNYKKHIKASKGWRKANGCVSKLVRIAANQRQDFIHKVAAQIVSSNSMVATEKLNLKNMTKKAKKGSKRKQQKTGLNRSILDVGMGMLRSAIEYKVEEAGGVFVEIPTQKVKPSQRCPKCDFVKPKTLSERVHKCEKCTYTCDRDFASAQVCAEYLRTGLGTSLAKHGCSTSISNPKVVKNCGGMKQVGQLKCQKPRPSS

SEQ ID NO: 45877 - protein, 389 aa, Crinalium sp.
MHRRFVAIFFLMPLVGCDRTGSQRALFNTTLLLIYLNSGIIFMIVTRRATFRLYPSKSQEVKLHYWRRLHKDLYNACLYQRKTEYNRFGRSVSYYQQQNLLPEFKECWTEYKELGSQALQATVKRVDFAYTRFLKGVGGYPKFKSARDYRGWTYPATSGWKAHTIGDNGYLELSNLGQIQMRGKARTWGTPTTLTIIWKQGKWYASITVNCEPVRQTGNGAVGLDFGTYHAIACSDETIIDNPRFLGNTQQKIKKASKKLRRKRAPNFKKKIKASKRWRKNRKKISKLQNTIANQRQDWQHQIAAQIVSRNSLVATEKLNVKGMTRKAKKGSSRKHQKAGLNRSLLDVGISNITSLIKYKLSECNGVFVDVPLNKVYKPKVPCTPSISR

SEQ ID NO: 45878 - protein, 401 aa, Crinalium sp.
MLVLEYKVKAKPQQYQAIDEAIRTVQFIRNKAIRYWMDAPQDVKINRFALNKYSTELRNEFNFVKDLNSMAVQASAERGWLAISRFYDNCKSSKLGKKGYPKFQKDNRSVEYKTSGWSLHPTKRRITITDKKGIAELRLLGKWDIHTYPVKSIKRVRLIRRANGYYCQFCVDVECIDIQPLTGNEIGLDVGLESFCTDSNGHQEPNPKFLRSSEADIKHAQRQIYKKHKGSSNRRKARTKFSKKHLRVNRQRTEHAKKLARHVCKSNDLVAYEDLKVANMLKNHCLAKSISDASWYQFRQWLEYFATKFGKLAVAVPPHYTSQECSQCKRVVKKALSTRTHVCVCGCNLHRDENAAINILLKAKSRGGHPQSKASGVGTATLLGATLVEQVLTLNEESLWL

SEQ ID NO: 45879 - protein, 414 aa, Crinalium sp.
MYATQKNQLRRLSKQEFKALTALCRLSKNLFNVALYECRQYFFAQRKHLTYESNYHICKSNENYQFLNTDIAQQTMRVVDRSMRSFVGLLKAISIRRCDQKPQLPKYLPQDGYFLLIIPRIKLKNGSFNVPMSKEFKQEYGEVKIQLPERLKDKNIKEVRIHPKYSARWFEIEYIYEDEKIETSVDSSLAMSIDLGVDNLAACFDTEGHQFLIDGKRLKSINQWYNKRNAQLQSESDKQGIKSFTNKQARLYQWRSNCVRDYLNKAARTIINHCLKHNIGKLIVGYNPGIKHVINIGRSNNQNFVQIPFWQLRQKLIALCYRYGIEYLEQEESYSSKASFFDRDEIPVYNADNPSKHRFSGKRIKRGLYQTRDKHLVSADINGSANILVKSKHRLNFERVCSGFLANPLRIFIS

SEQ ID NO: 45880 - protein, 404 aa, Crinalium sp.
VLKAVKVRLYPTDEQKEALAKSFGCARWYYNYALNACIQHYETTGKTLLLKTYKGMLPQLKIEHSWLKTDCYSSVLQCVAINLNKAYNNFFEGRAGFPRFKSKHHKQSIQYPQHITVVGDCLKVPKIGEVKAVFHRSIAGKLKTVTISKTPTDKYFAAILLEIEDSSEQSSGNKILGIDLGLKDFAIVHDGEQVTKHPNPKHFKRHQKNLARKQKKFARKVKGSNSKHKYRKLVAKVHEKVSNSRQDFLHKLSKKLVNESQVIIVENLNVKGLVRNRKLSKAISDVGWGMFVNFLAYKLERQEGKLIEIDRFFPSSKTCSSCGHVFDELTLDIREWDCLSCKTHHDRDSNAASNIRTEGIRILTIGGGNPVLADGGDVRPKSRKVDGQLSMKSEAYTYSTGKCR

SEQ ID NO: 45881 - protein, 402 aa, Crinalium sp.
MLDVLKVRIYPNKGQQQALAKSFGCSRFVFNYYLNKTNTQYEETGKGMSYYDMAKDLTQLKKLSDYEWLTEVTAATLQQTLKNLESAFKNFFSKRARFPKFKSKHRKQSIRYPESCSIKNGGLKLPKLGIVKANISKSINGKIKSVTVSQTSTDKYFAAILFETDDLTTNKKGKITSIDLGLSNLVTTFDGKDFDKVDPIKPTRKYAKRLRRRQQALSRKKKGSLNRQKQVKRVARVHEKIAKTRQDFLHKLSRKLVDENQVIIAENLCIKGLARTKLAKSILDAGWGMLLNFISHKLDREGAIFVQVDRFFPSSKLCNSCKVKNNSLNLSIREWVCPECKTHHDRDENATQNLREEGIRILLTNTVGHTEIQACGETVRLNGACIKEQVSVKQESPVTAQA

SEQ ID NO: 45882 - protein, 348 aa, Crinalium sp.
LGVSRFVYNTTIKYLQEPDTKANWMGIKTGILNSLPDWTKSVPFQIKSIAIKDACLAVKAAKKGFKKDGQIRKFRFRSRKDTKQSIFIPKSAIKDCGIYHTILGRSKLKEALPASFSDGRLTLAYDEYYLVVTLYVQPEQTDNQGRLVALDPGVRTFMTFFSEQSFGFLGEDSNLFIQKLCFPLDKLVSRISKSPSQQKRRLKKAASRLRCKIKNLIKELHHKSAKFLVDNFDVILLPTFETSQMVSKSRRKLRNKSVRQMLTLSHYEFKTFLNWKAWEQSKTVVDCNEAYTSKTVSWTGEIIKNLGGARIIKSLSTGFKMDRDLNGARGIFLRALVDTPWLRSQLAS

SEQ ID NO: 45883 - protein, 418 aa, Crinalium sp.
MIVTRRVTFRLYPNKSQEVKLHYWRRLHKDLYNACLYQRKTEYKRFGNSVSYYDQQNLLPEFKECWTEYKELGSQALQATVKRVDFAYQRFLKGVGGYPKFKSARDYRGWTYPATSGWSSHTTGDNGYLELSNLGQIQMRGKARTWGNPTTLTISWKQGKWYASITVNCEPVRETSSGAVGLDFGTYHAIACSDETIIDNPRFLGNTQHKIKEASKKLRRKRAPNCKKKIKASLRWRKNRKKISKLQNKVTNQREDWQHKVAAQIVSRNSLVATEKLNVKGMTRKAKKGSKRKHQKAGLNRSLLDVGISNITSLIKYKLSECNGVFVDVPLNIAPSQTCPKCGNKKKKELSERVHNCSNCNFVADRDVAAAMVMLNYARGLERASTNADAEPLSITTQDCVGFRKVQQLKRKKPKDVA

SEQ ID NO: 45884 - protein, 415 aa, Crinalium sp.
MIVTRRATFRLYPNKSQEVKLHYWRRLHKDLYNACLYQRKTEYKRFGNSVSYYDQQNLLPEFKECWTEYKELGSQALQATVKRVDFAYQRFLKGVGGYPKFKSSRDYRGWTYPGISGWKAHTTGDSGYLELSHLGQIQMRGKARTWGNPTTLTIIWKQGKWYASITVNCEPVRQTGNGAVGLDFGTFHAIACSDETIIDNPRFLGNTQQKIKQASKKLCRKRAPNFKKKVKASKRWRKNRKKISKLQNTIANQRQDWQHQIAAQIVSCNSLVATEKLNVKGMTRKAKKSRKRKHQKAGLNRSLLDVGISNITSLIKYKLSECNGVFVDVPLSIAPSQTCPKCYHKKKKELSERVHNCQNCGFVADRDVAAAMVMLNYSRGLEQASTNVDAKPLSKATHCGGFRQVQQLKRQKPRT

SEQ ID NO: 45885 - protein, 368 aa, Crinalium sp.
MRTAYQYRLRPTKQQITELDRWLSMLCAQYNYLLADRFNWFEQNRSPINACPLVCHLPELRDNPDYYSQKKTLPQLKKTHPWYGEIYSQVLQDVVKRVKLTFDRFLKGDSNGKRSGKPRFKARNRYRTFTYPQIKDGCLQGNLINLPMFGKLKFVLHRPIPDGFKIKTACITKKADGFYVTLSLEDATVPEITHDFNPNKITGIDVGLKEFLTTSEGETVAIPQYYRKAQKLLKVIHKRLSRRKKGSNRRLKTVKQLGKQHKKVADKRKDFHFKTANNLLKKYDVVAVEDLNIKGLSRTRLAKSVLDAGWSSFVSILTKKAENAGLLVVAVNPKNTSQDCSNCGEKVPKKLHERWHDCPHCRCNLDHW

SEQ ID NO: 45886 - protein, 404 aa, Crinalium sp.
MKSRYQYRIYPTNQQKKHLAQLFGCVRVVFNDALAYCQEKYKKGEKKPNNTELSRRLTELKKTEEKIWLGEVSSIPLQQSLRDLDQAYQNFFNSCKGERKGKKIRPPKFKKRKSKQSAKFTNNGFKINHDTVYLPKIGDLDIVWSRPLPSESSSLTVIKDAADRYFLSFVVEIIPEILPDNGKSIGIDLGIIDFATFSNGEKIKAPKPLKKKLKKLNRLQRRFSQTIKGSKRREVARKKIARLHAKISDTRKDFLHKLSTKVIRENQTIALEDLNVSGMVRNRKLSRAISDLGWRSFRTMIEAKGEKHGRDLRIINRWEATSQKCSCCGQKGGKKELSVREWTCLFCDTKHDRDVNASVNILNVAVGHIETKNGRRRKCQTGVKSAVSSDASTHLEPIQLSLFG

SEQ ID NO: 45887 - protein, 372 aa, Crinalium sp.
VLKVRIYPEPKLHEIWQSWKAAIRFVYNTAIEALKSGFEGGSYQLEALILSNDLLPEWVKNAPRHPKANAVQDAFDSWKQARKNQGIASYRSCRTPVQTIKFKVGGFRNTTWYPNLTKGLSFKSSQPLPENCEYGTQLVYDRHRWFAVIPQYVNSTPTQQDKVIALDPGVRTFLTGFDGESVLEFGKGDIGRIVRLCLHLDKLMSNTDGKDIRTKQCRAYRRAAEKIRIKIRNLVDDAHKKIASYLVNNYKVIFLPTFETSNMVRRAKRRIHKKTARQMLNWSHYRFKQTLKSMAALKNVLVVDTNEAYTSKTCTFCGHVHKKLGGSKIFKCSNCGSHHDRDWNGARNIMLRALSGATFTLWGDAIEVFNCV

SEQ ID NO: 45888 - protein, 395 aa, Crinalium sp.
VRTSYQYRLKPTREQIKIIDNTLDMLRCQYNYQLAQRFDWYDQNRCPIDRCSLTVCHLPELKDKPNRYSQQATLTQLKIDRPWYKTIYSQVLQEVPKKVELAFDKWLKGDCNGKKLGKPRFKAKGQYKTFTYPQFKKYHFVNNKIKLAKIGDIKVIVHRPIPDGFDIKTVSVTKKANGYYVTLSLDDKTVPEIKSDFNPDNIVGIDVGLIDFIVTSDNERIVAAKFLRKSERKLKSAQRRVSRRTKGSNRRKKAIEKLGIQHKKVADTRSYFHFKTANTLLKKYDVVAVEELNIKGLAKSRLAKSVNDAGWGQFISILTVKAENAGLKVVAVNSNGTSQECSSCGHKVKKPLSQRTHNCPNCQVNLCRDLNAAINIKNRGTHDLKAQSMSSLKSR

SEQ ID NO: 45889 - protein, 374 aa, Crinalium sp.
MDNQGVSKADLYTLCKDLAKEFDFAKKLNSSARQASAERTWQSISSFYSRCQKKEKKKGYPKFQKHCRSVEYKVSGWVLSKDCMSITFRDGFNIGTLSLYCNKQTREDLFRLKINRVRVVKRADGYYAQFCFDAARKEKRVYTGKVVALDVGLKYFIKDQNDNSVIYPQYLRKYESRLKKLQRLVSKKFNKDRKPQSNNYHRARIRLGKLHLKVQRQRKDWAIKLARCVVTSNDVVVYEDLQVSNMVKNHDLAKSISDAGWYQFIQWLNYYGKIWDKVIVAVSPKYTSQDCSSCGHRVKKSLSTRTHSCPNCKIEICRDTNAAQNILKKGMKILGTQWQNSTFGQKGSALKEEKHGEKTTSAFDGQPDTVSGFQ

SEQ ID NO: 45890 - protein, 402 aa, Crinalium sp.
LLKSFKTKLDLNNKQRTLAAKHAGVSRHAWNWGLDICLKALDNQEKLPTAIDLHKRLVAEVKSVHTWYYEVSKCPPQEALRNLYKAFQHWFKVPGRGKPKFKKKNVKDSFYLEGSIKISGNRIKFPIFGWVKCYEILPTVQPKNVTVTKRAGDWYVSFKYELEQKVTPKRRDKIGVDIGINALATCSDGSVFPNLKAYRKAKRKLAHLQRSVCRKEKGSNNRNKANLKVAKLHRRIANIRQDAIHKLTTWLAKNHGEIKIEDLNVSGMLKNHRLASAIADCGFYEFRRQLEYKSGWYGSTIIKVDRFYPSSQVCSCCNNRQKMPLKTRVFNCGNCGTTLDRDYNASINLERWHESIDYPKTVSSTGIACGGSHQLNGTAVKDSVKQELDIKFIPKQLSLFDE

SEQ ID NO: 45891 - protein, 404 aa, Crinalium sp.
MLVLEFKAYGKKQQFLAVDEAIRTVQFIRNKALRFWMDNEKVNKYDLNKYSAVLAKEFPFCDELNSMARQSSSERAWSAIARFYDHCKKGVSGKKGVPKFQKNNRSVEYKTTGWRLDVNRKSITFTDKKGIGRLKLKGTRDLHFYQIDQIKRVRLVKRADGYYAQFCISIERWETVLPTGKTIGLDVGLNSFYTDSNGETVENPRFLRRGEKILKRSQRRVSRKVKGSKNRGKARQVLGKRHLKISRQRKDHAVKLARCVAQSNDLIAYEDLRIKNMVKNHCLAKSINDASWYQFRIWLEYFGKVFKRVTVAVDPQYTSQECSSCGEIIKKSLSTRTHICKCGCVIDRDENAARNILSRGLGTVGHTGTFGLDSSNALGESTSTLTEAILSEQVGSLIKESPRL

SEQ ID NO: 45892 - protein, 402 aa, Crinalium sp.
MLDTLKVRIYPNKGQQEALAKSFGCSRFVFNYYLNKTNTQYEETGKGMSYCDMAKDLTQIKKLSDYEWLTEVTAATLQQTLKNLESAFKNFFSKRARFPKFKSKHRHQSIRYPESCSIKNGGLKLPKLGIVKASISRSINGKIKSVTVSQTSTDKYFAAILFETDDLATAKQGKISSIDLGLNSLVTVFDGEKFSKVDPIKPTRRYAKRLRRRQQALSRKKKGSLNRQKQVKRVARVHEKIANTRQDSLHKISRKLVDENQAIIAENLCIKGLARTKLAKSIHDAGFGMLLNFIGYKLEREGGIFLQVDRFFPSTKLCNGCKFKNNSLNLSVREWVCPECKIHHDRDENATQNLREEGIKILSTNTVGHTEIQACGEEVRLVGTCTKKRSSVKQESPVTAQA

SEQ ID NO: 45893 - protein, 213 aa, Crinalium sp.
LSLDDKTVPEIKPDFNSDNVVGIDVGLIDFIVTSDNERIAAPKFLRKSERKLKSAQRRVSRRTKGSNRRKKAIKKLGIQHKKVADTRIDFHFKTANTLLEKYDVIAVEKLNIKGLAKTRLAKSINDAGWGQFVIILSNKAENAGLKVVAVNPNGTSQECSSCGHKVKKPLSQRTHNCPNCQVNLCRDLNAAINIKNRGTHDLKAQSMSSTKSR

SEQ ID NO: 45894 - protein, 446 aa, Crinalium sp.
MLSTRRTTFRLYPNQAQTAKLFEWRRLHGWLYNQALSDRQISYKRDKKSVSYYDQQRAVKVIRQVLPEFKELGSHALQATVKRVDFAYNRFFQGLGGYPRFKSLRHYSGWTYPCNSGWKAHTTGVNGYLDISNLGHIQMRGKARTWGNPTTLTIVYRNGKWYASITVACDVQRETGNGLIGLDFGCNVAVMGAVHLGDGEYEELPIDNPRHLKQVQTKIKLANRQKRRKRAPNYKKHIKASKEWKKAQRKVSKLVRKVANQRQDFIHKVAAQIVSSNSMVATEKLNLKNMTKKAKKGSKRKAQKTGLNRSILDVGMGMLRSAIEYKVNEAGGIFVEVPTKKVKPSQRCPKCDHVKPKTLSERIHKCENCSYTCDRDFASGQVCAEYLRTGLGTSLDNHGCSTSISNPKAVKSCGGMKQVGQKKCQKLLPNQRFGRSSSSKLIYNLV

SEQ ID NO: 45895 - protein, 425 aa, Crinalium sp.
LAWESKGRDFVLKKKSATVLSLTLVSDMYKAYKFRIYPDTEQQTALAKAMGCCRWYWNYSLNLCQETYGKTGKGLSRAYIQGLLPGLKKEYPWLTDAYSQCLQVVALNLSTAYKNFFDKRAKLPRFKSRHGRQSISYPANVKFDGDYLKLPGKVGLVYCSCHRDFDGTIKTVTVSKNPDGKYFASILVDDGKETPQCSTEGKAVGIDLGLTHFCITSDGSKYNNPRHIAKHSKNLKKKQQNLSRKKKGSNTRNKARKLVAKVHAKIARCREDFLHKLSRKIVNENQVIAVENLNVKGMVKNHNLAKAISDVGWGQFCTMLKYKAERDGKTYIEVDRFFASSKICNVCLNQVGRLPLDVRNWTCDHCETNHDRDINASINIKNEALRILSLGTSDTASGGNVSRLGGKISCLLDAIPDETGSPARN

SEQ ID NO: 45896 - protein, 426 aa, Crinalium sp.
MIATRRTTFRLYPNQAQTAKLFEWRRLHHWLYNQALSDRQLAYKRDRKSVSYYDQQRAVKVIRQVLPEFKELGSHALQATVKRVDFAYNRFFQGLGGYPRFKSLRHYSGWTYPCNSGWKTHTTGVNGYLDISNLGHIQMRGKARNWGNPTTLTIVYRNKKWYASITVACDVQRETGSGLIGLDFGCNVAVMGAVHLGNDEYEELPIDNPRHLKQVQTKIKLANHQKRRKRAPNYNKRIKASKGWRKANGCVSKLVRIAASQRQDFIHQVAAQIVSSNSMVATEKLNFKNMTKKAKKGSKRKAQKTGLNRSILDVGMGMLRSAIEYKVNEAGGIFVEVPTQKVKPSQRCPKCDHVKPKTLSERIHKCENCSYTCDRDFASAQVCAEYLRTALGTSVEKRRSDSSTSTHCGGFKQVSEMKRQKPRPSS

SEQ ID NO: 45897 - protein, 334 aa, Crinalium sp.
MWGKHLNCAKLQAHVAKLRKRNPFWQLVGSQAVQDICQRIDKAYQLFFKHHKSCVRPPGFKKVKKYKSFTLKQAGYKFLSGNRVKIGKKVYQFWKSREIEGEIKTLTIKRTPLGELFMVLVVDDCPNPEIKSTTGKIAGFDFGLKTFLTCSDGSLIESPQFFKQSLNVIKKASKNHSKKLKGSSNRERARKNLVRKYEDISNARRDWFWKLAHDLTDKFDVLCFETLNLNGMKRIWGRKVSDLAFCEFLQILEWVAKKKGKQVVFVDQWYPSSKTCNSCNHVLEKLDLSIREWRCPSCKTVNGRDENAAKNICRVGASTLRLGDVRQSLTAIAV

SEQ ID NO: 45898 - protein, 376 aa, Moorea sp.
VEKSWFSISLKTVQNQSLPPFAKRDQRSIFSPSFTSSLAASTDSESTGQKSKKIRVFLRADQRSLVRKWFGVSRYVFNKTVKILQNGEVKANWKAIKTGILNDLPEWCKEVPYQIKSIAIKDACTAVREAKKKYNKTGQINRVRFRSRKNPVQSCYIPKSAVSEKGIYHTKLGGLTFSEALPDNRGDCRLTSNNGDYYLTVPHQTTQTKAENQGRVVAIDPGVRTFLTFFSENSIGKIGHGDFSRIQRLCAHLDDLLSRISKAKRSQKRRMRKAARRIVIRIQNLINELHHKAARFLVDNFDVILLPTFETSEMSRKGNRKIRSKTVRNLLTFSHFRFKEFLKHKASETGKTVVDESASLYQQDCELDGGNGKHRW

SEQ ID NO: 45899 - protein, 451 aa, unknown
  TnpB Polypeptide
MKVRSSYGAEIRKQNIPIRATLDLYRKAVAWLIPVYDREWELLAGIRDKNRQFNLAEHLVHETKKNRAAYPFDAAFPKMPSYLRRSAVRHALGSVSSYHTRLKMWEKGEITGKPKLTARNHAMPVFYHKEMYRLNRKRDGREISGSREDVIEMKLYSGKDWLWYPVRLLHTDMEYLRKHRAGKRTESPVLEKRHKKYFLRFAFAEDILLSERPEEEQKICAVDLGLNTHAVCCVMDREGAVLARKFIDFAGEKDRIGRMTGRIRRAQRTPGMQNQIARRWRYAVRQNEELSRKISSAVVGFAKEQDCDVIVFEHLEIGGKISGSRKQKLHLWRKRDIQKRCEHLAHRNGMRISRVNARGTSAYAYDGSGKVTRDKENHSMCTFAGGKRYHADLSASYNIGARYWIREILKSLPGTAGSLLEAEVPSVKRRSRCVHEDLLRLRRTMMEKGIA

SEQ ID NO: 45900 - protein, 397 aa, unknown
  TnpB Polypeptide
MLTAHRIALDPNNVQATYLAKASGTARFAYNWALAEWQKQYEEHKKDSTKPKPTEGALRRLLNSIKREKFPWMLEVTKNAPQMAIIQLGKAFKNFFSGHAKYPQFRKKGMHDRFTLTNDQFKIEKTHIHIPNLGKVRMREALRYVGKILSATISRIADQWFVSITIEIPDIPPQQCSESAVGVDLGASTMATLSTGEKITGPKPHNTLLGRLRMLSKALSRKIKGSKNRTKAKIKLARLHARISNIRKDAIHKFTTDLVRRFSTICIEDLNVRNMVKKRRLARSIADMGFHEIRRQLEYKTARNGNQLIIADRFFPSSKMCYNCKHVLKDLELSMRSWTCPYCGSSHDRDLNAARNLAAYTVSSAVNVCGGNSSGQVDTPIGETAPTKQKVNINIYL

SEQ ID NO: 45901 - protein, 401 aa, unknown
  TnpB Polypeptide
VLVRRGFRYRIYPTPEQEARLRCWEGALRALWNLAHEQRRVYLSRGARCPSAFDQINQLTALRADVPWLADVPRNVCAQLLVDLDAAWQRCFARLARRPRWKKKGRDTVAITEPHPKTFRLTETGVVFPKLGEIRAVFHRPIAGIPNRCTIVREVDQWFVSVQCEQDIQEPKPTTRPAVAIDCGVANLLADSDGGLVPNPKHLEAALTRLARAQRVVSRRQKGSRRRERAKRCVAKLHRKIRRQRQHLLHVLSHRYAKSHGVVIVEKLNVAGMVRGGLGRQISGAGWSSFCSMLRYKLEATGGTLVEVPAAYSSQTCPACGTIDAASRHGERFRCVGCGHEAHADVNAAIVLLSRRNGGDAGRGGQGAIRPPMKRQLRVVRRGHSTVQVSGSFKSPGLQSG

SEQ ID NO: 45902 - protein, 426 aa, unknown
  TnpB Polypeptide
MKTISFKFKSDSEELQQAIVEDSRICSSMRRFAYNRFKDGKANKEVYTELGEKFADVNSHLRNSAVRSGASVAKSNEEKKVYFGKFKKFVRGLISKEELRESKNTGILSEGEAPQSGNRFFKLDVENNKIIWKRKAKEHYDLKLVEQLDRKRKQIFSTLQLLMSEKKIPVTVRVKNDTIYLTYDESTVEANRRFKNLFSNRVLGIDLNPNYFGISVIEFNKKDEYKIIHKECIDLTELQEQRTNKIQFELYEINHHILRLCKCYHVGKLSVEDLKFDNKKFWNKNLNRLCKNRFRFSFVKTHLQTLCNTYGVELIEVNAAYSSIIGNFKHGSDKCPDPIAASIEIARRAYRRFQKGWFQPTFVKKERIRQVLGNQWKEELELGYMCWKGLAGKIKELKLKYRFQLNPLNAVFSKNHVKSHIVLYGF

SEQ ID NO: 45903 - protein, 401 aa, unknown
  TnpB Polypeptide
MTLRRVYRFKLEPNQKQAHRLYQLAGARRFVYNWALARRKEHFETTGETLRYAAQNLELTQLKKEEERLWLKEADSQALQESLRDVERAFQNFFFKRAGAKRFGFPKFKSRHKGHFAFRIPQRVKVEKGKVYCPKIGWIKIRQSQAVEGETKSATFKRDACGDWFVSLTVEFEREVQPVKEAHNPVGVDFGLKDFVTLSNEEAIAAPQFFRRLVKKLAKAQRKLSRAQRGSARRQKAKAQVAKVHRKIANSRADFVHKVSSGLVGRFDHIGIEDLNVAALAKTKLRGHSKSWHDAACGEFVRQLEYKAVWNGVRLVKVNRFFASSKLCGACGAVNKSLALCERVWTCGCGKVHHRDRNAAQNILRESLNVAGGHPDTRNAHGEGVRPVLPATFAEVRIPCF

SEQ ID NO: 45904 - protein, 461 aa, unknown
  TnpB Polypeptide
MLTIIIHKLKEQLGYYPTNESILYSLLADRLNKRTLNNQEKLQKLNEISNIIKSDNFLSELLNNMKKLKNELNNNPALQSIIRQVCKDFKSYRKAYEEYLSNPNKFTGKPKPPKAKKLKNIDKFTIELNKMSFKVNNKILHVKLHKNKQIRIKLPEFIKEPSSIRITYYLGFAYVDIVYDKHIEELKPLGKYRAGIDLGVENLATIVSTNDNIPSIVIKSSHLKAFNQWYNKLLAKLRSRIDNIKNLLKENPNDEKLLSELEVLTRRIRKLYLHRKKWMENVAHQISKAISLYLHKTGHDKVFIGKNILEAKNGSNLNRRVNQNFVQIPFRLFIDKLAYKLKWFGIKLVEVDESFTSKASCISDDIIEIQKSKGKVSMSGDRICRGLYFDKVINLIFHADVNGAFNILRVGLKRKRLFKKIDRIAKVKLCRPKAVRLSEFCKAVLGNLCPPKWTVEVGLSR

SEQ ID NO: 45905 - protein, 398 aa, unknown
  TnpB Polypeptide
MYLVERHIIKTKNPLYKELDNVCFLSKNLYNKALYIVRQHYFNTKEYLDYCKMCKYLAKNKDVDYYALNTRVSRGTLRLLDKNFKSFFSLIKKKKSKDYNKFVRIPRYLDKQGRYIAVFNKEAISKTFLEKGLIKLANISNVIKTKVTIDNIVEVRVLPRTNHHIVEVVYKKEEKPLLEDNKRYAAIDLGLNNLATVSSNVEKPFIINGRPLKSINQRWNKHKANLQSRLKDNRKSSKQLELITNKRNNRVKDYLHKSSRKVVNFLVSNKISTLVIGYNEEWKQNINIGRVNNQSFVTIPFLIFVQQLEYKCKLEGINVIFTEESYTSKCSFLDNEPLGKHDNYKGKRISRGLFRSAKGRLINADLNGSLNILRKVFGEFQYSIGACCTPVRIIPTYS

SEQ ID NO: 45906 - protein, 237 aa, Proteobacteria sp.
VQCHRVKGQADLVLVHGQFSLLMTLETPEEPPMIPERFLGVDLGIVNIATDSDGNSYTGTPVDVVRQRCSRARQTYQATGTNSAKRCLKQRARHASRFRRAVNHSISQQLVAHAKDTQAALSLEDLTGIRDRMTVRTGQRTRHHSWSCNPLRQLVSYQAQRAGVPVVLVDPRNTSRGCSRCGFTDKRNRRSQAKFSCLRCGHTAHADHNAARNLATRGGVSRPDLCAPVKGQLAFDW

SEQ ID NO: 45907 - protein, 434 aa, unknown
  TnpB Polypeptide
MQFSKSTVNKKAISFYSHHLNKEKLNKITEFAKKIQILQNFISYIYYDEYFNKKNIKCTDFIKLMNKRYRDKDFPCAFFRKICKQVYEKYNKKKPPKEQVIFKKLSFIGVNQSTKIFIEESFNKYTNGIINFNIPHFGIVEIPFRYSKKYHGNLSNIHYSMTGTNKNQYQKQYTCTIEKDRLKIVIVEDDNRVYPISTGNHIEGIDVNIKHNLLQCSDGYVIDYDRKMVKSILKRKKKQDRITSTKMTRKLSTEYTYKQRKQNQKDKRRSISMVEQCLVELFKHCNENNIDHLVFEDLNQFTRKYKISSKEFNVNIRRLMSILHIVDIKNMAERIGKKYGITISLTNAEYTSQQCSCCGYIHKNNRKTQEKFKCIHCGYEENADLNASINIKNRISVDVLRDSLHIEVEYNKYIPLETKHETVEQLFKKLNLVA

SEQ ID NO: 45908 - protein, 528 aa, Thermus sp.
VKAKPKAARERTSKERAKAFTGVHALLVFPSEEDRKATLDLMRRFSAGVRYAYNRLLEGQTREELKRADGFLCTSFRLNTRYADDAILKAQAVLDSARERGEDPRKVVFGGRKLFQQLKRRHLSGKPLRELKREWRERRQGLLYSRGDKTKGGNLNLRLLVEDGALRLRINLGDGSYAHALVKTGHPNLSALVGRVYASLPYNVALSLREGKVYATFTWEEEAVPLVATKENGVLALDVNSDPYHLALALVSPDGNLRRHLTLSLEEVDRAENRGTKELLLWKVAHQVVAIALEEGVAIATERLKYLRKSRRGDGSGRAFRGKQHRFAYASLLRKVHSLARKRGVQVVEVNPRDTSTIGMLKYAPQLSLSKDVAAAYVIGRRALGFEEKLPRGYERLLRDERFRGHVQGFYASRVQELRAKKAQERNPYLRRRLSREIGRAKRHLALFSSLQGSPGSQEGSTEGRNSFGANPWRVLRAGLFLPLLGREVPRDLSRLKPILFGGSWEGWRGSLGPPPGGGPGCANVRYT

SEQ ID NO: 45909 - protein, 528 aa, Thermus sp.
VKAKPKVMRKRTSQKRAKAFTGVQALLVFPSGEDHKATLDLMRRFSAAVRYAYNRLLEGWSREALKREDGPLCVLFRLNTRYADDAILKAQALLDSARERGEDPRRVVFGGRKLFETLKRGHLSGKPLKRLKREWRERRQGLLYSRGDKTKGGNLNLRLFVKDGALWLRINLGDGSYAHALVKTSHPNLNALLQRAYASLPYNVALSLREGKVYATFTWEEEPAPLVATKENGVLGIDINADPYHLALALVSPDGNLRRHLTLSLEEVDRAKDRGAKELILWKVAHQVVSLALEHGVAIATERLKHLLKGRRGDGSGRTFRRKAHRFAYASLLRKVHSLARKRGIQVVEVNPQDTSTIGMLKYAPQLSLSKDAAAAYVIGRRALGFKEKLPKGYGKLLRDERFRGHVQGFYASRVRELRAKKAQERNPYLRRRLSREIGRAKRHLSLLSSLQGSPGSQEGSTEGRNFLGANPWRVLRASTFLPLLGREVPRDLSRLKPILFGGSWEGWRGCLGPHPGGGPECANVRST

SEQ ID NO: 45910 - protein, 551 aa, Thermus sp.
MQGPQTGILPPRRPQVKAKPKATRERTSKERAKAFTGVQALLVFPSEEDRKATLDLMRRFSAGVRYAYNRLLEGQTREELKRQGSPLCTRKVAPSGLTFRLNTRYADDAILKAQAVLDSARERGEDPRKVVFGGRKLFQQLKRRHLSGKPLKRLKRDWRERRQGLLYSRGDRTKGGNLNLRLFVKDGALWLRINLGDGSYAHALVRTGHPNLSALVGRVYASLPYNVALSLREGKVYATFTWEEEPVPLVAKKENGVLAVDINADPYHLALAVVSPDGNLRRHLTLSLEEVDRAHNKGAKELLLWKIAHQAVSLAEQYGTAIATERLKYLPKGRRGDGLGRVFRRKAHRFAYASLLRKVHSLARKRGVQVVEVNPQDTSTIGMLKYAPLLSLSKDVAAAYVIGRRALGFEEKLPRGYERLLRDESFRGHVQGFYASKVQELRAKKAQERNPYLRRRLSREIGRAKRHLALLSSLQGSPGSQREVTDGRNSPGVNPWRVLRAGLFLPLLRSTVPRDLSPLKALLHRGAWEGWGSSLGPHPGGGPECANVHST

SEQ ID NO: 45911 - protein, 528 aa, unknown
  TnpB Polypeptide
  misc_feature (130)..(136): Xaa can be any naturally occurring amino acid
  misc_feature (186)..(192): Xaa can be any naturally occurring amino acid
MKTYKFKMYSNHGNDELHKTIDGHCHVWNHCVALQRRYYAIYGKYISKFRLINHISKLKRLPKFSHWNQLPSQSIQDVATRLDKGYKAMFEARASGKKWGRPRFKPRGKYKSFTLLQAGWELLPGNRIRXXXXXXXLKRLANFAHWNQLPSQSIQDVAARIDKGYKAMFEARAKGKPWGRPRFKPXXXXXXXGKYISKFRLINHISKLKRIQRFEHWNQLPSQSIQDVAARIDKGYKAMFEARAKGKPWGRPRFKPRRKYKSFTLLQAGWQLLTSNKIRIGKCVYQYFKSRDIRGTPKRCTIKRDAIGDIYICVLTDYEDGNLNRVMTGKIAGFDFGLKRFLTGSNGHDIESPQFFKRSLNAIKRANRNHCRKKKQSRNRERARLDLARKHRKIANQREDFHYELAHQLTDEYDEIRLEDLNLKGMKALWGRKVSDLGFADFVKKLKYLAAKKGVKIVCIDKWYPSSKTCSVCGAVNEALNLRDRTWQCNACGTVHDRDRNAALNIFRVGASTHEGEDVSPDSSGNPC

SEQ ID NO: 45912 - protein, 436 aa, Parasutterella sp.
MAITLSHRIEIKINNEFKTYCRKAFGISRFTWNWALEKVKEKISNKQKVNLFELKKEFNLIKRRQFPFVLEVTKYASQQPFIFFMQALEQFYVDLKSNKSSSKRRGFPNFKKKRHCSGSFYIGGDQVRVKKGSEIKDKRFGASENKYYLHIPKFGWVMLREAIRFPGKIISATISQDGEKFFASFNIETSKIVFEATHRENVQEALCGCDWGVKDLLTFSNGIKIKGSKYLRKKERKLTRLQKKLAKKQHRRTKGDKTPKSKNFIKQSKKLGKLYRKVKVQRLDENEKISSVLVRHFGVICLETLNVKGMMSNHRLAKAISDNSPYALRQMIKRKAAQRERTVFEIDQFYASSKTCRRCGAINKELKLRDRNFICPKCGFTEDRDTQAAKNLTEVYIDRVGSASPELLKIKPVDLTALLDDLAINGLATSREEAGI

SEQ ID NO: 45913 - protein, 381 aa, unknown
  TnpB Polypeptide
MVSICNMKVNKAYKYRIYPNRAQRVLLEKHFGCVRFVYNHFLRQRIDWYAEHENDKKKGLNYHDTAAMLTQLKKQEEYSWLQEVNSQSLQQSLRHLDLAYSNFFNNRAKFPRFKKRRYAQSFSVPQRWSLLDGRLNIPGAKGIKIKLHRPIEGIMKSVTISRSASGRYYAAILCEVEMSEPEYTGSEIGIDFGIKAFLTTSDGEVVESPKYLPRAEKRLKRLQRSVSRKQKGSNSRRNATHRLAVQHEKVSNQRSDFLHKTSRKLVSDNQAIHIEDLAIRNMIRNHSLAKSISDAGWNQFVNMLQYKGKWYGCSIGKLDRFFPSSKRCYSCGYINDALTLRDREWQCPECDAVHDRDLNAARNILTFSRAGAARSQAGGER

SEQ ID NO: 45914 - protein, 383 aa, unknown
  TnpB Polypeptide
MNMQEITRTVRIKLIPEDDNLLFQTMVAYTDACNWICDTAWEKRLTNKVTLHHEVYYKTRELFGLSANLACSSRDKVAEAVKSSFKRKGSKPHFAFTPIRYDARTCTIKPDYCTLSTNGHRVRCEFVLGDYQRGYLEDKSWEFGSADLIYRNKTFYLHLVLKKLIPSPAPPSQVIGVDLGVKNIAVTSTNKFFKAGRLNWRRNHYFRVRRSLQSKGTRGAKRTLKRIGERENRFHRDALHQASKWLVSHASTYDSPIIVFEKLTHIRSRTNFGRKGNRQVHSWGFAMLQGFVQYKALAQGIPIAFVDARYTSQKCSQCGHIAKGNRNGSIFRCKHCGFQLHSDLNASRCIALNFTQGYSPGVAVSVNDRLNPAPCGAGTSCLL

SEQ ID NO: 45915 - protein, 408 aa, unknown
  TnpB Polypeptide
MVLVEKHIIKPSHQYYDELDHLCLLSKNLYNTTLYTVRQYYFANKQFLNYQAVNKLFASNNNPDYRTLPAKVAQHTQMLVDRNFNSFFRLLELKGQGKYDKPINIPKYLNKKTGRQVVHYQKGALSFKAKGFIKLSKTHIKIKTSLTKESVQFVRLVPRNNYIVVEIGYHVKEPELKSNDNVLAIDIGVNNIASCVTTDGEKLLVNGKPLKYINHNYNKAVANAKSKLKTTHNQNSSKYISQIINKRNNRINDYLHKITTYIVNHAVSKNIGTIVVGYNKEWKQDTNIGKVNNQNFVNIPFYRLINLLEYKCRLKGIKFQTITEAYTSKCSFIDNEEIKKHQTYSGKRISREWFKTKNGLIINADINGAYNILKKYMQKNATWNESLSQTLVRVCSVPSVRKINIRLS

SEQ ID NO: 45916 - protein, 330 aa, unknown
  TnpB Polypeptide
MLSIAKQTSALPTTDIGWKDAFRKVIYEVMPNRSYVDGVIVLVRGIYESCRQLGVNFKEVELGNWLMFQQTEKEYPVRNITLKRGYEFYITTLDYDGNSERIVIKPTTLKNYKLLLDKILEESQKHTARVVVKDYGIRKGKLWVHGEIQLTIPLNFYYKYMTRYKRNYGKLYGGVDVNSDRINLAIVDKEGNLRDTYTFWFREVTARSYPRRKARTIIGMRIHEMLKYAYHHGVKTLFLENSEVLGRLKLMWMRNGKRLNRNYNWRVTTFRSSIIEMIAMKASLYAIRVMYVNPKGTTSSEKHDGIMRKYRLDKHTASAYLITLKGLDLL

SEQ ID NO: 45917 - protein, 381 aa, Bacillus sp.
MIARNVSDEHDVENQKNKGMKRMSQTLTVKVKLIPTKGQICLLEQSSQEYIKVINTLVSEMVEAKKSTKKSTKDIEANIPSAVKNQAIKDAKSLFATKVKKSHYKIIPILKRPVCVWNNQNYSFEPTYISIPFKVNGKSTRVKIRALLSDKNNRNLNLLKHKLGTLRITKKSNKWIAQISVTLPINKRTGTKILGVDLGLKVPAVAITDDDKVRFFGSGRHNKYKKRKFRSVRKKLGKDKKVKAIRRMDDKEQRWMQDKDHKISREIINFAIANHISVIRLEQLTNIRQTAKTSRKNEKNLHTWSFYRLSQFISYKAMIAGIQIEYVNPAYTSQSCPKCAKKNKAQDRKYKCPCGFKTHRDIVGAMNIRCATVIDGNSQSA

SEQ ID NO: 45918 - protein, 547 aa, Thermus sp.
MFPRGLDVKGKKRKGKGKRPQSFVGLEALLVFPDHGDYVATLDLMRRFSAAFRFAYNRLLEGEKREDLKKEDGPLCTLFRLNTRYADDAILKAKALLTSQVELGENPRKVVFGGRKLLADLARLKRSNHPLYERKKAEWREKRKGTLYARGDKSKEGNPHLRLVVQDGSLFGAPTPQMNLWLRVNLGDRYAWALVKTSHPRLQALLSRVYAHEPYNVELSLREGRVYALFSWEEELPPISLTQEGGVLALDVNADPYGLALAVVNPDGSLRRHLTLSLEEVDRAKNRGAKEIALWRMAHQIVSLAQEERVAIATERLKHLPKGRRGDGSGRRFRRQAHRFAYRSLLGKVHALARKKGIQSLEVNPQDTSTIGMLKYAPLLSLSKDVAAAYVIGRRALGFREEIPKPLKALLQDPSFHDRTRRFYEGRIAQLKERHREEKNPYLRRRLRRELAQMKRALATLPSLQGEPGGPAGSTAGRNPQGIHAWRALRVGLFLPLLGRKVPRDLSPLKPILLGSWEGWKGGLDPHPGGGSAATDAHLRVGVGSGG

SEQ ID NO: 45919 - protein, 404 aa, Anabaena sp.
MFNLTYEFKLKPNCAQIAIFEDWLEQCRRVYNYALAERKDWIKSRSCRINACSLHSEYIIPADTPRPTYFNQSERLTQAKKIYPELKKVSAQVLQQTLKRLEKAFVAMWEQKHGFPRFKKPGKMRSFVFPQLAANSIEKGRIKLPKIGWVKFRQSREIPDGGMVKQARIVKRASGWYVMLIVQWDVSVPQPTPQGEALGIDVGLTNFIATSNGLTVKRPRFFVDAERKLKLLQQRVSRKQLGSNNWHKAQKKVAKFHEYIANCRKDWHRKLSHQICNDIGMVFVEDLNLVGLSRGMLGKHCLDAGWGQFFNILEQICFKRGVYFQKVDSRKTSQICPNCGVETGKKELAERTHVCSNCGYTTDRDVAAAQVVLVRGLAAVGHTVKMLAEGKFIGIPKMQESPVL

SEQ ID NO: 45920 - protein, 388 aa, unknown
  TnpB Polypeptide
MRAVKAVQQHYTPGPQILQMLEQFRQMLNDCVRIGLAENVTSLKSLSTKAYNQLATYDVMSYYKLCAISKATGILKNYRKAKRQGMRVKEPYARQLQLTTCYGFKIKTIEKALSLPFKPKQPLSIPLNAHVLRVLSEPNIQVCSVTLTDQQLSISYATEVEQIQPHGLIAIDRNLDNLTAADSDGQMGRRNLAKATEVKARYREIRSHMRRNDVRIRQRVSEKYGCKQREKVKQILHHASKQIVLDAKRKEFGIVMEKLTGIRKLYRKGNWQGRGYRGMMNSWSYYELQRQIEYKARWEGIPVIYVNPSGTSVKCSICGSRMKPEENRTLKCRSCGFTVDRDVNAARNILARGMRFVPVASALEAMVQEPQSRAILKVDADELTKSAS

SEQ ID NO: 45921 - protein, 416 aa, unknown
  TnpB Polypeptide
VPLITLKAQIHTDLQTEAVLKDAMFCATKVYNGLLWHLRKEYQETGKVNISLKNLNRILKELPRTKSYYSMSVQLTRDEVREAYKSFFALKKKGFTQHKAPGFRRKGYLSPLKYVQSGFKVEGDKVTLSLGISREDGIKQVSFRISHRPDVEYERVRELSITYDQVSGRCEARLVVEVKARENNGTDRVAVDLGETVLLAATFEDGTTLLYSGRLIKAIRRYWQKVRSSVKPPSKERPRMSRRYREIAHRERRQVEHLLHIATAHFIRECVRHGVKEIAIGDLTGIRDKMDYGARMNQRLHAWPYRKIIGMIRYKAALAGIVVRDDVDECGTSRTCHACGQVREASRVHRGLYRCPCGWTAQADVNGALNIYERAFQVSPVKGSSGRVARPMVLSFQLGWHTVHEPKRRPVLRASA

SEQ ID NO: 45922 - protein, 361 aa, Brevibacillus sp.
MGETHITGELMQAFTVKVRIFPEHPDVLRQLGKEYIRVVNQLSEQAEQLGVFPKMTTKDVESRLPSAVCNQAIRDAKSVYRKTKKWGTRPILKKPVYFINNQNYSISENTVAFPIVVDGKTKKTTFLATPTNRDMELLSKAKFGLMRIVEKSRKWYAQLSLEVPTTESNGEFMMGIDLGLKVPAVAVTSTGKTRFFGNGRQNKYIRRKYQQRRRKLGKLKKLSAIRKLGNKEQRWMKDQNHKISRQIVHTAIQEGVSVIKLERLENIRKTARTSRKNAKNLHSWTFYQLQQFISYKASLVGIRVVEVTPAYTSQSCPACGGKNKARDRRYECSCGFNAHRDRVGAINIMRQPVADGNSLSA

SEQ ID NO: 45923 - protein, 404 aa, Moorea sp.
VIILEFKAYGKTSQYSAIDEAIRTVKFIRNSCIRLWMDNKGINNFDMSKYSKVLAHQFPFANELNSTARQAASERAWSSVVRFFDNCKKKVPGKKGFPKFQKHCRSVEYKQSGWKLSPDKKSITFSDKKGIGRLKLKGTWDLWRFDKKQIKRVRIVKRADGYYVQFCVSIEVNEQLEPSKLTIGLDVGLKEFYTDSNGNSEPNPRFYRKGEKRLKFHQRRVSRKKKGSANRKKAIDRLGRHHLKISRQREEHVKRLARCVIRSNDLVAYEDLRVKNLVKNHCLAKSINDAGWYQFRKWLEHFGKKFGRVTVAVNPAYTSQNCSECGEVVKKSLSTRTHVCECGCELDRDHNAAINILKRALGTVGHTGTWVLDPVNASGDLASTVLGSDQVQQAESLNEESPRL

SEQ ID NO: 45924 - protein, 371 aa, unknown
  TnpB Polypeptide
MLVAYKYRLYPNKEQQEYFAKCFGCVRFIYNRMLSDKIDYYKETKKKLNNTPAQYKKKFEWLKEVDSLALANAQMNLQTAYNNFFKRPEVGFPKFKSKKNNHFSYTTNNQGGNIYVTDRYIKLPKIGLVRVRKHRDFEGLIKSVTISKSPSGKYFVSVLVDQKDKEKLIPNNNQIGIDLGIKEFCITSDGEMIQNPKFLRKSEKKLRKLQKDLSRCQKGSKNREKCRIKVARQHEKIANQRKDFLHKLSRRFIDENQIIALETLKIKNMMSNHKLAKSIADVSWSEFVRQLEYKAQWYGREIVRIDTWYPSSQICSNCGHKDRRKPLSVREWICPNCGTHHERDINAAINILKEGLRLYNKNKTVGTTGLA

SEQ ID NO: 45925 - protein, 224 aa, Fischerella sp.
  misc_feature (215)..(218): Xaa can be any naturally occurring amino acid
LLANLKVKGFESISKKKFKNGGGISKVKFRSRKDPIQSCYIPKSAVSDKGIYHTILGEVIFKEALPQSFGDCRLVKAYGDYYLTVPEEVSRQQSENQGRVVALDPGIRTFITFFSESNFGEIGISANIQIQKLCFRLDKVISKIAKAKCKSKRRLKLAATRLRGKIKNLVDELHKKTARFLVDNFDIILLPTFETSRMSKKAKRRIRSRSVRQMXXXXYSVTNL

SEQ ID NO: 45926 - protein, 360 aa, unknown
  TnpB Polypeptide
MMTIKYRIYPSKYQQDFLWNQSIALTRLYNQFLAQKIQAYKENGISIKRFELQKQLVELKKQNPEYRKIHSQLLQHVPKRLCESFSAFFRRGFGFPKFKSPRFFFSLVFPQDKGCRIIGRKMIVGKEKIKILIHKPLPDKIKTRIITRSQDNKWFLCLAYITENEKRLNNEKILGVDLGLKNIIYCSDGHFVRNKNHSKYFDKQIAKLQNMQSFCHKNSKRNKQTQKVINRLYGQKVRKTKDFLHKVSHTLVLKNFDIIGLEKLASKRMSESNIKGLNRSIRNSQFTTLMCFIKYKAEQLGKKVVFVNPNHTSEKCCMCGKKYKMQMRDRQMICECGNNMDRDYNASINIMNLARNSLCQ

SEQ ID NO: 45927 - protein, 435 aa, Streptomycetaceae sp.
MAKRQFGHRARLALSPAQVRALDAQAHAARTMWNLLHAWWTMLSKERRSLTAADGAIRQARQDIDWLAVLPAQAAQAVLKTYVQAWRNCWEGRADAPVFKSRTRSVMSVDVPQGRDLHVVRVHRRWGMAQIPKVGRVRFRWTKDLPIGRQADRDHRITGARLVKDALGWHIAFRVQTLEPAPEPHPGSEVGIDVGVTVPLALSDGNHHYRARPERVGNGLGDRDKWLTDRETAALLLWEQRAARRKAFRRPGERASRRLQHTYDRIRRLRATATRRHQDWQHKTTTAIARQYGTVVVEQLQITNMVASARGTVERPGTNVAQKTGLNRAISQEAWGRTVAMLTYKLAGRGGTLAKVPAPGTSQRCSACGFTTKGSREDQARFVCKHPGCGWSGNADHNAARNILHLYRTGHAVAVPAAGRAVVRRARRVKPPTAR

SEQ ID NO: 45928 - protein, 419 aa, Microcoleus sp.
MLTLTHRYRIYPHSAQEQQLIEWMEICRGAFNYALREIKDWCDSRKCPIDRCSLEKEYIISSELKFPGEIQQLNNLPKAKKVFPKLSEVPSQVLQQAIKQLHRGWEYFQERGYGFPRFKKYGQFKSLLFPQFKENPVTNLHIKLPKIGAIPINLHRPIPTGFVVKQVRILRKADNWYASISLQCDVNVPDPTPYGHPIGVDIGLEKFLATSDGVLVKPPKFFKSLQGRLKVLQRRLSRKSKRSKNYEKQRLKVARLHHQIDNTRKDFHFKQAHALCDVGDMVFMEDLDYRISAKGMFGKHMLDAAFGQFRTIVKYVCWKRGKFFAEVDARGTSQECPECGGFVKKDLSVRVHSCPHCGYTTNRDVAAGQNIRNRGICLISTVGQTGIESACAADLPGTEATQSRQVAKSRKRATRKPRK

SEQ ID NO: 45929 - protein, 381 aa, unknown
  TnpB Polypeptide
MFRAYKYRIYPNITQKELIAKHIGSSRFVYNLALETKNTAYLGSKHNFSPFDLIKQLPELKNECEWLKEVNSQSLQQSIQNMDIAFKKFFKGAGFLKFKSKHRGKQSFSVPQSVFVENSLLSIPKFREGIKIVLHRPIIGNIKSATISVTPTGKHFASILVDTKKEYPTKTAIAESTCIGIDLGIKDFAITSDGEVFENPKYLRKAQSKLKYLQRKQSKYKGTKTKHNLAILHEVVVNKRKDFLHKLSTKLIRENQTIAIEDLNVSGMVKNHKLAQSISDVSWSSFVAMLEYKAKWNGKNIIKIGRFAPSSKTCSCCGNINNDLTLNDREWTCTNCNSCHDRDINAAINIKSFALKKTLSGTDRKIQKELPTLVGALTSEA

SEQ ID NO: 45930 - protein, 538 aa, unknown
  TnpB Polypeptide
MNKDVLKMPTEKKIDSNFVTVECLLAFDKDEDKGRVLSTMRKFSSMVRFAYKRLMEGAERKELKKLLSRKYGINARYSDGAILLAQQALESCVERGQNPKKLVFGSRELFEQLKKKHLTGKRRDELRQKWEERRYGILYSRGDKSREGNLNLRLVNLNNQWHLRINLGNSEYVWARVIRSAKRKTDKWLDFISSIEHAEKIGDWFPYTVRIKLRNGKIYAQFSKEENCPEVAITKDNGVIGIDINAYPFHLALVHTTKNGNLEKYERISLDKLLESSSEKRAYLSWQTAHQVVEIAKRERKAIVVENLEKLPKGKRGDGLPKLRQRLQKWVYKGVLQKIETVAKRNGIQVIKVNPAYTSIIGKLKYAPLYNIDKDTAGAYVIARRGLGFKESLPKNYKELLKDAEFLSYAIAKIEDKIAKIKHEIREEKNEYKRNRLKSILWRTRKELDTLLGYLRESGESETAAQQTVNRQMERVRGSTQVERKSWQVLSVALALSCLESPRDFSPLKRVIFARDWVGAAKRASPSPWSGDDRAKYV

SEQ ID NO: 45931 - protein, 378 aa, unknown
  TnpB Polypeptide
MIRTNVIRLYPTRAQEAQLNNTTGACRFAWNKALSYWDEQYEAHLKDKSIPVPISSKVASWYKDNREEWASETSSVCQRQEILHLGKAFHSYFKRPDHFAHPKFHKKGIKDSFEVPNDKAKIKDGRLSLPKIGEVKMAEPLRYQGKICSYTVKKSGGNWYVHIPVETGKDERVRCINPESVVGIDVGLLNPAVASDGTILQLPKETLDKLDAKLRRQQKALSRSQRNSRNHAKLLIKKQRTQNKINNIRKDAVHKFTTAIAKSHGTAVIEDLDIKEMKNKAPARSVRRAYNSSLMGAIRWQLSYKVQHLIKVNRFFPSSKTCSNCGHIRSDLTVGERTYRCDHCGAVIDRDLNAAINLMKSGLVKPEVSVEQVGTDLR

SEQ ID NO: 45932 - protein, 397 aa, unknown
  TnpB Polypeptide
LSRSEDQGEAILMDVSRKAICALKANEEEIETICATVLAFEDACNYLSKVAFQKRTADPRALHDLAYRDLRAIFRLPASLAVQVINKVASSYSERPYKFHTFSERSIILDGKLFCLKRNKGLRASMATVKGRVKARLEAGSYQRKILENPVQSARIVLKRDIPYVHIYVTCKVPEKETDDPVGVDLGVRKLLVASNGFKINGGLVKSRQRHFRYLRESLKSKGTSSARRRLKRLKKRENQWMKTVLHQSSRALIESLEEGNYVVLERLYGTKIRSKAKRNRKCARRVHKFSAMGRLQHMITYKCEERGVPVVLVKPDFTSQRCPRCGTIDRCNRRTQALFRCVNCKYQHNADFVASINLRELARGGWAAVSQPYAIPTTDGNCKPVQQFFALNILGS

SEQ ID NO: 45933 - protein, 519 aa, unknown
  TnpB Polypeptide
MHRKKGDFDMYTVRFQLELSGSEKRFLSKSFFYANQMHNQLVRYATNRLNALFHDKEYVGARKAYGEAEFSKKKGSELSASEKKKKKELSNIMCIKQKEYNLTKTSLCKFVSKEQKKFKNYINSHQAQAEAEAVYKGVEKVLFEDGRHLHYQRYNSFDCIKQKCAATGVRLLRWDTICFMKHYYKVRVPKNEYIQNILSSVDLKEDVVYSFLKRIEFNSGFKYYVVITLRGDAPKRIKLSKDGGHRTGVDFGTSTIATVSNNEVHLEELAPESAKYEKEIRHKQNLIDASMRKHNPENYNKNGTVKKGKHKWKTTRRCRRLKRQIRVLYRKQSAYIKTSHHTFINRVVQNTSEFILEPMNFKALQKKSKKTERKEEATAIKQKNGSLKMVRKYKRKKRYGHSIKNRSPGLMQADLKTKATQYGIPYYEIDIHQYRASQLHHDTGEYIKPTLSERFKTIEGHKVQRDLYSAFLICHTDDTLTAPDFEACHVDFPHFVKMQDTLISNKKKCGHTMKSCFGF

SEQ ID NO: 45934 - protein, 373 aa, unknown
  TnpB Polypeptide
MRITRTIKIPLNVNKSLFQETIDLYTKAYNLVCKTGFNDSDFNGVSLHNKTYYQTREYLPAQLAISARMKATESLTSIRSLKKNKQKITCPQSKQCSIRYDHRSLTTDFKDNVISILTINGRQKIFIKIRDYYSKYVSWIRRSADLIIRKNKIFLNIVFTKDIEDSVSNNKYVGIDRGIKNIAVTSTNKFYGGKQISKVSKRYEKLRSALQSKETRSSQRHLSRISRKETLFRKDANHCISKSLVSSLKKGTTIIFENLKNIRKSSSKWRKDVKRQVNKWNFYQFEQFVQYKAEANGMFVDYVNASNTSRKCSACGYVSQSNRKTQSVFRCGHCGFSIHADLNASRNIVNRYLKTKCCSDRVEINQPIVPSLC

SEQ ID NO: 45935 - protein, 491 aa, Lachnospiraceae sp.
VADLYKASIGKQEQGTPTPAIQLNQEQVSPDFSLERNATGTVKFSESRTYLYKNTSRKEVSHMKSMKDLKYHAGIVLRIYPSDRQKRLIAVNSGCQRYVYNHLVAVNNEIYRLSKTSEFVPCDRKRIDYLRSVRHHSDIADQAPFLYGSEVDKYVIDNAIMNYQTAWKNQKERHLGVPVFHKKGYAQSYQTNCHYSKNGTGSVRFLDESHLMLPILKRIRFAGSKKRIWQILDRSHETAKNFIRIGTVTVSRDPCGDYYVSLSLASDTPFRECRPSVSAEKVSAAPHDPVGIDMNLSNFCTMSDGTVVPNPKYRKSVQPKIARQQRRVSRRLERAKAEGRPLKGAKNYQKACRKLAELHRKAARRREDFIGRVSSDVVKNHDFIAMEHLNVKGLLKNHKLAMAISDAGWYKFQTAVSQKAAAEGKTFVRVPAKNTTQKCSRCGHVCHGDEKVILGQDEWDCPECCAHNLRDYNAAANILELGLQIAETNSI

SEQ ID NO: 45936 - protein, 337 aa, Methanohalophilus sp.
MPITNHSLVFGKMVTKRQDHLNLEVVNTFFTITYNQSGFKVVGNTIRFSHKMNNEDLIIDIEQDISNLKIKQIEIFNEDKKGNGDFFVTITYEPEISVPYVYNHKFQAIDLGITKTITAINDKGKFFEINNPRYDLYWDSKISAVQSRRDHCKKYSKKWHRLNKTIRTMVRRKNNQIKDWQHKLSKSMVENTKANTIIAGKLNVKNMGKSKNKTLNRSTQNNGYLSRFIEFLTYKAELIGKQVVKIDESYTSKTCYVCGKRHDMPLYRRDMTCDCGNIIDRDRNSAINIMIRYLSNYATWTGYEHFAHNLRQTGLLTFDVSKIHPMNDITTRRNLHA

SEQ ID NO: 45937 - protein, 240 aa, Methanohalophilus sp.
LDKNKVHRCFEGNLKTATISKIPSGKYFISILVDDGKDLPAKQKFDVNSTVGIDVGIKDFAIMSNGEKIDNPKHLNNSIKRLKVLQKRLSRKQRGSNNRDKARQQIAKLHEKIANQRNDFQHKLTSRLISENQAIALETLNVSGMLKNHKLAQSISDVSWSSFVTKLEYKAEWYGKSILRIGQFEPSTKICNVCGYHNKSITLANRKWQCPDCGMSHDRDVNAAINIKKFALNKQNLIGI

SEQ ID NO: 45938 - protein, 334 aa, Methanohalophilus sp.
MILTYKLKHNKDFSDELRKAKQVAEFGVKNRTLSSKDVKHFGLKSAISNQILRKYVKNKKVKSVRSVQLTVPNQSIKVDKKNRKITIPCLKLVLNYQFPDFEEINQIEIGKEYACISVTIPGGNEYEPEHWIGVDRNTTGHVVVAGEPDSGKVIKLGKHAQHTHTKYKNIRKRLQKRGKHKKVKQIKNRESRIVRDLNHKMSRKIVDTAKSNNSGIKLENLKGIRKNRKHAKSFKYSLNSWSFYQLQTMIEYKAKLLGVPISYIDPAYTSQKCSRCGHIGDRNGKQFECPACGHVDHADVNAAFNIALSPYMSQSSAESDVLEGSTDTPEVAMA

SEQ ID NO: 45939 - protein, 205 aa, Methanohalophilus sp.
MVCNISVVIKNNVKPVEPIAFIGIDVGLNSIVTLSDGAQVNSPKYYYNTEIKLKKQQRKLSRKKKFSNNWKKQCDKVNKLHQKIRKQRNDFNHKLSRELINVYDCIVFEDLNIKNMVKNSRLSKSIHDASWSNLIQFTQYKAEEAGKFVKLVNPCNTSQICSNCGQNVKKSLATRTHNCPHCGLIIDRDHNAAINILNRAVGTTV

SEQ ID NO: 45940 - protein, 415 aa, unknown
  TnpB Polypeptide
VVRREGNAAPSLQDIRYSVRMSRYRLTPSIEQEAILLGHCAHARFVWNLAVEQHRWWRPGRASAPGYLEQCRQLTAARAEHTWLREGPQMVQQQALRDFAQAMTNFMTGTHGRPSWRKAGRHEGFRIVAVKPGDVRRLTRKTGEVRIPKVGWVRFRWSRPVAEDAKSYRITRDPAGRWHVAFASAPGPVPAPANGEVVGIDRGIIVSAALSTGEMVSAHGLTVCEQRRLRRLERRLTRAQPGSNRRITVKRTIARLKTREADRRKDWVEKTSTDVARRFDVIRVENLNVGTMARSARGTADAPGRGVAAKAGLNRGIYRSGWGLLVRRLEEKAPGRVEKIQPAFTSQRCSACGHVDRKSRESQAHFRCTACGYACNADINAAKNIAAGHAVTARGGLGDARPVNREPQLLLLTAQ

SEQ ID NO: 45941 - protein, 553 aa, unknown
  TnpB Polypeptide
MQTSTYTTLLKTADINPETERLLSAYAALFGRVERKLYSSLCADNMTANERKSHFIAKYQISARQYNAILRTLAGKLDSKRELDKLYQYEKKERIEAVSCTISRLQSQAEMLSKTGGVPSEIQKIRFKAHQKSRYRARLTEQLEKIARNTGKIPAMCFGSKKLFGKQFFLKENSLKNHAEWLEEWQSARSSQFMVLGSKDETCGNQGAQLYVDDQGEFRLSLRLPDALGGGKAELSGFDFNYGKSAVLAACAENERRRAANVKELTRSSPWVPDRKTGELRPQTKNEVLASYGQPLTMRFMRHKFGWTLAVTVEELAPEALIGSYENGCLGVDVNADHLAVCVVTVDGNKRYVENIPCPASAKGLTTGQRMAMIGDAVKRIIEIGKTYGVGVGIEKLNFSRKKQALKETADKHHRTMLSAFAYNMVLSLIERRCYREGLPCKAVNPAMTSIIGMFKYHSTQNTTHQAAAQVIARRTLGLKHDRIRFSVPHNVGTQLCSARSRTVSIDGGPLQRWGKVKAVVKKHAALFKQPEKTGPPVPLMVNEHKLQPVSLA

SEQ ID NO: 45942 - protein, 405 aa, unknown
  TnpB Polypeptide
MGKGGVMILAHRIRLDPNKVQATYLARVAGTARFAYNWALAEWGRQFEACRLNPALPKPNEAALRRQLNAIKRTQFPWMLEVTKNAPQMAIMQLGRAFQNFFEKRARYPRFRRKGINDRFTLTNDQFQVDGKRIRIPKLGWLRMRETLRYIGRIVSATVSRTADHWYASISIDISDAQLPPAENQSVVGIDFGVTHLATLSTGEKVVGPKALQTLLDRLRRLSRALSRKVKGSCNRKKTKARLARLHARIANVRANGLHQLSASITRRFHTIGIEDLHVKGMLGNRCLSRAIADMGFAELRRQLVYKAVRRGGQVIVIDRWYPSSKTCSCCGCKFDALSLDVRQWTCPGCATHHDRDVNAAINLRNMAVSSTVSACRGECAGPVLDVQSETGPSEAGIQRKVNYA

SEQ ID NO: 45943 - protein, 172 aa, unknown
  TnpB Polypeptide
VSITCEVPKFHPLPKTHQAIGIDLGITDFAILSDGRKVACLREKVAFQREDFLHKLTTAFIRQYGVICIEDLNTKGMLKNHKLAKAIRDVSWSSFVQKLMYKAKWYGRTIVKTNRFFPSSQLCHVCGHHDGKKALEIREWTCSSCHTTLDRDINASRNILAEGLRLFEATQP

SEQ ID NO: 45944 - protein, 395 aa, unknown
  TnpB Polypeptide
MLDKALKSVCQHCAPNEQVLWLLEQFRQMLNDCIRIGLETNVTSMKSLSLKAYHSLAKYDASSRYRLTAISAATGILRNYRKAKRQGKHVREPYANRSQLVACYGLKVENGVLSLPLKTEQRVSIPLNPHTSQVLSEPNITVRSVTLTDEFLSVAYMREVEAIQPRGLLALDRNLDNVTVAASNGAVIRHDLSQTTRIKSVYREVRRHMTRNDHRIQRQVSGKYGRKQRDRVQQIIHHASKLIVKDAKERQHGIVMEKLTGIRKLYRKGNGQGRWYRARMNSWSFAELQRQIEYKARWEGLPVIYVHPHGTSSRCSICGQKMKPEENRTLRCPSCGYTVDRDVNAARNILAKGALRFGAFAPALEAMVQEPACAAILKVDAGESKRRGHSHVPKI

SEQ ID NO: 45945 - protein, 330 aa, Haloquadratum sp.
VEFPSQSFQVKDDHIRVGIPHSYRDEFNCDLTEIKIPFTYEEVQEVNVKRVQILPQADAQYFEYRVLYEQDLEEVETIEGSWLGVDLGVDNLATCCEWRGQSFIVDGRQLKSQNRNYNRKLAHYQSLKHKQGIDGTTKRIDRLHQKRRYSINDYLNKAVRVITDYCIEHRIDTVYVGDGKGWKQNVNLGDKTNQDFVQIPFDKFKQKLKHKLEYRGITFELVPESRTSKCSFYDGESVEHHEEYAGERVERGLFEASDGTQLNADVNGAVNMVRKSTGKPNSDLFESAEGVERAVDTPQRISLSELEENRSLKETSLEAPSSPKPPLAAE

SEQ ID NO: 45946 - protein, 184 aa, Glycomyces sp.
MAAQHHSKESQAREDMLQKATTRLVEEYDTICIEDLHIAGLMKNRRIARHIVRMGWHRFRRLLEIKCERAGKRLAVVDRWEPTSKRCSNPGCGFVLDELRLEVRKWACPGCGARHDRDVNAAKNILAAGLAVSAEEQDPAATEALPDPAVDKACGACVRPRGLSPPRQRAAKQETILSDEVNLL

SEQ ID NO: 45947 - protein, 409 aa, Aphanothece sp.
MYTGHKFRLYPTNEQKEALDNAFGCSRWYWNYSLELCQKTFQETGKGLTRNKIQSLLPKLKKEHEWLKTDVYSQCLQVVALNLSTAYKNFFEKRSGFPRFKSRKGKQSISYPQNTKIKQDCIHFPKLGDIYCRFTKEVEGEVKMMTISKTPEQKYFVSIGVDDKLDAPHLSSDGKAIGIDVGLLDFCVTSDGSKYNNPKHWNKHYKKLKRRQQKLSKKAKGAEGTSPQALDFKSSEQRGSINRNKARLAVSKVHGKIARCREDFLHKLSRKIVNENQVIAVENLNIKSMVKNHNLAKAINDVGWGMFCTMLKYKSEREGKVYLEVDRFFPSSKTCNKCLHVIDKMPLDIRQWQCPKCEIQHDRDVNAARNIRDEALRILAVGRIATASGDNVRRAVGDISYLTDAIVGE

SEQ ID NO: 45948 - protein, 414 aa, Aphanothece sp.
MYATQKNQLRRLSQQEFNALATLCRLSKNLFNVALYECRQYFFTERKRLTYESNYHLCKSNENYRLLNTDIAQQTMKVVDRSMRSFLGLLKAISVGRCEQKPQLPKYLPKEGYFPLIIPRIKLKDGMFKIPMSYEFKKEYGEVKIQLPERLHNKNIKEVRIHPKYKGTWFEIEYIYEDEKIETSVDSSKAMAIDLGVDNIAACFDTDGHQFLIDGKKIKSINQWYNKRNAILQSAKDKQGIKSFTNKQARLYQWRNDCVRDYLNKTARTIINHCLKYQIGKLIVGYNPGIKQEINIGRTNNQNFVQIPFWQLKQKLSALCSRYSIEYLEQEESYSSLASFYDRDKIPVYNADNPSKPKFSGKRIKRGLYRTKEKHLVSADINGSANILVKSKHRLDFERVSSGFLANPLRIKIS

SEQ ID NO: 45949 - protein, 422 aa, unknown
  TnpB Polypeptide
VATLCLGRRRNAALLPSRFVGACAYVAGVCRFRLLPSIEQAAILVEHCRHARFVWNLAVEQQQHWQPGRPAPGYNEQCAQLTAARAEYDWLAAGSQTVQQQALRDFAQAMRSFFKGSHRRPTWRKAGRNEGFRQIGFKPRHIKRLSGRYGQVWIPKVGWVRFRWTCDVPDTVKSYRVTLDRSGRWHIAFAAIPESIPGPDDGSVVGIDRGVVVSVALSTGELLCVPGLRAGETKRLRRLQQRLARARRGSRRRERTKSAIARLRARESDRRRDRIEKITTDVAHRFDTIRVENLNVRAMTRSARGTRACPGTNVAQKRGLNREIHRQGWGLLVARLEHKAVGRLEFVPAAYTSQRCSACGYVAPENRKSQAVFQCAACGAGPCNADVNAARNIAAGRAVTARGDLGASRSVNREPRLCSPAT

SEQ ID NO: 45950 - protein, 439 aa, unknown
  TnpB Polypeptide
LKQLLSRIRKPFTSKEHAAFERQLMGLKSKLAKIESLMRDLQQLESSKRLHICFGSRKLFNAQHHLDENGYNNHAEWLEDWRLKRSGRLSCVGKSQFGGGTMMKLFATSEIGIYTLKVTVPRPLIQKWGTHLSLKFEVSDRNLRTHRGNLNYALECQKPITTQVFRREHKNNQWYIHLTTYVQHVPKVHTIKHGCLGIDFNAESLSASYIKPDGNIAWCQDFSYQWKDLSSGQRMAMMRDLVVQIVRVAESLGCAIAIESLDFSKKKARMSEESKLYNSMLSNLATSSFREVIESRCQRFGVQLILVNPAFTSVIGMVKFMAKYGLNSGTAAAMVIARRAMRLSERIPQCLSLPEDEGKHDWSAWNRVSRFIKKHGIKRTQLFEWMKALEGILTCSEEQAEHQPSSSVAIQAGKSKNPCQSPMDEVPMINSFVQLSLGF

SEQ ID NO: 45951 - protein, 422 aa, Acidithiobacillus sp.
MLNRKVTYRLYPNAEQEARLQEILGLHQRLYNTALEERIRVYRETGKSLSFADQCKILTQWRKTVPALADLNAQSEQVTLKRLHLAFQHFFRRVKNGEKSGFPRFKSLQRYPGWGYKTHGDGWRLHSGENGKHGKLYLQGVGQVPIRGKARTAGQPVTCEILHKAGKWYVSVTLEIETIQRERGTEMGAFDWGVADFLTIATLQGIETVKNPRHLRNQLAELKRLSREVSRKMVGAQKTSGRKKGFPVSHGLRKAIHALACLHAKIARSRKNFLHQTSAWLVERFGALATEALDVRSMTKSGKGSRKKGLNREVLSTSPSAFLKMTKTKAEEAGSWYEEAPTQEIKPTQRCHACWKLPKKKKTLSERQHRCPHCGITCGRDENAAQVLLRWLETRLAGVPGSGREPSEVWSGVRPRETVAPA

SEQ ID NO: 45952 - protein, 400 aa, unknown
  TnpB Polypeptide
MNLTEIHQIRPNHKLYSICDELCFKSKNLYNAALHEFRQSYFNRELDTLNWQTINKNFNQNNQFDYRELPAKVSNTVIKKLGNNLSSFWTLIKKSDYNKKIRLPKYLHKTEGRFVVEFNKQTFSNKRDEDNNLIICKSALNLRIPTKVENPQQVRIVPKKWFYVIEVVYEVKENEPKQNQRVASIDLGLNNLATVVTNDGDNPILISGKKLKSINQYYNKITSKKKTLLPNNIYTSKSLDRLWLKRNNKITYEIHKITKFLTNYFDERDISKVIIGNNSGWKNSINIGKRNNQNFVNIPYITFINQLTYKCKLLGITVIVREESYTSKASFLDYDEIPNYKDETIHKFSGKRIKRGLYRSSTRKINADVNGAYNIMVKENPNYILSKREQLGFNPILIKL

SEQ ID NO: 45953 - protein, 450 aa, unknown
  TnpB Polypeptide
VSQKVRIDGVKHTGASVFLGVDHCGNPCWTRNPERIMVWLCDGWRTRFNQRREQRTHNIPVKDEAGEIVDWIKEPLGGPDVAELLSDKEARLQYSWMAGIPAPILSSTDRIENTEWFAGLKRKKTAGGRIPGFKSRHRGLGFVCWRNASKTGNAIFRKTGRKSGVVVITGMNPTGWVKPGEKAHWRVIIHVRVSQPIRPYTSVHVDWTHRSLVFVNMPLPLPRTGDGVIGIDRGCVHTLALSDGTFRDVPKPSKAELKRLKYLQRRMACQDRTNEARGGKTAKLASKRRRKTLSEFNALQGYIVRRRNDWIEKTTTRLARENSLVAMEDLDVQAMTKRPKPRPDPAKPGQYLHNGAKAKAGLNRSILSNNWSRLMKRLKDKMDANGGRLVVIPAAYTSQTCHKCGHVAKGNRESQAVFRCVECGYRANADVNAAENILSRALAKTGGGTA

SEQ ID NO: 45954 - protein, 394 aa, Candidate divison MSBL1 archaeon
LKEKFSEINSRYRRGGYFRAKFNYESVLELVGSGELESPEKVVFGGRKNLRKRERGKISNGEWKRLRNNQLYSRGDKTKRGNLNLRFVEQDGDLHLRVNVRNREWIHVPAYLPRKKRRFLAGEKPYGVRIIRKDGEYEVRVSFEEEQEPETSFEGGAVGVDFNHQTIDLAVTNEQGQLKDGKTIQCPEITTSRKNKRENLIGSYAKKVVNYAKYWRRGLVLEKLEDVARGQRNQHEFTHSKFLEAVKRRAEREGVEVREVNPAYTSVIGRHKYAPYYHITIHQAAALVVARRGQGLFEHLRGLKTPLFKALEAGEGRESALDRRVHSWSLWSLTRGLPSRKGAGYKHPDQSPEMIGVESLGTSSPTERCPGGGDSLGGKTANPGSGPPVQKASA

SEQ ID NO: 45955 - protein, 279 aa, Enterococcus sp.
LKEVDSLALANAQLNLDKAYKNFLRDKSLGFPHFKSKKNPVQSYTTNNQNGTIALIDNKFVKIPKLKSLVKITLHRQPKGLIKSATISRHSSGEYYISLLCKEEVSELLKSNSAIGIDLGITYFAILSDGQKFDNNTFTSKMEKKIKREQRKLSRRALLAKQKGINLFEAKNYQKQKRKVARLHEKVMNQRTDFLNKLSTEMIKNHDMICMEDLNISGLLRNHKLAKSISDISWSSFVTKLQYKADWYGRKIIKVNKWFPSIQICHDRDSLVNKRNRCR

SEQ ID NO: 45956 - protein, 395 aa, Prevotella sp.
  misc_feature (283)..(387): Xaa can be any naturally occurring amino acid
MRLVYKFYIRHTEELDRLFRISNNLYNQALYLFRQQLDADGTWLWYNDMDKLMKKTTNLEGECNYKLLKSQCSQQVLRVLDKNIKAFCKSIKDWKKHPEKYKGMPKMPHYRKRGGMFNLYYTNQSCSIKDGRIRLAKDLLVAIPQWEKYGDNLKSVHQVRLLPNYRNIKVEIVYEKEIEQADVDKAKYASIDLGLDNLATMVTSEGCTIYSGKYLKSYNNHFNKTLSHLQSIKSLQGIKRTTRRITRMYDKRDRYFEDAFQKVSRQIVDTLVRNRIGTLVVGXXXXXXXXXXXXXXXXXXXXXXXXXXXXXXXXXXXXXXXXXXXXXXXXXXXXXXXXXXXXXXXXXXXXXXXXXXXXXXXXXXXXXXXXXXXXXXXXXXXXXXXXXPIRYRNPF

SEQ ID NO: 45957 - protein, 396 aa, unknown
  TnpB Polypeptide
MAYKAYKYRIYPTQEQAELINKTIGCARFVYNALLADAKKQYKETGKSKIKTPASLKSEYEWLKEVDSLALCNSQLHIQTAYKNFFNKTAKFPEFHSKRKGKQAYTTNNIKETIRIENGKLKLPKLGFIKIVLHRFCKGKIKSVTVSRTPANKYFVSILTEQTPEIIKKDITQEKILGIDMSYKELAVYSDGTKAKYPMYYRKAQKKLAHTQRNFSRTEIGSKRHEKARLKVAKVYEKISNQRKAFLDKESTRIAREYDVVVIEKLDMRSMANKGMRNGKTVNDIGFGMFKEMLRYKLSNNLGQLIEADKFYPSSQLCSNCGFKNIAVKNLNIREWDCPQCGVHHDRDINAAVNLRNYYTTATVEIEARGEKVRPVVNVLCANTTGCLGETRKVVG

SEQ ID NO: 45958 - protein, 418 aa, unknown
  TnpB Polypeptide
VKTVQLVEQHCIDKRDPRYRVIDEAAFKSKNLYNAALYEVRQAFIHEGKYLNYSEMDKRMQSHAAYKALPAKVSQQVLVLLDKNWTAFFEARKAYEEDPSTFTGRPRLPKYKHKTEGRNILVYTIQAVSKRGLKQGLIQPSMLPIEIQTKHKDIDQVRIVPRNGHYVVEVIYRKAPVQAQVDPSYCVAIDLGVTNVAAITANREGFIPRLVNGRTLKAMNQWYNKRMKELKLCLPKEERERVTRQMEQITNKRNRQVNHYLHAASKRIIDFLVKEGVGTIIIGKNPRWKQEVNNGRRNNQNFVAIPHARFIDMLTYKASLVGIQVEIQEESYTSKASFLDLDPIPTYKPNDEEEHSFSGKRIGRRNRLYRTKDGRIICADVNGSYNILRKRKPDAFAHVDAKGIAAYVVQPVRLAITV

SEQ ID NO: 45959 - protein, 242 aa, unknown
  TnpB Polypeptide
VRRADGYYVQFCINVERTEESIPTGKATGIDVGLNHFYTDSNGETVPNPRYLRKSEKALKRAQKRVSRKKKGSSNRKKAINKLGRKHLKVSRQRKDFAIKTALCVVKSNDFVAYEDLQVKNMVKNHKLAKSISDAAWNQFAQWLQYFGKVYGKIVIAVAPQYTSQDCSVCGNRVKKSLSIRTHICGCGAVLDRDHNAALNILALGLKQAGITLNTVGHTEINAWGQNDLYSLVVTSTSKSTG

SEQ ID NO: 45960 - protein, 242 aa, unknown
  TnpB Polypeptide
MQQALKQLDTAWSNYFESLKKLKRGEISQDTVVGPPQFRKKGQNESFRYPDPKQFKLDQVNSRIFLPKVGWLRYRNSRTVEGELRNVTVRISGGKYFFSIQTRREVPKPVHTSNSAVGIDVGITRFATVSDGLVIEPLNTFKKHHVKLKRYQRVMARKQKFSNNWKKAKAKVNRIHIHIANSRRDFLHKTSTGISKNHAVVFIEDLRVRNMSKSAAGTMEAPGKNVRAKSALNRSILDQSAR

SEQ ID NO: 45961 - protein, 285 aa, unknown
  TnpB Polypeptide
MSVHAYRTIKEKFKAKHRDKDSYTTNNVNNNIRIEDTQIKPPKLGFIKMKQHREIPSNQVIKSCTISKSPAGKYFVSILVEYFQNVQPISPMRENVLGLDFDMKNLYTDSQCVRAEYPRFYRKALEKLAKEQRKLAKCTKGSNNRHKQKIKVAKAHEKVANCRKDFLHQRSRELVDSYDAIVIEDLNMKAMSQCLNFGKSVGDNAWGMFTTFLKYKLENEGKLLVKVEKWFPSSKTCHYCGEINKGLELSDREWTCQFSGCTINRDYNASKNIRDEGLRLLALIA

SEQ ID NO: 45962 - protein, 373 aa, Robinsoniella sp.
MIRVKRIRLYPTGEQEEKMWKSVGTARFIYNWTLGKQQENYKQGGKFICDNELRKQITNLKKSDLVWLNEVSNNVAKQAVKDGCDAYKKFFKGMTERPRFKSRKKTKPSFYNDTSKLKVNAKAVLLEKIGWVTIRPNQLPLSPCKYINPRISFDGKYWYLSIGLDQEQPYVELTGESIGIDVGIKDLAICSNGMTFKNINRTRVIRQMEKRLRRLQRKVSNKYQQNKNGKEYVKTSNIIKLERKIKLLHRRLANIRVNHLHQVTNRIVKTKPSQIVMETLNIKDMMKNRHLSKAIAQQCLYEFKRQIQYKCEWNGIACIEADKWFASSKICSGCGNKKQKLSLSERVYKCDSCGLVIDRDYNASLNLSRYELA

SEQ ID NO: 45963 - protein, 387 aa, unknown
  TnpB Polypeptide
MKRLLKSFKTEINPTEEQKARIRRTIGICRYVYNFYLGHNKALHDNGEKFMTGKSFSLWLNNEYIPNNPDKTWIREVYSKAVKKSIEDGCTAFTRFFKHQSDFPKFKKKGKSDVKMYFVRNNPKDCVCERHRLKIPTLGWVRIKEKGYIPTTKDGYVIKSGTVSIKADRYYVSVLVELPDNKTADNSNEGIGIDLGLKDFATVSNGKTYKNINKSAKLKKLEKKLIREQRSLSRKYENLQKGESTQRANIQKQKSKVQKLHHRIDHIRTDYINKTIAEIVKTKPSYITIEDLNVKGMMKNRHLSKAVASQKFYEFRIKLQAKCNENGMELRVANRWYPSSKTCHCCKNIRKDLKLSDRIFKCDCDYIEDRDLNAALNLRDAMTYEVA

SEQ ID NO: 45964 - protein, 393 aa, unknown
  TnpB Polypeptide
MSRYRLMPTAAQAAALLEHCRHARFVWNLALEQWLMWRPGSRSAAPEFAERARQLTEARAQYDWLRAGPQMVQQQALRDFDQAVQRFFAASHGRPTWRKAGRRDGFRIVGKQAARVAVLSRKCARVLIPKIGWIRFRLSRRLAPAKSYRVTRDTAGRWHIAFAVRPEPVSPPGNGRAVGVDRGVVVSAALSTGELLVCPTLAPAERARLRRLQRRLARGRPGSRRRAKVKSAAAKLGMRAVDRRKDWVEQISTRLARRFDVIRVEALDVRSMTRSAKGTVSAPGRNVRQKAALNRRILGNGWGLLVTRLEEKAVGRVEKVPAAYTSQTCSQCGVRDREARESQATFRCRACGVRMNADVNAATNIAAGRAVTARGADVVISAQKREPQPFTCS

SEQ ID NO: 45965 - protein, 388 aa, unknown
  TnpB Polypeptide
LIRTYKYRLRPYRFQTEMLDTLFWQARTLYNAALEQRIAVYKETGKGIDFADQCKVFRDERNTNPDIYGLLNATSVQQMLRRLDKALSAFFRRMKAGETPGFPRFKGYDRFKSVEYRYGDGCKLRYMENGQVRFYIQNIGEVKVIFHRQMPDGSTIKHVVIKRVNQKWYVCLMLEIPDKQIAPSQEYAAVGIDMGLKSLIATSDGFMAGNPRWLKESLRDLRIAQRKVARRKRGSKRRRQAVRQVARVHEKIANQRQDYWHKLTRELATSYSHVAVENLNLRFMNKNKYLSRSSYDAGLGIFMQLLTYKVEETGGQLVAVNPAYTSQMCSECGEIVEKDLSVRTHECPYCGLVLDRDVNAARNILQKAFYAPGLGVQDLTWAATPGVS

SEQ ID NO: 45966 - protein, 263 aa, unknown
  TnpB Polypeptide
MSWNELRQLALDLRKQNPEFQALHSQVAQQVAERFYRARQRFFEGFANKPKTKKPHKYLSLVYPQSGWRLSNIREVGQGENEKKKARLYLSKIGFFTVIIHRGFPSERVCQVCIKLNPSGHIYVVFLVEEGEVEAPNEQKCAGEVKKAVAVDVGITRLATLSDGRFLENPRPLERSLERIRTLQRNLSRKRKLSKNWLKAKRRLAKEYEYVKDFRRDVFFKLGALLVKEYDLLVLEDLNVAGLIRRVKPEGGGFGFTTPRSPS

SEQ ID NO: 45967 - protein, 353 aa, unknown
  TnpB Polypeptide
MYRTIKIKLDKSNELIQTARIWNAACQDVIDYGFAAHDYNKTRLNKATYKDLREKYPTLPSALHQTARDQASDMLKRLKFGKKPFKHPLGSVRFDIRTMKVFLESGYCTLTTAFGRVRYDFQLAKYYEKYATWKAMNAQLKIAENACYLNVQVEYPDPEPVTGDKRVGVDLGINNIAVCSDNKFWQSGPVKAVKGKYQYLRSKIQSKGTRSAKRKLQELSGRERRFQKDVNHKIANWILSKPYDTIALEDLTNIRNDKNNMKLGKWSFAELRSIIEYKATAIGKKVVAIDPRYTSRTCSRCGFQKKENRNGRTFKCKSCGFQIDADLNASRNIATFSISDRSRLPVNQPIVAG

SEQ ID NO: 45968 - protein, 384 aa, unknown
  TnpB Polypeptide
MRKAFLYRLYPSKLQAEKFQILLDMARTFYNAGLQERKEAWQKNHVSLNFYDQANQLKEIRATNPEYKSLNYSATTEILRRLDKTFKAYFRRIKSSEKPGYPRFKSRDRFNSITFPGYANHDGVGFHSNKLYIMNVGEVKIKLHRSLEGQIKTVTIKRQCGKWYAVFSNVVEAEPLPVSGRQVGIDVGLTSFAVTSDNEIIENPRYLREAEAALRKAHRKVSRRKKGGRNRRKAVKLLAKQYEKVKNQRKDFAHKLARNIVNTYGYIAVEDLQIANMVQNHHLSKSISDAGWGQFLGFLAYKAEEAGRQFVRVNPSGTTQRCSNCGTIVPKTLSVRIHRCPVCGLVLPRDYNSALDILRLGRSLWGITYDTGQCVPQETVAVSN

SEQ ID NO: 45969 - protein, 402 aa, Escherichia sp.
VKRLQAFKFQLRPGDQQECEMRRFAGACRFVFNRALALQNENHEAGNKYIPYGKMASWLVEWKNATETQWLKDSPSQPLQQSLKDLERAYKNFFRKRAAFPRFKKRGQNDAFRYPQGVKLDQENSRIFLPKLGWMRYRNSRQVTGVVKNVTVSQSCGKWYISIQTESEVSTPVHPSASMVGLDAGVAKLATLSDGTVFEPVNSFQKNQKTLARLQRQLSRKVKFSNNGQKQKRKIQRLHSCIANIRRDYLHKVTTAVSKNHAMIVIEDLKVSNMSKSAAGTVSQPGRNVRAKSGLNRSILDQGWYEMRRQLEYKQLWRGGQVLAVPPAYTSQRCAYCGHTAKENRLSQSKFRCQVCGYTANADVNGARNILAAGHAVLACGEMVQSGRPLKQEPTEMIQATA

SEQ ID NO: 45970 - protein, 240 aa, unknown
  TnpB Polypeptide
MDLHEKTQGVCRKLLSEISDSQYGAVRKYFASLLYEGYSCENQAADGDYSNAKILGIDYAMQGMAVFSEEIELEKAGFFRRNEKRLAREQRKLSRCVKESRNYVRQKKKVASCHEKIRNQRKDYLHKLSRRITDQYDIVAVEDIDMKAMGQCLHFGKSVQDNGYGMFRNMLDYKLAWKGKKLVKIDRFFPSSKKCSKCGKIKKELGLSERVYRCTCGNEMDRDRNAAINIREEARRMLAV

SEQ ID NO: 45971 - protein, 348 aa, Acaryochloridaceae sp.
LVCRVIWLNRVAGSRKVAKQKNRLVKAFKVGFVTYDARIFSFREKDWTVSLTTVDGRERFELAIGNYQIGALKGSNPKSATLVKRQDGSYYLQICLESEPPSPQESENVLGVDLGRTDIAHTSEGQTWEGKSINKVRDHYANLRAKLQHKASKGTRSTRRRVRGLLQWLSGRERRFQSWLNHNISKSLVQTAKSKQASIAIEDLTGIRERTNQQARTKTERRRSNSWAFHQLRLFIDYKALGAGVKVVMVNPRYTSQTCHQCLHIHPVTGKSYRKGKRFVCGHCGWHGDADLNGAKNIKTIGSIGNMAWRLLVVLRDSWRAAETSWANGCARAVPLRRYSARKTLLDP

SEQ ID NO: 45972 - protein, 389 aa, unknown
  TnpB Polypeptide
MLRTYKYLLRPDDRQSSGLEFLLWQGRLVYNAALEQRIHTYQETGKGIGYATQWAHFRDLRKLSPDTVGRLNASSLQQMLRRLDKAFSAFFRRVKAGERPGFPRFKGRSRFKSLEYIYGDGCKLRMNELGRRSFYVQNVGEMRICYHRPIPEEARIKHVVIKQVNQRWYVCLMLELSEQPTIQRQAGRSVGVDVGLYHLLALSDGRTVENPRWMRESLAELRILQRRASRREEGCRRRQKAYQQVARLHERIANQRRDYLHKVTNCLVGEYDLIGIEDLRLGFMNRNAHLSLSSYDAGLGELRQLLAYKAEEAGVLVVAVNPSCTSQRCSRCGGLVEKDLSVRVHACPDCGLVLDRDVNAARNILDLALQNPPGRGGQDITWPSGASVS

SEQ ID NO: 45973 - protein, 389 aa, unknown; identical to SEQ ID NO: 45972
  TnpB Polypeptide

SEQ ID NO: 45974 - protein, 358 aa, Bacillus sp.
MKNKISNQEWKDLRTRQLYSRGDKSKKGNLNMRITVDDCGQGWLEIANPLGRTNGKTKSPRIKVPIMIPYRFYHQITNVVMGKQIGVNSKGKPIIEHQKYSVEIIRKQNEFYVNITFDETEIGRVLDFKETPQSDVIAGIDVNPDRIAVSLCTKQGNFKGSKIFYLHNLNTFSTNKRATIIGQIVQQIKTWLLENNVGGIVLEDLKFQQSHDTDKYSNRNFHQFTYKKMLNSLIRMALRNGFSVKTVNPAYTSVIGKLKYSKNFGISDHEAAAFTIARRGLELQEQLPQEIILLLKNQITTKLRILVASMEESKKNTQKVYKKWLQTIQTWKEYHNWKLWSILHKTVYMNNQQFVFKI

SEQ ID NO: 45975 - protein, 545 aa, unknown
  TnpB Polypeptide
MAKTTNGKFWNDECEKVSDLLWKPSLAVNHKPEERDNFKCDNKYITFNYYSDNVLINNKLKFKDIPQLNNTEEKNKLMDKLLKIEDSRYKKDIESNKIRKIKLTKEQLTAKHNTQLLKIQNKIGQLDGFIRSRRIQLLPNDFQKHVFDIWFNETTVIYNQLLTEFTQYYIKFKEIASDNKELVNLLKTNTEFPLSLQKLRNLKIHDIINIYLEDQLIHKLETPFCVIANTIKEFVANVKSNLTKLAENKIDRFTFKHKNFNRKIRTISIDSKYVSENSVYPDSLGKLLQTYEDLKGFSWQNVEHDFKIVYDKYDSKYYAHIPKYVYRNPNVLNKKPIVVMDPGERTFQTLYGLDHVISIGDNLRETISKRLLRIDSLKSKLDTPGSNKYNLKLNRKTRVRKYRYKKAIDRHHKKIEYLQRELHYKTAIYLCENYQRIMVTDFSSKKVSSKDGDLDTMSKRILGKISHYRFRQRLQQKCEEFNCQYLEVNEAWTSKTCCNCGYIHAKLGTSKVYDCPKCKQKRDRDVNGAINILLKNRKLVLIEDQ

SEQ ID NO: 45976 - protein, 372 aa, Symploca sp.
MLVLEYKIKAKQAQYQAINEAIRTVQFIRNKCLRYWMDTPKASSIKRFDLNKYSTELRNEFKFVKDLNSMACQASAERSWLAISRFYDNCKSNKTGKKGYPRFQKDNRSVEYKTTGWKIHPTKRRITFTDKKGIGELKLLGTWDIHTYPAKTIKRVRLMRRADGYYCQFCVNSECVDAQPKTGHEIGLDVGLESFYTDSNGYQEPNPRFLRKAESDIKQVQRSIYKKQKSSTRRRKARARYSKKHLRVSRQRNEHAKRLARNVCKSNDLVAYVRAACRRQDLRVSNMLKNHCLAKSITDASWYQFRQWIEYFANKFEKLAIAVPPQYTSSECSQCKRVVKKSLSTRTHVCQCGCVLHRDTNAAINILHKARV

SEQ ID NO: 45977 - protein, 373 aa, Paenibacillus sp.
MLVSAQEVSSKPLVHQAYKYRIYPNTEQKQLIRRMFGCCRFVFNYFLEAWNQRYVETGKGLSYHACATQLPGLKAQYDWLKEVDSIALQSAARHVADSFDRFFKKQNQAPRFKSRKHPIQSYTTKFTNGNIAMEGSRLKLPKVGWIRFANSRKLEGRILSATVRKNASGKFFVSLVCEVQKNPLPQVDTHIGIDLGLKEYAVCSNGEHIANPRFYRQYEKKLALWQRRMARRTPGGSNWKKARQHIARIHERIANKRNDFLHKLTTRLIRENQTISIEHLRVANMIQNPKLSKSIADASWGEWVRQLTYKAKWYGRNLRIADTFEPTSQRCHVCGTIHPEVKNLSVREWTCTPCGTIHDRDENAAHNIEQVAV

SEQ ID NO: 45978 - protein, 421 aa, Acaryochloris sp.
MLLNQTNRLRLDKQQSDALKQMCHLSKNMFNVGLYNVRQYFFQERKYLHYEGNYHYVKENENYKDLPTDIAQQTLKIVDRSFRSFFKLLQLKQAGGYQAKVSIPGYLPKDGYFLLTIPIRPRDWAKLPSRDWVFNIPMSRPFRRQWGVVPITIPERLRDKVVKEIRILPKLGARYFDVSYVYGAEEALQVEQTGEMLGIDLGLDNFATCVSSTKQSFIMDGIAIKSINQWYNKENARLQSIKDLQGISGLTHNQAKLLDRRHHRVNDFLNKSARYVIDWCRDNGISKIVIGYNPDLKQGVNMGKRNNQKFTQIPIFTFKRKLESLCERYGIECIEQEESYTSKSSSLDRDILPAWNADNRPKHQFQGKRIKRGLYRTAKGWLVNADANGALNILRKHTSKLDDLLGEFRGCLAQPVRVKCS

SEQ ID NO: 45979 - protein, 357 aa, Escherichia sp.
  misc_feature (300)..(300): Xaa can be any naturally occurring amino acid
MASWLVEWKNATETQWLKDSPSQPLQQSLKDLERAYKNFFQKRAAFPRFKKRGQNDAFRYPQGVKLDQENSRIFLPKLGWMRYRNSRQVTGVVKNVTVSQSCGKWYISIQTENEVSTPVHPSASMVGLDAGVAKLATLSDGTVFEPVNSFQKNQKKLARLQRQLSRKVKFSNNWQKQKRKIQRLHSCIANIRRDYLHKVTTTVSKNHAMIVIEDLKVSNMSKSAAGTVSQPGRNVRAKSGLNRSILDQGWYEMRRQLEYKQLWRGGQVLAVPPAYTSQRCACCGHTAKENRLSQSKFRCXAHVVSFSIALWRFRMRIMRPVINTSLTGKWLPGWLSGKTPLKRNGLKIRPHSHCNSH

SEQ ID NO: 45980 - protein, 313 aa, Escherichia sp.
QNENHEAGNKYIPYGKMASWLVEWKNATETQWLKDSPSQPLQQSLKDLERAYKNFFQKRAAFPRFKKRGQNDAFRYPQGVKLDQENSRIFLPKLGWMRYRNSRQVTGVVKNVTVSQSCGKWYISIQTENEVSTPVHPSASMVGLDAGVAKLATLSDGTVFEPVNSFQKNQKKLARLQRQLSRKVKFSNNWQKQKRKIQRLHSCIANIRRDYLHKVTTTVSKNHAMIVIEDLKVSNMSKSAAGTVSQPGRNVRAKSGLNRSILDQGWYEMRRQLEYKQLWRGGQVLAVPPAYTSQRCACCGHTAKENRLSQSKF

SEQ ID NO: 45981 - protein, 381 aa, Escherichia sp.
VKRLQAFKFQLRPGGQQECEMRRFAGACRFVFNRALALQNENHEAGNKYIPYGKMASWLVEWKNATETQWLKDSPSQPLQQSLKDLERAYKNFFQNRAAFPRFKKRGQNDAFRYPQGVKLDQENSRIFLPKLGWMRYRNSRQVTGVVKNVTVSQSCGKWYISIQTESEVSTPVHPSASMVGLDAGVAKLATLSDGTVFEPVNSFQKNQKKLARLQRQLSRRVKFSNNWQKQKRKIQRLHSRIANIRRDYLHKVTTTVSKNHAMIVIEDLKVSNMSKSAAGTLSQPGRNVRAKSGLNRSILDQGWYEMRRQLEYKQLWSGGQLLAVPPAYTSQRCACCGHTAKENRLSQSQFRCQVCGYTANADVNGARNILAAGHAVLACG

SEQ ID NO: 45982 - protein, 403 aa, Paraburkholderia sp.
MQRLQAFRFELKPSGEHARKMRQFAGMCRFVYNKALALQKETHEAGGKFIGYVPMAKRLTAWRHSLETPWLKDAPVHTSQCALRDLDRAFVNFFEKRTAFPRFKRKGMGDSFRYPDAKQIKLDRRNGRIALPKLGWLRYRNSRMVLGEVRSATVSLRAGKWYVSILTARQVEQPVPHGPAVGIDVGVVRFATLSDGTFIAPLSSFKKHEQRLAKYQRRMASKVKGSANWKKAKVRIQRIHARIANARSDFLHKASNAICKSHAMIAVENLQVRNMTRSARGTVKAPGHNVRAKGGLNKSILDQGWGEFRRQLEYKAAWHGGLFIAVAPRNTSRTCPCCGHISADNRKTQALFACVKCGHEAHADHVGAINVLAAGHAAMACGGTMLSGRPVKQEPTEAQAIVA

SEQ ID NO: 45983 - protein, 377 aa, Nitrincola sp.
MITATKVRIYPTPDQAGFLNQQFGAVRFCYNKALWIIRSQYQRHGVSLRAKRDIKPLLAVAKKSRKYHWLKDFDSMALQQAVINLDTAFTNFFNPKLQARFPRFKSKRSKQSSYHCTSVSAGADWIKIPKMSSIKARIHRELNGSIRSITISRTAAGKYYASILTDDGAIAPAPTRVLDRVIGIDMGLTDLCVTSEGVKTPNPRFLKKAASNLRRKQKALSRCQKGSRGWAKARLLVAKAHERLTNARADYQHKLSRQLIDDNQAVIVETLKIKNLLKNRTLAKHIADVSWDSLIKKLTYKAMHAGKHLVKIDPWFASSKTCACCGHKIASLSLAVRTWDCPACGTTDIDRDINAAINIRQQGLIHLRAEGLSVPAN

SEQ ID NO: 45984 - protein, 314 aa, Erysipelotrichaceae sp.
MSLRCSLFDLDNAYNKFFKEKVGYPKFKSKFNKNSFRTNMITIEYKGRTYYNIKLDLIGKTITLLKIKNMKIRGYRKINKINGRIINTTVSRELDDTYYVSVLIEEDIINYKFMPTTIIGLDLGIKDLVITSNFKKYKNEKVIEKYEKRIKQKQKRLAKKERGSHNYYKLKREIARIYKKIKNARKYLIHHITKDITDNNDIIVCETLKVKNMVRNHHLAKALTDASFSEIIRQLEYKIKWKGKKLYKINTFYPSSQICSHCGYKNPLLKNLNIREYTCPNCNYELDRDINASVNIMFEGLKLYMNEVSAYNLI

SEQ ID NO: 45985 - protein, 356 aa, Desulfotomaculum sp.
MIIVHRFHIEPTKEQEQKLFRTLTLCRWLYNAALEQKEICYRQRGRSPSCMQQKNELPTLKKELPEYKQVNAQVMQDCLRRLDNAFQRLFSGLAGYPHYKDRDHYRSFTYPQADKQDQFKKPGYIYLPKIGYIKMNAHFAFDPLKVSRVNVKYHNGKWYVNLTSEIAEAEAVEIVNKIGIDVGLLTFAALSDGTKIDNRKYFRKSEKKLARLQRRLSRKKKGSNNRRKAKTKVTWLHDKIANQRKDFLHKASYGIVKKYDLIAVEDLSVKNMIKNHHLSKSIADAGWGKFVNYLEYKCLKYGKTFVKIPPRGTSQTCVCGAHVPKDLSVRVHKCPECGLIADRDIVSAMVILQRAS

SEQ ID NO: 45986 - protein, 365 aa, unknown
  TnpB Polypeptide
MKINKAFKFRLYPNDQQKQFLAQSFGCARVVYNYFLRQRIDYYAQTGKGLTYHNNALTLTQLKRQPEFEWLANVNAQSLQQALRNLDTAYNNFFNKKAKFPNFKKKSNKQSFNVPQHFSIHDNLLDIPKCKGIKIKLHRDIKGTMKSIAISRRPSGKYFASVLCELEIPEPIYSGGEIGLDYGVKAFITTSDGEIIESPNYLRKSEKRLEQLSKAFSKKQPNGKNRYLVQKQLARQHEKVSNQRQDFLHKLSKQLTCDNQAIYIESLAIRNLIQNHCLAKSISDSGWNTFVNMLKYKGNWYGCRVIEIDRWFPSSKRCHICGYINDNLTLKDRSWLCPECNTNHDRDVNASINILTFGRAGIAQT

SEQ ID NO: 45987 - protein, 476 aa, Corynebacterium sp.
LTGVQRIHRSLAEVRRKLPGKKRSAPGCRRERQQREQADQKRGRNQPSTKKPHRFSFETDVLTPEIRRHREAAKLLWQRDHGKRWSPQHQERLDAVWSPDTKGARPFLHLVNRRCPVSGIKNAAEAMKNYYASKTGRRKGRAMGKPQRKTHRSRKSVTIHPDSRMGPKGCPPPRGQPQITGYKHLYLANLFSHASKPDKKDRILRVRVHGSTRRLVKALQNHPDAKISNFTISQKGGYWYVAVMVKSAQRQPSLTRRQKQADTLGIDIGIHNYLSLSDGSTVIQLPPLLQRNIKRSKNLRKKLARSQKGSNRRRKLIATIKRVDHELKLQRDGFVHQITAELARNYALIGIEDLNVKGMTRSARGTVDAPGTNVRAKSSLNRRMLEGIPGEFRRQLEYKTKRTGAALEVIDRFYPSSKTCSRCGWKNENLSLSNRQFTCLECGLSLDRDHNAALNIAAEAERKHLKDTKSPKPSHD

SEQ ID NO: 45988 - protein, 492 aa, unknown
  TnpB Polypeptide
LAALASEVRDISAYATFVVRNDVELGDELARVAAAQPTTAGRRAGVTMPDFLVSGKSGRSRKEMLVQHRVVTEYRSWQERVKAANGESSKYVSRGWKRTVDASAPSYGGDYVNLGAVNKQYAAIENNPFTDGEIVLKMVIQGQWHRLIFNFDNERFTEGKVALPIIKVQDGQPVFIFTVVTDNPIVQFSGGYTIGVDVGINNYATVVVRDVKTGRIAYETTLSQRVHSLWNSVRASQHQVRALRRKAATLLHDRQERMAALDEAQLHREAASRKKRELAILAAQEITDLSHLWGNAVVAVEDLSWIRNTMQNGRWNRGELVRWITHYVSQNGGWVVDVSSFNTSQQCYKCGARVTHPTHEVSVCAEHGTMGRDVNAAANIAARAVPRVAKARVTRAKNRKLRPQAPLRTPPARDSLKYPGRDRAKNKPTPKRKNHRRTVKEVILPLRPARAQAPCLDARVLADGGTLRASGTSLAALKQGNRAYKSRLCCLI

SEQ ID NO: 45989 - protein, 511 aa, Sulfurihydrogenibium sp.
VGKERMSSEEKERTLEDREDRIFGSYLFINYANKGKIEKVKNALTEYRKTAKDISKFLWNIFFHTGKLPHRKKINIKHIPSYLSERYKYVCLWQAYDVLSSYIANIQYQFANIVFGSSLSKEDKLILLALNNVKGWLIYDKDEIEIYEYEKKGKKRIVKVSEFHRKLAKKIFKHLLGKNRRPRFNNISMHLDGKVVEISKKEKDGAKSFDYWIKISTLEKGKPIYIPLKANTYAEKVEGEFLNYCQVIENDGKIEFRIIKQLKKKEYTPLTDEIAIDLGLNPLFATDKGDLFGRSFFDILKAFDKKITKRMASLQKRKIKPRDDKKYRKYRDNLRDYLKNEINRLINVIVETYKPKRIIIERLDFRSPELSKRLNRMIQNFGKRYIKQKLERLQQLYGIEIIEINPAYTSQECSSCGYIDKKNRKDTQEFECKVCGNKTNAQVNGAKNILKRSSLGSLYLTKKQVLKILIERYLERHKGCKSPPLDVIKGNPYFKDYLDSILNPCQNLTPS

SEQ ID NO: 45990 - protein, 538 aa, Sulfurihydrogenibium sp.
MKNSNKKKKNSKKELSQNTELRVFSIRIKNDKLEKELKHLLFTYKHFENILLILISQNYNLYKDGKDTNDFKLLTSPQLMRNALYDYNSKHSTQLEYLKNKYKDNQLWQALKETAKKLKPHNVVEIIKRVKANFKTYFTNLETYKQNPNLFTGMPKPPKPKKLSKIIDYSVELDKYNSLSFTRLEKENLVGINLSDHMVYIHIDKRQIEKLAEVSKLYSARLVYDNDNLYLQISYLKNISRFTSHVSHKYASIDIGVNNLMAVFVDDETTSSLIVDGKPFKDYNSKFNRLIPKLNESKSKEVAEWAVSKTGSKYPAKYTEKGKKIGKFISYLYAKRNRFFHDQFHKMAKRVVEYLYLHGITDLFISRNLAELKNNGECNLDKATKQSFIQIPFIKLLQNIEYKAQEYGINVHYVDERYTSKASCISDDIESIQESPDLTNAFNGRRVKRGLFLDTIINKVFNADINGAVNHIKVATGKSFRWLKNKLFKLCNPIKIKSDYEFCRLLKNLQNSGSGNSVPFIGVEASQSNKLIENISFC

SEQ ID NO: 45991 - protein, 403 aa, Sulfurihydrogenibium sp.
MLKAYRYRIYPNKEQRIFFAKTFGCVRFVWNKMLAEKIEALKNKQPLPTITPAKYKEEFPFLKEVDSLALANAQLNLEKAFKNFFKNPQHYKFPKFKKKKDKQAYTTNKVKNNIKIDFEKGLLYLPKIKDGIKIKLHRKFEGKIKSVTITKTKSGNYYVSILVETEDVKNKVKQSKNKICGIDLGLKEFATITDDTGTYKIEHPKYLLKAEKKLKRLQRALSRKQKGSKNFEKARRKLAKQHEYVANLRNDFLHKLSKAIIDENQVIVVEDLSVKGMQQNPYLSKSISDSGFGTFVRYLEYKADWYGRTLIIADRFYPSSKLCNVCGYKHKQLKLSDRYWQCPICGTHHDRGVNASINLYKVGLERPEFKPVEHALADDRIQQWVPKKPSCCEAGSHTFYKVE

SEQ ID NO: 45992 - protein, 557 aa, Sulfurihydrogenibium sp.
MITLQCQLEFENRQDKEIILDLMRRFSSASRYAYQRLLEGKKRKDLKKQLSRLFNINTRYSDDAIFLAQSIILLYKERQQNPKKVIFGSRKLFEQLKKNHLTGKRRKELKAKWKESRQGNLYSRGDKSKQGNLNLRFHRINNELYLRINTGDRQYIYARVIRSVKREKNKWIDFVFMLENAYQTDEWFAYSVRLKTKNSKIYAFISIEEKLPPITIKRDNGIIGIDVNAYPFHLALSFTSKDGNLEKYQSINLNELLEANSEKRQYLEWLIAHKIIKIAKKENKAIAIENLNKLPKGKRGDGFAKLRSKLQKWSYKRLLDKIEILAKRNGIEIRKVNPAYTSVIGKLKYSPQYNIDKDIAGAYVIARRGLGYKEKLPKNYKELLNDIDFLSYTIARIEDSITKLKQKIKEEKNEYKRSKIKSKLAKLRKNLKTLQNHVSRFTSPVSRSESGKSKTATQHPVNQRKEQVRGLPTGRHKSWQVLSIALAFCCFERSYRDLSPLNRVIVSKDWTVVANRLAPVLGAGTMTLPKYRLLGSEVSEMAEYKYPNPSCSFIQFG

SEQ ID NO: 45993 - protein, 533 aa, Sulfurihydrogenibium sp.
MQDKEIVLDLMCRFSSAMRYAYQRLLEGEKRKDLKKQLSRLFNINTRYSDDAIFLAQSIITSCKEREQNPKKLIFGSRKSFEQLKKNHLTGKRRKELKTKWKESRQGNLYSTGDKSKQGNLNLRFQWINNELYLRINTGDRQYIYAKVVRDVKREKDKWIEFMFMLENAYKYGEWFPYPVRLKVKNGNVYAFISIDEKLPPITIKRDNGIIGIDVNAYPFHLALAFASKDGNLEKYQSISLNELLEVNSEKRQYLEWQIAHKIIEIAKEENKAITIENLKKLPKGKRGDGFAKLRGRLQKWSYKRLLDKIEILAKRNGIEIRKVNPAYTSVIGKLKYAPQYNIDKDIAGAYVIARRGLGYKEKLPKNYKELLNDADFLSYTIAKIEDDIKRLKEDLKEEKNEYKRNGLKSKLAKLRKSLKTLQKYLESGKSESSSRQPVNRRKEQVRGLPTSRHKSWQVLSIALAFCCLEKSYRDFSPLKRVIVSKDWTVVANRLAPVLGTGTMTLPKYRLLGTEVSEKAEYKYPNPSCARFA

SEQ ID NO: 45994 - protein, 421 aa, Sulfurihydrogenibium sp.
MTKAEKIKQTIKETKERRKNLIPVIYQLKIQNLSKVKEEKLNRVFLEAKWLYNWIVADINRINISTKEIKEVEIKVGNEFEKREIKYLGSQLKQVIQDRVKNNLKALKSLKENGHKVGRLKFKKSISSISLKQYKVSFDIDFERNKVRIQGLGWFRVLGLHQIPQDYEIANAQLIKKPSGYYVYLTCYVKKEYFERDKVGDAIGIDFGVANKLTLSNGLTVDFKIEESKRLKKLQKELARRKKGSKNWIKTQKKIQREHERLTNKRKEIHNKLLALFRHYGTVIYQDDNIKSWQEGWFGSQIQHSGIGMLKARLKDRLATIPVDRFEATTQECCVCGYKQKISLSNRIYCCPVCGNTINRDLNSAINILKKGLDLSQNQVVGVDRSDLKPVEMALATKILGSNPYVKVDVIDEAGSPRFYK

SEQ ID NO: 45995 - protein, 395 aa, Sulfurihydrogenibium sp.
VFNSSLNKEDKLILLALNNVKGWLIYDKDEIEVYEKDKKRKVKVSEFHRKLAKKIFKHLLGKNRRPRFDNISMHLDGKVTEISKKEKDGAKSFDYWLKISTLEKGKPVCIPLKANTYAEKLEGKFLNYCQVVENDGKIEFRIIKQLKKKEYIPATDEIAIDLGLRPLFATDKGDLFGRNFFDTLKAFDKKITKRMASLQKRKIKPRDDKKYRKYRDNLRDYLKNEINRLINVIVETYKPKRIIIERLDFRSPELSKRLNRMIQNFGKRYIKQKLERLQQLYGIEIIEINPAYTSQECSSCGYIDKKNRKDTQEFECKVCGNKTNAQVNGAKNILKRSSLGSLYLTKKQVLKILIERYLERHKGCKSPPLDVIKGNPYFKDYLDSILNPCQNLTPS

SEQ ID NO: 45996 - protein, 373 aa, Bacillus sp.
MLVNKAYKFRIFPNNKQEVLIAKTIGCSRFVFNHFLSEWNNAYKETGKGLTYNTCSAQLTKLKKELLWLKEVDSIAIQSSLKNLAGAYARFFKKQNEAPCFKSKKNNVQSYTTKHTNGNIAIVGSKIKLPKLGLVRFAKSREVNGRILNATVRRNPSGKYFVSVLVETEVYEWPKTNRSCGVDVGLKDFAILSDGSIYRNPTFFRTLGKTLAKEQRILSRREKGGSNWHKQRIKVARMHERITNARNDYLHKISTEIIKNHDVIGIEDLQVSNMLKNHKLAKAISEVSWSQFRTMLEYKAKWYGKQVIPVSKTFASSQLCSCCGYQNKDVKNLNLREWDCPSCQTHHHRDINAGINLMNEAIRLLTAGTVGLA

SEQ ID NO: 45997 - protein, 376 aa, Enterobacter sp.
MKRAYKYRFYPTSDQVELLARTFGCVRFVYNSILRWRTDTYYECQEKIGYVQASARLTALKKEPEFTWLNDVSCVPLQQSLRHQQTAFANFFAGRTKYPAFKSRRHKQAAELTASAFKYRDGKLYMAKSKTPLNVRWSRLLPSVPSTVTIIKDAVGRYFVSCLCEFDPVLLPITGKTVGIDVGLKDLFVTDNGFKQGNPRYTAKYAARLALLQRRLSKKARGSKNRARARLKVARLHAKIADCRMDALHKATRKLINDNQVVCVESLKVKNMIRNPKLSRAIADASWSELVRQLQYKGEWAGRSVVAIDPFFPSSKRCSCCGFTMQKMPLNVRKWHCPECGADHDRDVNAARNIKAAGLAALAHGEPVNPESHKAA

SEQ ID NO: 45998 - protein, 401 aa, unknown
  TnpB Polypeptide
MLKAVKVRIYPTDEQSITLAKHFGCTRWLWNHCLSVMTETYKTTGKGISAFNMKKQIPILKAEHEWLKECYSQCLQQSVLNLSQAFQNFFEGRAKYPNFKSKHYRQSVQFPQNVKVISESAIKFPGLLGTVTAKIHRPIEGTIKTVTVSRNPDGKYFASLLVDDGIEKPESSSEGKAIGIDLGLTDFAITSDGSKFANPRHLKKHERNLKRKQRKLSRREKGSKNRNKARLKVAKVHSKIARVREDFHHKLSRKIVNENQVIVVEDLAVKNMVKNHNLARAISDVGWGQFCTMLKYKAEFEGKVYLEIGRFFPSSHLCSNTLLTLEKMDLSVRSFVCPHCQERHDRDINAAINIRNEGLRILASGSGASALGGTVRPKGGRRKSTLSEASPDEQRSPRSIA

SEQ ID NO: 45999 - protein, 394 aa, unknown
  TnpB Polypeptide
MTNRADAPCVTLTLRLKVRPESYAWLNAAAVEVKQTWNFCNERAATVLGNLGRWLSGFELCYATAGATLYMKRIGADTIQRVCTEYAAKRNAVRKQKLRWRVSRGVRRSLGWVPFKAASVKRKGRHLRFAGKTFRVFEAKRLDGVKWKQGCFAQDAVGDWWLCLPVERALERSVAPCEAVGIDLGLASVATTSDGETLEAARFYRDAEQRLAHAQRRGHKRQAKRLHRRVANRRRDALHKFSRRIVDQYENIVVGDVSAPKLARTRLAKSVLDSGWGMLRQMLRYKGEHAGRSVEVVSERNTSRVCSQCGALSGPQGLRQLAVRVWTCCSCGEPHDRDVNAARNILARAKVLASVSGNESSDSPVPPSRLSRPSRGRERYGEDGGMSTGSVPIL

SEQ ID NO: 46000 - protein, 365 aa, unknown
  TnpB Polypeptide
MKLTAQIKLQPTPEQAGALKRTLETANAACDYISGAAWESKRFGQYKLHHLTYAEVRAKFGLSAQMTVRCIAKVADAYKLDKETKHTFKATGSIAYDERILSWKIKQSTISIWTMDGRMAIPFVCGERQRQLLKTRQGESDLATAKGNYFLFATCNVEEPAPMEFTDALGVDTGIVNIATDSDGEVHSGKTIKNVRFRHRRLRQKLQRKDTKSAKRRLRKLSGKEQRFAKWTNHNISKRIVAKAQHTGRAIALENLEGIRDRVRVRKSQRATLHSWSFFQLRTFIEYKAKRVGVSVILVDPRNTSRTCPSCGCIDKANRPSQSKFSCVSCGFSGHADTIAATNIGRRGAVNRPYVSDRQGQSSGF

SEQ ID NO: 46001 - protein, 520 aa, unknown
  TnpB Polypeptide
MNDKLNHVLKFDKARECKWYNNKTIDNSIHLWYPNNIKFTKNNKYSNKNYNIENCININQSKFKFNIKNVASSYEDSLNEINKKYNLKLSKLEQNYINDKDKLNIQIKTLNTKKEKEINSINKVLHTKPYVLQLNNNQTNTIFNWFFECDRVYNRVIYMFNNKNPNFVMDYRKLKLVIFNDLYPDKKPVPYDILTDEVRIALSNIKSCMTNLKNKNINNFNINYRSFNLSNRRSILIPYKSITNKGIYSTILNKISNFDKLLKYIEDIKNIKSDCRLVYDKITKKFLLYMPIYKDKRNIKNRNEIVALDPGEKIFQTYYSSNECGKIGENIRLIILKYQDKIKKYQRILKKNTNKNKKKLKNKITIKKKIRKYYQKIKNIVKDLHHKTAKYLCEKYDNIIIPKFETSKMIKNKNTNTNINKDEMKRISKMNKLNKKVKFVLSNLSHFKFRQYLSYKCVEYDCQLLEVTEEYTSKCCSRCGFLSDNYEKREKICPYCNLKIDRDINGSRNILLKTLNEIGR

SEQ ID NO: 46002 - protein, 540 aa, Sporolactobacillus sp.
MQSKKKKTKSKKTVTKNVFLYGHPTKVKQDLLQTTQKAYVHQINHFINVLMADLPKYLLILLINDKKNAKIGQLEKEHRTSLGSAYGQNAVRHAITELHNHLIRQKNKLYGWMQSHEPDLLPYACFISLLHASVLDEDELTILKTLIQREQGKGKPDAEKLAAYTDFFNELSTVTSEQRAENRAIVHALYLERLENTRLPFVKKAPLQLDARLATLEEAKNIRSSYVLSVKLTGSKHRVLFPVNTSRNGRRRLAQYKTGGMTVSWEQGKIRVGVPIKKNITKQKWTEKVGADAGINDLFHSSIGHAYGSFSGRVKQFEELLETRTGHRSSLRNVMKRYQKELKKTDDLWQQSFLRTKIAHIAKTLNGRKSLQKVQRRYRHQRDLAMHEAVNQLFEEVRQDHLVLVLEDLELTNFDRGKKANKRNSSWIRGQLFQKITERLNWYGMPYVTVDPAYTSQMCHACGHLDKTSRSGKSFVCTVCGHSDDADHNAALNIKDRADDAEIKEIAEKYPYNTKKRHQAIKEHIEERYRSQHPQVAPAV

SEQ ID NO: 46003 - protein, 545 aa, unknown
  TnpB Polypeptide
MQINQSDEQTEYKQMLRTYHKLSDRHVLVLETDLSYQDKCKIFHYADLERKAGNELVALMKNNYEQLIRTKKYRKLKSLYVKYINANDKKNSKLIANQLNDLQRQYKVTWDFCRTSMIPLGKKYGLDAIFALTKAEDVWRAVEKCLYSDGNTIHFSKREDLPNIRAKQSNRGIVIHSSDNRLRFKFNGLKFGVLIKDRFENDEISAILDYLSEPEIKDNLAVNTLKEDGICISTYRPCYATLVCKKIRGKLRVYIHITIEGLAKPKYDKFGNIKHKLGKGTVGCDIGTQTIAYTSDNEVGLKNLAERGTSISANERKERLIYRAMDRSRRTTNPQNYNSDGTVKKGHKTWNYSNRYKRLRAKHTELCRINAINRHLAINEDVNHLRSLGDRFVTEPKNAKKLQKRTKQTTLNKKGKINRKKRFGKSIKNRCCGYFQSQIEKKFKCTNGTYIEVPNDYRASQYDHTADNYIKKKLSERMYYLSDGTQVQRDWYSSYLLYSIDYVTKTIDKNKCIANFENNLNKEKALIDWIKTNNIKILNSGIKVS

SEQ ID NO: 46004 - protein, 455 aa, unknown
  TnpB Polypeptide
MNHYTSKGGNAMNIESSYAAEILHADKIFRNTVRIYREAVSFCIDVFEKEWNSLSVIKNANTRRNACEALIHGTSKRQAKYPEFDKLFYKMPAYMRRAVAVDAYGCLSSYHSDVEKWKSKGSKGKEPTLRMDRNCFPTFYRKGACLGNERTEDTVQLKLLVNNDWIWVDFHLKPTDMKSVRKHAADGKISAPTLERKHKKWYLRYAMEHEKELNKTKLKNQRVLAVDLGINTVATCSVMDSEGTVYARKFINFPYEKDLLNRTLNRIKKVQRKYGNHNLSKIWRYAKSLNDQIAYKTADAIVNLAIKYGCDMIVFEYLDTSGKKRGSKKQRLHMWNKRTVQTVATHKAHMNGVRVNRVCAWGTSRLAYDGSGRVLRGRDAGFDTYELCRFQAGKIYNCDLSASYNIGAKYFIRELQKTHSVMKWSRIQAKVPECVRRSRCTYGTLLKINSVLAVA

SEQ ID NO: 46005 - protein, 353 aa, unknown
  TnpB Polypeptide
MLCYIQTVNELVSTAVSGTSIKDYTTADIEAYLPSALKNQCIRDAKSVVRKHYRFCHKAVLKNRGFAKRGSDIWVTAPILPVLRKPCCYINNQNYKVKDNCIEFPVLINGKSKRISVLIKLTDRQKALFSGTRLGTMRIVMKNRTLVAQIVYEVTEPGLKPEGNTMGIDLGIKCPAVSYCSDGNIRFYGNGRRNKYIRRHYAYIRRKLQVSKKLKAVKRIDDKEQRIMRDIDHKLSHDIVKTAVEHNVKVIKLERLQNIRSTTRKSRKNNHSLHNWSFYRLAQFIKYKARLAGITVEYVNPAYTSQRCPICGNVHHADDRKYICECGYHGHRDLVGAINICNSTEFVGNRQTA

SEQ ID NO: 46006 - protein, 557 aa, unknown
  TnpB Polypeptide
MKTIVGITEELNFNQLSKLDSFVMLYNKILHKLYVDLFIKKLPIKELCPLYQAKYLISKRHFDSIRKTLEGKVSSILALNKNYIQDTKDKIKSIEKDLSKQTKTYNSYKDKYKKEGKLSLIETNLKFKVHNKIVYNYIRLDRLKAKLLKLEYIRDTGNVRLCFGSNKLFRQQFNIGVNQNPFKSHEQWYEEFNYQRNKEFTLIGSKDKSAGNLNAQITHIKDNLFNLKLNIHPHANKITDKYINLNFKIDYEVNTLINIIKNNNGKNKELWQALTYKLIKQKTKYNRDKYVVSISFEKHLIKQTYTSKNKGCIGVDINQDHLAVSNLDNKGNLLTIYTFNYDLNGNKHQNNNSISLAVKELMLLSTKLNKPIVIEELDFSAKKKNLKSGINKNRNKQLSSFAYSKIIELIKARAEDNYVDVREVNPAYTSMIGSIKYSVRSRISVHHGAAICIGRKGLFNKEKTIKVLDKETNKEVNKKVIKEYKEKRISSRNRQIKSLVLPVRNGLNSVVYWKELKENMVKDKQHEKESSSNVASKSTSLGNSDMPVMNASVGTKS

SEQ ID NO: 46007 - protein, 412 aa, Nonomuraea sp.
MAVQLRYNVRLYPTPGQRQALARAFGCARVVFNDGLRARQAAREQGLPYIGDGDLSKRVITEAKKSPERSWLGEVSAVVLQQALADLNTACRNFFASLSGKRKGPKVAAPRFRSKRDNRQAIRFTKNARFAITPGGELRLPKIGDVAVRWSRALPAEPSSVTVVKDAAGRYFASFVVEVTEKPLPRAAPEAGIDLGLGHFAVLSDERKIGFPRFLRRAEKKLKRLQRALARKAKGSNNRAKARLKVARQYAKVADARREFHHRESTKLIRENQAIYVEDLAVDGLARTRLAKSVHDAGWSAFVGMLEYKARLYGRTFHRIDRWFPSSKLCSACGAVAESMPLNVRSWTCPCGAVHDRDVNAAKNILAAGRAERLNASHESGRDGARRSGGGQVRPPHQVAQPVEAGSLRGAA

SEQ ID NO: 46008 - protein, 377 aa, unknown
  TnpB Polypeptide
MQLSETVKLYMSKTEYTLVKATMDSYISTVNRIVSDAVNGVSIAKLTTKDVHADLPSALANQCIRDAKSIVKKYNKACRDVDRKNAKLAKQGKDIKAVAALPVMKKPCCYINNQNFKVNGDHIEFPVMINGKSKRLSIRTKMTDKQKSAFASYKLGTMRVVVKNNSVVAQIVYHVDESVCPDDGNIMGVDIGIKCPAVSKCSDGSVKFYGNGRKNKAMRRHFAAKRKALQKAKHQDAAEHINHKEQRIMKDIDHKLSHDIVATAAAHNVKTIKLEQLQNIRSTTRTSRKNNHGLHNWSFYRLAKFIEYKAKLAGIEVLYVNPAYTSQRCPVCGNVHHANDRDYTCKCGYHIHRDILGAVNICNSTEYVGDSNIRRTA

SEQ ID NO: 46009 - protein, 412 aa, Methylorubrum sp.
LSVSISRGYRYKLAPLPEQEAVLWQFAGVCRLVYNLGLEQKATWGRRHRIGFGKQCLDLTQLRAEFDWVRAVYISCQQQALRDLDRAFQNFFAGRASFPRPRKRGVNDTFRFPGREIETRRLNGKWSAVRLPKIGWVKFRDTRPMRGALKNVTVSLDATGWYVSFAREIEHEAPAPCEAVIGIDRGVATTLALSTGETMTMPVSLARIEQAKRKAQRIVARRKRGSKRRKRAQGRVARLQARQARIRRDFHHRAALDVARRFGVAALEGLNTRGMTASARGTVTEPGRNVRQKAGLNRAILNAGWHQFATILSYKMEERGGQVVTVSARFTSQTCAACGVVDARSRESQARFRCVSCGHTDHADINAAINIERRWNTPLLDVEGLHQRPFEASTGRDFTVSENPRRSGRGRC

SEQ ID NO: 46010 - protein, 387 aa, unknown
  TnpB Polypeptide
MRTLLKSFKTEINPTEEQKVKIRKTIGTCRYIYNFYLAHNKELHDNGEKFMSGKSFSVWLNNEYLPKNPDKLWIKEASSKSVKRSIENGCVAFTRFFKHQSAFPNFKKKGRSDVKMYFVKNNPKDCRCERHRINIPSLGWVRMKEKGYFPTTKDGYVIKSGHVSIKADRYYVSVLIEIPNNKIANNSNKGIGIDLGLKDFAIVSNGKTYKNINRSTRIKKLEKQLIREQRSLSRKYENLKKGESTQRANIQKQKFKVQKLHHKMDNIRTDYMNKTIAEIVKTKPSYIAIEDLNVKGMMKNRCLSKAVASQKFYEFRARLKAKCDENGIELRIVDRFYPSSKTCHHCGSVKKNLKLSDRIYRCECGYVADRDFNAALNLKDAKTYKIA

SEQ ID NO: 46011 - protein, 395 aa, unknown
  TnpB Polypeptide
MRLVERHIVRDNRFEDICFKSGLLYNYVLYSVRQGIFSGNYLKEYEFSTKLGRENQFDFRNLPTDLSQQVVGQVFKSIRSWVKLKKDFDKNPSKYGNHRPHIPSYKKGKKQSMVVFTTNSCRIKDGYIHFVKNIIHPIKTKIGDSKLCQVRIIPQATCYVIEVIYEKKEQELNLNKDNVLSIDLGLNNLCSCISNVGLIPFIVNGRIMKSFNQWYNKNKAKLMSYVGDVGTSKRLRQLNNYRNFWIEDYIHKVSRYIVNYCINNNIGSIVIGLNKGWKQEINLGKKTNQKFVEIPFSRLIDKISYKCKLVGISFQINEESYTSKVDHLAFEKLGKHDVYLGKRKKRGLFQSSIGKLLNADINGAIGIGRKVFGDFYVSKIIDSGFAFNPVRVSIL

SEQ ID NO: 46012 - protein, 524 aa, Thermus sp.
MTTERSYFQGVQAKLNFPRKEDKHAVLDLMRRFSSARRYAYNRLVEGVPREKLWSVEGPLGTLFGLGSYYIQGALLKAEMALRSAKERGIDPEKVVFGGRKLFLDLRKKHNLKVRKKKKREWKEKRQGLLYCRGKKRAGGNPNLRLEVKGGVLQLRINLGHGTYAPALVQTTHPNLGQLLQRVYARESYNVELTLKEGEVYANFTWEEKAPPLTSTRENGVLALDVNAEPYHLALALVGPDGSLRYHFTLPLDQVDRAPNRGAKETLLWMVAHEVTDFAVANGVAIATERLKHLRKSRRGDGSGRNFRRLQHRFAYASLLRKIHTLALKKGVEILQVNPQDTSTIGMLKYASQLSLSKDVAAAYVIGRRALGFEEKVPKSYQALLADPRFREDAEAFYRERVEELKEGMEKEKNPYLKCRLSREAAKAEKALVLLSPRSSPGSRKEVTGGRNSYGVNPWRVLRVGLFLPFLGGEVPRDLSRLKPVLVQGPPLYRDRGRGKEGGPRSLLPGRADGAREGAVRDLA

SEQ ID NO: 46013 - protein, 380 aa, unknown
  TnpB Polypeptide
MLRAIKVRLYPNKSQEQELNKVLGAYRFVYNHMLAKRKTAYETDKTNLSVNDLSKWFYGTLRKDEQYAWLKEQNTQVMKQAIKQMDGAYQRFFKQHKGFPKFKSKKDKQSALFNREAISKKNTFETKHITLIKSLKNLKFSCSELYHRRLQEYKDSIRRATLSKTKRGNFFLSILVDIPESECVKFKKTNKHVGLDLGVKDFVITSDAVVFENKHFFSGSERKIVRLQRQLSRKEKGSNNRNKQSIRLAKAFERLTYKKENYIHSVVNEILKYYDVVFMEDLNVQGLLKNHRMAKAIQEVGFYRFKSVLQTKALQNGKQVILIDRFYPSSKTCSCCGYKKKDLKLSDRFWTCPECGEHHDRDINAARNILLEGQRKLQVG

SEQ ID NO: 46014 - protein, 467 aa, Nitrospiraceae sp.
MDMPIKANRAKRTRKPKHRVVTRAFDFPMEVNARQNDRLWMHVGACWRLRNLLMADRIDNRETNKLLKQQGETDLRYLTQSDQYAAIHEYVRHDTALSKAHSQVRQNVAVRVDAGYKRFFEALKEGRTNVYPPKFIERKKYRSITYPQYGPAAKIKTGKLNLSGLGEFRVFDYCKIKGKPKTVTVKFKQGRWHCIITAEAQEKDVVDLLRPDDTRPDAEFDTGLTALLTDSEGNAYNPPKAWYDYRARLRIAQKKMSRQFEAREKKYEILAAQAKAEGRPVSPLKDIPYSNRLKAQIKVVAKLHTKVDNIRDHHHKKNASVVASRYRKSAVEEHAVQFMIRNRKLAKVATDRAIHKQKLLLKSKLGKRYIAVPNQTENGGNSQTCTCGAPVSKELKDRIHHCPVCRLTAGRDHVAANIVSIIAFGIASLTLGVGHTLRRPGRSSSDVERTKRCAAKAACASWKASRL

SEQ ID NO: 46015 - protein, 391 aa, Lactobacillus sp.
MPLKGVRLRIYPTQLQIQRIESNFGAVRKVWNLMLAMQKDRNKNNPNCRFVSKYDMNLFLPLLKKEPEYSFLKQAESTSLQSAIIDLSEAFKKFFREHSGYPRFKSRKYPRQSYRSTCVNHNIKQLGKNYIKLPKLGEMRFKCGRNIPETIKSVTIYRNLAGKYYAVLLVECENQIFDKTQVTVGLDMGVTDLIITSDSVKYPTIHFDKIFAKKKLHWERKLARRRLLAIKNRAKIKKLGLVDPKPLEDYKNVQKAKIMVAKYSERVANQRRDYLNKITTQLVKDYDVIVVEDLKIKNLLKNHNLARSIANQSWRMIRTMLEYKCEWYGKKLIVVDPFKTSQFCAECGYDDGKHELDVRRWTCPECNSDNDRDINASKNILMKGLEQAIVI

SEQ ID NO: 46016 - protein, 389 aa, Thermoplasmatales sp.
MIKALKVRLYPSEEQKVLLEKHFGSCRFVWNHFLEVRNKYYAEHKNDGKKGLSGFDTMRMLTVLKKEITWLNEINSQSLQHSLVKLEMAFKAFFRHNSNYPTFRSKKDNQYFIVPSGFKTEGDKLIIPKFMEGIRYRDKSTIPENIKQIIVTKDVDRYYAFMQYETNVEISKGKGIIGIDMGIRAFITASDGIQVEPLNALRKKEKRLAREQRKLSRKEKGSKNRKKQILKVQKIHQNIRDARIDFNHKVSTAIAKHYGTVVVEDLNIHGMQRNPYLAKSITDQGWGEFKTMLTYKLGWREAELIQIGRFDPSSRMCSGCGNIKRDLKLSDRIYHCSECSISIDRDLNAAINIRNMGLRKIGKGIPEFTPVESATAAELLKGGLRVATL

SEQ ID NO: 46017 - protein, 306 aa, unknown
  TnpB Polypeptide
MGVLKAYRFRIYPDAEQKQFFIQTFGCVRFTYNHLLMHRKQNSESKLTPALLKKEYPFLKDTDSLALSNAQRNLEKAFRRYYSGQSGFPNLKNKSNMWQSYTTNNQKHTIYFEDDKLKLPKLKSLVDVNLHRKIKGEIKSATISARNTEEFYVSILCIEEVEALEKTYRKIEISYCPKHLVHFSEEICPIQFNQEKLLGQINQAKRKLRLRAKIAKKRKVLLANAKNYQKQKEKMNRLLVRRKYKKEDFINQLSYFLVKNFDYIFVQEKNSEDKYLKKEFTSNDWQQFLSKLHYKSEWYEKQVIIN

SEQ ID NO: 46018 - protein, 392 aa, unknown
  TnpB Polypeptide
MKAYKFRIYPKREQVEVLDRTLALCRHLYNAALEQRMAAYERGFKVSFNKQSGELPNLKNELPEYKEIYAQVLQDTLHRLDKSCANFFRRIKEQKEKPGFPRFKPATRFRSFTYPQYGGYRGLNTFEISYNGLKLPKIGIVRMFKHREMEGELKTCTIKRDAVGDWYAIFTTEQPDISKREPKTAIGVDVGLKNLAVLSTGESIEPPKFLRASEDKIAIIQREVSRKVKGSINRRKCVKRLAKAHRRVERQRDDFLHKASRALSRKADVIVFENLNINGMLKNHHLAKSIGDASWGKLMELTRYKAESAGGSVQFVNPDGTSQICSRCGETVQKSLSVRLHSCPTCGFSADRDYNASLNILQRLHTDSVELYKTPVETAPPQLLLGGCERGS

SEQ ID NO: 46019 - protein, 370 aa, unknown
  TnpB Polypeptide
MKAIYKFRLFPTDGQRTKLKTTLEGCRRAYNLCLQIRKDAYEYDGTTLGFYDTKKMVKDWRADDPVIGAVHTHVIQQVCERVHLAFEAFWRRCKAGENPGYPRFKSEERCRSFTFQDPVRGFRLIGDRTLRVSGVGDVRIKKHRPIPGKMKRLTIKRDEGGYWFACFHIDFTPEKLPVNEDIIGIDVGIENFATLSNGEIIENPRFLKRDRKRLAKLNRQFHQSPEGSERSIKKAKAKVKVWNKITNRRTNFAHQESRRLVDRFGIICVEDLDIHGMVSDGIDDFLNEGTHDVAWGRFISMLSYKAEGAGRMLIKVNPKNTSQICSGCGAMVPKDLGVRIHDCPSCGLKIHRDLNAALNIKRRGLTSLVH

SEQ ID NO: 46020 - protein, 512 aa, unknown
  TnpB Polypeptide
MSSKTIVSRTYPRVPYAAFDKNGGSLDLSEVLDGIRKDAELVAHYALQEMTEQNLALSTYFDGLKPSGAGYMMGLKLPTEVKKQFKSGSSRMERMFREQVVSNLRSWATRVEVMTQTYPKYVSSGWKRTASDSKPSSMKPRLALSSADKQYREMTVTPDHIELMMVVQGQWTTLHFPTPPQLLEVGCDSGVPDIWVDKNDRVVFGFHGQTDPGRPEFSERYVIGVDVGITNPAAYVVWDTEKKEVVEKSLLGQRARSLSNKIKRTQTQITSLQKKNRSEEAVSHRQHLSNRRQELSVLIAQNLADVSWRYGNAIVSFEDLSHIKNTMKHGRWFRGDVHRRTRDMVEADGGRVMKVNAAYTSQRCHVCQSDLDMSNYSSPVCHSCGITHHRDLNAAANIAQRANVKKACQTRKRHATNKRVRRSKCQIKPLKHPGTKNKPTPKAPQNQKKTKTHTRNYPPLSSKEVRVRMCPADNRVSAVNHREDSGFQTTSGTTNPKENLSINTVDWVYPQE

SEQ ID NO: 46021 - protein, 446 aa, unknown
  TnpB Polypeptide
VTTAVLERTSLAAQRIFQTYSFALDPTSEQANVLRSHIGGSRFCYNALLELVTANWAENRKKKDAGGEVPSGDYLGTSHFDLLYLWSATRDELAPWWAQNGASTYNDAAQRLSRAFANLKKGAAKFPVMKKRRQRGSVRFTNTAVRLKDSHHVRVSRIGALKTYESMRKLSHHLERGTGRIMAATITERGGTWTVSFTVEVLRQVAPTRAPKKVIGVDVGLSVLYTGATPDGQHVLDVANPHHVVATEKKLAHAQRIASRRQGPSPGKRPSNRWKRANARVQKVHAGVARARRNLIHETTSRLAKRYDLIVVEDLNIAGMMKNSSLAKHIQDAAWGEFVRQLEYKTAWYGSALLKAGAFYPSSKTCSHCGTVKANLSLDERVFHCGNCGHSSDRDLNAAVNLARMGLAGTDSVTGRGGEVSPCRQKLGDVAHPDEASTEVLPEVGA

SEQ ID NO: 46022 - protein, 521 aa, Flavobacteriaceae sp.
MSEKKEKKNLKSFSIHETNVDVAHYFKKAVLAHKHLENMLNILIKNECDKIFENEKDKRDFTLYNLLTNSMIMKAVICNCSGKDKTQNQIAFVNNHYKDNPLFLQIKKMGTILNDKNISNIVTRLKKDWKNSLDNLKLYYKNKSKFSGKPSTPKPKKLSKVYNYSVPLEVSKFSMKHKDSFGITIYKRSKKVFLRANDYVNSKKINGITVSLSHGHIYYDFNYVVEKKRNHTNQDQMINNRPVKQSGLDIGVLNLFALFINDFTTQSLIYNNGKLLRYNALFNKHIAKLNEEIALQVSKYKEIKRDKQTIKIPVEYTSYGRHLIKKRSHLWNERNLTMESEMQKISSSILTYLQKNDVTHLVISKNLQFTKTDGSIKQRKKESQKFYQIPFGKLLNLIEEKSLDFGIIVIDKNEAYTSKTSCLTVDVNHIQQEAKTREITSNELNGVRGVKKGKIGRGIFKDTTLNKIINSDLNGAANHIKLGFKDVDLSVYRNHLWKVCNPKMIKSSNEFDRFISNSNAV

SEQ ID NO: 46023 - protein, 351 aa, Actinomadura sp.
VTQRVQKTFRYRFYPTSEQAEQLGRTFGCVRLVYNMALEARIRALQDGRPLTYGETSALLTAWKKKDELSFLRDVSCVPLQQALRHLQTAAGNFLAGRARRPRFESRRRSRASAESTRSAFTYCDGRLNLAKMRSPLRIVWSRPLPEGAEPSTVTVSRDAADRWFVRLLCHVTVRPLPPTQRALSRKQPGSANHAKARLRLARVHAHIADRRRDHLHKLTTRLVRENQAVVIEDLNVGGMVRNHRLARAIADAAWRETRSMLECKCAWYGRELIVVDRWFPSSERCSSCGTVRQDMPLDVRKWTCGCGAEHDRDVNAARNILAVGLAERRNACGADIRPQRETSFRAGDRR

SEQ ID NO: 46024 - protein, 414 aa, Actinomadura sp.
LSAPIDTVDRAVLILVWEVGVHRSFKFLLRPTARQAGSLAACLEDHRQLYNAALEHRRTAYRKAGVTVRYGDQSAELKHIRAGDEGGQGRWSFSSQQATLRRLDRAFAAFFRRAKAGQRAGFPRFKGRGWFDTVQWPRDGDGCRWDSQPEHPSAVFVRLQGVGHVRVHRHRPVHGVVKTISVKREGRRWYVILSCDGVPALPLPATGAAAGIDMGVASLATTSDGEHMANPRHLSASAGRLARAQRDLARKKRGSGRHRKAVARVAALHAKVRRQRLDDAHKAALALVRAYDVIAHEDLRIANMTHSASGTAEQPGRNVAQKSGLNRSILDAGWGVFLTILAHKAESAGRELIAVNPAHTSRTCPQCGHCANENRLTQAAFACTACGHTAQADVNAAINILRAGLALRNAAQAA

SEQ ID NO: 46025 - protein, 527 aa, Actinomadura sp.
VNSGNPLISPALSRLRAAGWAAPPPSRCRGRPRPAPPAAAAAPHRPDRRRPARPRPRSTAAAARRRGSGLGSGRARRRRGRARWGCAGGRSSDTCSVETPSFRAGRKRGMLGHVDSPGSVGGGRYGRCVSRYRLCPTPAQEAGLLEHCSHARFVWNLAVEQQAWWTPRRGPAPGYAAQARQLTEARAAFGWLAAGSQTVQQQALRDFAQAMANFFAGTHRRPTWRKAGVHEGFRIVGVRGRAWDVRRLGRRTGEVRVPKVGWVRFRWSSPVPPGVKSFRMTRDRAGRWHVAFATIPDPVPAPGNGEAVGVDRGVAVSAALSTGQTSTVPGLTPGEAERLHRLLRRLARANPGSNRRARVKAAIAGLRAREADRRKDWVEKTSTDLARRFDLIAVEDLNIAGMTRSARGTIDAPGTGVRAKAGLNRSILAAGWGRLVTRLEHKAPGRVVRVDPRYTSQTCNACGHRAPDNRESQAVFRCVACGHRANADINAARNIKDTAVGRTVAARGGRAMARPVNREPQPALLPS

SEQ ID NO: 46026 - protein, 481 aa, Actinomadura sp.
VKAHLNDCGVRLTGADLHSWFLDPAIVPNGSGVTNDTPLFIGYLSVETPSFRAGRKRGTMRCCGLLVLSVVVGRLRGVSRYRLCPTPAQEAGLLELCSHARFVWNLAVEQHSWWTPRRGPAPGYAAQARQLTEARAVFGWLAAGSQTVQQQALRDFAQAMANFFAGTHRRPTWRRAGVHEGFRVVGARGRAWEVRRLSRRTGEVRVPKVGWVRFRWSRQVPPGVKSFRVRRDRAGRWHVAFAHVPAPVPAPGNGTAVGVDRGVALSAALSTGQTSTVPGLTPGEAERLKRLLRRLARAKRGSNRRARVKAAIARLRAREADRRKDWVEKTSTDLARRFNVIAVEDLNVPAMTRSAKGTIDVPGAGVRQKAGLNRGILASGWGRLVTRLEHKAPGRVVKVDPRYTSQTCNACGHRARDNRESQAVFRCTACGHRANADVNAARNIKDTAMRDTAVGRTVAARGGTPSGGPVNREPQPTLLSV

SEQ ID NO: 46027 - protein, 412 aa, Actinomadura sp.
VSRYRLCPTPAQEAGLLEHCSHARYVWNLAVEQHSWWTPRRGSAPGYVAQARQLTEARAANPWLAAGSQTVQQQALKDFAQAMANFFAGTHRRPTWRKAGVHEGFRIVGARGRAWDVRRLSRRMGEVRVPKVGWVRFRWSRPVPDARSFRVTRDRAGRWHVAFAAIPDPVPVPGNGAAVGVDRGVAVSAALSTGETSSVPGLTPGEAERLKRLLRRLTRAKAGSNRRARVKAAVARLKAREADRRKDWVEKTSTDLARRFDVIAVEDLDVAGMTRSARGTIEAPGTGVRAKAGLNRGILANGWGQLVTRLEQKAPGRVVRVDPVYTSQTCNACGHRARDNRESQAVFRCVACGHRANADVNAARNIKDTARNIKDTACNIGDTAVGRTVAARGGTPSGGPVNREPQPALLSV

SEQ ID NO: 46028 - protein, 461 aa, Actinomadura sp.
VGRGRGIPGHGDSPGFVGGGRYVAGASRYRLCPTPAQEAGLLEHCSHARFVWNLAVEQQAWWTPRRGPAPGYSVQARQLTEARAAFGWLAAGSQTVQQQALKDFAQAMANFFGGTHRRPTWRKAGVHEGFRIVGARGRAWDVRRLSRRTGEVRVPKVGWVRFRWSRPVPPGVKSFRVTRDRAGRWHVAFAATPAPVPAPGSGAAVGIDRGVAISAALSTGETSTVPGLTAGEAERLKRLLRRLARAEAGSNRRARVKAAIARLKARQADRRKDWVEKTSTDLARRFDVIAVEDLNIAGMTRSARGTIEAPGTDVRAKAGLNRGILANGWGQLVTRLEHKAPRRLVRVDPAYTSQTCNACGHRARDNRESQAVFRCVACGHRANADVNADVNAGGRQWVLSLVLMSSAVSRRRVRISPCRSALVRRIAETATFTAAAGASSAPNTGTETERRPCASSSSCTA

SEQ ID NO: 46029 - protein, 412 aa, Actinomadura sp.
MLTGRRYRLGLTSEQAEMVEEFGGICRSVWNTALEQRREYRRRGAWMNYVPQAAELADAKREHEWLRAAPSHVLQQTLKDLDKACRTHGTFKVRWRSKARWNPSFRFPAGNLITVERLNRRWGRAKLPKLGWVAFRWTRPLGGEIRSATVSRKTGHWYISFLVEDGVVTPGHHAGTPVGIDRGVVVAATTSTGCFHDRDFVTSGEKARCRRLQRRLARSEKGSANRRRTLVAMNRIVGRITDRRTDFTAWTANRLATRHSVVVLEDLRTKNMTASAKGTQAEPGRNVRQKAGLNRAILDKGWHRMERAIRNAARWTGTEVVLVNPAYTSQTCNRCGSVDAKNRKSQAVFVCTSCGHRDHADVNAAKNILSAAGHAVPACGDLAVGRSVKQEPAAPRGVPRQLAFEPVGISRL

SEQ ID NO: 46030 - protein, 407 aa, Actinomadura sp.
MPRYHLQPTPAQEAGLLEHCGHARFVWNLAVEQHACWRRGRGGAPGFAEQCRQLTEARAAFAWLRAGSVIVQQQALKDFAQAMANFFASTHRRPTWRKAGRHEGFRIVGERGRHWDVRRMSRKTGEVRIPKVGWVRFRWSRPVPSGVKSFRVTRDRAGRWHVAFAHVPAPIPAPGNGQAVGVDRGVTVSAALSTGELLHGPSLTAGEAERLRRLQRKLARAKRGSNRRAHLRALIARLRAREADRRRDWVEKTTTGLAAGFDLIAVEDLDVRGMTRSAKGTVDAPGTGVRAKAGLNRAILAAGWGRLVQRLEHKAPGRLIKVDPRYTSQTCHACGHRAPENRESQAVFRCVACGHRANSDINAARNIQTIARNIQDTAVGRTVAARGALQPPGGATNREPQPDLLSA

SEQ ID NO: 46031 - protein, 718 aa, Actinomadura sp.
VIHVFAPDARGACRLSRPRREGDTGLVRHSTARHPAAAPRPPPRPRPRPWPAERGRRAVRHRPGGRPPDLGRARLGLGVRRAGVVPRPGHQHPGDPRVAAARRDGRAPGRAARRAARRPVRDRRRGRRRAGPRGRADRRRADHRGRGRVGDDRRHGRPPHPGRAVGDGGDGGQPGAPARHAPAVGGEPGLHAARLARHRRGRGRRVRVQRAAPGRHARRLLRRRGVAAPDVRPGGDAAEVLAVRRHRGRGRLLHGDELRGQPGRRRPRRSSDTCSVEIPSFRAGRKRGTMRCCGLLVLSVVVGRLRGVSRYRLCPTPAQEAGLLEHCSHARYVWNLAVEQHSWWTPQRGPAPGYVAQARQLTEARAANSWLAAGSQTVQQQALRDFAQAMGNFFAGTHRRPTWRKAGLHEGFRIVGARGRAWEVRRLSRRMGEVRVPKVGWVRFRWSRPVPPGVRSFRVIRDRAGRWHVAFAAIPDPVPAPGNGAAVGVDRGVAVSAALSTGETSTVPGLTPGEAERLKRLLRGLARACRGSNRRARLKAAVARLKAREADRRKDWVEKTSTDLARRFDVIAVEDLDIAGMTRSAKGTIDAPGAGVRQKAGLNRGILANGWGQLVTRLEQKAPGRVVRVDPAYTSQTCNACGHRARDNRESQAVFRCVACGHLANADVNAARNIKDTAMKDTDCTIRDTAVGRTVAARGGTPSGGPVNREPQPTLLSI

SEQ ID NO: 46032 - protein, 398 aa, Actinomadura sp.
VKAVHVKRAFKYRFYPTDAQAAELSRTFGCVRKVYNLALAARTQAWAQQERVNYNQTSAMLTAWKKTEELAYLNEVSCVPLQQALRHLQVAFTHFFAKRAGYPRFKSRKKSRKSAEYTTSAFRFRDGGLTLAKMAEPLAIVWSRPLPEGASPSTVTVSQDAAGRWFVSLLCEDPSVGPLPAAGAAVGVDAGLDHLVTLSTGEKVANPRHERRDRERLAKAQRDLARKAEGDGANRRKARRRVAAVHARIADRRRDHLHKLTTRLVRENQTIVIEDLAVRNMVKNHGLARAISDAAWWELRNMLEYKARWYGREVIAIDRWFPSSKMCSACGTLRDKMPLNVRTWTCDCGTTHDRDVNAAKNILAVGLTASVCGAGVRPQRRTPGGQPATKQKPLQREP

SEQ ID NO: 46033 - protein, 397 aa, Actinomadura sp.
MSRYRLCPSPAQEVGLLEHCSHARYVWNLAVEQHAWWTPRRGSAPGFAVQCRQLTEARAANPWLAAGSIIVQQQALKDFAQAMSNFFGGTHRRPTWRKAGLHEGFRIVAVKPGDVRRLSRRTGEVRVPKVGWVRFRWSRAVPDGVKSFRVARDRAGRWHVAFAHVPDPVPAPGNGEAVGVDRGVAVSAALSTGETRAVPGLTDAETLRLNRLLRRLARARRGSNRRTRVKAAIARLRARETDRRKDWVEKTSTDLARRFDVIAVEDLNVRGMTRSAKGTIDAPGTNVRQKAGLNRSILANGWARLAARLEEKAPGRVVRVNPAYTSQTCNTCGHRAPDNRESQAVFRCVACGHRVNADVNAARNIRDTAVGRTVTARGGGALARPANREPQPALRSV

SEQ ID NO: 46034 - protein, 377 aa, Actinomadura sp.
VKLLADAATEQALRETLKLCNRAACHAAARAHATGIKGKTALQRLVYGELKAMGLSAQPAIHCVRKVAGAYATLAQNLKAGHYGPQGSRRRAAVEGGPVRFRKDAAQPFDDRSLSWQIDARTVSIWTVHGRLKSIPFACSPAQAKMLAACRQGESDLVWRGGCFYLYATCEVPPALEYVPDGFTGVDLGIVNIATTSDGTVHSGNQVNRVRHRNRRLRTRLQSKGTKSAKRLLRHLSGREARFAADTNHRISKQIVTEAQRTTHGIALEDLGGIRARVRLRKPQRVTLHSWSFAQLGAFIAYKAQRAGVPVEFVDPRHTSQQCSACGHIHKQNRPDQATFQCTSCGFAEHADVNAARNIAARGTAGWAVSHAADDAA

SEQ ID NO: 46035 - protein, 374 aa, Actinomadura sp.
VKLVVQVKLLPDAATEQALRETLKLCNRAACHAAARAHATGIKGKTALQRLVYGEVKAMGLSAQPAIHCIRKAAGAYATLAQNLKAGNYGPAGSRRRTRVEVAPVRFRKDAAQPFDDRCLSWQIDARTVSIWTVHGRLKSIPFACSPAQTKMLAAHRRGESDLVWRGGCFYLYATCEVPPAPEYVPDGFTGVDLGIVNIATTSEGTVHCGNQVNRVRHRNRRLRTRLQSKGTKSAKRLLRHLSGREARFAADTNHRISKQIVTEAQRTTHGIALEDLGGIRARVRLRKPSGSPCIPGVSPSSARSSPTKPNAPVSPWSSWTRGTPRSSARHAATSTSRTGPTRPPSSARRAASLSMPTSTQPATSPHAAQRAGQ

SEQ ID NO: 46036 - protein, 421 aa, Actinomadura sp.
LSVRILSVVVGRLQSVSRFRLCPTPAQEAGLLEHCAHARFVWNLAVEQHAWWTPRRGPAPGYAVQARQLTEARAGFGWLAAGSQTVQQQALRDFAQAMANFFTGTHRRPTWRKAGVHEGFRVVGARGRAWDVRRLSRRTGEVRVPKVGWVRFRWSRPVPPDARSFRVTRDRAGRWHVAFAHVPAPVPAPGNGEAVGVDRGVAVSAALSTGEMRTVPGLTPGEAERLKRLLRRLARARPGSNRRARLKAAVARLKARQTDRRKDWVEKTSTDLAHRFDVIAVEDLNVRGMTRSARGTVDAPGTGVRQKAGLNRGILAAGWGRLVVRLEDKAPGRVVKVDPAYTSQTCHACGHRARDNRESQAVFRCVACGHQANADVNAARNIRDTACNIRDTAVGRTVAARGGWALVRPVNREPQPTLLSI

SEQ ID NO: 46037 - protein, 457 aa, Actinomadura sp.
MKPGWPPRVTEKPIEQRPEPFIGCLRRGEPVLWGGKERGMAGRGDSSNFVGGGRYVAGVSRYRLCPTPRQEAGLLEHCSHARFVWNLAVEQHAWWTPWRGPAPEYSVQARQLTEARAAFEWLAAGSQTVQQQALKDFAQAMGNFFGGTHRRPTWRKAGVHEGFRIVGARGRAWDVRRLSRRTGEVRIPKAGWVRFRWSRPVPPGVKSFRVTRDRAGRWHVAFAAVPDPIPAPGNGAAVGVDRGVAVSAALSTGETSTVPGLTPGEAERLKRLLRRLARAKRGSNRRARVKAAIARLKTRETDRRKDWVEKTSTDLARRFDVIAVEDLNIAGMTRSAKGALDAPGVNVRQKAGLNRGILAAGRGRLVTRLEHKAPGRLVRVDPAYTSQTCNACGHRARDNRESQAVFRCVACGHRANADINAARNIKDTAVGRTVAARGGRALARPVNREPQPTLLSV

SEQ ID NO: 46038 - protein, 399 aa, unknown
  TnpB Polypeptide
MKQQRAVKVELNPTDEQRILIHKTFGCVRAVWNDMLGDEQEFYAATDKHFIPTPAKYKKKRPYLSEVDSLALCNAQLALQKAFKRFFENHGHFGHPKFKTKKKAKKSYTTNCQYHVSGPTVYTAKDAIRLPKLGLVKAKLYRNTPDNWVLKSATISETKSGRIFCALLYEFDIPAPKEVLPTLENSIGLDYSSPLFYVDHENRSPDKPRWLRESEAKLAHEQRLLSHMKYGSKNYIRQLHKIEVLQEHIANQRKDFAHKESRRIANAYGSVCVEDLDLQAMAQSLNLGKSTNDNGFGMFREFLKYKLEEQGKHLIKVDKWYPSSKTCHYCGGYYKDLQLGEEAWTCPHCGKHILRNQNAGINIRREGIRQFYTERAAAVTFGEGHVVTFEESHVEPAAS

SEQ ID NO: 46039 - protein, 369 aa, unknown
  TnpB Polypeptide
MPVIRNYKFRLYPTIQQEKKLQNNLNVCRWIYNKFVESAQTGFLTRNDMNYMLTELKQSESWLYDYHAKMLQMISAQIDGSQKALVQLRKKGYKTGMLRFARYGEYRTFTYNQSGYRLERHCDTDLLWLSKIGYIEIRKHREPISSIKQVIVSKSKSGRWHVVVTCEIDNTIIQLPKLSFGRAVGIDVGIKHFASDSQGNVIPNPQNLKKLLKPLARIQRKISRRKKGSNNRKKAVRLYQRIHERIANRRKDFHHKLSTQYAKNNDIVFVERLAKLNMVKNHRLARGILDAGWGTFLNMLDYKSDILHSLKHRGFNGYHHFWHCRFIAPLAQRGISAPLAQITFFVQLTHALDPCRIYETMRYRSSDIK

SEQ ID NO: 46040 - protein, 362 aa, unknown
  TnpB Polypeptide
MILTYNIKHDRDFSRELFLAKKVADFAIRTKSNSSKDVRHLGLKSAIANQILRKYRRRGIKKTSSVKLTVPRQSIKFDSATKIAKIPCMNLELDFKYLPEFEKIIQIEIGKEYAHISVEIQEPQTKPTKQFIGVDCNTTGHAVVVAVPHTGKIHKLGKSAIHTHTKYKSIRRKLQKQGKFSLLKKIKDRESRIIKNINHHISKKLVEIAVSEKCGIRFENLKGIRKNKKHSKNFRYSLNSWSYYTIQQYTQYKAKKQGIEISYVAPAYTSQTCSRCGSLGNRDKKKFQCVRCGHADHADVNASFNIGRPVSHCLIDPARIKSMSQLHKESDLCKGSTDTPLRQRRYKTAMPKMMVTVEPTML

SEQ ID NO: 46041 - protein, 450 aa, unknown
  TnpB Polypeptide
MKQMSSYPVRISRSADIRKTLSATAGIYRKAVDFFISVCMEEWDTVSACKGQTGKVNAVEAFTVKTSKRKTVPYDFGKDFYKFPSYLRRAAIAQAVGKVSSYKSNMKNWEASDPRTRGRIPGYPCAGYVYPAMYRDNMFVRTGTYTASIKVFTRNTWDWLEIGLRKGDADYITRHCQNRRECVPTLRKRGKLWYLDFAFEEKIGLPDTEACGRRILAVDLGINSACTCCVMGPDGTVTGRSFLKLSGENDRLDRAVGRIKRAQHHGARRMPRLWARAKGISRDIAVKTAETIVKTAVLYNVDVIVMEHLDTRGRKRGSRKQRLHHWRAMYVQRMVAQKAHRERIRISTVCAWNTSRLAFDGSGRVKRGKESEKTADNYSICEFSTGKIYNCDLNASYNIGARYFIREILKSLPATAEQRLEAKVPSVSKRSTCTLSTLINLGAALTAAAV

SEQ ID NO: 46042 - protein, 355 aa, unknown
  TnpB Polypeptide
MARCAKLRVPDQLCHILDDLYPKALNAARGMIKDRSLSSSKHWKTIPCVIAKSLIAKYQRNPKCKNIKSLVIPICGDKGKQVKTVEGGIRVPALFGKAVIPAKLPWPVVGFVRQVEFLKRDGRWLMSVCANTPCDRRIDVMGVVGVDRNSVGNVAVMADIQTGKVFKLGIDPAGTKRCFRGRRGNLQREGKNALLTKTRRNQSRRMTYENHRASRTVVDYAATHRRAIVLEDLSGVRSKGSKIRRYSEKNQWAFAQLETFIEYKAALRGVPVLHVDPAYTSQRCSRCGHVHKPDGKRYVCASCGHKDHRDANAAFNIGRLGAEVVRASGGSGLSVPLPGSIGGPYAGKEQTRCVG

SEQ ID NO: 46043 - protein, 368 aa, unknown
  TnpB Polypeptide
MYRTFKYRIYPNRVQEVELLLWLDLCRSLHNSAIAERGDAWKKEKRPVKFKDQSAGLPGLKKSRTEYGRVNAQVLQQVLHRVDLAFKAFFRRVKTGEKPGYPRFKPEDRYSSLTWPQDEGFRVKDRTLWLSKIGDVKIKLHRPVKGRPKTCTVKRAASGWYACILCDDVPVRVYPKATAEVGIDMGLTSYATLSTGEHIDNPRWYRKSEERIAESQRNLARKKKGSKRRQKAKRKLARLCAKAAGQRRDFQHKLAHRLVSENALIAVEDLEPGKMAQKSPTSLSKSIGDAAWGLFLMILACKAEEAGRRFSRVPAPGTSSTCSRCGAYRKKTLAERVHACDCGFVLDRDHNAALNILRLGRSRQVCSA

SEQ ID NO: 46044 - protein, 419 aa, unknown
  TnpB Polypeptide
LFINYFRSPLPKGEINGRLELLLEWEVTMAIEKNVLKGRSILSCKFRLYPSKTTEKTLNRQMALCRWLYNRLLSELSMVHEKGIKLKRTDTQALIVYLKRHDNPELDEVYSKVLQMVNYQLWSNIGALAGLKRKGRRVGKLRFKGKWFKTLNFNQSGFKLENGKLVLSKVGEIPIKLHQKIGGEVKGVIVKRENSKRWCAIFQVEDEPELLPETGRKIGIDVGIRHFLTDTEGRQVENPRFYERTLERIRIMQRQLSKKQKSSAKKEKAKIKLARVHEKLVNQRNDFLHKLSRFYVNNYDVITAEDLNIAGMVRNHNLAQRILDASWGKFLHMLSYKAERAGRQFVEVNPRGTSQEYKRGELDRDYNAALNVLERGLVGLGWPELTPVEMGPLLRVPASAVIAGQAPSLKQEALCDSLG

SEQ ID NO: 46045 - protein, 473 aa, unknown
  TnpB Polypeptide
MFNESDERRYRMDINTCYVCKIQNQLDAVPDKKIGTLTVSRKHPVDDRLMHQTADVCLEALKFCTSVILKEWDGIMAVDSKLRKRKIDMLIHGTKKGIPKYPEFDKQFPNLPAYTRRSIIADAFGMVKSYKSNLKNWEELSPAERGAKPTIGFPSRYELTFYDQERKMSHLADGQIGLKLFNGHSWNWYYFQISQSDARYIYHMSRERKMLSPIVYKVRGRYQVRFAFRESRELVQNENKLAYRILAVDLGINAAASWCVMESDGTVHAKGVIHLACEEDRLNHMINRKRMYQQSGKKSRCVYRWITEANRQLSIKTAKVLMDTAILYNTDCIVFEHLDSGGKIRGKKYRERIHLWRKNDVQNRVELQAHRHGMRISRICAWGTSKYAFDGSGRVDRHSVYRYEHGRKVYNYSICTFQNGKVYNCDLSAAQNIGARFFLREYEKSGVEGLPSTPQRTLCTLRLLVSNGLPLAA

SEQ ID NO: 46046 - protein, 412 aa, unknown
  TnpB Polypeptide
VLPGNRIVDFRGNEACRRAFIKDVSSIISMKVTRAWKFRMYPTKTQATEMQVHLWLSKELWNDLLEFTKEIYDNHQMFPTKRTLREMVKNSGLYSQTAQELVDRLTYALHRKIELKKRGKTGGFPRFKCIERLKSLVYPQSGFSLKAEKKRLKVTPFGEINIKLHRPVDGTIKTMTLKKEATGKWYAILTAETDAKPVPKNTESEVGIDLGLINFAVLSDGTIIKNPRHLKKHQDNLRAKQKPVSRAKWGSSNRKKAKKRLAIVHEKVRNTRRDFLHKLSRKLIHSHSLIALEDLASQEMAENAYGKSINDAGWSEFISMLFYKAEGAGSRVVLVDPKNTTKECSCCGTLTDKELLERQHNCPSCGLSMNRDHNAAINILNRATAGIAGSNASGDVSKETSSKEEAHALRRG

SEQ ID NO: 46047 - protein, 427 aa, Lactobacillus sp.
MAKKKTTKSMTSYRFRLYPTAEQAELIERTLDATCWFYNQLLTIQKQRYIEDPDVRVSRNDFTNLVSPYRQANPKLKKIDSTALDVVCENLVRAYDNFFGKRSKFPKFHKRKFTNSYTAAGRIKDGKSSIHFSQTGNRFQIRLPKLKFVTIKGSRLPSNPVKQATITHESTGHYYVSVQVERTKENQNVSLHPVSKRTDNAEIKLTGKSVGIDINIPHLDFSDDHAIVKLETLEKTSEAKHLLLWERRLAHRRALAKEKQAQLEHASRQKMGIDSDWHWWQSKRYQEAKQHVARLRATQAHRRDLFFQRLTTQLIQEYDVIVVEDLTVTKMLKAHRYAKHISEISPNRFITMLEYKAQWHAGKQVIRVDPKNTTQACHNCGFIMGTDGTRALTISDREWTCPKCHVHHNRDKNAAKNILQRGLATLN

SEQ ID NO: 46048 - protein, 379 aa, unknown
  TnpB Polypeptide
MLTYTYKFYRSKRTAKLDAMLREACFVWNHALALQKWYYSLYGKYVSCSRLKAHFAKRIKRTRLHSQTTQEILERLDVSYKRFFDRLSKRPPKFRRARDFTSIVYKQGGYRIDGNVLVVNSIRQHFQFSLSRPYEGKVKQIRIKRSRLGEYYLYVVTDAVAGSCAHGKSHKGASVGMDFGLKTYLTLSNGTKIENPQFLKQGLSELRRKSRALSRCEKASHHRRERRRDLERCHERIRNRRDDWQWKTCRELCGRYSVICVEDLNLTGMTRLWGRKVNDLAFGAFVQKLEYTALKFGTEVVKVNRFYASSKTCSVCQYVNERLSLADRRWVCPSCGASHDRDLNASVNILRQGIASSGSTRKTVLARRGASATGESPSL

SEQ ID NO: 46049 - protein, 386 aa, unknown
  TnpB Polypeptide
MMVRKAYKYRIYPNKEQREYFARVFGCVRFFYNKSLSDMCELYKTTGKYKNITPATYKSDYPFLKEVDSLALCNAQLSRNAAFKAFFRKQNAFPKYKSRRNDQSYTTNNQGSAKFSNNNRYISIPKCPRIRIKKHRDFKGEIKSITVSKTTDEKYYISLLVEENSECINISDNAIGLDLGLKDLIIDSNGNKYKNHKYLTKSQNKLAREQRRLSLMKKGSSNRDKQRIKVARIYKKIENQRNDYLHKLSRHIIDENQVICIEDLKVKNMARNSKLARSINDASWSRLVSMLIYKADWYGNIVVKVPSNYPSSQLCSRCNYQNSLTKDLRVRKWTCPHCRTVHDRDINAAKNILSKGIEMLTKDGTHPDSLFMLGSIESSSKKPPLL

SEQ ID NO: 46050 - protein, 254 aa, unknown
  TnpB Polypeptide
LASPRRYRRTEYRQCQAKLSKGMAEVSTNSRCRQAPLSSKRFTLLVSNESALCQILMVQQCSLSRCSSSRSAKIKAYPFSRFEKDMTNAQRKLSRRIVRANREHRPLSQAKNLQKQRKIVAKLAAAIMRRRKNFLHKTSTALIKNHDLVAAEELRSKNMLKNHALAMRLQDSGWRTFLGMLTYKAKLYDKIFIAVNPRNTTQTCHHCGYVLTGPQKLTLKERTWTCPICKMHHNCDVNAAKNILTKAKQQLTAR

SEQ ID NO: 46051 - protein, 364 aa, unknown
  TnpB Polypeptide
VILHFDQDDEKHEVNCYITWNGITIPVRYDLSKADLPGGRNYVNESLSSGKICYCEIKRIWFRSGYKYYVDIYMKGEASKKVEPGKSVMGIDEGTSTVAAVSGDAVFLEELAPQCVDYNKEITKLQRQIDVSTRKTNPDKFNEDGTCRKRSEWKEKHWTFSKNCLRKKAKLRELYRRKSAYAKCRHENLLNRMIQSASSFVNEPMEFSALAKRSKKTERQNKLSEVKKKDGTVKIVRKYKRKKRFGKSVNDRSPSLFQTRLKQKCVQYALAYMETDKWKYRASQYDHVLDAYIKVELSRRFKTVAGQVVQRDLYSAFLQSCMGTPEKPDREKCLQLFGQFVRMQAELIMKMKASGQSRPACFGF

SEQ ID NO: 46052 - protein, 427 aa, unknown
  TnpB Polypeptide
MAWNHNEELVRTLKFKLDPKDKESLDHLREEFRNCYNQYLQLTKELETTDRRTLEQQEIETELVENTRQRALETAAKAVENYFELRDIQENASYPRQKDTPMTATLNHRDGYTIENPDTVKISTVPYNRVKASITGRREDEIFLEKALNGQYKFGTGEVLKKNGDYYIHINVRTEQVPEIQVEEDNTFIGVDINGSNVMLTATREDGEVLDTLYLDYNKLKGKRNEYFTKRKRLKEAGKWSTLEKLSGKEEKATNDFCHKLSRYAVRWIQQFENPVVVLEDLTGLRDSIDYGKRMNKRLHSLPFRKLQQFLKYKSEWSGVPVSFVDPAYTSQRCPLCADSEDTTRRGHRFKCQSCGHQDHADRNASINIALRAATTYRKSHSTVVPSPKNFPSFEKVRLTAAGLCEQADPSPRTPLEVLMPRGSGRA

SEQ ID NO: 46053 - protein, 370 aa, unknown
  TnpB Polypeptide
MPKKNNDLGHKAYKFRIYPTSEQKTLLVKTFGCVRFIYNKMLADKIEHYKETKQKLNNTPAQYKKEFEWLKEVDSLALANAQMNLQTAYNNFFRTPKVGFPKFKSKKRNKNSYTTNNQNGTVTIINGKLKLPKIGLVKIRQHRLIPDNQKIKSATITKTPSGKYYVSILVEYEQYIPNVQLDNNKALGLDYASHSFYVDSQGREADYPKFYRNAQNVLAKEQRKLSHMKYGSNNYQKQKLRVARVQEHIANQRKDWVHKLSTQLANEYDYICVEDINMQNMAQSLNLGKSTNDNGFGMFRTILAYKLADRGKKFVKIDKWFPSSKMCRFCGAINHNLTLADRVWTCECGKTLNRDENAAINIMNVGLSMV

SEQ ID NO: 46054 - protein, 399 aa, unknown
  TnpB Polypeptide
MFKSTKYRLYPNKEQKVLLDKHFGCVRFIYNFGLELKNKTYQETGKSISRYEIQAKIPILKKEKGFLKDVNSLSLQASLVNLDNAFSKFFKKTADYPNFKSKHISRDSFQVVQNVKVIGNKLFIPKFKQGIEVVISRPIIGEIKTCTVSKSPSGKYFISILTDTGIEIPTQLPLNLDKSIGLDVGIKTFVTLSTGEKIDNPKWISKSAKKLHRQQRIMSRRNKQSKRRDKQRQIVAVIHEKIANQRKDFHHKISKNIVDENQVICIEDLSIKNMIKNRRLSKAISDCGWGQFLSFIQYKAKWKGHTIIKIGRFEPSSKMCSCGKINNNLKQSDRTWKCSCGLEHDRDILAANNIKKFALLKPNFVGQELPEITLGESGNIIKNDLKCCSTNRESVRSLA

SEQ ID NO: 46055 - protein, 389 aa, Desulfonatronovibrio sp.
MIIRKTYKYRIYLKKSQVTNLENQFSMCRHLYNWSLAERMDAYKNENRSISYNEQQNALPSLKKDRPWYKGVHSQVLQDTLKRLDKAYKAFFRRVKKGETPGFPKFKKRGQWNSLTYPQHVMHPDSYIKVPKLGNVKVVLHRTVPKDAKVKTLNISKEAGKWFACFSVEEEICPHESKQALSPLGLDLGLIDLYYSSDGQHSPAPKYYRKKQKHLTRLQQRLAKTSKSSPKWKKILRSVQKAHYRIACMRKDFLHKEANKVLGKSSLIVHEDLKICNMIRRPKPKQDVDGKYLPNGACWKSGMNKSIADIGWRMFLDFVGYKATWQRKNVIAVPPHYTSQTCPDCGDIVKKSLSTRTHACPCGCRMHRDHAAAINILRIGLNTLADKAA

SEQ ID NO: 46056 - protein, 406 aa, Pusillimonas sp.
MQRLQAFKYELMPNGQQHRQMRRFAGSCRFVFNRALALQKARYERGEKKLGYAGLCKELTAWRNGAETPWLADAPVHPLQQTLKDLERAYASFFAKRADFPRFKKKGQSDSFRYPDPKQIKLDQANSRLFLPKLGWVRYRNSRAVLGTVKNVTVSQSCGKWFVSIQTEREVDQPIPESGAVGIDMGIARFATLSDGTFYAPLSSFKRHQGRLRKAQQSMSRKTKFSRNWKKEKSRIQKIHARIGNARRDYLHKTSTAISQNHAMVCIEDLQVRNMSKSAAGTAEQPGKSVRAKSGLNKSILDQGWFEFRRQLDYKLAWNGGWLVAVPPQNTSRTCPCCGHVSAENRRTQAKFECVECGFEENADLVGAINVLRAGHARFACEVSGAVMPPAAGTHRSDSGAAQCRA

SEQ ID NO: 46057 - protein, 349 aa, unknown
  TnpB Polypeptide
MSTKVYRYRVKSLNGLLNKQARAVNFVWNFCNDTQKHALKWRKRWPTGFDLNVLTAGSSKELGIHSGTINAVCEQYAKSRKQFKRPYLRYRGKRSLGWVPLKGRDLKRHGDAFRFAGNTFRVFNSRPLPEGKIKDGSCFSQDRRGNWFLNIVVDVADAETRKPVRGVGIDLGLADLATLSNGEKIEHPRCFRQLEEKLAKAQRARKKRLAAKIHAKIANTRMDFLHKASTDIVRRFDYIAVGNVSSGKLAKTKMAKSVYDASWHSFKTMLAYKSVANGAWYEEVNESFSSQTCSACGALPESRPKGIAGLRIREWVCSECGAVHDRDVNAALNILRSGRRAPVVGIPAL

SEQ ID NO: 46058 - protein, 392 aa, unknown
  TnpB Polypeptide
MKTYRYKMYTKAKDGRLGNQIDRFGIVYNHCIALHRRYYKLTGKSLSRYELMGHLTKLRRRARWIGIFAGLPSQAVQQVAERIDKAYKLFFRNLKHKVKTNPPRFKAVKKYASFTLKQAGYKFENNKVRLGGVWYGYHKSRDWKGKIKTVTIKRDRCGDYWIVVTTDWNEAEALPKSGKSVGYDFGMKTFLVASDYRDVEAPLFMQRAAKENLKVSRSVSSKVLGSNNLRKARLSKARFMRKLANRRADFQWKLANRLVREYDVLCFEDLNLKGMARQVRKPGKKHGKKKHGRKIGEYGFAEFLAKLEYKAQVACKEVRYVGRFFPSSQLCHVCGYKNPAVKDVRIRKWDCPQCGTHHDRDRNAAMNIYLEGTSSSGRGSSKSPVSSTEAEA

SEQ ID NO: 46059 - protein, 587 aa, unknown
  TnpB Polypeptide
MERARAKQTLSYPLRLPDAAQADALRLLDVSREVINAALASLWPVLDAFGERGDGPAYKQVEALLTSPKPHGSRQWRCEAEMAGRILRAQAIRKARFALISPLLIEGLIRPQTEQRQMSKNRHAIRAALKTLRDLSEDGGKAVELQGLVEQACNYFLTHGYFPETYEQMQPIPVLKAGQLPYAGDDGPGMGQAYRMSIYLSQRQLRLSLRCPDEGGRWVRDWRQQTITLALPEPVTERLEQGEDLAPTLREVCEPDGSRYAVLDFLLEVPCEVPAEWGQIDSVLGFDWGIRTLVTATSVDLAGNQLGRPFFLDSGCFDGKQARTRRHIDRLKAKVARLESQRERFPEGDLRREPSTAQLKVLLREIAKAWRKYEARNRDLAHLAANVLLLLATIQGCRLIAGESLKSLKSAGRGRDTSGRWRNWRNNSQIRGELWRVLRYKCHLVGMRLEWQQPEGTSHVCPRCGEPAHTYRSPDDREKSQDWGAWLWCEKCHWNGARDYAAALNIARLGATFITRAPSTGAFVHPFILEQTVNPVSYKGTGPVLRLPPTVPRERLLHAGKMYCNGWRNSVTLRSSYPTEFMLRLCG

SEQ ID NO: 46060 - protein, 239 aa, unknown
  TnpB Polypeptide
MSPSIVLKKTGPELHIPWKTFVKDGRTAKERMAAGEKICAVTFTNQDALTVCCVLNSDGAKENVFFVRGGAEYAHRCRQVTDKIKKSEASGSSGSSAIPNSRYWMKLKNLNDFYSHSISRQVINYTIKQGVKIIVLPEYEKEYSRILMSKAGNFSPIHLSTAIREKIKYKAWQEGLVVLELQQHNISSTCAACGASLHKKGQNFVCKNGHQGNYYLNASWNLGLKCIRGFQPKESRTSD

SEQ ID NO: 46061 - protein, 418 aa, Cyanobacteria sp.
MRTTYQYRLKPTYLQRCTMSRWLDMLGSQYNGLLAARFDWWEMNRTPINACPLIASIAQPTDQPDYYGQKRGLVQLKKERPWYKEVHSQVLQDMVKRVKLAFDRFIKGDSNGKRSGKPRFKRKHRYRTFTYTQAKRDWISGNSINLPKIGSIQFIKHRPLPEGFSVKTASVSLKADGWYLTLSLENKSVPDWPQIDIEPTSANSIGIDSGLEYFVACSDGETKEPPKFYRQSEDKLKKLQAKRDLKNKGSKPRRKLNHRIAKLHQKIARQRRQWQLETANELIDKAEIIFVEDLKIANMSRKNKPKQAENGTYLPNGQSAKSGLNKSFADAGIGRFLNDILPHSAAKAGRKVMKVNPSGTSQHCAICQNRVPKKLSDRWHNCPHCGASMPRDVNSALLIKQVGLGKTSLKNAKPSSKS

SEQ ID NO: 46062 - protein, 531 aa, Cyanobacteria sp.
MQTKGKLRQSGRKQDKDSSMSNPILWEQLSLPLFATAESAATSKKTTCKDKLPICNRSTQKQKSCKTSEADSTSKGKDCVPYWTDLCKEISSKLLLPVATDSPDSDLNSSNTWSNKTVEKSWFSTNLNIAPNQNSCKIYSPSSTSSLVASTGCENTVKKSKKIRIYLNAEQRRKVRQWIGTARFVYNRTVEYLQREGTKANWKKIKGGILNDLPDWSNSIPFQIKSIAIRDACIAVREAKKKYKEKGEIQKVKFRSRKKPVQSCYIPSSAVTEKGIYRTILGEISYAENLPEKHGDCRIVVHQGCYYLCLSREEQPEKTENQGRVVALDPGVRNFLTFFSENSYGWISSDDIGRIQRLCYHLDDLISRSTKAQSKKKQRMRKAANRIRLKIRHLVDELHHKVARFLVDNFDVILLPTFEVSQMVFKSSRKIRAKSVRQMLSWSHYRFECFLKHKAKEGGKLILDVNEAYTSKTVSWTGELIPNLGGRKVIKGSDGLKMDRDLNGARGIFLRALVDTPSLRDCLSECIVSVS

SEQ ID NO: 46063 - protein, 418 aa, Cyanobacteria sp.
MITVTYEYKLKPTKQQIKQINQDLEVCRKVWNYALKERKDWIASRKCPVNVCSLRSEYIIPADEPYPSFKIQCQRLTESKKLISELASVNAQALQQVLRRLDRAFERRKKLGAGFPLFKKAVRMRSYVFPQLGKNPLAQGRVKLPSLGWIAMRQSRPYPEGFKVKQARIVKRASGYSVLLSFQADLDIPAPPLVGHVIGIDVGLEYFLSTSDGLQVKRPKFFVGLQRKLKLLQRRLKRKQLGSANSKKAQAQVARLHEQIARTRKDFHFKTAHQLCDAADTLVVEELNLIGLSRGMLGKYMLDAGHGQFLNGVLPWVAFKRGKAVAKEDARGSSQECPDCGAKVAKSLSDRWHQCSCGCSMPRDVASGLVLLHRFQKRCGAHSAENAPGDGLAGVSFGASSQVSVNGESPAIRSALAR

SEQ ID NO: 46064 - protein, 409 aa, Trichocoleus sp.
VLHKAVQVRLYPSKEQQIQLAQTFGSARWWWNYALNKSIETYGQTGKGLGRSALNALLPTLKKAEETKWLGGCYSQVLQATTLNLTTAYKNFFDKRAGFPKFKSKHGKQSIQYPQNVKIVDGNVKIPGNIGIVKAKIHRPIEGEIKTVTVSKTPSGKYFASILTVSTGGQRPTVEGENLSNYLGKIYGIDLGIKHFAVVTDGEKVSKYDNPKHLAKHENNLKRKQQKLARKQKGSNSRNKYKKVVAKVYERVSNSRQDFLHKLSYKLVSDSQAVIVENLHVKGMVRNHNLAKAISDVGWGIFTNFLAYKLERSGAKLVEIDRWFPSSKLCSNCFYQRCEMPLDVRVWTCPHCATHHDRDGNAAINIRAEGIRMLKADGSAVSAVGGEVRPKLGRKSNLWHSPVSTEAHA

SEQ ID NO: 46065 - protein, 390 aa, Trichocoleus sp.
MKHKAFKYRFYPTPEQETLLRRTIGCTRLVYNRALALRTEAWYEHKKRVGYNETSAMLTEWKKDENLVFLHEVSCVPLQQGLRHLQKAFSNFFEGRTKYPTFKKKRNGGNAEFTKSAFKWRDGQIYLAKCSEPLNIRWSRQLPHMCEPSTITVKLSPSGRWTVSLLVNVEIEPLPESPNQIGIDLGITSLIALSTGEKVSNPKGFAIKRRKLRKAQKALSRKQKGSSNSYKARLKVAKVYAEISDARNDFLHKLTTRLVRENQTIAVEDLAVKNMVKNRKLALSISDASWGELVRQLEYKCEWYGRSLFKIDRWFPSSKRCGHCGYIVEKLPLNIRSWECPECGTHHDRDVNAANNILAAGLAVKVCGANVRPDRHKSDGGCYEAERSKK

SEQ ID NO: 46066 - protein, 401 aa, unknown
  TnpB Polypeptide
MGKINRTYRFRLYPNEGQIELLAKHFGCSRFVYNTFLNQRIEQYKLTGKSDNYYVQAKTLTVLKKQEETAWLKDVNSQTLQFAIRSLESAYNNFFKKRAKFPKFKSKHSKNSFTVPQSASVAGGRLFIHKFKEGIRCRVHRDIKGKVGKVTITKTPSGKYFVSVFTEEEYITPLEKTGKSVGVDMGLKDLLITSEGESFNNNRYTKKYECRLAKAQRHLSRKVKGSRGFENQKLKVARLHEKIVNSRADYLHKCSISLIRRYDTICIEDLNVKGMVKNHRLAKSISDASWGSFVSMLIYKAEWNGKKVVKVDRYFPSSQTCNVCGYVNKQIKDLSVREWECPHCHTHHDRDVNAAINILRFGLNNISAGTVDYTGGEEVSADLLESHSSKKPEANEYSTQG

SEQ ID NO: 46067 - protein, 316 aa, Bacillus sp.
MVRNCKSIRTNKWKNKKPTNQSSDYDSISFLSSNYKCRYGKQIGVNPKGKPIIDHQKYSVEIIRKQNEFYVNITFDETEIGRVLDFKETPQSDVIAGIDVNPDRIAVSLCTKQGNFKGSKIFYLHNLNTFSTNKRATIIGQIVQQIKTRLLENNVGGIVLEDLKFQQSHDTDKYSNRNFHQFTYKKMLNSLIRMALRNGFSVKTVNPAYTSVIGKLKYSKNFGISVHEAAAFTIARRGLELQEQLPQEIILLLKNQITTKLRILVASMEESKKNTQKVYKKWLQTIQTWKEYHNWKLWSILHKTVYMNNQQVVFKI

SEQ ID NO: 46068 - protein, 413 aa, Scytonema sp.
MIIYEFKVKGKDKQYRAIDDAIRTSQFIQNKCLRYWMDNKEKKVDKYVLNKHCAVLAAEFPFADELNSMARQSAAERAWGAIARFYDNCKKKVKGKKGFPKFKKHCRSVEYKTSGWKLSTTRKAITFSDKKGIGTLKLKGTYDLNYYAIKQIKRVRLVRRADGYYAQFAIDIDLKVETQPTGQVVGIDLGLKYFIADNIGNVEQSPQFYRKSEKQLNRANRKKSKKYDKARSSAKKPQSTNYHKARNRYARKHLRVSRQRKEYCKRLAYSVIQSNDLVAYEDLNVKGLVRNRHLAKSITDAGWSTFRSWLEYFGHKYGKATVAVPPHNTSQNCSNCGKKVKKSLSTRTHVCPHCGFVEDRDVNAAINILRLGLSTVGHTGTYAWGDLPSWAVGRGLLSNGESTNQESPGFSSK

SEQ ID NO: 46069 - protein, 403 aa, Oscillatoriales sp.
MYQAYKLRIYPTTEQQIYLAGAFGCCRWFWNYSLNLCQETYKTTGKGLTRGAIQGLLPHLKKEYPWLKSAYSQCLQVVALNLSTAYKNFFDKRAGYPSFKSKHGRQSISYPQNVKLGDNIIKLPIIGELHCRIYRKIEGTIKTVTISKNTDGKYYASVLVDDGQETPEASADGKAIGLDVGLRDFCVTSDGSKYANPRHLKKHSRNLKRKQQKLSRKQKGSNRRNKARKLVAKVHSKVKRVREDFLHKLSRKIVNKNQVIAVENLKVKGLIRNHCLAKAISDAGWGMFGTMLKYKAEKVGKLYIEIDRFFPSSKTCNNCLHKVSSMPLDVRHWNCPKCGSCNDRDINAAKNIRDEALRIWALGTSASANRGDVSRGGKPSVLSGAIPREVGSPQPIGTPIAGG

SEQ ID NO: 46070 - protein, 429 aa, unknown
  TnpB Polypeptide
MTKYQAPAGTIVRGWTVALEPTPEQAAQFRRDCGARRFAYNWAVTRISESFDAGKETGEYDPAVWSAYSLRKRWNAAKADTAPWWAENSKESYAGGIADAVTALKNWHDSKTGKRPGPKMRFPRRKKKTRDRPRCAYTTGALRVDGSRTVVLPKVGTVRTAENIRPLWRHIRRGTGRVMSATIREKAGHWSVSMRLEITAPRQPAPRTSTVGVDVGIGQHLLIVMHPDGTVAEKVPNPKALRASLADLRKANKALARKTERSPRWWQAQRTLARTQARAANIRSDAIHKATTHLAKTHGQVVIEDLAVRQLIRGIRSHRKSWADAAAGEMRRQLTYKAGWYGCDLRIADRWYPSSKTCSACGSVNRDLALSDRTWDCPSCGVHHDRDENAATNLANYPASQAEALSDGKTGLARHDAVKRVNHLRKVAA

SEQ ID NO: 46071 - protein, 463 aa, unknown
  TnpB Polypeptide
MARFEVPEGWTVQAFRFTLDPTVEQKGLLARHFGARRKAYNWTVAALKADIESWHATGVETEKPSLRVLRKRWNTVKNDECVNAETGQVWWPDCSKEAYADGISGAVDAYWNWQTSKSGKRAGKRVGFPRFKKKGRDADRVCFTTGAMRVEPDRRHLTMPVIGTVRTHENTRRIERLIRAGRARVLALSVRRNGIRIDASVRVLVQRPQQPKVTQPPSRVGVDVGVRRLATIADADGGVIEHVENPRPLDTALGDLRHVSRARSRCTTGSRRYRERTTQMSRLHRRVNDVRTHHIHVLTTRLAKTHGHIVVEGLDAAGMLRQKGLSGARARRRGLSDAALARPRRHLSYKTGWYGSQLVVADLWFPSSKTCHVCGHVQHIGWAEHWQCDGCTARHQRDDNAAINLARYEDTDTASGSAVGLVGAAVKRGADPKTRPGRAGGCEARKGRSHTAAEQPRDGVRVA

SEQ ID NO: 46072 - protein, 211 aa, Ruminococcaceae sp.
VTNVNDSLHAVHANQSKTVIINGRELRSKRRYQNKIKGKFQQRLSKHRKGSRKYKQLNLKKKQVLKRLDNQIKDILHKQTAKLVQTLKSNDVCTAAIGDVRDIRQNVDYGAKANQKIHQMPSGQVRAMIEYKCERNGIATVLIDEAYSSQTCPNCLKRHKPSNRNYICPFCGFAYHRDGVGAINIRQKQMYREYAPVVGVMAPPVGIRYVV

SEQ ID NO: 46073 - protein, 374 aa, Ruminococcaceae sp.
VFAIELTVTAKLLIKPAEEQKALLLKAGRAFSKACNYISGIIFDTHNLNQFKLQEETYNTLRGTYGMPSQMAINVIRHVIGSYRTILASQKEWIKPDYKHTAYPLTWNRDYLLRENYFSVGTLKGRIKLEYDSGGMEKYFDGTWTFGAAKAVNKHDNWYLHISMSKEFEQLQDFDVANIVGVDLGINFTATAYDSKGNTTFYSGRQIKHRRAHYKNIRKQLQKRQTASARRRLKAIGSRENRWINDVNHCISKALVDANPKGTAFILEDLTGVRHATEKVRLRDRYVSVSWAFYDLRQKLEYKAKMSGNKVIAVDPRYTSQTCPKCGHTERANRDKKNHIFKCNNCDYASNDDRIGSMNLHRMGIEYLSAVASE

SEQ ID NO: 46074 - protein, 401 aa, unknown
  TnpB Polypeptide
MRVLDELCDYRRYCWNQGLELWNELYDQRVAMVPVDLRKKSQLALKDKTIVFSEEEKELLNSFPSPSNRVVRDLLVKKKEDWQYLLSSRVLQLAVKDLSVAWSVFFDSRNSSKKRKRKIGKPTFRDKKNPKQGFKTNIAYIKNGKLVLDKPRAYTGSWYGISFRGYNLPDGKIKHCAVTKIGNSYQAAITMDYPEQPLPKTGEKTAIDVNVNHFDYTDGSFAVFPKQLEALYSQIKFYQRLLAKKRQENVKNATRSKRYFKVRTKLQKRYQRVAAIQNDLLHHFTTMIYQNYDTVVIEDLNVQAMQMTKKAKNLHRSLFGRFRLLMEYKAIKFNKKLIVANQQYPSTQRCSSCGHVKTGDDKIGLAGNKKHGTKHNEYICYSCGFVADRDQNAVLNLLALA

SEQ ID NO: 46075 - protein, 355 aa, unknown
  TnpB Polypeptide
MANANKKIISKGKAGQEEKKPSKSPVTVEVVDGIFVFHGGKGGHNITERKNKALEPYGKCIYNYGLLLELIPGDKTSRINQNIGNSRYVHNNYLAERIKYYDEHKKTLSIDQYKKEFLSKLKEEKEFLKLTDKFVYQNACQNVETAYQNFFSGKSGFPNFASSRKPNGNSFTTNYTNNNIELKMIDGLPYLKLPKIGNVRFVLPKGKTLADLQPLGVSIKSATVTRTNSRYRVSLQMETVIDRPVFPTVIHADEVFSVDLGLKVFGMFGNAKETFTVPTQDGSKSTQDACAGSSRVYPESSTTKTPTGDRRTGRRHVRRWQRSSVRLLTRDGISIISWQGPLQIITPLSSAKTWR

SEQ ID NO: 46076 - protein, 310 aa, unknown
  TnpB Polypeptide
VCKTQKNKLESILKIKSGSEVKSVEKAYKYRIYPNKKQKEIITKTFGSCRFVYNKYLAKRIEMYEKNKETFSYVQCANDMKTLKLELEWLKEVDSTALQSSLRDLDSAYQKFFKEHTGYPKFKSKKTHRYSYKSKCVNGNIQYCNKYIKLPKLGMVKTKNKLIPQGRILNATISQEPSGKYFVSLCCTDIEIQPLPKTKNAVGIDLGIKEFCITSEGEIIPNPKYLKKSLDKLAKLQRELSRKSKGSSNRNKARIKVARLQEHIANQRKDFLQKLSTKIVRGNDVICIEDLQVKNIIKNHKLAQSIVDVS

SEQ ID NO: 46077 - protein, 390 aa, unknown
  TnpB Polypeptide
MVVRKVAQRIPFTPSKTQAALLEQCFGARRFAYNQQVEAFNAYDKGTNPHPKYPGVTDMKEANEWLRDSPIPSNALSNAIMDFRKVQSAYFRKAEYGKNRPRFASKSDNVQSFRNGKPMRRMEGNRYPLSRKLGSVRIRRRDRLRYPIESLSSWTVKRENGVYYLVLLFDVDVQPKPPVDGRVGIDVGVKDFLTLSTGEKIDYPDRLRQLEEKARWEQRKLSRRVKGSSNYRKQKATVAKAYAKVRHFRENFQHQLSHRLIEDNQFIGMENFAVQNMTRRAKKKLDENGKYTRNGQSAKRAMNRSILRNGWSSFVCKLAYKAQWYGRTFVQVDRFYPSSRLCHNCGRKYDGLLLSEREWVCESCGASHDRDVNAALNILGEALRLSQTAG

SEQ ID NO: 46078 - protein, 415 aa, Acidovorax sp.
MQRLQAFKYELMPDGAQECQMARFAGACRFVFNKALALQQANHQAGGKFIGYVAMAKHLTAWRNGPETPWLANAPVHPLQHALKDLEKAYKNFFAGRASFPRFKRRGGVAAFRYPDPKQIKHDWANARIFLPKLGWMRLRLSRPVLGEVRNATVSVRSGRWFVSIQTVREVADPVLVATSAIGIDMGVARFATMSDGTYLAPQASFKRHEVRLARYQRRMARKVKGSANWKKAKARVQRLHSRIANVRQDFLHKASSQIAAQHAMVVIEDLQVRNMSASAKGCTGAPGRNVRAKSGLNKAILDQGWAEFRRQLAYKMQWSGGELIAVDPRNTSRTCPECWHVDAQNRKTQAIFRCVVCGHTAHADVVGAINILARGHRVAACGEDVSRGEAVRQLRAASVKQEPAEVTTHEVTHA

SEQ ID NO: 46079 - protein, 366 aa, Methanosarcina sp.
MNMDRTIKLKLGVSEEDKETLKKTITLFNTVFNEVAQYGFEHKTHSKVSIHHATYKDIREKYPELPSSLVQGARDIACEALKGVKLKRIPVAKTFSSIRYNQRVITYYLKTESVSIATVNGRIKATFNIPECYRYYIDWEVRSSTLKYDIKKDAFFLHVIFRKESPEHSGNRILGIDRGIVNIAVCSNNVFFNGKSIKNVRGKYAYLRKQLQSKGTKSAKRLLKKMSRKERRFVTDTNHCISKTIVNMPYNIFALEDLTSIRVQNRKGKDFNRKLNSWAFYQLAQFFEYKAEALGKRVIYVDPRFSSQKCSKCGDIRKSNRKGSSYHCRDCGFQIHADLNASRNIAQAGISCLSRVSVNNPNVATI

SEQ ID NO: 46080 - protein, 476 aa, unknown
  TnpB Polypeptide
MPASTQLISYEERGPISPATSDASVHGSEGGKKGSKKGFLVSAVKVSKERANVVRLLPSGAQERKLRRLADASAKLWNELNYERRQQWSGGQRVDLEGTERKYREEYKGVLGPHNADAVINKNNEAWGSFFSTLKSKKEGKLPKHERVSPPGYWKDREEGRRKPIFVVAGDSYAVDEVNHTVRIKLGRKKKPLEIPFAGRLRWYGKQGRMEIHYDGARRAWHAQISVKVGAEETRDGNPARIVRGERKSIRTAEPKGKVAAAVDLGINILASAVTSGGAWLLYRGSRAKEDFFHLTKKIAKIQSEADEARKGGDDEKSRRLSRKRRRLFRKLAGRTAHLYWNLANHLVRSLWELGVSKIYLGYPRDIAQDRGNKLTSNMWSYRKLMRAIELKAQEYGIRVYEVVEYNTSNHCAIHGVEVTRSPRGVVTCPLGHRLHSDLNGALNILKRGAGSVPATLKGPLSFLVDHSGIAPVKAA

SEQ ID NO: 46081 - protein, 364 aa, unknown
  TnpB Polypeptide
VKYGKVAIPCKYKAKDLWLWDEEKAILAYLAEPELQDAHAVDQMSKGIITDTYRPCFASLVCKKIRGRLRVYVHITVEGKAISKRRKDSTPRHYYGKGNIGCDIGTQTIAYTSNTEVGLENLAERGNSIQHVERQEALILRAMERSRRAMNPNHYNENGTVKKGHKQWNFSKRYQKLKQRHQKLCRIAAENRALAIREQVNHLRSLGDCFITEPPNAKKLQKRANPENPVDKNGRMKRKKRFGRSIKNRCPGYLQAKAKQLFESTGGMYVEVPILYRASQYDHTSDSYIPKKLSQRMYHLTDGTKVQRDWYSSYLLYCINKTYTQINKLKCRSNFATMYQKEKNMIEEIIRSGKKIMNSGIRTV

SEQ ID NO: 46082 - protein, 444 aa, unknown
  TnpB Polypeptide
VVLRCDCTSSRHSPSSRSALVIKYYLPFTKSQLIRVVKSVRQSCDVPPEILHMLETFRMMVNDCIRIGLQHDASTLKRLAMLSYCQLARYRILSQYKKAAISRAAAILSNRKKSIRRGHQTKNPCMMKPILASYRGFKIDSDNFGIPIGNNQYYRIPLNRYLKLILMCDPTISLRSFTLTPSSISISYSKDVDEMECYGMVGIDRNLKNITVGNINEVIQYDLSKAADIAENTRSIMRSFRRNDARIVRNLASKYGRRRNNRVKQLLHKVSKFVVQKAKQEKTALVFEDIRHIRSMYQRGNYQNKSFRAKMNSWDFSEIKRQMQYKAKAEGLPSIQLTGEQTRGTSSLCPQCGTRTQAAARGDVWHQRQLWCEQCQRWCDRDVIAAMNLSLRGLLQFSSPQGAASEAMLLGIGYFRPIIRRVDAAKLNSRKLVVHRGFSRTTIV

SEQ ID NO: 46083 - protein, 382 aa, unknown
  TnpB Polypeptide
LGDPRCYGGWLSGSQVERCDVVRLLPTPQQEELLRYAGDQCARLINMENYRRRRLFFANRGIDAGVKIARQLAKTIPEYLEVKEILGSMNFDETLRKVSEAWKSFAAQLKERKEGKLPPWMNPRPPGYRKRNGEHLPIIIVSADNYRVDVERKVIHLGYWNISVQFAGKLRWLTKPGAKRGRERWHGAALQGKALKSDYYFEKRIAGIDRALSRLEEADRSVLWEERMRLYEKRRRRRDQAHANAVAHLAREALKRNTGIVFIGYPWHISREKPGKGNTNMWGQRRLVLRLATTLENAGIPVFAISEDSTSKMCAYHSCDVLRKPRGLVTCPHGHTMHADVNGALNIMLRGLKALGIEAEPPTKIRVLSLLATPSRVKPIKP

SEQ ID NO: 46084 - protein, 447 aa, unknown
  TnpB Polypeptide
VRVVPLNAWALLLWGATGDPCCYGGGVSGVQVGRCDVVRLLPAPQQEELLRFVGDQTARLINMENYRRRKLFFEGGKIEKDVKVARELAKRLPEYLEIKKVLGSMNFDEALRKIGEAWRSFAELLKKKREGELPPWLKPGPPGYRKRGGERQPIVIVRADNYRIDAERRVIHLGYWNIDVPFTGKLRWLTRPGAKRGRLEIIYDPVKKRWYAHISVRVLLEGRHSGREFMGIDLGREVLVAAVASSGEALLYKGSALKSDYFYFERRIAAIDRALSDPRAEEATKSVLVEERRRLYDKRKRRRDQTFANAAAHLRSEALKRNIGIVFIGYPWGISHEKPGKGNTNMWSQQRLVLRLATTLESAGIPAIAVSEDGTSRECAYHGCVVVRKPRGLVTCPHGHTMHSDVNSGLGIMARGLEALGIKARLPEHIRVLSFLPTPSRVKPIKP

SEQ ID NO: 46085 - protein, 413 aa, unknown
  TnpB Polypeptide
MSKGSRGSWRGGFRVFKLHVNSENLPKLRQLFKDFVEGEARTRGALCYRDEWLEEWKNVLNMRGDAGKRTVPNPPAITLLVRFVMPNGSVRGNTAAPCVIDLRRKELRIPSYGVSVPLRRSLARALVEENGLDPRPEFVLQVTRRGFLRVIARREACSEFTFPTRIITIDENSVYGFSIGAWDIDANILRVTLRHFEKLRPPNHSYGRGVASLLQSYAAKPSGEARQRLAELLPEEVLRTLTTERARELAEATRGKERRLNNAFVERLVARMRGLVREARRRGMNVLMLVDPIDPDSLRGTRLQGTLLRARKHVRNLAVYEGATFRTVRASGKVCPRCPAVGVEVIHTKRSRIYECPKCGMRWDRDEGVHYTMVVRYFERLRKEEGDDETVMAERVLAALKEWLEENPNILMF

SEQ ID NO: 46086 - protein, 607 aa, Deltaproteobacteria sp.
VSVLRLALDTSDPLQRGRLEAMYQGAYQVRRAVQRRAKNACRAYWAATHERNDQGPASVRDRLGLSKTALERAAYAHLNAAPHLRRHVTKALAMNLADGVWTAAERHLFRDASGNRHGALRIGRWYDFTRLPGRARSHTRERKWESFRLHGTLAGHRAAYADGSGDFVQPRALQPIDSGDAWWKYAGPLALVFSGLADGTLVLPVRLPTSPCNQPILDHHLTDPSRWHKIDVVRTQDPQSPGGWRYEAHLMVLTQPYVSGSTAERRARSAIETADRTVGIDVNVSNLSIASHDTGRDMRLSRVVRDEPQQQRDRGRARRERRRQRALDRSRRALNRQHYKLSRRQDKRARRRAEAGLRPVEVVPAGPRLARTDGVPLTSYRADQLSTRYRRLRAAQVACAASATQARRDRAREVAAGVVAAHGYQIVIEDVRLPAWSASWGRAVAAFSPGTLIAAIDHEARAVGVRAGGSGGIERASTATTALSQHCPCGERVPKRLADRVHACPRCRLRGDRDDVSAILASFVVLTERGVPASARVDYPAAHDALGEIRRALRSAASTYHGWARHPVRVNRPLGPRWIVRRVVDAHTRLRRGGSANRWHGRVFNPA

SEQ ID NO: 46087 - protein, 376 aa, unknown
  TnpB Polypeptide
MKLVATAKLLPTDAQSTALLSTLERANAACNWLAERAFAEKTADKLRLHGDFYRALRDQFGLSAQMAVRVIGKVCDTYKRDRKILPVFDLHGAVPYDQRILSFKALDRVSILTLTGRQLIPYVTGDYHRARLQGVRGQSDLVLKDGGWYLYVTVEVPEEAPVEPKSFLGVDLGIRNLATDSDGDMHSGAHIEAVRTRLHTLRTTLQTVGTKSAKRHLQRLGSHEARFRKDVNHTISKVIVTKAKGTNRGLALEDLKGIRDRVTVKKSQRAMHSGWAFFQLRSFVTYKALLAGVAVVSVDPRNTSRECPSCGFTAKENRRSQAEFLCKSCGFADHADFVGATNIARRAAANRPIVSTVKREPHSRDTSLRSGTSRPL

SEQ ID NO: 46088 - protein, 400 aa, Scytonema sp.
MRTAYQYKLRPTKQQAEEIDRWLSMLCAQYNYLLARRFDWYEQNRCSIDACPLVCHIPELRDNPDYYSQKKTLPNLKRTHPHYSNVYSSVLQDVVKRVKLTFDRFLIGDCNGKRSGRPRFKPRDRYRTFTYPQMKDDCIQGTLITLPKLGVIKVILHRPIPDGFKVKTASVTKKADGYYVTLSLEDPTVPTVKPDINPNLITGIDLGLKEFLTTSESETVAIPQHYRKSQKRLRVIQKRVSRRKKGSNRRKKSVKQLGKQNKKVADKRKDFHFKTAKQLLSKHDVVVHEDLNIKGLSKSRLAKSIHDAGWSSFLSILSNKAENAGLLVIAVNASGTSQDCSSCGMKVPKKLHERWHSCQCGCSLDRDHNAAINIKKAQRLEAEASSDPSFVRESGRAFRS

SEQ ID NO: 46089 - protein, 389 aa, unknown
  TnpB Polypeptide
MGGKAELLSGHSMALKALHILKGRVPPRPSGLGVEATFLRTLTLYDLRPYHTSMKQEDTPSKRLCRKAFKYRLSPTKKQEQTLLFVLRRCRHLYNSALEQRKAFYQMRRKSLGYSAQAAELADLKAAYPAYQDIYGQVLQDVLRRLDKAFAAFFRRLRNGEKPGYPRFKGTNQYDSFTYPQSGFALAGNVLTLSKIGDLKVRVHRPMVGQLKTCMIKRDVNHWYVTFSCEVEGEPLPPSEEEVGIDVGLLHFATLSTGETIENPRHYRRGLKRLKLLQQAKDHKQKGSRRHKRVAIALAKAHRKVRNQRADFQHKAARALVNRFGTLVFEKMNIPNMSQAPDPKPDPDNDGAYLPNGASAKAGLNLSILDAGWGQFQAFCVAKAASAGR

SEQ ID NO: 46090 - protein, 397 aa, unknown
  TnpB Polypeptide
VLILEYKLRTNQAQRAAIDEAIRTVQFIRNKALRLWMDGRGVGWAEQQRLCAVLAKEYPFAAKLHSNARQASADRAWAAISRFYQNCREHKPGKKGYPKFQHDNRSVEYKVGGWKLERDGTRLTFTDGSGIGTLRLIGTRSIETFPIQQIKRVRLLKRSDGYYVQFAVKADRQMAHPPTGVQVGIDMGLKSFYTDSQGVTVPNPRFLRKAECKLKRLHRRKNRKQKGSANRNKAIKRLAKEYLKVQRQRQDFACKQARALIMSSDLIAYEDLQIANMIKNHRLAKSISDAAWGQFLAWLRSYGQIASVPVIAVSPRFTTQGCSRCGEQVQKSLSTRTHVCPCCDLVLDRDHNAALNILDSALRTAGRAGTGSLRAANASGQGTSGRRKRLQTVKLAG

SEQ ID NO: 46091 - protein, 420 aa, Ktedonobacter sp.
MQLVEQHIIDKNDPRYAVIDAAAFASKNLYNAALYEMRQAFIHQGRYLSYSQVDKMMQSHEAYRALPAKVSQQILMLLERNWKSFKEAKQAYQQDPSKFTGRPQLPKYKHKTDGRNILIYTVQALGKRALKRGLIQPSMLPISIKTRHSEHIDQVRVVPRKGFYVVEVVYEKDIVQAPVNPAYYAGIDIGMNNLGALASNKPGFRPVVINGRPVKSANQFYNKRRAELQHKLGHSGTTERMERMTNKRNRRIDHYMHTASRKIIDLLVQEEIGVLVIGKNDGWKQECEMGKRTTQNFVQIPHARFISMLTYKAELVGITVKITEESYTSQASFLDRDPLPVRKPNDDTKHTFSGKRIKRGLYRASGRRFINADINGAYNIVRKVAPDAFGSEGVEDGRVSPYVVHPVRMTLTKPRKASGH

SEQ ID NO: 46092 - protein, 546 aa, Ktedonobacter sp.
LERIFYKSKGARERFMSKRSQTPTFLLELSLEVSAGQAKRLRAHLEAGRAFYNAVLSEGQKRVRQMRADPAWQVARAIPRTHKPQRAAAFGRLREQYGFTEYALHEAASALRTSWIAEHLDAVLAQTLASRAYHALNRVCVGQARRVRFKSRARGLSSIENKRNDTGLRFVLQKPEEGNRGWLLWKDDRLPAHIDWADPVVKHGLAHRIKYVRLIRRRVSSQRAAGADSQAERYSVQLALEGTPYHKPKHTVGADTIGADLGPSSIAVVPRGGEASLSIFCEGLAPDAKAIRRLQRKMDRQRRVANPEHYDSMGRIKKRGKQKLGWKSSKGYQKTRQRKATRERKLAAHRKSLHGRKVHELVALGNTIILEKIPYKAWQKQYGKSVGLRAPGMFIEMLRRTVASTGGTLTEVSTHRTKLSQYCHGCGKFVKKPLSQRWHRCPCGIGPVQRDLYSAFLAAYLDPANPIPSCARYVIPWEGAEARLRAAYERVQQRAREGQSLPRSFGCARAGARLPGSLSEPTQEPVLLLSRGRQEAWKQRSEPPVL

SEQ ID NO: 46093 - protein, 529 aa, unknown
  TnpB Polypeptide
MQFVKVFRGGEDMESVRRAVAVELERPPPELYAVEEQYRRIVEEVAAYVAERGRLEKEKYNELYHRFREQYPLPAQLTQQAINQGVETGKSFLELKRDGRVHKPHPEVRRVSIRFAKDSWSYRKTATAIAPVKIAVSLPSGRREVWIKPHRRFWLYWWKVLRKEAELASTLVLKRKRNKWYAVFVLDVAPEREPPAEAVAFDVNENSVAVARVTLLSTVDAVARWNRRYVDPAVYSIKTDFGSLAKRYEAVRGRKLEELKQKYPFAGGDEEERRQNVADTREFRKFAKRLRERRRKEGRVRQVAREVTKSPAVIVTEELGKNPQEEMIGVEKEKVKKRELRHRVKQTPFKKLVRAVEEKAAEGGSAVFYVSSFRNSKVCPIHFALLKNGGGWHTLYCPHGHAVDRDAAAVLNMLWRVTPAGWVKGVWWDLRDVKRRLEKGRGLVPRDFAKRRNLLVTWPVVYTVWASLWMLKASPQWPAVLARAAPMNPAQGADEGGTRAPMNRPKGNNSRGGEEVSSSRNTARWAFCF

SEQ ID NO: 46094 - protein, 402 aa, unknown
  TnpB Polypeptide
MDVMEQSRQDGHSGPERATQYNTIKVRLCPTPEQEELFQKTFGCCRYIWNRMLADHERFYEETDAHFIPTPAKYKKEAPFLKEVDNQALTQEYNKLSQAFRNFFRNPAAFGYPRFKRKKDDRDSFTACNHVMGTSATIYTTRDALRMTKAGLIRAKFPRRPRSGWRLTRVTVERTKTGKYYGYLLYACPTRRPEPVAPTAEGTIGLKYSIAHFYVTDHGGTADPPRWLRQSREKLAATQRKLSRAQPGSRNYQELVQKYRLLHEHIANQRRDFLHKESRRIANAWDAVCVRGDDLGAMTDTLIQAGSAVKEAGFGMFREMLCYKLARQGKAFIQVDRYLPTTRSCSACGLTRDALHARDYRRSGWVCPECGAVHDREVNAAKNIKARGLEQFFDLQGQDRSA

SEQ ID NO: 46095 - protein, 390 aa, unknown
  TnpB Polypeptide
MQILKYKYRIYPNNEQVSKLNQICGIQRAVWNNFLAEEMDRYENDGKFNFLHQNSKWLTELKDYVPWLNKSPAVSLQQTLRYLDSAIKQSFKKGSSKKGFPKFKKKRNNNGSFSLTMTSIKANIKGEQFYIPKVGLVNWKCHREVPNEFKSIQVKQEAGRWFVVLTTKKAKIPKRSINSSIGIDLNSKEYVIFNGKQQERFDVPKPLRENQTKMKVLQQLFARSKKGSNNRRKIQYKIQRLHQYMANVRSDFFHKLSHYLVTKYDLICIEDLDVKGIQVKMGKVIQDNMFGAFRQMIEYKAELYGATTSVISRWYPSSQTCSSCGGIQKMPLNLRTYNCKNCNFELDRDLNSAINIRRAGTARIAFGDETPIEQAIVFGQLVNIYEEGSH

SEQ ID NO: 46096 - protein, 499 aa, unknown
  TnpB Polypeptide
MPPQTTTNETRKPLRRAIAVELEVTKELNMLLYSVETAYLNIVREVAEYAVKNNVTSATQLHGLFYSRYRLEYPGLHSHLIIQAIKQASEIAKSFVKRRRKGLVSKPYPEVKAVSIRFDETAWNYEQFIKSIAPVRVELSLPGGRMEVWLRLHRRFWLFWWKVLTGEAEPASTLIVKRKANKWYAVFVFEIKPRVEEPKAIVSYDINENTISICKIDITTVSKVTDWNRQYIMPQLYMIRTDFGRLARRYERVRNAIIERLKQSFTLPSGKYVNITNTREYKKFVRRLREDNRKLGRVRQIANELTKVPTLIITEELGKAPQQSMINEIKRSETRHRVSQIPFKTIEKLIEDKALERGSRMFKVSSHRNSKVCPEHFMMMRKTDDWHILQCPLGHLVHRDYASVMNMMWKATLEGWVKGVWWNMRKRMGWREYEGKSNPLIPQNIAQLLWLLMRNARASLKQSPAVLARGKPMNPAGGANEGWAREKASLQAVRFTMAK

SEQ ID NO: 46097 - protein, 443 aa, unknown
  TnpB Polypeptide
VLRTINVKIELKDLESESHLFHLSTLETQVWNGCNELYLKVWNSTGRVPNQVWVMTNVLKDLKGDLRFYDLGGLSLQEVSRKVDASWKSFESLNTKFKNGELPDWFKQPSPPRFHSRRFFNTVFLNSQSIHFNSKGEIDGVNIHPNRIKGRYKPPVYLARSVKLLEGYELVGAGHSITKNGEGDYYLSLICNVKSEAEKTGEIANPYKIVGIDPGVKTLLTLVDTDGNFVKVENSVRPISIHFNLEADKIRAKRSKCKKHSRRYNRLTKTMVKCSRRKRSQIRIIQNKIAKDLSKSYGVIGIGDLDLKQLCNIQGTKTGRKGIVRDWQLNQFVNIQGQKCENSGSMLLNVNERGTTKTCSNCGYVNSSGLHLGIREWVCPDCGITHDRDGNAGLNILSRTLNTLRNQGLCTVNVPLPTLGRCVTVKYSYQSVGPSNKVNRLIA

SEQ ID NO: 46098 - protein, 405 aa, unknown
  TnpB Polypeptide
MRRKPTLKAYKYRIYPTDTQVVFFAKTFGCCRFVWNKMLDEKLQAYNKKERIPRIIPAKYKEEFPFLKEVDGLALCNIQLQLEKAFKNHFKNRKQFKLPKFKKKRDKQSYTTNNTHNSIRVDFDRGFLHLPKIREGVKIELHRKFDGKIKSVTVSRTNDGKYYASILVETENPRNKVVEPKSKACGIDLGLEHFATVTNDLGSYKFEHPKYLLKAEERLRRLQRVLSRKQKGSKNSEKARLRLARRHAYISNARNDFLHKLSKAIIDENQVVVVEDIGVKGLLKTRLAKSISDSGWSRFLSYLKYKAKWYERTFIQVDRFFPSSKLCHRCGHKNEDLALHDRTWCCPSCGETHDRDVNASINLYYVGLGRPEVKPVERALVDDRSPNGLPKKPSRDEAGSSTTKS

SEQ ID NO: 46099 - protein, 375 aa, Moraxella sp.
MLKAYKYRIYPNREQAKSLENHLGCARFVFNWALGLQTRYYKMFGKSLTRNQIQTQLVKKKKKASFLWLNNVNSQSLLNAILNLCKALVNFFKGLAKYPRFKSKRFSKQSYQCPQHCTVNFEQSIINLPKIKGIKIKLSREFIGKIKTVTISKTATGKYYASILVESDEITPTPTIIEPERTLGIDLGIHHLLNLSDGTKFDNPKHLTKSSKKLANNQKIFARKHKTSNNYQKQKLTVARIHEKVKNQRLDFHHQITHKLICENQATSYAIEYLSVKNMVKNRKLAKAINDVAWGQFVNILTYKANWYGKNIIKVNRFFASSKLCSHCNHKLDNLELKIRNWICPNCQVCHDRDINASNNIRQQALADAAGLAAV

SEQ ID NO: 46100 - protein, 222 aa, Moraxella sp.
MTPIRGHIIRLIPNNKQATYFAKACGIARLAYNWALNEWQKQYKADKEYRDFCLKNNLAIDENKLNKPNEGKLRKQLNSIKRQQFPFMLEVTKCAPQLAIMQLGDGYKRFFKGESKYPQLRKKGIDDRFSLSNDQFKIKQINNKSYIQIPRLGLVKMRENLRFNGKILSAKVFKKGSNWFVSIAVELQDVIKSLPKTNKTVGIDLGIGACVRLEPNGKSGGR

SEQ ID NO: 46101 - protein, 468 aa, Sulfobacillus sp.
MKPFRSVCVRFLRTSSRMTTSRFRNGTTPENLSMFCSRLIPIPNYPSVLTPIKAYHRDSSKKNFLTYEKRCGKSIFGHAVSACLRQEVLPLRPSKDPSKTRENETVSVLRFRLEPTKEQKQTLFHTFYLCRRLYNEALEERVTAYRENGVAIRYTEQQNRLPAWKQEHPEYKEVHSQVLQNVLQRLDQAFVNFFEKRARFPKFKNKFMFRSITYPQARDTYFRENQVYLPKIGWVRMMAHLPFDPSSVKMINVKFHDGKWYANLTYVTEAAVPLTEIQNTVGIDRGLLSLIATSDGEFFENPKWLQKSEKRLKRKQRQLSRKQKGSKNREKAKHELQGIHDHVANQRKDHLHKVSRLLIDRYDLICMEDLPVKGMMKNHRLAKSIGNASWGKLGIYLEYKAKNAGKQLIQVPPQYTSQLCSGGCGTLVKKDLSVRIHQCPTCGLEIDRDVNAAINILHRGLEILQQVS

SEQ ID NO: 46102 - protein, 417 aa, unknown
  TnpB Polypeptide
MQLTKKIKIYPTKEQVDVLWQLSDKCRLLYNHALSERKEAWETEQKSIKYIDQQNKLPDFKKQNPEYTVVYSKVLQSVLKKLDANYKSFFALWKNGDKTSRPPKFRSKKYFMTLVYNQSGFKIKDGKVSFTHKVNEIPLSFEMGIGFDSLAIKQVEVYNDDPYKGRGNFFISVTHEVDSVKKYHDNGLYQAIDLGITKTVTAVNTHGKFLEITTPRPDKYWNPKTDSIKSRKDHCKKNSKRWNRLHKTYRKMEAKKTNQIKDFQHKLSKTIIGNTKSNTIIVGDLNVKEMTRSKKVTGKQKHSQNRSTQNQGYLSRFVGFLTYKAELAGKKVIRIDESYTSKDCCVCGVRHDMQLWNRIMKCGCGNVIDRDRNSAINIMKRFLSQNALWTSYQQFIDNLRQTGLQMDNCSNTAIQMT

SEQ ID NO: 46103 - protein, 349 aa, unknown
  TnpB Polypeptide
MILVYRYRVKSLNGLLNKQARAVSFVFNYCNDRQKDALRFGRRWLTGFDLNKLTTGSSKELGLHAGTINAVCEQYAKSRSQKKRPFLRYRGKKSLGWVPLKGRDIKETKDGFHFHGREFRVFKSRDLPVDAKIKDGTNFSRDARGNWFLNVCIEVDQPEQRPMRTGVGIDLGLKSFAALSNGETIDNPRHFRRLEEKLGKAQRARKKRQAANIHARIANSRRDFLHKLSHRIVREFDYIAVGNVSASKLAKTSMAKSVADASWSSFRAMLAYKALRHGAWFEEVNESWSTQTCNACGVIAGPRGRAGLNERAWVCSGCGCEHDRDQNAALNILARGSGHRAPVEGIPAL

SEQ ID NO: 46104 - protein, 478 aa, Thermoanaerobacter sp.
MIVIQAKLIFLSQEDKQIVLDLMRRWSSCVRFAYKRLLEGYNRNTLKRDLQGTFNLNSRYVDDAIMKARSTLKSSKELGNNPKKVIFGGKDLFRKLKKRHINGKEYQKLKTKWQEKRKGNLYSRGDKSKKGNLNTRIEVKENGTFLRINVGERKYLYARIEAGYRKNKSRGKLLQEIAQSNIPYSVELKLKNGNIYAYFAIEEEYPEIKITKEKGVIGIDVNAYPDNISWAETDEKGNLISYRNMPMTELASGSKDKKEYFRWQYAHEIVNIAKEKGKAIVIEGLDIKNKGKRGDFSGRKSRRIRHNFSYKSLLSKIKTLAKREGVEVIEVNPSYTSIIGMLKYSPQYMITKDVAAAYVIARRGLGKEEKMPNNYMKFLNALTVDELEELKKHVKNTIKNKHLKKKHLREINKAIKFLQSLESKPGRALEPLNGTSFSAYNFWQVLKVAVVTPLSPEKVPRNFSTLKGLLIQGKWRDL

SEQ ID NO: 46105 - protein, 365 aa, unknown
  TnpB Polypeptide
MKINKAFKFRIYPDNTQKQFFAQSFGCARFVYNRFLRQRIDYYAENAKGLTYHNNALALTQLKKLPEFEWLKDVNSQSIQQTLRNLDIAYHNFFNKKAKFPNFKKKSNKQSFNVPQHFDIHDNMLDIPKCKGIKIKLHRDIEGTMKSITISKTASGKYFASVLCELEIPEPVYSGSEIGIDYGVKAFITTSDGNIIESPKFLRKSELKLKQLSKSFSKKQPSAKNRYKAQKQLARQHEKVSNQRQDFLHKLSKRLVCDNQAIYIESLSIRNMVKMHTLAKSISDSGWNIFVNMLKYKGAWYGCRIIEIDRWFPSSKRCHVCGYINDNLTLSDRSWLCPECNTNHDRDINASINILTFGRAGIART

SEQ ID NO: 46106 - protein, 401 aa, unknown
  TnpB Polypeptide
MIRRQAYKFQLKANLSQTRQMRRFAGACRFVFNQALALQKANYEAGNKKLSYADLCAELLTLKLSNPWLGESPSQTLQQSLKDLERSYTNFFAKRADFPRFKKKGLSSSFRFPQGCKLDQANNRIFLPKLGWIHYRNSREVLGEVKNVTVSHSCGHWYISVQTEREVSDAKHPSTSAIGVDMGIAQFATLSDGHVFAAVNSFKQKQKQLARYQRAFSRKVKFSQNWKKQKSKIGRLHQTIANIRKDYLHKTTTIISQNHAMIVIEDLQVKNMSKSARGNLNKPGRHVKAKSGLNRSILDQGWFEFRRQIEYKQVWRGGNVLAVPPQYTSQRCSCCGTVSKENRQSQAKFACIACGYQANADVNAAMNILAAGHAVLACGEIVQQDNSVKQELTEETSHEHA

SEQ ID NO: 46107 - protein, 228 aa, Herbidospora sp.
MLSEHRKGESDLIHRDGMWFLHATCDLPDVEVVNPVAFVGVDLGIANIATTSDGVLYVGKTLRAVRHRHRELRRRLQTKKTKSAKRLLKRRSRKESRFATDTNHVISNRIVTEAKRTGRGISLEDLSGIRERVRLRKPQRVTLHSWNFHQLGSFIAYKAARLGVPLVHVDPACTSRECSTCGHVDIKNRPDQATFSCTSCGFAEHADVNAARDIASRGAMGWAVSHAA

SEQ ID NO: 46108 - protein, 281 aa, Pseudomonas sp.
MEITKTLKLRIKDKHAKTMLAMARDVNQVWNFCNETQFRSLKRYCNKPKVWLSGFDLQKLTNGYSKCEGVSIGSATQQQVCEEFASRLRQFKRQRLNWRVSDRKSPKYSLGWVPFKARALTYKNGQVRFNGINIGLWHSYGLSKYTFRAGSFNEDSRGRWYLNIAVKIEVVDKRVPAGSSVVGIDLGLKTLATYCSGDRFEPARWYRESQAALGIAQRARKTRRIKAIHARIANQRKNTLHCETSALVKRHAAIFVGNVNAKALAKTSMAKSVLDAAWSTF

SEQ ID NO: 46109 - protein, 422 aa, unknown
  TnpB Polypeptide
LEPFAHQQRRLKSLAGACRWAWNHFLRFREEAYLAAKAAGGSLPKGAFSYVANAKELTRLRTRRPWLKEADITGLQQALRDLDLAYARFFAGEAGHPGPRHYGDDRYRVCGEASFGVDGDWVRLPKLGWVRFHKSRDLPTGGRLLNVTASREGADWFVSCCVEHSVAVLPAPIGDPIGIDLGVTQSVAFSDATVPFQMPVASRTEERFARRLSRQVSRKTKGSNRRKRAIERLAKHRRHLARRVKDAAHKLTTQLASTRSEIHVEDLRLRNMTASAKGTVEEPGASIRQKAGLNRRLLANAHGQTVRLLAYKCARSGAKLVFKDPAYTSQECAECHHVAPENRPSQAVFRCVKCGHQDNADHNAARAVLTRPAAGQAVAAHRGKRKTARKGRGPDEVRTHPSDPGLPAPGSTGIPAKAAPAA

SEQ ID NO: 46110 - protein, 422 aa, unknown; identical to SEQ ID NO: 46109
  TnpB Polypeptide

SEQ ID NO: 46111 - protein, 382 aa, unknown
  TnpB Polypeptide
MLVYEYKLDGNQKQFAAIEEAIRVAQFIRNKCLRLWMDGTNVSQNDLQTYCAVLAREYPFATRLNSQARQASADRAYFAICRFYENCKNKKPGKKGYPQFQHTNRSVEYKKTGWKLDDDGRHITFTDGCGIGRLRLVGNKQQQIETFPVKDIKLVRIVRRADGYYCQFVVSTERNIEHVASGKQIGIDVGLKSFLTDSQGNTVSNPRNYRKAEKNLKRLQRRLSRKTKKSANRRKSRKALAKQHLKVQRQREDFARKQANALVSSCDLIAYENLQIRNLVRNRKLAKSIHDAGWGIFLQWVTRYGFLHDIPVIAVPPHYTSQKCSDCGTLVQKSLSIRTHICHGCGLVLDRDQNAALNILYKARSIDQNGTEGHSGTNEQVS

SEQ ID NO: 46112 - protein, 354 aa, unknown
  TnpB Polypeptide
LQLRPETPQDVQRAGFGRRTPDTTHEPSREVRPLGRTRLRVYVVGSSSRSGNEFLDAAPHQSRTGRPLARPRIRGRESGRDTASTASEELVLHVTVEYPVEEPAADGDATHIGLDIGETALITGCALKDGSPTDPFVCSGSRAKHLRKEMHTTLKRLQERDASEWRTDDERFDHYQNALTDIVEKASREAVEYAKQFENPVLVMEDLTYIRERLDYGKYMNRRLHSWAFARLQGRIEDKATEAGIPVEYVNPAYTSQTCHSCHRIGRRDSQAEFRCPNDDCHVSTFQADINASANIARRVDPWGESVPLDKAGRDDSPRDGSGCDTATTHREKSVPAQMTLTAYEESKPSTSDD

SEQ ID NO: 46113 - protein, 468 aa, unknown
  TnpB Polypeptide
MLTCFRYIRQAMLTGIRLKANPLREQKEVLSQWMGCARFIWNAKCDENKYLSHFARRYLPIGTYPSIDQTYSQYKTELSPWLSECPSQILRNSASNWYQTYQNFLKGVCGKPKRKNKSETSSILLTRELFRFEKCVDGVTRLFIGTKNNNIGYLSIKNHAPYKIPNSLRISRENGIYWVSFCYEDALDPEILQTQFQHLEYLKTCSPEELEKMVIGVDRGVKRPVQAGNEVFDFTEEQKKHKKAKEKYSKRCQRRLSGQKKGSKRWRKTKRKIAKSHNKIGNIRKDFCHKTSRAIVDQENVKVIILESLQTKNMTAKPKAERDPGTKKWLKNNCSRKAGLNRAILDKGWYQLEVFLKYKSHRAGKAFYKVSAHYTSQECADCGHTHPDNRRKQELFLCESCGHTDNADRNAAEVIKKRAIKLIMDSGTELSCKGVLQDKGRGAVDKTKVAKATFANSKETSKKKEFAA

SEQ ID NO: 46114 - protein, 444 aa, unknown
  TnpB Polypeptide
VISIKITSSYSVKINNYTKVLRPTVNIYRKAVSFFIDVIDTEWESFSSITNTNGSVLIAERLTHSTKNNLSVKYNFDERFYKFPSYLRRAAIADAFGIVSSYRTNLANWETSDRENKPPRLKKNHSCNPCFYYNNMFEGDCYSKTVKIKYFNGKDWLWLPISLSSQDVKYLNSKWSHCKPSAPILERRHGKNYLRFSFSEKVSLNKTPIEEQKIASVDLGLNNHAVCSVIDCKGTVYSRKFINLKYEKDLLNHKLNKLKKFQRQHGSKNSLSRWSFINNLNDNISRKVAHQIVEFAISQNVDVIVFEHLDIRGNKHGSKAQQLALWRKRQIQKIVEHQAHRNGIRFSRINPNGTSKYAYDDSGLVVRSNENYSLCTFSNGKQYNCDLNASYNIGARYFIREILKPFSAMERSHLEAKVPSMAFRTKCTLATLISLNKVLAASAA

SEQ ID NO: 46115 - protein, 437 aa, unknown
  TnpB Polypeptide
MAWSGKSHPHRLLLTKQFPLGLEVLPLFQPAMLAANRIWNSCVWHSRETLKQENRWSTEAELKAKFKSFAVWKELHSQSAQAVVEEYFEAVSGYRKHRENGHLEMNPPNFKPKNHLRTVTWKRQGFNVEDDSLVLKLSRKKEPIKVALPGGWDAVTLPDGTGVRGTPVEVKVKAVVRRRKVENLVLHVTFDLGVVPVYRTGAVSAYDYNSALVARATLSGILDLFICREILSQVQYRNKTIADFQEKMSRLKEGSRRWRRCLSAKIRRLKKLDRRIRQMEHALTKLFAELDEAEGVAFAVVGDLTDLRRSARTGMKGKKATQKINQMAYDRLHAEQRYKNLMRGVQTDSWTEKNTSSTCCFCGARNPAWRKHRGLWVCRKCRLILQADLNGAANLLKQYLFGSCVGWKLPSTFGEPQVWRWDKRSNRFVQVSPRAAA

SEQ ID NO: 46116 - protein, 412 aa, unknown
  TnpB Polypeptide
MTTVQQVEKHIIKKSHSYYSMFCEYTHLAKNLYNHANFLVRTEFTKTGKWLRYYELDKILRRDVDYPDYKNMMAAQSAQQTLRLLDDNWKSFFKAIKDWSRNKDKYTGKPKLPKYKPKDGKMVFMLTNQQVRLRDDLLYFPKSFQGFTVKPRCVRLDNFKRINQIRIVPNNQIFCVEIVYSISVSDTLLQDNGRYMSIDLGLDNLATVVTNIGSNPVIVNGKGLKSNNQYYNKKNAHYQKVAKQMNDKSYTNRLCSLTQKRNFKIEDSLHKISKFIVTSALSDNIHTIVIGNNKDWKRDISLGKKVNQSFVSIPYQKLIEKIIYKARNVGINVVLTEESYTSGTSFLDGECPTKEFYDKKRRKHRGLFVSNQSVQINADVNAAYQIMKKVFPNVFADGIEDVVLHPVRVDIM

SEQ ID NO: 46117 - protein, 441 aa, unknown
  TnpB Polypeptide
MATRRQTFRLYPSKAQEKALFEARRLHCYLYNACVSHRETEYKLHRRTVTYLEQQNLLPEFKQVWVEFAQLNSQALQATVKRVDDAYQRFFRGLSRKPRFKSIRRYSGWTYPARSGWKVNSTGKHGTVTLNDLGITLKMRGQAKHWGVPTTLTLVYKPSRRQWFASFTVEVAIPEPKFGSQSDLRYESIVAYDLGTETALTLFDGAEFREITNPRFTQRSEEKIRRVARLKRRKRAPKKGVKASRRWKKIHRREAQLKAKVARQRKDWQHKVTSEIACRYDVGVTEKLHVKGMTRKGGKRKAGLNKSILSVGFGTLNRMITYKIEQKGGLVLMFPTQTLKPSQRCPKCGAVHKEWADLSNRYHVCSGCGFEVPRDRGSVMVMYNVATNRQPGLGTSLVSLGCLSTTSKSCGSMKQLGQRKRLKSCRQANGASETPSAYAVG

SEQ ID NO: 46118 - protein, 368 aa, unknown
  TnpB Polypeptide
VKLVAQVRLLPTSEQAKALAATLAACNRAAEWVSTVAWEQRVFHNYDLRGRTYGQVKAEFGLSAQPAQHVIKKVADAYRGDRTTRRRFQPLAAQPFDDRCLSWQLAQQAVSIWTVGGRLKGVRFACGEHQWRLLASRRGESDLLSRDGRWFLLATCEVPEQPQQPPVGMLGVDLGIVNIATTSDGTRYCGSHVNRVRHRHRRLRQKLQHNGSKSAKRLLRKRSRTESRFVADVNHVISKQIVAEAARTGRGITLERLKGIHRRVRLRKPQRATLHSWSFGQLGGFIDYKARRAGVRVVFVDPAFTSQQCSQCAHIDRGNRPNQSTFKCRRCGFAEHADVNAAVNLKVRGWAAVNPPNADTRVAASDAA

SEQ ID NO: 46119 - protein, 515 aa, Scytonema sp.
MTRKKTPSFITEIPLIVDSAQEKELLSKFEASRQLYNACLNEAMVRMGLVRDSEAFKSAKKILKSKKKERTEAFSAALKAYRYSDYDLQAYATIAANSSKWIANKIDSNTQQTIAKRAFLTSERVIFGRAKKVRFKVSSRFRSVEGKTNKQGIRWKDNQLVWGSLKLRSLIDESNPVIMHGLRSPVKYVRILWRELNGKRRWYAQLINEGLPYQKEKNYVSNGLIGLDLNISNIAFVGDEKAGLLPFAEKVPTYEREMTALQRKMQRSQRVNNPDNYEPDFEIKTGHRTVKKKGKVKKGKRKWNCSRNYKKAAQKKRELQRKKSAYAKSQNSKVVNEILRNGKDIKTENVSVKGWQKRYGKAISAKSPGFVQSELIRKAEKAGGSVHKFSTSYTALSQTHLDGSRVKKSLSERVHHDATGIKMHRDLMSAYLSRYVNQDDILSLQDARNGYPGAESLLLEAWQESVNRKQVGSSESGLIAPERFSNKLKKVDQIADSLQSGRKVNPNFQPESALL

SEQ ID NO: 46120 - protein, 225 aa, Okeania sp.
MIEILSEKSEKTTDNQQVAGRDLGVNNLMAVTTNQTGVAPLLINSRPLKAINTLDNKKLSLIQSQLKTKNHQNSSNRLNALTHKRNCRVENYLHTASKRVIDWCEVHQIGTLIIGQNEKWKQSINPGKKNNQEFVNIPDYRLIEMLRYKAQLKGIKVIITEESYRSQSSSLEQDELPKSGESKPIFKGKRIARELYKTGEKKLLNADVNGAFNIIRKVIPDVFGE

SEQ ID NO: 46121 - protein, 414 aa, unknown
  TnpB Polypeptide
VARGEGVEAVLRAYRTELDPNNAQQTVFVRHAGAARFCFNWALADRIERFKAGQPTNHYEQKKRFNALKKEQFPWLSEVAYKVQEQGLANLDIAYKNFFRRVKRGEVKKGFPRFKSRKRGLGGFTLRGNLTVERQRINLPVIGWVKIKEAGYLPQADVRVLSANVSERVGRWFISLQVEQETAQPKPATGPSIGVDVGLKVLAVCSDGTVFENPKTLKRNEARLAQLQREMCRRQKGSKNRAKTRRKVAKLHFKVANIRKHTIHQVSHYLTAKAKPQTVVIEDLNVKGMMQNRKLSKAIADASWGELRRQLEYKAAWYGVDLVVAGRFYPSSKTCSACGNVKPLLRLSERTFVCEACGMVLDRDANASINLQNLAAKRAVAACGGSIGPGASLAVPGESGTRQALGHKSEKLGG

SEQ ID NO: 46122 - protein, 479 aa, unknown
  TnpB Polypeptide
VPSPGELHQDGERGPTSPAIPGEGIYPVEFSNKRTNVVKLLPNGAQERKLRKLADATAKLWNELNYERRQQFFRGEKVDFKGTWDKYYEKYKKILGVNAQAVMQKNNEDWNSFFSLLNLKKKGKLPPHMRRVSPPDYWKDKEIGKRKLIIVIRQDRYVVDVERRIIILKDFNMEIRFVGRLKWFGKQGRLEIIYDETKDAWYAHIPVEVGVEEARTGRKSKHIVRGERKSIQVESPKGSKVASIDLGINNLASVVVDDGTWLLYKGVRAKEDYFYMQRLISRIQSLRDTLKGKLLSDAVEELNHEMRRLYGKLRRRLLHLYRNFASHLLKQFHELGVSTIYLGYPFNIAQQKGNKFTSNMWSYRKLMEAIELKAQEYGIKVFIVIEYNTSRYCAYHNVEVKRHPRGVVSCPFGHKLHSDLNGALNIMKKAIEKIPPVIKKPLSFIIDHNQVAPTKREVTPKTPEHPHPLRRGGGQYTPE

SEQ ID NO: 46123 - protein, 216 aa, unknown
  TnpB Polypeptide
MYGCQQVLIKPNQDLRAILEFICEQSNKLANCGTYYARQLYFKTGKIIGRHDLSCLLKGNPHFQSLYSHVAQQTLTSVAESFKSFKELSKLFNAGKLANEPKLSQYKKNSLKLATFPEADVKLKDGLLRLPLGSKVKAWFGLDAFYLPMPSNLNFADIKEIRILPRNRCFYAEFIYKLEVEKPVLDPNKALGIDHGIDNWLTCVSNIGTSFIVDGK

SEQ ID NO: 46124 - protein, 404 aa, unknown
  TnpB Polypeptide
MEQAESLLETMRQFTQSFNAVCSTGWRLKEGNAYTLHRITYCDCKTLCPNLVSDLHVQARQKAAEAVKSAMALGRKGRKVNCPQSTLCPPRYNKNSFSVDWQKGLANLATVAGRQKVAFVVPAYALAMVGNRVATADLVYRRGRFTLHVVLKLADVEFTDNGQALGVDLGVCRPAVTSDNRFHGKKRWRQVEHRRHHLRRKLQSNGSKSAKKHLRRLAGRSARFRRDCDHVLSKSILANILKDFGPGTAVVIENLTNIRTRVKANRGEAKRRLHSWSFAQLASFLTYKAEAKGCCVAGVDPRHTSQRCAACGYIYRGNRRSQSSFVCRSCGHRDNADLNASKNIRDRHLVGWSKAPSDTPSSEGASSQPSETSASVSWPKNHTDDVSSSGCGLGTSRPSSGGSI

SEQ ID NO: 46125 - protein, 387 aa, unknown
  TnpB Polypeptide
MTIRGQIIELNPNNKQATYFKKACGVARFAYNWALAEWQKQYQEDKAYRESCKQSGLTINESQLNLPSQGKINKLFNAIKREKFPFVLEVTKCAPQIAIKQLGEAYKRFFKGENKYPQFRKKGERDRFGLSNDQFKIQKKEGKFFIQIPRLGLVKMNEELRFHGKIMSATISTHGERWFVSINVELSEAIQPLPKTNCSVGLDLGITHLATLSDGTKIQAPKPLKTQLKKLRRLNKSLSRKQKGSNNRAKAKAKLSRLYYRISNIRKDFLHKLTTKLIRKFDVICLEDLNVKGMIKNRRLSRAIHDLGFYELKRQLIYKANQFGKTVKSVERFFPSSKTCSCCGFKLEKLSLSVRKWTCEKCGAEHDRDINASINILNFANKVLTVN

SEQ ID NO: 46126 - protein, 410 aa, Halogranum sp.
MDWQRNTVRQLYNHALNEFNQIPGDAGTLRQRVWMVRDTLPALKDWWPALKRVYSTVLQKAVERIRDNIQNLRKLKAKGYNVGSLNWKKPREYRSFTYRQSGFELDKKSGPNGRGLLILKKLKGETREIPIRLHRDLPDHEQIKEVTLKKEPTGAWYVSFCIETDKPERSAVEDIEPGDSVGLDLGVLNFIHDSKGRSIGRLDLPNERERIEREQRSLSRKEYQSKNWGKQRRRVAEVHARMSNKKRDYKHKLAHFYTTEYDAVFVEDLNVKGMLESSENARNKAEVGWRNLITIFKHHGKKNGCHVVTVRPEKTTLECASCGTSVYKPLWVREHSCPSCGFELDRDWNASLNVLSRGLQLGVVHSEETPVETATAVSTDGGSQAVVVDASRVVETGSPVLKEATRSVAE

SEQ ID NO: 46127 - protein, 439 aa, Halogranum sp.
MLDVHRTHRAKILNHSQVEESLDRHGWSASKLWNVANHHSREVWDETGKIPDHGDLKGELKTHPKYKGLHSQSSQRVLEELAESFNSWYGKRESDNRANPPGYRKKNYYDNNGNRVHEEHPRSTVTWKQKGIRHDIKNGRVRLSKGANHKEHPRAWEYILVKYETRPGVTVENLQQVRAVYDKAKGRWELHLVCKDEIKTPSSPGNETAGVDLGICNFSAVAYSTEEADLYPGNRLKQDGYYFPKEIAKCDDAGGERATRLHAKWSERRTHFFHSLAKHIVERCVEQEVGRINVGKLAGVREDENGESKDWGKHGNLDLHGWAFDRFTKILTYKAKVEGIEVVEVSERDTSKTCCVCGREDDSQRVERGLYVCESCDAAFNADVNGAENIRLNINQSNSESSGQLSGDRSTGWLAQPGVYLHDLSRGFQPRAEVVDCKP

SEQ ID NO: 46128 - protein, 406 aa, unknown
  TnpB Polypeptide
MEKRKINYKLYPSATQKERLLGHLRLHQQLYNAALQERIECYRKTGRSISYNDQQASLTQIRAEHDEYRAIPVYITRMTLRRLDKAFKSFFDRVKKGQTPGFPRFKSLSRFSSFDMCSGSGWSFTPEANGKHGHLSINGIGKIKARGQARTLGKVKASQVIHRHGHWYLSVTVECEPKRACTELKACGFDWGVEYLGTIVHEDGTTETLDNPRYYRDSKESLLPLQQAIARKKRGSNRWKRACKALAQARAKVARQRHHDHHQMSHDLAKKYALFATEKLTIKNMTRTARGTVDKPGKQVKQKSGLNREILDTAPAKLLAMVRYKVEETGGEFVEIPTRQAKPSQRCPVCWSVVKKSLSERTHRCDCGCTMSRDAASGLVAIRWALGLGGNTSETAKAVKPLLSTA

SEQ ID NO: 46129 - protein, 360 aa, Planktothrix sp.
  misc_feature (24)..(157): Xaa can be any naturally occurring amino acid
LNIKHRDGNYTQLKDRLPLPIKMXXXXXXXXXXXXXXXXXXXXXXXXXXXXXXXXXXXXXXXXXXXXXXXXXXXXXXXXXXXXXXXXXXXXXXXXXXXXXXXXXXXXXXXXXXXXXXXXXXXXXXXXXXXXXXXXXXXXXXXXXXXXXXXXXXXXXXYQEVNPKFLRKAEQSIKKSQKRIYKKVKGSSGRRKARKVYSKKHLKVSRQRNEHAKITARNVCTSNDVVVYEDLSVRNLVKNHCLAKSISDASWYLFRKWIEYFAAKFDKLAIPVAPHYTSQKCSNCGVIVKKSLSTRTHICTCGCELHRDTNAAINILNLGQQARGGHLQSNANGLETSTPLDKNLVEQVSRLKLESQCLQT

SEQ ID NO: 46130 - protein, 362 aa, Planktothrix sp.
VVCLSVNYEDVPEVETEKTLGCDRGQNNLAVVAPKEGFGKFFNGQSVKHRRRYFQQRKQLQEAKKFRALKKWNKKEQRWMEAINHTVSRRIVRFGLCFMVLRHPSKSSITISALWYWEKSRYVMTKINIVLVEDHDLTRVGLRTALQQDSNIKIVGEAANGKKGLEILKQTQPDIAIIDIGLPDMDGIELTQKFKQHIASSGARETKVLILTMHDNEDAVMGAFAAGADSYSVKDVSLDKLKDAIHTTYEGNAWIDPVIARTVLKQVKNKQPDITTPGDQKTVMINAVEPEYQEFLKSCPLTERELEVLELIVAGRSNAEIAEKLYITVGTVKTHVRSILNKLCADDRTQAAVRALRSGWID

SEQ ID NO: 46131 - protein, 423 aa, Planktothrix sp.
MAKTIGVQQILLSPDLETRALLEYLCQQSGKIYNTGIYFARQTFFKTGKLLTGKFDLAFEPSVAKSLLAQSMPSTPMQQTLMSVTESFKSFKNLKDLYIKGQLHFRPKPPGYLKSSKLFKVAYPNSGGQRPKLIDGQLRFALGTTVKRWFGVSEFFLPMPSNLDYSKVKEFTILPKNGAFYLEMSYEAEKQHHELDINQALSIDLGTADNLAACVDTLGNSFLIDARDLKAKNQLWNKKVSTRKEGKSQGYWDNWLDRVTRKRNHQMRDGINKAAKLMINHCLKYGIGTLVMGWNEGFKINANLGNLNNQKFVQMPLGKLKSRVKQLCDLHGIKFVETEEAYTSKASFLDGDSLPKYGEKLMGWKASGNRIKRGLYRTSDGFVVNADLNGAANILRKVSGRLGIMLNQLSRRSLAVVARIKLN

SEQ ID NO: 46132 - protein, 519 aa, Planktothrix sp.
  misc_feature (112)..(380): Xaa can be any naturally occurring amino acid
MIYVNIVLGRKQEIFMIVLEYKCKGKPNQYKAIDEAIRTTQFIRNKAIRYWMDNSRELKIDRFALNKYSTTLRKQFPFVADLNSMAVQSAAERGWSAISRFYDNCKKNISGXXXXXXXXXXXXXXXXXXXXXXXXXXXXXXXXXXXXXXXXXXXXXXXXXXXXXXXXXXXXXXXXXXXXXXXXXXXXXXXXXXXXXXXXXXXXXXXXXXXXXXXXXXXXXXXXXXXXXXXXXXXXXXXXXXXXXXXXXXXXXXXXXXXXXXXXXXXXXXXXXXXXXXXXXXXXXXXXXXXXXXXXXXXXXXXXXXXXXXXXXXXXXXXXXXXXXXXXXXXXXXXXXXXXXXXXXXXXXXXXXXXXXXXXXXXXXXXXXXXXXXXXXXXXXSNDLVVYEDLIVKNLVKNHCLAKSISDVSWYLLRKWIEYFAAKFDKLTIPVAPHYTSQKCSNCGVIVKKSLSTRTHVCNCGCELHRDTNAAINILNLGKQARGGHPQSNANGLETSTPLDESLVEQVSRLKLESQCLQT

SEQ ID NO: 46133 - protein, 346 aa, Planktothrix sp.
MVLGLIKRLNPVIRGWCNYHSKVVSNWSTRKGTSFDVPNKVAFLLKKQKGKCTFCGQYFTPEDIAEIDHIIPTSLGGKDEYKNLQLLHRHCHDIKTSTDGSYNSKEDGWYASIVIEDASVPSPLSLDTVKSAVGIDVGLKEFLVDSEGDAVPIQQYYRKAQSKLARAQRELSRKVKGSANYQKLAHKIACLHQFVARVRKEFHYQVAHKLCEKYDLIGLEDINIKGLAKTRLAKSILDAAWGQFSQILEAVAVKRGNWIVKVNPYGTSQRCSGCGKNVPKALSVRTHECPHCGTVLDRDHNAAINIKNLALNAVGLTVSACGSKRGYSACEAGIFICEEKKLTLYR

SEQ ID NO: 46134 - protein, 381 aa, Planktothrix sp.
  misc_feature (10)..(178): Xaa can be any naturally occurring amino acid
LNIKHRDGNXXXXXXXXXXXXXXXXXXXXXXXXXXXXXXXXXXXXXXXXXXXXXXXXXXXXXXXXXXXXXXXXXXXXXXXXXXXXXXXXXXXXXXXXXXXXXXXXXXXXXXXXXXXXXXXXXXXXXXXXXXXXXXXXXXXXXXXXXXXXXXXXXXXXXXXXXXXXXXXXXXXXXXXXXYQEVNPKFLRKAEQSIKQSQKQIYKKVKGSSGRRKARKVYAKKHLKVSRQRNEHAKRIARNVCKSNDLVVYEDLIVKNLVKNHCLAKSISDASWYLFRLWIEYFASKFDKLAIPVAPHYTSQKCSNCGVIVKKSLSTRTHVCSCGFELHRDTNAAINILNLGKQARGGHPQSNANGLETSTPLDESLVEQVSRLKLESQCLET

SEQ ID NO: 46135 - protein, 208 aa, Planktothrix sp.
LLVAIRLVIPKSIPIALSLTGNGLIVGSSKRMEICQRPDGCIYRFYPSPEQESLLRRTLGCVRLVYNKALHERTQGWYERQEKIGYNQTSSMLTAWKKQEDLDFLNQVSCVPIQQGLRHLQSAFANFFAGRAKYPNFKKKRNGGSAEFTKSAFKFKDGKIYLAKSVEPLDIRWSRQIPKGCEPSSVTVKLNAFSIPHIIVYLFVNVLN

SEQ ID NO: 46136 - protein, 343 aa, Domibacillus sp.
LIPTKEQSAILQEMSQEYISIINDLVFEMVKEKKSTKKASKNILAHLPSAVINQAIIDAKSVFRKAKKSKYTFVPVLKKPMCIWNNQNYSFDFKYISMPIMINGKAKKTPIRALLIDKDNRNFDLLKHKLGTLRITQKSGKWMAQISVTIPTVEGTGLKVMGVDLGLKIPAVAVTDDEKVRFFGNGRKNKYKKRKFRSDRKALGKKRNAIRKSKEKEQRWMEDQDHKISRAIINFAKENKISVIRLEQLANIRQTTRTSRKNEKNLHTWSFYRLSQFIEYKANLEGIRVEYVNPAYTSQTCPKCSKKNKAQDRKYKCKCGFEKHRDLVGAMNIRYAPVINGKS

SEQ ID NO: 46137 - protein, 458 aa, unknown
  TnpB Polypeptide
MAYRVMQSQVARGNYIFDYCDRNAEYAKLLYNAALFRIRQIFTGYDKENRSDNETQVFSEVALLEDQFPSIHVKKVISYCHLEKLMRVTDNPDFLAGLPMQSAQNVLKQAVQDFKDWLKALSDYKKHPEKYLGRPRMPRYKRSGVTTFTLSNQDAVLYFTDHGTLLKLPLVPERLYLPNLSNKAVLKEVKVIPFYDRYIISLTLEEPEVPLRPDLPYLCSVDFGIDNFAAIVCNDGSSKLYKGGAVLSDCQWFHKSRAAAISIITKGHDRYTASSRKLNSISVNHHNFINDQCHKISRDIIRFCMEHRAGTIILGENKFWKQNTSMGAQNNQVFVSMPFSLLKNMITYKAEREGIAVITQEESYTSRADITAMDYIPVYGVDDEKADFSGRRIKRGLYRCSNGLVINADCNGAANIMRKAVPDAWNGTESFEFLALPEISGFHELNPKSNSVRGIDAV

SEQ ID NO: 46138 - protein, 335 aa, unknown
  TnpB Polypeptide
MAASSSNPQVVHRTARICLRTTRAQANRCYRLLRAAGDVWAWLLDSNRDRRQQGDLAVVGYQALCRQLTSSGGFGGLSAVGARSVLQRYADAWFEAARRHNRGERAGFPRRKRLLVPIRFYNGTFRLDGDRRVRLPIAKGHPELWVRLARPLPYPSDQVRSVTLLHDAGRLWRSVTAAVPITHHDLDPDRVAGADLGIIHPYAVVTEDAGLLGSGRAVRAESYLHLQDQQARQARAAGRAPKPGQHGSRRWRRHRARLRRVEARHRRRVHQAHHQAARQVIAFATAHQVGTLVVGDPTGITGRDAGRVQNWRLRQWRRTHLLGALRDKAEQAGIG

SEQ ID NO: 46139 - protein, 420 aa, unknown
  TnpB Polypeptide
LRATKCVSQSHSSEQLRSLLAECLTTTYTAVHYAEEHGIDNRKGMKGFYRTLKGMDLPSCYKVASISRACAVVQSRKKTERRGVKLTHRGPLRPMVCIISGFFVTMKGRLFVPLRRDRYFDVQLNRHTLEELADKTVRSLAITPDSLSFCYSEDVKPAVVKRVFGLDRNEKNITFGDRERVTQVDMAKVVKIKQMTREVISSFKRNDVRIRRKLARKYWKRANHRTDQILHAATNFIIDSAVKNNAALAIEDLTDIRKMYRKGNGQGADYRFRLNSWPHWRAKRMLEYKAAWKGVTVIPLTKSETIGSSSTCSSCGERLRNPAKGDVEHERMLWCQACKVWKDRDVYAALNLSTRGRSRLDRSLSRPEAREEGRSQQAATSFPSVEEKGPAGEAVTGNGTATLILRVDASKLIRRREPES

SEQ ID NO: 46140 - protein, 495 aa, Microcoleus sp.
MLLSYKYKLRPNNQQSEKLSGWLNMLRATYNWCLRDRMDGWYQQFLCGTYCDLKTQTEIMPLTCSLVKGTQLENPWKDGGGKAKKEGEKDKSPKRSASLMQDANLINLKTSRPWYQDIDCDVLQSIPARVNEAFNKFFKGAGFPKFKRSHYFKSFAYKPGRVKIKGSKIYLPKIGWMRFFNSRNIPNGFDIRTVTIRQKADGWYVSVRIEDKAIPDFSIIPDSEIKSIIGCDMGLTKLVYLSNGETIDNPRFSTNKHIKRLMKVRQRRVNRKQKGSKNRRKAQNKVTTLHHKIQQKREAYQWWVAHKIVGLADGVAVEDLQVKNMMKRCKPVSSETGRFLPNNQSAKRGLNRSIADASWYGLTQKLEYVAVKSGKKLYRVNPQYTSQTCSKCKHIDKVSRNGEKFICTNCGHIDDANIQAARNVRTKAIESYGLTIVRKTRIRAKTVRRDSSKPVQLSIFDVNLYERLVDNKPPQKGKRLVTGNPQYKQLSLWDG

SEQ ID NO: 46141 - protein, 368 aa, Microcoleus sp.
MSQTYKETGKGISALTMKKQIPVWKTEHEWLKECYSQCLQSSVLNLSQAFINFFDGRAAYPTFKKRQGRQSMQYPQNVKILSNSEIKFPGNLGVVKAKIHRDCIGTLKTVTVSKMPDGRYYASLLMDDGAESPVTNGDGKAIGLDLGLIDFCVTSEGSKYQNPRHIKKYECNLKRKQRKLSRKKDKTTNKRRKAKCAVAKVHAKIARVRVDFRHKLSRKIVNENQVIVVENLAVKNMVKNHNLAKSIADAGWGMFGTMLKYKAEAEGKVYLEVGRFFPSSHLCSNTLLSLPKMDLSVREFNCPHCSKRHDRDINAAVNIKNEGLRILALGTSVTALGGNVRPKQYGRKSTTALGGCPRRGKPTLYPIG

SEQ ID NO: 46142 - protein, 409 aa, Microcoleus sp.
MRTAYQYKLRPTKQQVIEFDRWLSMLCAQYNYLLADRFNWYEQNRSPVNACLLICHLPELRDHPDYYSQKKTLPQLKKTHPWYSEIYSQVLQDVVKRVKVTFDRFLKGDSNGKRSGKPRFKARNRYRTFTYPQMKEGCLQENLINLPMFGKVKVVLHRPIPDGFKIKTASVTKKADGFYLTLSLEDLTVPEIKPNFNPNKITGIDVGLKEFLTTSEGETVCIPQYYRKAQKRLRVIQKRVSRRKKGSNRRQKAVKQLGKQHKKVADKRKDFHFKTAVKLLSKYDVIAVEDLNVKGLARTRLAKSVLDAGWSNFLSILTNKAENAGLLVVPVSAYNTSQDCSNCGEKVPKKLHIRWHDCIKCGCSLDRDHNAAINIKNKAIGQFVFKAQLMSDGIPGVAEKPTSYCIQLV

SEQ ID NO: 46143 - protein, 397 aa, Microcoleus sp.
MKQVLTVSCKLQVTPEQSAKIDGTLRAFAAACGYVNETVQPTLMNELAIQSLVYHDVRAKFGLSAQLAIHAIRRVSGNRKTAKKDGKPVGSFAPTSATYDARTFSFREKDWTVSLTTIDGRERFNLAIGNYQIGLLKGHKPKTATLCKRKDGTYYLNIQLESTPPEPEKTSKVLGCDLGRTDIVVTSEGDKFSGKEITKVRNHYASLRANIQQKATRGSRCTRRRCRELLKRLSGKEKRFQELVNHTISHRLIARAKSSKQAIALEDLTGIRDRTNQIPRTKKERRLSNSWAFFQLRQLLIYKAIKHGVHLIFIDPRYTSQTCHNCNHIHPVRGESYRSGKKFSCGHCGWIGDADLNGSRNIAALGAVVNQPKGSGLSCSLHDHLRAIESPRHIVSA

SEQ ID NO: 46144 - protein, 414 aa, Microcoleus sp.
MYLTQKNQIRDLSKTEFLAIRELCRLSKNLYNVGLYTVRQYYFQEHKHLRYESAYHLCKDNENYQILNTDIAQQTLKVVDRTFRSFYGLIKAVRYGTFQQKVRLPHYLPKEGYFVLIIPRIKVKDGSFKVPMSPAFKKEFGEIVINFPERLDPAKIKEVRIHPKYDARFFEVEYICSIGEIEAVETVKGSALAIDFGLSNLATCVDTNGASFIVDGRKLKSINQWFNKENARLQSIKDLQGIKKLTERQSRLYINRSSQVRDYLNKAARLIVDHCINTKIERMIVGFNIGMKDGINIGSRNNQNFVQIPLYSLRNKLKFLCERYGLIYQEQEESYTSKASALDGDYMPIYNADKPATYQFSGKRVKRGLYRSKEGHLINSDTNGAANIGRKSKQNGFTGLCRGCLAQPLRIKVY

SEQ ID NO: 46145 - protein, 441 aa, Microcoleus sp.
MSKWLSLPRQTDWQDSVLTNANGTASKTGVNSWYRVKQTLVQNHKWLKTSLPSCTDRVVDCASGKSINLKSHKLRIYPTPQLHKVWRKWLAACRYCFNQAIAMQRKKCLSKLQLRNQVMQSDLPEWVKETPCHIRQNAIFDAHRAFKASSDAKFRSIRDYSQTIKFNDSNFKKGTWYPSLTKGLTFKAAEIIPDCDRGTQLVYCKGRWFGVFPVPVTVQPTVATGIIALDPGVRTFMTGFDGNKFLEFGGGDMGRIARLCQHLDNLMSRISQAQKRRRKRMRQAAHRMRIRIRNLVDECQKQTACYLTSNYRVIFLPTFESAQMVAKVRRKIRSKTARAMLNWAHYRFKQTIKHQANVRNVSVIDVTEEYTSKTCTHCGHVHQKLGGSKVFTCPECGYSIPRDYNGAFGILLKALRDTASISYEDDSAIVTLSGNCRVTVA

SEQ ID NO: 46146 - protein, 349 aa, unknown
  TnpB Polypeptide
MILVYRYRVKSLNGLLNKQSRAVNFVWNFCNDRQKDALRFGRRWHTGFDLNKLTTGSSKELGLHSGTVNAVCEQYAKSRSQKKRPYLRYRGKKSLCWVPLKGRELKREGDAFRFAGNTFRVFNSRALPAGKIKDGTNFSRDSRGNWFLNIVIDVDVVAPDARAPVRGVGIDLGLKDFATLSTGEKIEAQRIYRGAEQALAVAQRANKKNRVKAIHAQIANRRNNFHHQLSARIVREFDYIAVGNVNAAGLAKTKMAKSVLDASWSGFRTMLAYKSIREGAWYEEVNEAFSSVTCSSCGARSGPSGLKGLQVRQWICSDCGCVHSRDQNAAINILARSGHRTPVEGITIL

SEQ ID NO: 46147 - protein, 337 aa, unknown
  TnpB Polypeptide
MGIKVQKNKIYLPKLGWMRFYNSRSIPDGFTIKSATLRKRQDGWYVSIRIEDKAVPDYSARPLTDFNKIVGCDLGITKLVHLSDGYQIENPKFLTNKKTKHILKNRQRQINRKVKGSNNRKKAAKKVGRFHKKIADKRQAYQWYVANKIVLRNVDAIAVENLNVSAMKKRCQPKIDDPALKTGFPSQATGGEETGRFLKNGQSRKRGLNRSISDSEALASLRASASWSDLVLKIEYLAAKHGKVVIKVNPKHTSQKCQNCGHVDASNRDVRGASRSEEKFICTSCGHITHADINAAKNIRDRASSMVREDFAKPEPKGSKRPKHCKETSTRSSEQTC

SEQ ID NO: 46148 - protein, 460 aa, Hydrogenibacillus sp.
MSKSEPTFVLELPLRVQIWQAHLLEKRFEAARNLYNAVLAEGFKRLRAMRRDRRYEAAKAESEPVKRRKNFSDLKREYGFTEYDLHRSVTELRKSWIGHHLGPHEAQKLATRAFQALERWSTGRGGKPRFKGKNRIKSLVLSIEGKSPTAGLIWKTDHLYWRGLQLPALIDRSDPVILHGLNKPVKYARLVRRMGKDGWRYFVQLILEGDAFRKPPVPGSEAIGGMDPGPRQIAWYDGKEAGIDSLVSPALKEHRRELRRLHRKADRRRRAMNPEHYLPDGRVKPGPKIWRKSKGLLRTEARIREIERKEKSERKRYLHELANRLIARTAFWKVEKPDVRAWQKSRYGRSIKRSGLGTFVRILTRKAESAGGWVFMIEPRKAKLSRTCICGRVEPKPLSQRVHRCPECGAVMHRDLFSAFLAVFVDRDHALHAGEAQNAWPDAGPRLLAAWRAAGRSDSI

SEQ ID NO: 46149 - protein, 389 aa, unknown
  TnpB Polypeptide
MLTNQLTYDSIDSMSNELSIRVRVKPDAQDERVLNQLIDSYLSACNHVSEIACSKQVINNRDLHDLTYTVIRVKYNLMSQLACSVIRQVSGNYKTIIANNKNYDYDKRSVYTSRTIELTHNRDWYYNPRTQNAKISTPNGAVILHDIIMPNYLREYDYKFGGAKLQHKRNGWFLIITIKLTDEPYVRSMPSNVIGVDAGLRFIITTFDGYRTDFISGREVMDKRRKYSEKRAELQSKGTSAARHRLLMLGDRENRWMTDVNHQISKALINRAKQENACIILENLIGIQSTLVKSRKNDRYYRVSWAYAQLRDMILYKARLAGVIVYLVNPRFTSQVCPACGYRDKSARNHKLHLFKCSHCGYSSNDDRIGAMNIRARGIEDRLIPEFDN

SEQ ID NO: 46150 - protein, 247 aa, Aerococcus sp.
MGVCVGVAIGAALGIAIGQIGRWVSVGIAAGLVVWSSADVMRREKQKTIRSKTDLGVSDLAITSDGQKYQSQRLHLSYKKQLHYWEKRMARRRLQAKKNGVNLVDAKNYQQAKRQVARIHQRIKNIRKDYMHKITTDMVKSYDVIVLEDLKTTNMMKNHQLARSIAGQSWRMFRTILEAKCEMYDKTFVAINPHKTSQKCSNCGNDSVKKVLNIRHWTCMKCNMHHDRDINAAKNILNIGLEQALVK

SEQ ID NO: 46151 - protein, 328 aa, Aerococcus sp.
VKTQFKQKPKRYKDIHTGKYHTLYKDLYHLTKPLGFKQPVAVFVRNRNYAYHQNNTYSLTTNQGRIKVSCDKQHIDYLQQFSQNAYKFGQAELRCRKGKWFLHVSASKEIDSPDETNIQRIVGIDRGLRQILTIADDTAHTTFYSGKSLMKKRRRFKKLRQSLQAKNTKSSRRRLKTIERRENRWMNDVNHQLSKTLVDRYGANTLFVVEDLTNVTFNTTHHRKQDARYEHHSWRFFDFEEKLMYKALESGSQVLKVSAQFTSQRCPKCESIDRANRQQYKHLFTCQNCGYQSNDDRVAAINIQELGHRYLSSEKNPRFEKVVPIQNY

SEQ ID NO: 46152 - protein, 487 aa, Tomitella sp.
MARFEIPDGEAVQAYRFALDPTPAQVRALRSHAGGARKAHNTMLAVVKAVMDQRAAERSYGIADADLTPSLSWSLAGLRKQWNARKHEAAPWWWENSKEAYNTGLDGLARGLDAWAKSRNGERAGRAVGFPKFKTARSRRSIRFTTGTIRVEPDRHHVTLPRLGQVKTHESTRKLARRIEAGTARILSATASEDSAGRWHCAFQVLVQRTIAVPGHVRAGAPVVGVDVGVKADSLLVIATPGGSEAGRVPAPRAYVRTQAKRRALQRRAARQQGPYDPAAKTRRQPSKRWARTQARINTTHAHAAAVRRDVLHKATTALAQQHRVIVVETLNAAGMRSAGGARKRGLNRALADASLAEVRRMLDYKTRWYGSTLVEAGRYFPSSKTCSGCGGRKPNLTLAERTYVCEHCGLKIDRDLNAAINLARLGETRSWGEQSPAGSGLVAGRGAMQESAAAQVVNAAGHEASTPPRQPSGKTGTASPQGEAAS

SEQ ID NO: 46153 - protein, 385 aa, unknown
  TnpB Polypeptide
MQRTYQYRLYPTPQQQEALNTILRQSCLLYNEALEHRRQVYKHTGQSVSYPAQWRRFKEERKERVEDFGLLNASSVQQLLRRLDKSFASFFRRIKAGLKPGFPRFKPSARFRSVAYRHQDGCTLKGACLYVQHVGEVSIRLHRAVPEGCLKQVVITRKAGNRWFVSFQGDDGQEAAPLKGGKAVGIDVGLSSLLAFSDGTLVTNPRWLRRSLAKLRRTQRGLARKTRFSSRWWKTKRQLESLHWKIGNQRRYFLHQLTYRLTDIFALIAVEDVSPSFMLSNRRLALSASDASWHLFRSMLDYKAERAGCLVVEVEARYTSQACSGCGKIEKKTLSQRWHSCTCGTELNRDVNAAVNILNKARCGPTEPNVEVGNSSVLRQKADVL

SEQ ID NO: 46154 - protein, 406 aa, unknown
  TnpB Polypeptide
MIRVERHQLHDTYLDRLCFLSKNLYNYVNFLIRQEWIDTKVYLNAYELVGKLAAENQPDYRALPSNVSQQIIYQLFKNWKSFYGASKDYQRHPEKYKARPKMPQYKHKTDGRNLLIFTRDACRLKAGYIHFAKDNIKPIRTKVEKIKQVRLVPQSSSFVLEVIYEKEKKHHELRGDRYVSVDLGVDNLATLVTNLDSRPLLVNGRIVKSWNQYYNKRKAYLASIGASRQIGRLGLKRLNTINDYFHTTSRFIITYCLEHQIKGLIVGYNKDWKQDVNLGRVNNQKFVSIPYQNLIQQLQYKAEEVGIEVAVQEESYTSKCDALALEEVCQHEQYLGRRVKRGLFQSSVGRFINADVNGALNILRKGIGDHFVRNVVGDDFARNLLNRGFADNPVKVDFLHECSCLA

SEQ ID NO: 46155 - protein, 382 aa, Thiocystis sp.
MPFKAYRYRFYPTPEQVQNLAQTFGCVRYVYNRSLRYRQDAWYERQENVSYLQSSALLTGWKKEPERLWLNEVSSVPLQQSLRHLQTGYSNFFKGRAKYPHFKKKDSPQSAEYTTSAFKWDGETLKIAKQAEPLDIRWSRRFTGKPTTVTVSKDAAGRYFVSLLVEEEIALLPVVNVTVGVDVGIKDVAVLSTGERTGNPRHTAKYAAKLAKVQKRLAKKQKGSNNRRKAKLKVARVHAKIADARRDFTHQLTTTLIRENQVICVENLAVKNMVKNPALAKAISDSNWGELVRQLEYKAGWYGRTVVSIDRWFPSSKRCACCGHTVAKLDLSVRQWTCPECDTELDRDVNAALNIKAAGLAVLACGETVNPVLAKAGIGSSR

SEQ ID NO: 46156 - protein, 394 aa, unknown
  TnpB Polypeptide
MQLTETVKLYPNKYQTELIKATMSEYISTVNHLVLDAINGRAITKITTADVNAILPSALCNQCIRDAKSIVKKYDKACKEVEKAKKNKKNQKSKKNKNSKNVKEVEEIKEVKKLKEIKVPVLKKLCCYINNQNFKIQDNYISFPVMIDGKSKRISVKTKMTDKQKLILSSHRLGTMRIVIKNINTLVAQFVYEINEIEKVNESNNVMGVDLGIKCPAVSYCTDGSVKFYGNGRKNKYMRRHYANLRKWFQKAKKPTVAKRIKNKEQRIMKDIDHKISREIVNTAKKHKAKVIKLERLENIRSTTRTSRKNNPSLHTWSFYRLAQYIEYKAKLAGIEVEYVYPAYTSQKCPQCGNIHHAKDRKYICKCGYHTHRDLLGAINICNSTEYIGNRCIA

SEQ ID NO: 46157 - protein, 403 aa, unknown
  TnpB Polypeptide
VSRSAHPKQYSVRRLKIGQSDQMDTLARASGELYSRVVISYWRTVRHKGVWLKPKHLMRWHTSPALHAHTADACVQSFFAALDSWRARRTVDADAHPPRKRRSYYRVQWKASAIRVKGDRLYLANGRGNAPLIVPWAHGLPLQVEMGWDGRQYEIRATYAVDAVGVVPGESGNVAGVDLGEIHPAVAHDGERAIVMNGRHLRSVRRYQNKTKGTLQALVARKRKGSRRWKRLVRSKKRQQRRWDHQIKDVAHKITSRLVSTLHENGVQTVAIGDIRDIRKRVDVGQTGNQRIHQMPSGMIQYMVTYKAERLEMAVVMQDERYTSQTCPACQARHKPRGRVYRCAVCGLTMHRDAVGALNIRQKYLGAIPVVGAMASPTAGVRYHAHLARSPLPTGQRESIPAL

SEQ ID NO: 46158 - protein, 392 aa, unknown
  TnpB Polypeptide
LKGRKDNGYRVGELRWKAPQEYRSIKYSQTGFKLNNTSGRPVLSFPRSATFRWSTTARSRTTPRSRRSSSSRNRPASGSPSSESKPRTTRHRSLRIPRNASNRRGILKYAHDSDGTAVEGPDLTDERERLEREQRKLSRKEHGSANYRTQQRIVARRHADLKRKRRDFLHKLELLHPGIRPRSGRRPRREGVDGTPLEQPQPRRSGVGNVPSDARIQVRPRRHALRGRRSGWNDQRVFQLWRCDRQTAVGTRTLVSLMRIRVGPRPQRRLQHPFSRTHRSRGGSPDSMPAETALPYGIDSVPAKRVLETGSPVSARPPGRAGRGSSRLAAGEPVILHPLVFHLVCASPRGRSKPRRGCPIEEHLGGAADHLDLLWAADNPERRAVDDDVGPG

SEQ ID NO: 46159 - protein, 391 aa, Lactobacillus sp.
MVVEIVQVIKGIKLRLYPNAQQREQLWQMFGNDRFVWNQMMAMAKERYQNNPSSHFVNEYSMNYLLKRLKQEYPFLRVSDSTSFLMVNHNLAQAFKMLFKHQGGYPRFKSRRAIRQAYTGRSICQVLAKRRVRLPKLGSIRTSKTTRLANGKIKCYTVRFESTGRYYLSLQVVVEAPEYLSKTGKAVGIDVGIADLVISSDGIKYGTFNAKWAEKQATKWQSKYAKRKHQALVAVRQWNYNHKTVKTELDDYKNWQRAQQQKARYQAKIANQRKDYLHKLTTVLVKQYDLIVIEDLKAKHLQKNHCLAKAIANASWYQFRTMLAYKCAWYGKKLVVVKPNYTSQICSHCGYHSGPKPLQIREWTCPSCGTHHDRDINAAVNILQQGLKAVG

SEQ ID NO: 46160 - protein, 311 aa, Lactobacillus sp.
MAQIIKGVKLRLYPNAQQREQLWQMFGNDRFVWNQMLAMAKERYHNNPSSHFVNGYGMNYLLKRLKQEYPFLKASDATSFLVVNHNLAQAFKMLFRHQGGYPRFKLRRAIRQAYTGRSVCRVLAKRRVRLPKLGSIRTSKTTRLASGKIKCYTVSLAPTGRYYLSLQMAVEAPKHLSKTGKAVGIDVGITDIAISSDGIKYGNFNAKWAEKQATKWQSKYAKRKHQAMVVVRQWNHNHKTVKKELSDYRNWQRARQQKARYQAKIANQRKDYLHKLTTALVKQYDLIVIEDLKAKNLQKNHCLAKSIANAS

SEQ ID NO: 46161 - protein, 368 aa, Lactobacillus sp.
MKKVLDSLCDYRRYCWNEGLATWNDMYDLRTLDSSSPPPSAYSVRNELVANKADWQYELSARTLQLAIADLGTAWQNFFDKAQPDWGKPTFKSKKAARQGFKTDRAKIIAGKLRLDKPHGVKDWYDIRISQHVDLSGVLKLVSVYRENGKYWASLPFEVELDVKPKTGDSSAVDVNVGHLNYTAGVINTLPKRLRKLYQRIKFYQKQLAHKRVMNGNKATKSTNYVAIRAKLQRDYRKVANIQHDIMQKFTTKLVNNYDKIVIEDLSVKAMQMSHVASKGLQRSMFGYFRQILSYKCDWYGKELILADHQYPSTQRCSKCGHIKVGNDKITLQGNCAHQTKHNEYVCYNCGAIMDRDENAVSNLLDLI

SEQ ID NO: 46162 - protein, 337 aa, unknown
  TnpB Polypeptide
  misc_feature (22)..(76): Xaa can be any naturally occurring amino acid
MLLSSISWLGWLILSGITLMSXXXXXXXXXXXXXXXXXXXXXXXXXXXXXXXXXXXXXXXXXXXXXXXXXXXXXXXRRSLGWIPFKKTAIKHISTRQSGKKSLKSTLQFSLANRQKLTIDLWDSYNLSLYGINTCELVQDNRGHWYACITVKEFPKIKCGDGQVGIDLGCKDSAVSSDGDKLQTKVTHQYAEKLATAQRAKNKKRVKAIHAKIKNTRKDLTHKFTHKLVKANNLIVVGKIKSTSFTKGKLAKSVYDAGWFEIKRQLDYKCKHAGCHYIEVNEAYSTQTCSCCGSRQDSPKGRSGLGIRVWFCRSCKTTHQRDVNGAKNILAVGLDRL

SEQ ID NO: 46163 - protein, 307 aa, unknown
  TnpB Polypeptide
MSRYRLEPTSAQEAVLLRHCSDARYVWNLCCEQQSWWRPGRGGVPGFAARCRQLSGARSDNPWLAEGSVTVQQQAIRDFDQAMRNFFGGTHRKPTWRKKSLSEGFRIVAVKPEHVRRLNRHHGEVFVPKAGWVRFRWSRQVPECKSYRVTRDRAGRWHVAFAAIPEPVNAPGTGKVIGIEDLKIGNMTGSARGTTEAPGRNVRAKAGLNRAVLQQGWGMFARFLEYKAPGRVEKISPAYTSQRCSECGSVDANSRQSQALYACTSCGYSCNADVNAARNIAAGHAARGDQALAWSANREPQRALLVA

SEQ ID NO: 46164 - protein, 349 aa, unknown
  TnpB Polypeptide
MLALTHSIHTIKKQTLIRNSRQSRILLLKKPWLNEVSAATLQQKQRDFIEFSRQYFNNNRKEKLGRPNYKNKHDNQSFRLPFPKFKITDNKIRIEKIGWVKIVIDREIPDNARFISCTVSKNRSGQYFVSVLVEIEQCYKQKTGKTVGVDLGIKTLATLSDGMTVENPHFLRENQAKLKRMQRHLSRKKLGSNRRNKCRLKVSRLHCDIANKRSWYMHNLTTMLVNNYDVICIEDLNVSGMLQNHKLASSVSDTSFSMFRNQLEYKCRWYGKELIVIDRFYPSSKTCSRCGWKNKDLKLSDRTFVCKDCGLEIDRDLNAAINIQAVGVDAAIRTQSSRVAGCVEASKME

SEQ ID NO: 46165 - protein, 438 aa, unknown
  TnpB Polypeptide
MRSYRLDCSLEQQRLLYEWVGCARLIWNIALEQRRIAWRDARGRTLDRRWAQQPAPSLTTQCAELTHLRAEYSWLAAVPCQVLQQKLRDLDQAFRRFFAGAAKRPVRKRKGQCAEAIRFPDGKNVQWRRLNKHSGEVKVPKIPWLRFRWSRAVCDAARRERVENVTIVRRCREWYVVFCVERPAAEKTPNNHPPVGIDRGCTAAVATSDGELLDFVALKPRERHRLARLQRRTTRQRRGSRHFVRTQSSINALHARATNRRKQFVHTTARMLAHTYGVVVLERLHIESMTRSARRTPDRPGKFVHQKRGLNRRILEKGWGALQRRLAEVCPAEGSELRLVVASYTSIRCHECGHSHPGNRKSQAVFLCQACGWCEQADVHAAKNIRELGTVGWCSIPKSAPTEGRAVAGRGGSVAACPWSRQAKYWAEASTNAARESS

SEQ ID NO: 46166 - protein, 459 aa, unknown
  TnpB Polypeptide
MLRRSISRLAFAWSAIGSGQFEGEQAVSTSVDIIVVSCRPCILIGMQLRYRYRLTPTVEQRQALARAFGCARVVYNDALRLREDAYKAGRPFISDGEVLRLVTTLAKRTPERAWLAEVSAVVLQQSVADLHRAYRNYFRALAEAKGKRAKGNPKAMLRVRKPRFKSKRSEQALRFTANSRFRILGNGRLSLPKVGDVAVRWSRPLPAPPSSVTVTLDRLGRYHASFVVEVARNPLTAVEREVGVDLGLHVLAALSDGTTVPNPRWLRQAERALRRAQRTLCRRQQGSTNWHKARRKVARLHARVADARRDLHHQLSTRLIREKQAVYLENLDVAALGRSKLAKSLADAGWGQFTAMLAHEADLYGRTVVRIDRWCPSSQQCSACGAKSGPKGRAGLKVRTWTCSVCAAAHDRDVNAARNILAAGRAVTACGGDVRPGLTLAVAATPLGTEAGTPPGAAA

SEQ ID NO: 46167 - protein, 438 aa, Helicobacter sp.
MIIQDKNKGVILLNAVKFRIYPNAQQKELISKYFGCSRVVYNYFLDYRQKRYAKGIKETYFTMQKVLTQIKRQEKYHYLNECNSQSLQMALRQLVSAYDNFFSKRARYPKFKSKKNAKQSFAIPQNIEIKTETQTIALPKFKEGIKAKLHRDLPKDSIIKQAFISCIADQYFCSLSYETKEPIPKPTLIKKAVGLDMGLRTLIVTSDKIEYPHIRFYQKLEKKLTKAQRRLSKKIKGSNNRKKQAKKVARLHLACKNIREDYLHKISDEITNQYDLIGVETLNVKGLMRIYHSKSLANASWGKFLTMLEYKAQRKGKTLLSIDKFFPSSQLCSYCGVNTGKKHEGITKFTCPHCKTTHHRDYNASVNIRNYALGMLDERHKIKIDKSRVGIIRTDYAHHINERIKACGASSNGVISKYGNILDLASYGAMKQEKAQSL

SEQ ID NO: 46168 - protein, 506 aa, unknown
  TnpB Polypeptide
LAQPAGRDALKGVHQPGDGDLRRVGHEQVHMVVLAVHLDQLGAEVGTHPGEHLAQGVQVLAGQDPPPILGHEDQMDVEARNHMSTSTVVLLLSHRPRILGGMLVRYRYRVDPTAGQRQALARAFGCARVVYNDALGARQAAHAAGERLSDTEVQRRVVTLAKRTPERAWLGEVASVVLVQACQDAHRAYRSWFDSLAGKRRGRRVGRPRFRSKHGRQSIRLTRNGFALHGSRLYVAKVGNLRVRWSRELPSPPSSVTVIREPDGRYYASFVVERAPTPLPPVAQTAGIDLGLAVFVFATVATSDGSTEQVTNPHHLRIAERRLVKAQRILARKRKGSTNSAKARHRVAAVHRRVRDRRADHHHKLALRLVRENQAVAVEDLAVAGLARTRLGKSVHDAGWAMFVRLLEEKAGRHGRRVVKIGRWVPTSQTCSACGHRDGPKPLHVRVWTCPGCGTTHDRDGNAARNILNILVAAGPAETRNACGADVRPPAMAAVGDEAGTHRGAA

SEQ ID NO: 46169 - protein, 390 aa, unknown
  TnpB Polypeptide
MVVQLMYKFRIYPSIIQRERILNSFKICKIIYNELLALSIDSYKFGKVSLSGFDYNKYLTGKYSEIHSQSKQNVSDRVHKAFQNFFRRVKDKSCKEKGFPRFKSRINSITFPQTGFKLLSDKRLRLSKIGNVPIILHRIPKGKIKTLTIKQNKARQWFAVFSCELPDSQIIHPSKQRIGLDLGIENVVTLSNGEFVSNPRHIVQSEKQLKFLQRRLSRKVKGSANRRKARFKVARLHNKIANQRSDFLHKLSRKIVTSYSFIAVEDLNIKGMVRNHCLAKHISDASWNTFIRNLEYKAVTSGSELMKVNARNTSKTCSKCGTIVEMPLNKRKFLCQNCGFACHRDLNASINILKVGTDCAELNACGDSASTIEQSIANGVAESGTINDTV

SEQ ID NO: 46170 - protein, 435 aa, Candidate division WPS-2 bacterium
MLDVTRELYNALLQQRRDAYRLRKVRVTAKMQYEELTKLRAEDPRVRAVFRECEDAVLHRLDLTLAAVSRRSKRGEKAGYPRFKRRRRWKQVEFPHGDRALRFDQAQQRVTIPGVGAVKLRKGRQVPASYKRAWVVRKNDRWYACFECERPVRPLPATNEVIGVDRGVHVLAALSDGRLLANAAVGEKRKAATARMQRELDAATVRDGNRRVVNGREYRRVKARKRLARAKEREANARRDYAHKVARQLVNGADVIALEKLSLRAMTRSAKGSVERPGRNVRAKAGLNRVVLDSGFGLLRQMIVAKAEEAARTVVEVAARFSSQECSRCGHVARESRRRRRFCCARCGYRNHADVNAALVIRGRAQLALKSELYPAEEAGRRGPDAAAWAHTTNSTETRLGSRGSRSRVGISLRRRTVRSNRTWSASLPNGWVRP

SEQ ID NO: 46171 - protein, 212 aa, Streptomyces sp.
MFGASAGTIDSEFRITVVLQDHLRPLRCDPASYCGITPKRKSVVGKVKTVSVKREGKRWYVVLTAEQAQPEPLSPSGSVVGIDMDIVSFLTTSNGEHVKAPTPKPDPETPGGFLPNGFAAKAGLNHSISDAGWGVFLTILHAKAESAGRNVIAVDPRRTSRTCPECGHVSAENRPTQETFYCVGCGHLAHADTVGALNVLRAGLARREAALA

SEQ ID NO: 46172 - protein, 388 aa, Lactobacillus sp.
MGKIIKGVKLRLYPNAKQRDQLSQMFGNDRFVWNQMLNMAKERYANNPSSHFVNEYGMNYLLKALKQEYPFLKESDSTIFLVVNHNLAQAFKMLFKHQGGYPRFKSRHSLRKSFTGRSKMSVEAKHRVKLPKLGSIRTSKTAQLNNVKIKCYTVSLEPTGRYYLSLQVEAPAVQPLSKTHKLVGVDVGVADLAITSDGKKYPKFNPLWLDKQATKWQARYSRRKHQATVAVRQWNHNKNHLTDMEVDDYQNWQRAQQIKARYQAKIANQRKDYLHKITTQLVKQYDVIIIEDLKAKNLQKNHHLAKSIANASWYQFRAILEYKCAWYGKQLIVVKPNYTSQQCSNCGYQSGPKPLEVREWTCPNCGTHHDRDVNAAVNILHKGLKAVG

SEQ ID NO: 46173 - protein, 332 aa, unknown
  TnpB Polypeptide
MAPDMLRSIQYQLLRWRRFKQSLVFGATPKKWLAKTWIPLQTYRTFPDGRRVGDQTAPVVLDFMRNVIRVRQICRNQPRYSVELQMPKWVLERVAEGGDVKFAMAGVRRGRPYLVLVAEREVQPIQPSEYTLVVDVNSWKHGIAWALIKGDRVVRWVRERPNLGYVERMYSELVRLERKYGTLKRLGLHETPEGRKLWREIKRMWRKLYAYLRDFVQKLASRLAKKAVRHSARVVIDDMFDESRRELLEEKISSSLVKIYLSGVRRFVKLFVNQLRWYGVPYEFRRLYSTLCPKCGAKMKELPGRAMRCENCNFSTHRDFVPVMWYLTNKIA

SEQ ID NO: 46174 - protein, 385 aa, unknown
  TnpB Polypeptide
MEIIRSNKYRLYPNAKQKSLLHNHFGNTRFVFNSVLGMIQESKFGTIISKYGKEVSIIPSQTQIVNQVTILKSKYPFLCQTGNDFLQAELNNLYSAFKGFFNKGGYPKFKSRKQDQSLNLYAGSRAKFDSKYIYLPKAHGTQFDKSDFKIKYKQHKTNYALPEKITGYTISKDNLNQYWISFTYKVDLPYSISGTGKQCGIDLGIKDLVITSDGLKIPNDNLIKKSEKKLRSLSRQLYKKKKGSKNRNKARIKVAKYHDKIKNQRSYRNHNVSRALVNIYDFIGIETLKVNNMVKNRRLSKAISNVALFDLTSKLQYKMAEKQGQLIKIDTWVPSSKTCSNCGSVKAELSLGTRIYECEHCNYIECRDINAAKNILASAKRIANL

SEQ ID NO: 46175 - protein, 478 aa, unknown
  TnpB Polypeptide
MMVVKKMIKTIRVMLIPNNKQNTKLFRYANTARFAYNWALGREKENYKNGGKFLSDSDLRKEFTQLKKTEEYSWLNEVSNNVTKQAIKDACHAYKRFFKGCSKFPKFKSRKFSIPSFYQDNVKIQFSDTHVKIEGFAASKKKNKQKINWIRLAEKNRIPVNCKYSNPRMKYDGINWWITVGIEYEDSVTVPSNDGIGIDLGIKDLAICSDGNKYKNINKTKKVKKLEKQKRRLQRSISRSYENNKQGKEYCKTKNVIKKEKLLLILNHRLTNIRHDHLHHITSEIVKREPSFICIEDLNVKGMMKNRHLSKAVQQQGFYEFRRQMEYKSEWNNIQVIIADRFFPSSKLCSCCGKIKKDLKLSERIYKCECGNVIDRDLQAALNLKKYGEDVLENKMGDEPNKLVKRAEVILKAGLDAGFTYRFLAKGFFIDWIVEKNNLGIQYTELLERLNNVNREVVDSIMREAQKHNFMEQLNRIG

SEQ ID NO: 46176 - protein, 438 aa, Paramecium sp.
MIFIINMTRLKPWWSRKTHEFSQILPWEKTITPLFQNDADIKKVIRTRKVKLNPTKEQKILLRKFADGARYSYNAAVAAVNDKTHNANKIELQNALVSLKSRNGEYNTFFQKRRWLLATPKVIRHQAIFEAAKNFKAAFTNLKNKNITHFKMYYKTKKHQQKNGFSLGIGKQLKYKDGVLTILPRTLGQIRYFGSIPFEDVPEAECRIQRDAYGDHWLLVPVYKTTRTQTPNPIIAIDPGVRTPFACFGTDGGSKSLGEDMNAKLVDIRTRVSIVDRRISKCQDNALKRKLKEHRRKLFRHHKRVRDTYHWEIINHITDESSGVLLPPFETKRVSGMLKAKTNRSMLGISHFTFRMRMKSKCEEKGLLYSEPTEEYTSKTCGACGQINYLLGSKKTFECFCGNVCDRDIHAARNILLKWLSTEADARVIETFAASRSI

SEQ ID NO: 46177 - protein, 379 aa, unknown
  TnpB Polypeptide
MIKTYKVRLYPTTEQESQMRQHVGACRYVWNYMLAKQQELYKQGGKYLSAFSMIKLLPPLKNDGKHEWLYEVSAASCQVVCRDLDKAYKEFFAKRKGFPRFKSRKRSSNSFPVCSNRLRIISSREVQVQKLGRVKCRIDNRLNSNVKYKISNARISYKNNKWIMTVGVESESQAPELTDKPMGIDLGVKDSAIVAFDSKKIVFPNINKGRQIRLLKKRIEHLQRSISRKYEANKVGNKHNKTNNIERCETKLRKLYERLSNIRTNYIHQSTSKLIKLLPRRVVMEDLNISGMMKNKHLSKAIQEQCLHEWIRQMRYKCEWSGIEFVQADRFYPSSKTCSNCGCVKRDLKLKDRTFVCDECGFTIDRDYQAALNLMRYEG

SEQ ID NO: 46178 - protein, 379 aa, unknown
  TnpB Polypeptide
VLPHASRNIIENYYRLKNGKYRELRNIYPNIPSHYVHGVCQDAVERVSSFRRNRARQYSREIFREIVKYLNLREKDLKNKKLVRLLWEKSWEIAWDQADLEMSNGIPVLKINSVSLWLVDDHIWKPVNPTKININGFENIFFTSVAINTHRGWVHLDLEPSKEFYKLLARGFKPTSHAKIKLDRKSRRVIFHLSLEKEVEIYKPGNIKPVDVNENSVATLYEAFAVILETDLAETTLGYSYRKESIQRRNGSDSGKTRKAMEKLKEGKKRDYRMKKANMIVRDAMRMKGVIVIERISRDNIRVMIARYRNKQLRHRIYQSALKGELNAIIDKAREYGVPVLMVDPRNTSKICPIHKAVIEYGEDRIGICSKGARGGIGR

SEQ ID NO: 46179 - protein, 493 aa, unknown
  TnpB Polypeptide
VGECAGRMTQGGTTPRSLLADGRPDPLQALREEIAERLKKNHRTVRLRLLPSESEHEDLMGIGLTCVKLFNELNYEKRQAFIKGELTRKKNYEINSKYYYKYNETLGVNAQAVIQKNDEAWSTFFKQLDLKKQGRLMPHIRKVSPPGYWKDRLTGEKEIHIFIRNDRYYLEPINEGEGYLVLKDFNLRIRYVGRIRWEGKQGRLEIIYEAGRRQAYIPIEVDVEPPKSNRRGYVKPNYRDKKGRIINPRSIRQRDPIGDKKAFIDMGLNNLFAVVTTDGSAMLVKGGSIKSEYYWWKREIATYQAIRDLPRNARFSTWKEYHEKYLKAMYTRNERLRHLYITSIRFLADDLYRRGVKKLYIGYPIMLTQNNSNEYNTNIWWSRKIVLWIVDIFMEYCIDVEIVPEDHTSRECSICGIRHKNGRKYRGLYECKKTGKKINSDINAALNIARRLGHRIRIARKIESYLVTHNGVKPLIPLQRANTRDPEVRNPTP

SEQ ID NO: 46180 - protein, 265 aa, unknown
  TnpB Polypeptide
LEGQGYGEKRIHILIRNDRYYLEPISENEGYIVLEDFDLKIKYVGRIRWEGKQGRLEIIYEAGKWFAHLPIEVGADPPKSNPKGYVKPIYDDEEEKKKQRITNPKSIRQRDPIDDKEAFIDMGLNNLFAVVVSDGSALLVKGGSIKSEYYWWKREIATYQSIRDMLRRLGVSTWIYYLKRYLDAMYKRDERLRHLYITAIRFLADDLYRRGVRKLYIGYPYMLLQDNGNEYNANTWWFRKIVLWIVDIFMEHGIDVEIVPEDYTS

SEQ ID NO: 46181 - protein, 294 aa, unknown
  TnpB Polypeptide
MGLKMRIPIIPKDRAFKKRLREELMKDNPYAAHWVDTVIRTAYSIMKNWRKSYLRGRARKVKPRIRRRFARCKTTLMKIDYQAKSIRITLKPGEYLTISWRSTWFEHRVRGWAVGEVIIKDDRVFIPFKSSKEIYVRRVIGWDSNELSLDGYEPSIGFIHVDLKPLQSIKITYERKKAMAQSKGRRDLYEKYVRRERNREKDFVNKLSAGLRMLFQNTIHVFEDLDKEDLVFRKRAKNRRKRNARTPWKRIRRRISEVALTAYVDPRNTSRESPDAGMSWRPKRGRSSNAPDVD

SEQ ID NO: 46182 - protein, 438 aa, unknown
  TnpB Polypeptide
MALDHATKAEMIDAMLKISLEAKTKRKAKAAKEGKPEPEDKEDFYEKCAKTLSEMPDEEFAFRMEEINDSFAMLSLEYKVPVISKARIPLDSRLMKLEESNDIKAPYVIEVTNPTEKGKRITVPLDTSKHSLHKAKSCKMARAVTCSIDKGVLRIGWSYTKTVAKPATSKVNGVDTGIADLFYLSDGKHFGSMREVLDFYHKEVEKSFGEFSSLRNKKRKIRHFLRKHKNLPDDVRRSLIKKMDKLNRMIQKANAPYRKKRHYYQMLDKEIKDAVLSYVSSLDKETITVLELLDIREFNKSRRVNGMFSCFARGKAQQKLMQTLNWKGFDFVEVVPDYTSQVCPECSNLDKANRNGKSFLCTCCGYKGDADHTAGINIKARYLDKNLSKICEDNKYNHKVLQSKLSGYYSRKNELYKQQHPEKFVKKQNSEEQAASAT

SEQ ID NO: 46183 - protein, 414 aa, Lactobacillus sp.
MTKKMADLAYHYGLKMRLFPSSEQKRIIDNNINASRFAYNEMVAIDKELYLLQQVQIPISIVQDRIAYLKRRKNNTQMLFAIHPWLAGTGIGTDVIDQARRAYQAAWHMFRQVHQAGVPVFHRKSYDGSYQLPTRYTKTEAGLMSGSNRFLDTKHVTISGLGKFRVSGSQKRLFSHADSIRVGTITVRRDATGRYYLSMQLGSDVPFVELSQNRQPAIGIDLNTDNFLTDSDANVIANPRYYRAIKGKLAKQQRKLARRALRAKKENRALRDSKNYQKQRVVVANLQRDVANRRDAFLHLLSTTLIKNHDLVVAEELRSKNMLRNHALAMSIADGGWRRFLGMLAYKAVLYAHKFVTVDPRNTTQTCSDCGFVMSGDQKLTLADREWTCPQCGTYHIRDHNAARNILAKGLALK

SEQ ID NO: 46184 - protein, 402 aa, Streptomyces sp.
MMRAYKFLIRPTVRQEQALGEMLRDHCSLYNGALQERRDAFRHASKTTIRYGDQSAQLKEIRAFDPERQGRWSFSSQQATLRRLDKAFAAFFRRVKASGKPGYPRFKGAGHFDTVQFPKDGDGCRWDSTPHDSQTRVRLQGVGHVRVHQHRPVKGRVKTISVKREGRRWYVILACDEVPAEPLPATGSIVGIDMGTVHFFTDSNGEHIENPRFLQTVAQELAAAQRHLDTFPKRTRRRTKKHRAAARKVAKIHAKIRRQRLDHHHKAANELIRAHDVIAHERLNTAGMSKAPVPKPDPDNDGAFLPNGAAAKAGLNRSILDAGWGLFFGILADKAESAGRRVIPVDARNTSRECPECGHTSVENRTTQAKFQCTVCGFTAHADHVGALNVLDRAGLVLCGAA

SEQ ID NO: 46185 - protein, 664 aa, unknown
  TnpB Polypeptide
MGRPKKEVPPKPPDKPTFDYFKAVKVPIKHILKQPEIHLPKINNAVMKCHKIVIHTLMFMKLYLLDYYEKHQTLPVIDTKFINTIMKVVCGEKTEKRGKPASEITKQEKEKFVAFFEEHYLHLTQNEELNYTNLNTVLDYLKLTVLTVYETNIKSHFVEYVERYVNVMWKKQFLTQKIKSKTTLTKKEKETKLRKLGSELRKIKNDILNVEPTEYKSHSSYHSWINEQKKKIMPVKTKFEKQSIYYDIQCHPQDYFPCMICMMKQIEKQQIKIKNVFPMRNDIIPKHIRLDTTTIVMLLFTKKHGGKGEYTTKGNLKINENKIWDFFFTTEKQCFQKPNYTFHHMIETDGVSATILFIRNEFVGKHVPNQTYKEKDIYIDEVSDYSVLQTKKIVAVDMGKSDLIYCVNGAEKDADKFRYSQDQRRKETKSKKFSKLILELKQEKINGKTIIEHETELSNYNRKSLNIDEFKAYIQKKNELNHILMSFYEKYLFRKLKLNGYLNTKKSEQRMIQNFQKKFGTPDTVIIAFGDWEQRQQMKYKEPTKGKGMRSLFRKCGYKTYLVDEFRSSCKCSQCNGGECKNFLMVDNPKPYRNNQQMCWGLLKCKTCSTFWNRDCNGAKNIYKITENAINQFARPVYLCRGTYQAIFKNGYNQNLCGYEKTQS

SEQ ID NO: 46186 - protein, 391 aa, unknown
  TnpB Polypeptide
MSTQNISYKYRIYPKQKQIKRIFTMFNQAKEIHNELIALNVETYKSTGKGLIKFDYARHTSGRSKTINLHSQTIQNIADRVHKSFQNFFGRIKRKEKEKGFPRMKKYYKSITYPQSGFKFLNDKHLFVSKIGNIPIVFHRIMKGNVKIMTVKRNRVGQWFVFFSNEIEIIKVKHPSKEQVGIDVGLESFATLSNRERIENPRFLIRSEKRLKTFQRRLSRKKKGSSNRRKSKFRVARIHQKIFNQRTDFLHQQSVMIVKKFSIIAVEQLNISGMVRNHRLAKHINDASWGSFLQMLSYKAVMCGGEIVENTKTRGSSKRCSHCGTEMEMPLSKRTFNCLNCGLSIHRDLNASLNMLRDTVGLTEINACGDNVRPSVKKAVVVEAGTKYESA

SEQ ID NO: 46187 - protein, 411 aa, Acidimicrobiaceae sp.
MVLPVLVPTGSGRWARLAHFLNDRDTWHKIDLVRRPDPNRAGGWRYEMHLLVLNDGYHSPRVRDQLAAAPRDRVACVDVNVSNLSVTSRNHELTSLETTVVKVSEIERERLVREVLQRRRRQRSLDRSRRATNVAQYQKSKAQVRRDQRRAAHGLSEVTTLARGARRMRTKEKPIQAYRRDTLSKQYVHLRTIDAARARATSITKGQAAWAISRELIAIHGPHWIIEDCHLPTWSRSWGKAMAISAPGMVTCALAATSAELNGSFTKVSTATTALSSTCLCGAKVRKVLGERVHRCASCGLVGDRDLVSAALGTCVTPATTADEHDLVDSAIATALRQMIAIIGCEDTLVSQTQPLELGRHGSVQAARPDPMGPGCSRERPLRAPSTKGRGRPRPAKVARLRGLALRHPTG

SEQ ID NO: 46188 - protein, 443 aa, Escherichia sp.
MVKNLTSVSGDKDQVNMHQENTMLPRRISVSLFIDQSIIWPVKRLQAFKFQLRPGGQQEREMRRFAGACRFVFNRALALQNENHEAGNKYIPYGKMASWLVEWKNATETQWLKDSPSQPLQQSLKGLERAYKNFFQKRAAFPRFKKRGQNDAFRYPQGVKLDQENSRIFLPKLGWMRYRNSRQVTGVVKNVTVSQSCGKWYISIQTESEVSTPVHPSASMIGLDAGVAKLATLSDGTVFEPVNSFQKNQKTLARLQRQLSRKVKFSNNWQKQKRKIQRLHSCIANIRRDYLHKVTTTVSKNHAMIVIEDLKVSNMSKSAAGTVSLPGRNVRAKSGLNRSILDQGWYEIRRQLAYKQLWRGGQVLAVPPAYTSQRCVCCGHTAKENRLSQSKFRCQVCGYTANADVNGARNILAAGHAVLACGEMVQSGRSLKREPTEMIQATA

SEQ ID NO: 46189 - protein, 296 aa, Escherichia sp.
MLRTACIRLDVKVEQSKQLSVLREVYADACNRLVSVVCEHRIWNRVGLHNMVYRDLREHTPLGSQMCCNVIFSVCKAYKSQKERGHIHKAKAVPTIRFNGTSVHFDKKTYSLRDNSLSLYTLNGRIRVPMIIGEHQQRMLSSGHPKEAELVFRKGLWFFNLVVEITDTTMVVSEKTMGVDMGENNLAAHSLGKLFGGEQLRDERDRHLALRRRLQSNGSQSAKQKLRQVSGKEMRRVKQTNHETSKVIVAAAAEAGIGTIILEDLTHIRDRIKAGKRVRSRLPPLGMASASDVYRI

SEQ ID NO: 46190 - protein, 422 aa, Escherichia sp.
LQQSLKDLERAYKNFFRKRAAFPRFKKRGQNDAFRYPQGVKLDQENSRIFLPKLGWMRYRNSRQVTGVVKNVTVSQSCGKWYISIQTESEVSTPVHPSASMVGLDAGVAKLATLSDGTVFEPVNSFQKNQKKLARLQRQLSRKVKFSNNWQKQKRKIQRLHSCIANIRRDYLHKVTTAVSKNHAMIVIEDLKVSNMSKSAAGTVSQPGRNVRAKSGLNRSILDQGWYEMRRQLAYKQLWRGGQVLAVPPAYTSQRCAYCGHTAKENRLSQSKFRCQVCGYTANADVNGARNIFSGGARRSCLWRDGAVRPPVEAGTHRNDSGDSLNVAGIHVLQGVEDVNIGFCQRLNSTPRNKRLRQLIPKTQNQSRPASIHLPLPEMPPPPRLAHAHYAAPDTNCRRWYLTAPDLPASGSNLRAGQPSSR

SEQ ID NO: 46191 - protein, 385 aa, unknown
  TnpB Polypeptide
MITSIKVRLEPNNKQNSKMFQSAGTARWAYNWTLNKQQENYKQGNKFLQDGVLRKELTQLKKTSELKWLNNYSNNVTKQAIKDACNAYKKFFNHLADKPKFKSRKKTKPSFYQDIVKVKFTETHVKIEGFANSRKQNKQKLNWVKLSEKGKIPTNTKYINPRITFDGLHWYISVGIEVKNIRPKLTTESIGIDLGIKDLAICSNRMTFKNINKTSRVKKLEKKMRKLQRRVSRKYLINKKGKSYCKTGNIIKLEKTIKKVYKRLDNIRTNYIHQVITKIVKAKPSRVVMEDLNVTGMMKNKHLSKAIAQQNFYKFIQTMKYKCKKYGIEFIQADRFYPSSKTCSECGAVKKDLKLSDRTYICNECGCVIDRDFNASINLSRYELA

SEQ ID NO: 46192 - protein, 397 aa, unknown
  TnpB Polypeptide
MIRLSYKYHLKPSAEQVAALEKQLRLCRWTYNALLEHSLSERRAGRGTPTHKELTYLIPDMKAMKPELSNVFSQVLQNVAKRVRSGFEGYWNRRRVGLRAHLPRFRGEDRYDSLTYPQFGFQLKDGVLCLSKIGDLRIIQHRSIEGKVKTLTVTRSRARKWFAVFSCEVEEKPIPGRLPSVGVDFGLNSLVALSDGTLIEAPRSYRGAEAKSRRAHRNLSRKRKGSRNREKARARLARVEERIANKRRDFAYKTARSIVNRYERVYVEDLKIANMVKDRRLGKSIGDAGWGMLRNALTYMAKMSEGVIAFVSPRGTSQTCSGCGAYVGKGLSVRTHRCPGCGLTIDRDVNAARNILRKGIGLERAEYTPVGEVTATQLSEVGQVASVSQEAHLFRGG

SEQ ID NO: 46193 - protein, 517 aa, unknown
  TnpB Polypeptide
MFVSLQFKLELKKEDKEKLIKLMRKQSSAIRVAYNMLRELEKGKTKNSHAQIYQRLRQLFPELPTKYIDSAIYKAKQYPIDKPVVFGGKRLFEKLCKNHLTGKAREKLKNQWRELRQGSLVSVGSKSDKGNRLTRFENINGQIHLRITTGNKEFIYAKVLREPSNSKDKWLTFMTILLESWQTKNYFPYTVELKLRDGEFYGSVSFELPTPEVRYKRENGVIAIDTNASPIHLAIAEVSKTGELVSYQTISLHNLLGLSQNSKDHQEWILAHQIVDLAIQKGKAIAVENLKKLKKGMRGDGKATLRKRLHHWSAKKFLQKLKRVAVLKGVEVIEVNPAYTSVIGILKYAPQLNIDKDIVGAYVIGRRALGFREDMPENYENLLKDKAYLEFALNRYEEREKELRELLEEETNQYKRNALESELRSVENSKKLLTNLIQSLQGEPSSCEGANGRNPEQGETKKVSQVAWQVLKVALLFPILVRILPRDLSPLKPVLVEGVWDRVRSRLVPLEAGGASR

SEQ ID NO: 46194 - protein, 589 aa, unknown
  TnpB Polypeptide
MIITIETRLRLEPQQEHLLHACVEMWSSFYRTTWRLFNNHHCSEKQIYDRLMADGALNSHQVKSLINKVKGEHAKLKALTKTQLIQQQNKASLVEKFIAKLKQELSAGNAKIAGLKQKKTNHHSQIHLLQADIKKKRLLLHAKMLKFQRITKRIHIMGERLSRNTFKLCFGSRDLFRQQPGFHTDAYRLTKEQKVYDSKEQWLDDWRKARNNILYSVGDKNKPQGNAELQYYPETKTLRVRLVERVYQQRLAVKALELDTPVQELLNHDIIKHSSLRTQARFMDIQDVSFSQKHLAKLQQVFALPSDQRQPITAKIIKRQCPNGRDTGYYLQLSFDEVIQPSFQFTTPYTMGVDLNVKGLAYCIVKEDGNKLKNDSTRLYPSHGFIPWDLNGKTSAQRSWIISNTIEKLLDVSCHFGIGTLAIEDLDFNATKATMNHGYKAQPNYNDMLSQFATSQFKDLLIRKTERLNMKLHLVNPSYSSIGGFTKYGYSNKLPVDVAASLWLARQSLYGKTFKTEQHIEYKKFSKESVTLPCVFQPKQSKRLEKLDHWRHMSNALGTKRSEWIRKMHTLLRPEVDQPPLISDHDFGR

SEQ ID NO: 46195 - protein, 405 aa, unknown
  TnpB Polypeptide
LYSRGEKSKEGNLNLRLVNLNNQWHLRINLGNGEYVWARVIRSAKRKTDKWVGFISDIEYAAKTGEWFPYTVRLKLRDEKIYAQFSREEKLPEVTITEDNGVIGIDINAYPFHLALVHTTKDGNLEKYERISLDKLLEGSSEKREYLSWKVAHQVVEIAKRERKASVVENLEKIPKGKRGDGLPKLRQKLQKWVYKALLQKIEIVARRNGIQVIKVNPAYTSIIGKLKYAPLYNIDKDTAGAYVIARRGLGFKERLPKNYKQLLKDGDFLSYAIAKIEDKTAKLKQEIREEKNEYKRNRLKSILWKTRKELDLLLRYLRESGESESATQQTVNRKMERVQGLTHVRQKSWRVLSVALAFSCLESFRDLSPLKRVILTRDWVGAAKRASPSLPGQGTTVLNLYSFV

SEQ ID NO: 46196 - protein, 355 aa, unknown
  TnpB Polypeptide
VAQAKLFETWLGICCDLYNAALQERRDAWRLLRRQVTLNDQYRQLTEVRGADAEVAAIPAWVTRSPLLHVERAIATFVARRQRGELVGYPRFRARKRYDTFTFPFTSVRDRAVHVPTLGSVRFVKHRDFRGDPRQVRIMRRADHWYVGIVCDVGDAPAKLPVRSAVGIDLGLHSFATLSDGTEVENPRFFRRAEKRLSCAQRVLARKGSVSRGRQRARVQLARQLRKVKNQRRDFAYKLTRALFLKYDMIAHEALNIVGLAQGICRKSVGDAGWGQFIRILSCKAEEAGKTVVAVDPSGTSQRCSTCGVVVAKTLGERVHACSTCGSVLGRDHNAALNILALGRSAVAVRAEALS

SEQ ID NO: 46197 - protein, 335 aa, unknown
  TnpB Polypeptide
MESYRAAVNIYISHLWNTKGKLDKNTLALLPATKTRLSARYRSQALKQAMETVIATKKAVKGTHKYCSMPVFRGSATLDAKFVTIEAGKGSFDLVIKLSCLEKGKRLILPTKKTKMLNKWASKPLARIIQGCSLNENSITIWVDLPDLDAKKGDSLGVDIGINKLISSSDGSHLGTEFKALRDKIKRKKPGSKAKGRAIKERNNFIRRIVNMLPWSSLGLLAIEDLKHMKTGKQKNRGKQFRKAMMPWTYCQVIEVLKQKAQENRVHLVAVAPAYTSQTCPSCETASKGNRKAEKFCCINCGYSHDADTVGAINILVKALRLIGSVESPMLLNSQ

SEQ ID NO: 46198 - protein, 470 aa, Streptomyces sp.
  misc_feature (335)..(399): Xaa can be any naturally occurring amino acid
MSGRNRWGGPCGAPRRHPAAERRTAGQGAREICRVRMRKVRSLDSVADVKLVVQVKLLPTPVQAAALEVTLRACNEAATWVSEVAFEKDVKNNFALRKLAYDAVRAQWNLGAQAAQHVVKKTCDAYATLKANLKAGNLGKPSSKRYRQAAEKPIVFRPQGAQPYDDRMLSWQIVEPRVSIWTTAGRIKDVTFTAAPKQLATLSLYRKGESDLVCRDGMWFLNATCEVPEAPLNADPVDFLGIDLGIVNIATTSDGEIMAGRELNRVRVRERKLRTKLQKKNTPSAKRRLKKRRRKEARRARDINHKIAKHVVAEAERTGRGIALEDLTGIRERVXXXXXXXXXXXXXXXXXXXXXXXXXXXXXXXXXXXXXXXXXXXXXXXXXXXXXXXXXXXXXXXXXGTALQAPTGRPLQLVLRPAGAVHRVQGPQGGGAGGVRRSGIHLAYLRRVRAHRQGEPGLTGPVCVPELRIR

SEQ ID NO: 46199 - protein, 163 aa, Gracilibacillus sp.
LAKAQRSLSRKQKFSNNWHKQKKKIATIHEKVVNKRKDFQHKLSSELVQQYDVIAIEDLSISDMLKDKSYSKSIHDASWSEFATMLTYKCDWYGKELVKVGKHFPSTQICSSCKQKHPIIKDTSIRVWTCPTCQTNHDRDINAAVNILEEGMHLSTVGATGIA

SEQ ID NO: 46200 - protein, 514 aa, unknown
  TnpB Polypeptide
MAKNQTYKAFTVRPTHVLDLNGVLLDRATILAELASEVGGISGYATFVVRNDTKLADELAQAGAVQPTTAGRRAGVKMPDFLVTGKSGRSRKEALIQHRVVTEHRSWQERVDAVNGESSKHVSQGWKRTMNASPPSYGEDYINLGAVNKQYAVIENDPFIDGEIVLKMVIRGNWYRLIFKFDNKRFPVGKVTLPVIKVQGNQPVFIFTVATDNPVVQFSGKYIIGVDVGINNYATVVVRNTETGGIAHVSTLSQRVHSLWNSIRASERQVRQLREKAEPILYDRQGKMAALDEAQLHREAASRKKRELAILAAQEIANISHQYDNAVVAVEDLSWVKNTMQNGRWNRGELVQWVTHYVSQNGGWVVAVNAANTSQVCHLCGSKVKHPKHNISACPTHGEMDRDVNAAANIASRAVKKVATARNTRANNRKLQKKTALKTPIGRKALKHPGGSRNKNHATPKRKKRRVSKGVSLPSRPARVITTTVLADWATPETSKAALNQGNTTYECRLCSLS

SEQ ID NO: 46201 - protein, 298 aa, Acidimicrobiaceae sp.
VRQRGRRPSARELLCITTRFSDPSHLRLPKFGPVKLFGPSRKVRRMIDAGRFHVYSATLNQRAGRWIVSLTGVAAELHHAERSRSARHPVAVGVDRGITSLAVAADANGTPFQDFEGVKTLRAAQATLKAANQALARTTPGSKGRQRARDRLANTHRKVANIRRHLVHEASKALVTRAQVLALEDLNVTGMVRNRRLAKSISDAAMGELSLQILYKAKWHGVEVRMVDRFFPSSKTCSGCGEIKRELNLSQRTYFCVVCGLVIDRDLNAAINLARWQPDESPSGTAPNTPRALLLSTV

SEQ ID NO: 46202 - protein, 438 aa, Hydrococcus sp.
MILNYVYRIYPDSNQTDLLNEWLETCRRSYNYALRELKDWIASRKCPIDRCSLESEYIMAADYPFPSYHQQQNNLPKAKKDFLRLAAVPSQVLQTNIRRLHDAWDFFQKRGYGFPRFKKYGQMKSILFPQFKSNPLTGWRGLQGRDAGSRHSPLQIQLPKLGKVQINLHRPIPDGFVIKQVRVLKKAVGWFAVVAIESDISLPSPLPHGRAIGIDVGLLSYVATSDGYTEARPKFFKTAYSRLKVLQKRLSKKQKRGKNYEKARISVAKQHNHIDFKRKDYQFKLAHKLCDMANTIFVEDCDFRIMASCMLGKHTIDASFGQFRTILEYVGQKKDVFVGKVDHRGTSQTCPNCRTEVRKDLSVRLHECQECGYVVDRDIASAQEICNRGQETYRGTPEKQEIVSQVVLSGAMCLDKWRMGGEMPNREVGKPTLYCASN

SEQ ID NO: 46203 - protein, 360 aa, unknown
  TnpB Polypeptide
MKLTAQIKLHPTDAQVESLKRTLEAANAAANYLSAYAWNYQQFRKYDLHYAGYYAIREEFGLSAQVAVRIVAKVADSYKLDRQTQRTFRPLGSIAYDDRILSWKKGDTVSIWSLDGRLTIPFVCGETHRELLTKRQGEADLVYRNGEFYLYQTCDVDETPLETPADYLGIDLGVATIAADSDEKLHSGSEIKNVRFRHRRLRSKLQKKGTKSCRRRLRKLSGKERRFATQVNHTISKQIVDSAQRTGRGIALEDLQGIRDRIRARRSQRATLHSWSFYQLRGFIEYKAKRVGVVVVAVDPRNTSRTCPSCGCIDKANRPNQATFLCIQCGFSGHADCVAAENIRRAAVNQPYVSTTPNPA

SEQ ID NO: 46204 - protein, 464 aa, Burkholderia sp.
MISLVKTPRRYFVTKTKCTCMRNTQCLPCLMCGSLMRGRPIFTLLRSFKGQSILLDMELLQAFKFELMPTGEQARKMRQFAGACRFVYNKALAFQKENHAAGQKFVGYVGMAKRLTEWRNSVDTPWLKDGPVHTQQHALKHLEAAFKNFFAGRASFPQFKRKGLGDSFLFPDKNQIEVDAGNGRIKVPKLGWLRYRKSRDVLGEVRSATVSLRAGKWYVSILTRRQVEWPVPHGPAVGIDVGVARFATMSDGSYIAPLASFRKHEQRLAKSQRRMARKVKGSSNWKKAKARIQNIHARIANARSDFLHKASNTISKNHAMIAVEDLKIRNMSKSAKGTADAPGRNVHAKSGLNKSILDQGWGEFRRQLEYKTARRGGFFVAVDPKNTSRTCPCCGHVSKENRKTRALFACVNCGHKANADHVGALNVLAAGHAVIACGGMAQSGQPAKQEPAEGACAPVGILVL

SEQ ID NO: 46205 - protein, 404 aa, unknown
  TnpB Polypeptide
MLDNRFSIKYNKDMQSYKFKILPNKEQKEKLDSMFGCSRFVWNYFLDLNNKIYLEAKEKDLKKKHLNYYDCANQLTALKKGNDWLTIANSQSLQQTLKDLDTAYNRFFQKKSSFPNFKSKKNKQSFRVPQFFTIKENLSCFPKFKDGIKTVVHREVMGNIKFATISKTKTDKYFVSITTDYEVKKKRINDNNIGIDLGIKDFAVCSNGEKYSLKIDEKNIKFLHKQVSKKQRGSQNKNKARLKLAKRYEKIDNIKQDFQHKLSDKICKENKLIAIEDLNISGMVKNHCLAKSISNQSWYSFITKLEYKAIRYGGKVERTNRFYPSSKTCNSCGYINKGLELKDRDWECPRCSIKLDRDINASQNILAQVLRELNLKGVGYQRLKPVELSSLDEAMKQEATGSLA

SEQ ID NO: 46206 - protein, 307 aa, Okeania sp.
MKARFKYRIDPTPGQKYRLAKLFSCVRVVWNDSLACCQQKYKSEEKKPTNAELQKQLITSAKKTVDREWLSEVSAIPLQQSLNDLNQAYQNFFQSTKGKRKGKPIKPPRFKKRKSRQTAKFTKGGFKIGQHKVYLAKIGKLKIVWSRELPASPSSVTLIKDSANRYFLSFVVEIQPETLSENENSVGIDLGIKTFATLSDGTKIDAPKALKKRIKKYRKLSKLLSNKTLGSKRYEKARLRVAKFHAKLKDTRTDFLHKLSTEIIRENQTIVLEDLFAKHSEGNVSGMVKNRNPPPSPPGRGARGVGF

SEQ ID NO: 46207 - protein, 364 aa, Haladaptatus sp.
MGGVSDVVTPYDLPYQAKSALCSYVPKLRKTYNAREIDDEHPLRLTNQAAKFDHSDEREYEFTWWAPRPGRGTNFWIPLRINPDQKSLWYDLLNEDAKTGEIRLQKHRKNWVLHVTAEYSIDEPTTNGDTTPIGLDIGETALITGCALKRGTPTRPVLWSGKRSKHLRKEMSTTLQRLQERNAEWRIDERFDYYQNALTDIVEKASREVVDYATGFENPVIVIEDLTYIRENLDYGKYMNRRLHAWAFARLQGRIEDKATDAGIPIEYVNPAYTSQTCHECGHIGKRGSQAEFRCTNDDCHVSTFQADISAAASIAQRVDPWGESCISKTCDDDSPQDGSGCDTAVRPPKRSAPTQMTLGAYES

SEQ ID NO: 46208 - protein, 367 aa, unknown
  TnpB Polypeptide
MKEPDKYASVPEQDLPTPLSQRWQRCAWQQACGIVQSWYSNECQNPPVLSNRCIQANANVVKLEPSRTPTFDYWLRISTLEAGKPIRVPIKLYDRAKETIASFPKLCTSVTLNELKGEWYVIFVVERKTKKPPKKEVVGVDIGMVSIVSTSQGQHYGQINDFLRKRVEKSAQKRRRKQKLNSCLKRKGKPLVSLSDSRAEAYSKNEIGRALNSMISELPDGASVAVEYLSVKDMRFKSRQMNRALRASQLGYVRDKLKFKLDERNIHYRSVQPAYSSQQCSKCGFTLKMNRRNQSEFLCLFCGYSANADLNAALNIAERFGDDELTRLSFREVETVLAIRFLRRHPVACSATAGPVRDVVQLWLPPG

SEQ ID NO: 46209 - protein, 374 aa, unknown
  TnpB Polypeptide
MRKTLKYRLFPTKKQQRLFQEQLDECRWLYNHFLEERRNAWEKDKKNIGYFQQSESIVVLKRQRPSLNKVYSQALQNVADRMDKAFQNFFRRVKQGEKPGYPRFKGFNRYDSFTYKQAGFGWKIENNKLELSKIGSIKIKLHRPIVGTLKTCTIRKKANKWYACISVECEPKPLKKNSRAVGIDVGLENFAAFSTDERIENPKFFKREERQLAKAQRKLSKQKKKTLEHGKAKKVVTRIHERIANKRHNFTHQEARKIINRFGIVCIEKLNTKNMMQNHLLAKSIADVAWNQFAQALFYKAEEADRKIVAVDPCLNLAGVDSKNTSQICSQCGTVVKKKLSTRWHKCPVCGLHLHRDINASRNILRLGIQSLGI

SEQ ID NO: 46210 - protein, 420 aa, Erysipelotrichaceae sp.
MNPDKNRQIAESMKETLERHSHMDCRVFEIKVVSNKLNRLQKGSINGIFREAKWIRNAYIADKDSCKGNFKTVPVKIGDETETRKLSYIGSQMKQSVIKQVNSEIRSLSSHKKKGDKIGKLRYKSFCNSIDLKQYGVTYDIDFAGNRIKVQNIQKSLYVKGLKQIPSDAEICNARMVRKASGLYFYVTCYVPKKKEPSTGRQVGIDFGIEHNLNFSDGSDPADVSVKESKKTKKLSKKINRSWITNGRKHSKNNLKRIAQLRKLYEHLYRQRKDKANKIVHNILNSYDFIAIQDEMIHNWHSGLFGKQVQNSAMGLIKAELKKSSKTFVIDRSFPSTQICPVCGCLNKHPLSKRDYDCPHCGYHHPSRDIKSAQSILDKALKQVSTERRTKSPEEVSASVAEACSSAISALPVIQEAQVL

SEQ ID NO: 46211 - protein, 421 aa, unknown
  TnpB Polypeptide
MIRVHKIKLEPTAAQEDYFRRACGTARFAYNWALAEWDRQRKAGEKPTEAALRKQLNAIKTEQFPWMSEVTKNAPQQAIKNVGLAFQHFFRRVKLKQKPGYPRFKQKGIRDSFRADNGPGTFSTDGKVLKLPRVGGIRMREQLRFVGVAKSAAVSRMADGWYVSISVETETRLQAVANKGACGVDLGVNTLAAIASGSGVEVVPALRPHRAAHKRLVRLSRSLSRKVKGSANRAKAKAKLARLHLRIANVRKDALHKLTTGLATRYSTIGIEDLNVRGMMGGNLARSVADVGFHEFRRQLEYKAAMTGAQVIVLDRFFPSSQLCSRCGERHPEMTRRGGNASRMVCRCGCNTDRDENAAINIMRQALACQSVESEALASAQAETKLHPVKQETEGCAAMRRRGRAAWSPLPALLAAKEVKQ

SEQ ID NO: 46212 - protein, 407 aa, Chloroflexi sp.
VPLASDMGVKRRPDVVNKRQSHLLLQCLRESRLIYNEMLETVKRQYEEKGTFPGKYDLTTQFKGCGGQHVPATTVQTLADRLSKALKRFLACKALAQPVGFPRFKGANRWHSLQLRQYGKDVSLHEDKKHLIVPAKLGKSLKIKMHRLMEGTPKTVYLVLRADGHWYALIVCETEPQTEHLPSRCSHPDIGLDVGLKSFLTDSEGQTVENPRFYRTSQKTLRRQQRQLCRRKKGSKRRRKAARTVAKTHLKINRQRRDHHFKTAKPYAEGYQRIVVEDLAIPNMVKNHHLSKSITDASWGAFLAILEAKAESAGHQVLRVNPRFTSQKCHQCGEIVQKSLSVRTHICPCCGYVADRDVNAAKNILAKARAWPSGTVSAGSPVELRSPRLEPWGVVTIPGSRSSTGAE

SEQ ID NO: 46213 - protein, 372 aa, Okeania sp.
MQSIKTKLKVNNQQKTILAKHAGVARHAYNWGLATCISEYEQTKKRPSAITLHKRLVAEVKSINPWYDQVSKCAPQQALRDLERAFKNFLTIPQRGFPQFKKKGKKDSFYLEGSIKICQGNKIKLPRIGIVKTYEILPSVPVKNVRISKRANNWYISFKYDNEPTHTAKKRDVIGVDVGINTLATCSDGTPNAHPKAYQQAKKRLTRYQRRVNKKKFGSVNRAKAVKRLAILHKKVADIRADKLHQLTTWLAKNHSTIVIEDLNVSGMLKKRCDPATTSVAPGSAPRHHKLASAIADCGFYEFKGQLTYKCEWLGSELVIADRFYPSSQICSHCGHQQKMPLSVRTYECSACGFTADRDFNAAVNLENYVSQ

SEQ ID NO: 46214 - protein, 440 aa, Cyanobacteria sp.
LYGCQQNLINPTPELKAILEFICSESHKLTNCGIYYARQLFFKTGKLIGKYDLEKEYKTNKHYQVMYSQAAQQILRTVAESFKSFKELDKKYSNGNLHFKPKLPKYRQGAGYALVTYPKQALRLIGNQIKIPLGTTVKRWFKLDSFTIPMPSNLKFEDIKELRILPRNQCFYSEFVYKQKPVFQYNLDSSKALAIDSGINNWLSCVSNVGTSFIIDGRKVKSLNQWYNKRVAAFKEGKPQGYWDDQLAHITEKRNRQMRDAVNKAARLVINHCIKHQIGTVVFGWNQGQKQEANLGKTTQTFVQIPTAKLKKRIEQLCECHGIKFVETEESYTSKASFLDNDFLPTYSEKPVREASPQEITWKSSGKRVKRGMYRTGQGILINADLNGAANIMRKVETQLGLSLVKVCRQVLTLATRFRIWETKTKKRGGTDLSCHVATV

SEQ ID NO: 46215 - protein, 415 aa, unknown
  TnpB Polypeptide
METCKSRFGGEGLVLLSNQDPASYPTFCTEASPDKFHPPVFLTLLSERWHRVAIQQAAGIAQSWRTNREQAHQDFLEEVLEFHAQQTEGTLISQSQEPVWTEWDVPTLRQTCIQANANIVALEPSHDSTFDYWLKISTLEPRKLLLVPVKLATYHRKALEGKTINASVTLNKCDDGWWLTLSYDEVITSHTEPDAAVVGIDVGVANFLTTSTGKHYGTFHGKLAGRQKRDREKRRRKAKLRRCLQSKGARRLPSTSSKSGQRLIRHVRQEINRAVNECFAEHVGMRVAYEQLSVATMRHKARAMNAYMRAANLSHIPKQIAWNASKRGIRATRVKSAYSSQECSVCHFPDRANRPDQKSFCCGACGFQTHADLNAAENIKRRAGDAALQACKNKGEVKALLLERHEAWKTRNGCP

SEQ ID NO: 46216 - protein, 347 aa, unknown
  TnpB Polypeptide
MGQATRTTKLLLDLGKRAEGGANTGKRIYLEETTKLLNTARAFYVSFFLAHSDKLTERVRSVTEQCQEERERLISSNELLTWAESLTVSTSAHPHPLPSYNFTERFPEFPFIYRRSVIKDAIGKVRSHLSHLAKWSSSGKKKGRPGTPGASNHPTLYDGAFCLDLDGIDLHSGSHTCFARLKVYTGAGWAWHRYPVKLETRWRERDWEQHSPKLVLRRKYAALHFSQVKKKVKESREDPHLVTVAVDLNVRNLAVITVRQDAAIIETFFVTDRGLDRHRYGHLKRIAKKQWQSGSPVKGEHSNQQLWGHVQRMNDDAAKVVARRIVDVCAKYPGCVLLFERLRKIKT

SEQ ID NO: 46217 - protein, 494 aa, Moorea sp.
MIERLDFTVGDAKKSRRNQENIDSSSVVEMTKSVELELLQVMKKLGIVRSESYNKLGSISHWGLNWKKAIPEIKSFRTPDSLGLPAKLMDWTINDVAKAITASQAACTDAVIKKIYRRFSGQDNQKTRKELCKQLKTRAFLDNPLLHRFVRKEFRRGHSWVKNQIVYQQVGYSCKRLGRNTYQLELAGLCRGKRNRIVVRSNRKIKGQIRLIYNQLLEKFEIHFLVDYGTVEIPADRRVIGVDKGYTEAFYDSDGRAHGKNLGKVATKKSDRICAKNRNRGKLWALHRKLEKIDPAKSARILENNLARKTENRRYRRNQSELTAIIGAASKSLFKGESLKVFAEDLTQPIRTLRQSKAMSRKLNSWMKGVMRNSLQKWANWTGSVVTEVQPSYTSQVDSVTGTLLGKRSGDSFTRFNGVVLQADHNAAKNILDRGTDFEISRYMSKTEVQTVLLRRTARFLKGMELSLADAVELGWLDFKHSKIRAFKELLIEI

SEQ ID NO: 46218 - protein, 426 aa, Streptomyces sp.
MSLACSRRRHGFALLSVIVMQLRYTFRLYPNTAQQAALARAFGCARVVFNDAVRAREEAREAGRAFPTAGDLSKKLITQAKRTAERAWLSEVSAVVLQQSLRDAETAYRNFFASLKGTRRGPRQGAPRFKSRKDHRQSIRFTANARWSIDHAGRLNLPKIGAVTVKWSRTLPATPSSVTVVKDAAGRFLASFVIDTDPAADQARMPETEATIGIDLGLTHFAVLSTGEKIDSPRFLRRAEKKLKKTQRELSRKQKGSKNRAKARRKVARAHAVVTDARREFHHQLSTRLIRENQAIAVEDLSVVGLARTRLAKSVHDAGWASFLGMLKYKAERYGRTLIKVGRFEPTSQTCSTCGTKDGPKPLKVREWTCSACGTRHDRDINAALNIRQAAGLAASACGAQVRPEPVLAQREETGSHGFPTGNRAA

SEQ ID NO: 46219 - protein, 484 aa, Streptomyces sp.
VKGFRPRPGFVVQAYRFALDPNAGQEAALRSHCGAARAAYNWAVAWVTASWWQRRAEVSYGVPDAELTGWRPWSLPALRKEFNVVKRTDPRFADWWEDNSKEAYSTGLANASAAFDNYAKSKNGKRKGARMGAPRFKSKRKARLSCRFTTGTIRVDADGRHVTLPRLGTIRTHEPTHKLLARVRGGTARILSATVRHERGRWFVSFQTEVKRDIQRVARPGTVVGIDLGVKTLAVMADSTGEIRTVANPRHYDKALTQLRRASRAVSRRRGPDRRTGQKPSKRWEKANAQLTKIHHRVANLRADALHKLTTTVTRTYGTVVVEDLHVAGMLRNHRLARRIADAGFGEIRRRLSYKSRRNGCRVLAADRWYPSSKTCSGCGAVKAKLPLHLRTYTCDACGLVIDRDANAALNLAALAATAVTGTGVAGDQDTAQPVSKPRGADRKTRTTRTRRKAGPGRAGGATLPHQQQTETRDRTQAQAPTLW

SEQ ID NO: 46220 - protein, 164 aa, unknown
  TnpB Polypeptide
LKKSLNKLAKLQRELSRKSKGSSNRNKARLKVARLQERISNQRKDFLQKVSTKLIRENDIICIENLQVKNMIKNKKLAQSISDVSWSEFTRQLEYKSNWYGRKVIKVDKFFASSQLCSKCGYKNEEVKDLSIREWICPECGANHNRDINAAINILNEGLRNMTI

SEQ ID NO: 46221 - protein, 392 aa, unknown
  TnpB Polypeptide
MKVITSIKVQLKPNKKQMTKLFQYANTARFAYNWAMSREQEYCISGGKFISDNDLRKEFTQLKKQKDYHWLNEVSNNVTKQSIKDACNTYKRFFKGQCKYPKFKSKRKSTPSFYQDNIKIKFTETHVKVKGFSSSKKLNKQKLNWIRLAEKDRIPIDCKYTNPRITYDGLHWWISVGIEKEDSTRIPLNEGVGIDLGIKNLAICSNENNYENINKKLTVKKSEKRKRRLQRSISRKYEKNKKKGKYCKTRNIIKSEEEFLKINHRLMNIRQNHLHQTTSEIVKREPSFICIEDLNVNGMMKNRHLSKAIQQQLFYEFRRQLEYKCNWNNIPLIIAERFFPSSKLCSCCGNIKKDLKLSDRIYKCECGNVIDRDYQAALNLKQYGENVIQSVA

SEQ ID NO: 46222 - protein, 254 aa, unknown
  TnpB Polypeptide
MCGAELSRLILSSLVPEITRHCRSFTVDGWYVVFAVEENQCRFFPLSGETVGVDVGIENFATLSTGEAVENPEFLRESEAELKTAQRKVSRRKKGSKRRGKAVKLLQKKHQKIRRQRRDFHHKTAFKVVREFDAIAVEDLNIKGMVKNHHLAKSISDAGWSQFILILTSKAESAGRVVIKVNPSYTSQDCSRCGHRNRITLATRIYRCSRCDLVIHRDRNGALNVKGRAGLSGMVPDGESCEPRISTYNAALGV

SEQ ID NO: 46223 - protein, 339 aa, Geobacillus sp.
VSVSGGGIGIRHRSSSCLNKTEGVKWIAIEHTFPDVGEKIMYQAYRFRLYPTRTQEELINQTIGCCRFVYNHFLAEWNQAYETTGKGLGYNECSKRLTALKKTLPWLKVPDSTALQNALQQLAEAFDRFFDGTANAPRFKSKKHPNPSYTAQCNYPKKGRPSIEADGHRLKLPKLGWVKFAKSRAVEGCILSATIRRNRTGKYFVSILVETEIPPLPATDKQVGVDLGLKHIVVFSTGEKIEHPQYWRRYEEKLAYWQRVMARRKPGGSNWQKARLKVAKLHEKIANCRNDFLHKWSTRLICENQVVCVEDLRVKNMQKNHKLAKGISDSAWGRFLNML

SEQ ID NO: 46224 - protein, 401 aa, Sulfolobus sp.
MWRAKGKSNVVQLSFKYKIYPSREVEEKLLKVMQVEAKVYNALLDVITKARREGKKITTVYTQAMIKDLKVEGKELVYSKALQMVNNVLWYNIRALHELKKKGKKVGRLRYKKILKFINYNQSGFKVEGDKLILSKIGSVKVLFHRPLEGRVKGVLIVKNATGWYAIFQIEVEKKPMPSNGRRVGIDVGVEKLVTTSDGIVIENPKVFDKIEKKIRLVQRILSRKKKGSKNYEKTRVKLAKLHEHAKNVMNDYIHKITTWLVEQYDEIYVEDLETKQMVERPKSKTLRKHILHSNFSLFLHHLSYKAERAGRRVVKVDPRNTSRMCAKCGYVRNDLTLKDRVFVCPKCGWVADRDYNASLNILCAGSGLPLVPVDGKPLLYIPFSEGVYSKFPGRSRKSSS

SEQ ID NO: 46225 - protein, 367 aa, unknown
  TnpB Polypeptide
MQIVNKYRLYPTKDQEEILFSTLNSCRKLYNYMMDLRQRYYKNYKYSMSYTEQSRILTFLKKTDEWSFLKNIHSQVLQNVLKRLDTAYDRFFKRISGYPHFKSYRNYNSFTYPQVKTMKKPFSKEGFVLLPKIGYIKMNIHRRFNTEDVSNITIKYLNGNWYIYLTCEVIGLEKIEKPSSKDKQIGIDLGIKHFIALSDETFIEKPKHLYKSEARLKLLQRRLSRKIKGSNNREKARRKLAKLHEKIANQRRDFLHYVSKKLADKYDLIVIEDLKIKNMVKNHKLAKSIHDASWGTFVVFLEYKMKLKGKILDRVNPNGTSQTCLCGAKVPKDLSVRVHKCSNCGVEMDRDIMSAKVILSRSKFALV

SEQ ID NO: 46226 - protein, 375 aa, unknown
  TnpB Polypeptide
MARRAFMFQLYQSKRLRHLHAKIDVAAEVHNHLIAVQKRYYRRFHGYLGYYRLKRHLTKLKRWHRFAHWRALDAQAMQHIVWRIDQGYQKFFRKENQRPPTFRKRAKYHSITLSQTGWRYEGGNHLWLFGRLYRFHHSRDLGGTIKTLTIKRLPTGRLVVIFSCLCEEEPIVRVKTGQTAGFDFGLHTYLTGSDGTEIHAPQPLRASLRALRKANRAFSRTKPGSGHRRLAHKRLAQAHADIAHQRQDWHWKLAHDLCARYDVIYLEDLELRGMAAMWGRKISDLGFGSFLPILHQVAPRHGSHVHHIDRWFPSTRLCHVCGNLNAFITLRDRVWTCACGTVHHRDRNAAINIHQEGASSCFQGRCKPTPVAATA

SEQ ID NO: 46227 - protein, 461 aa, unknown
  TnpB Polypeptide
VSGCALIKGHRVFSVLRSYSLKHELGDELLPLLLAHRDVVNRILEELWSHIEWKKRKLPGKKQWRLLPKYKVDIHSKEYKKKLRESLLQEWPYAAHWVDSAIKTAYSILKSWRKNYVKGDRRRRRPTAKRLFARAKQTLIKLEGEKLRLTVKPGEYVYLDLSKRYFPLPGEVSSAGLGEPVITLEKVHLPVHYEDTQSGKPAVAWDFNLLSLDGYSPETGWVRIDTKKLASVHIASFEKRRSVQRKASKSKKARKVLSKYSKRERNRARKHQLEIARVIQSVAGVVGLEELKKQGMYTRSRVWNRRISRSDWRSVKRILVGRLGEAKVKELDPYGSSSYCSRCGWENKDLNGAVFECKECGLRINRQLNAAINLYMRMSFGYIVNWEDGRKRVELRMEGASQKEWWDRVVLPSLLGGCVLTGGKRSDPDELVRGLHDAVRPKLYAYERCADAYLRRVKPIR

SEQ ID NO: 46228 - protein, 553 aa, Arthrobacter sp.
MDNNIQATKASAVQDPARPAGGLRRIAAPFVVATPGGVRIRTRLRPTEAEARVLRLVGEHLGHLYRTDLAVRVALGRVPAAQRGRAGRKRNLTAFSSSRWAGSITRAAEDQYQLGMRALAAEVSHLRAATGAMQRRIAVPAGQKLGKVRGYGNEAERFQKTRRLAQLKEHLEVAQAALAAGHPSITLGGRRLWKTRNHLGDTDLTRAQWEERWSASRMFLTADGESGCIGGNQTIRLTDTGNLAVKVPAPLVPVLGDRLVLSVPVAFAHRSDEWAHRVASRRCVRYDIGFDPKKGRWYLAASWGYGDTPVPGLAALQAGGLVGVDLNADHLAGCRLVGSGNPVGTPVTIPLELAGLNAGTRDGRLRAAITTLLDFARDTGATAIAIENLDFQDARSAGREAMGRGASGKRFRRTVHGIPTGKFRDRLVGMAANRGLSVIAVDPAYTSKWGGQHWHKPLQAASGGTVTRHHAASVAIGRRALGCRIRRREDGPRTRQRTLTGKPSPRPGQAPGGAAIDKSPVRPAATSRPGPPGTGRRQTPKTVRGSRAILDCP

SEQ ID NO: 46229 - protein, 584 aa, unknown
  TnpB Polypeptide
MELSRTINSDKRYYLDENTIENAASFLQTMRVFNDAKIDLYNALYDQKYLASGPLIDHAYPVFLKEKYKTNDYYNAAVYSAASGSISSQKELKKYYSTTITADLKTRDEKIKMIQETLDKKKAVKNSIRIYRKDGRWVTPYPRCQLKVKGLMIVLFNKTIVKLDEYERSVETDIRKLKTRLALVTEARRQKEKKLENIKNLPPERIVFGGKKLYSEKDTVGITKSAEDNKTSQKALKEWKQDFFEKRHQSMALPGRHTSKYGNFLCKYDGKDLSVTCIDGTTTVFHDFKLPRYNEAFQNNFTCKPEDRQSICYNFTVKRDRKNRQYIIVSVNMKLQAYENSYYGNGAISMDVNYDHFALAEIDETGKLLDQKLIRFDLVKKSTGQITNILGAAVKEVFNWCAEKDKRLIVEDIDLTIKLASRKYGNRKGNHHMTLFAYQRIASSIENQSLRREIAFCKIDPAYTSQMGKFLFMRRYGMSIHQAAAYTIGLVGMGLYDKLAPDLRILNLLKTKEGIVPEFSQETYKTIWARITKAFSGIQKHFFYRSIPYEVLEERKRPSLRTLAAEMKVRYMPKLTNYKSCELV

SEQ ID NO: 46230 - protein, 402 aa, Streptomyces sp.
VIRAYKFLLRPTARQEQALGGMLRDHCSLYNGALQERRDAYQHSSKRTIQYGQQSAQLKEIRAFDPERQGRWSFSSQQATLRRLDKAFQAFFRRVKAGQSPGYPRFKGVGHFDTIIFPKDGDGCRWDSTPHHAQTRVRLQGVGHVRVHQHRPVQGRVKTISVKREGKRWYAVLACDNVPAEELPSTGSNIGIDVGIAHFLTTSDGEHVANPRFLQAMADELAEAQRHLATFPKRTRQRTKRHRAAVRKIAKLHRRIRRQRADFHHKTARVLITDHDVIVHEQLNTVGMTKSPAPKADPEQPGSFLPNGAAAKTGLNRSILDAGWAQFLAILANKAESAGRLTVSVDPRNTSRTCPRCGHVAKGNRVTQARFQCTTCGFAANADHVGATNVLNRAGLVLCVAA

SEQ ID NO: 46231 - protein, 594 aa, Streptomyces sp.
MSVFWHEWVSTVGREGPVSEREREFACRMRDLRRVLVVDWSGRFVTAEWGCEVAGLRELAAPFVVCGPSGTTVRTRLKQLTDVDVEVLRQVGAHLGTLASRDLKARCRAGLGHDAGAWAVRKRELTPVSSARWAGAITKASHDQWALARRCAHAHIQSLEAGARTLRHRLSLPLGQKGSKHAPGGYRNRREWHAKARRLHVLEDRLQRARADWETGTVHVVRGGKRLARARHHLTDAGLTEARWRERWEAERWFVQADGESGKRFGNETIRIAPDGEVSVRLPAPLAHLANAAHGRYVLTGRVTFAHRGQEWADRVAAHRAVAYRIHYDTTRGRWYVTASWQKPVTRTVPTAAALAEGVIGVDMNADHLAAWHLDTHGNPVGDPRRFSYDLTGPATHRDAQVRHALTRLLHWATASGVKAIAVEDLDFTAEKTREKHGARRRFRQLVSGIPTGRLRARLTSMADQTGITIIAVDPAYTSRWGAQHWQKPLTISTRKTTRHDAASIAIGRRAQGYPVRRRTAPPRTHQSDGCGHRTAQAEPETPGREGPRPRIPGPRTRSVPPDTERTRATRTPNTVRDVRSKQEWVQDSLLLTE

SEQ ID NO: 46232 - protein, 585 aa, Streptomyces sp.
MVVMLEGSVSEWECEFVCRMRDLWRVVVVGWSGRFVTAEWGCGVAGLRELAAPFVVPGPSGVAVRTRLKQLTGMDVEVLRQVGAHLGALASRDLKARCRHGLGHDARAWAVRKRELTPVSSSRWAGAITKASHDQWALARRGAHAHIQSLEAGVRTLRHRLSLPVGEKGSKRTPGGCRSRREWHAKSRRLHVLEDRLRQARADWAAGRVRVVRGGKLLARARHHLAAAGLTEAGWRERWEAERWFVQADGESGKRFGNETIRVTPDGEVSLRLPAPLAHLANAGHGRYVLTGRVAFAHRGQEWADRVAANRAVAYRIHHDTVRGRWYVTASWQNPVTRTLPLNVALVEGVIGVDMNADHLAAWRLDLHGNPVGDPRRFPYDLTGPATHRDAQVRHALTRLLHWATASGVKAIAVEDLDFTAEKTREKHGRQKRFRQLISGMPTARLRARLTSMADATGITIIAVDPAYTSQWGAQHWQKPLTSSTRRTTRHDAASIAIGRRAQGYPIRRRTAPLRTHQSDGCGHRTAQAGPETPGREGPRPRIPGPRKRSVPPDTARTRETRTPNTVRDVRSDQEWVQDSLLLTE

SEQ ID NO: 46233 - protein, 351 aa, unknown
  TnpB Polypeptide
  misc_feature (237)..(313): Xaa can be any naturally occurring amino acid
MERLKAYKFRIYPTEEQEIFFAQSFGCVRKVYNLMLDERMKAYEEMKNDSTKKISYPTPAKYKKDYPFLREVDSLALANAQLNLDKAYKNFFRDKSVGFPRFKSKKNPVQSYTTNNQNGTIALIDHKFIKVPKLKSLIRIKLHRQPRGVIKSATISRHSSGKHYISLLCKEEIIELPKTNLAIGIDLGITDFAILSNGQKFDNNKFTSKMEKKLKREQRKLSRRALIAKKNGINLFXXXXXXXXXXXXXXXXXXXXXXXXXXXXXXXXXXXXXXXXXXXXXXXXXXXXXXXXXXXXXXXXXXXXXXXXXXXXXVVIKMARNLLIFENGLVLYALLITTEISTLALTSWARD

SEQ ID NO: 46234 - protein, 335 aa, Xylella sp.
MLMAHRIALDPNNVQATHLSRVAGVARFAYNWALAEWRHQYEACTLDSALPKPSQHSLRRQLNAIKREQFPWMGEVTKNAPQMAIIQLGQAFQNFFTGRAKYPKFRKKGAHDRFTLTNDQFDLNASRIRIPRLGWVRMRETLRFAGRIMSATVSRVAARWFVSITVDVPDPSHLPQAENQGAVGVDLGVLALATLSTGETICGPRPHRALLGRVRRLSRSVSRKVKDSANRHKAKATLAHLHARIAAIRLDALHKLTSDLTRRFHTIGIENLNVKGMVKNRHLARSIADMGFFEFRRQLEYKAAMRGGQVVVADRFFASSKMCSTCGHTLNELPP

SEQ ID NO: 46235 - protein, 455 aa, unknown
  TnpB Polypeptide
MLRSHAGAARYAWNWGLRECNKRYTVERKWYSAAELHQQWNVAKKTDPDLTWWNQNSKCVYQEAFRNLDRALRDYDKSRKGQRNGMQLGFPKRKKKGRCRDSFRFSTGAIRCSGTTVTLPRLGAIRTHESTRKLIRRLEDGTARILSATVSRTAQRWYVSFTVEVERDVPGHHARPGSAVGIDLGVKTLITGADDRGNVVAIEGPKPLRASLHKLRRVSRAHSRKAKGSANRRKAAARLARIHARAAAIRADALRKATSALAARYETIVCEDLNTSGMTRNRRLARAVSDQGFAVARRMLSYKTTWNGGTLVVADRWFPSSKTCSACGAVKTNLSLSERFYRCGNCGLVLDRDVNAARNLLHLAASGAERLNACGGYVRPGTAGRRPLNQEPGTRSCGGGTAARQRVAAGGPMLTNPATATYSPEPSQPKAKEFAADANELTTCRAGETGLGPIR

SEQ ID NO: 46236 - protein, 390 aa, unknown
  TnpB Polypeptide
VILAHRIALDPTFAQRAYFARAAGTARFTWNWALAEWDRRYAAGEKPNGQTLKVVFNAIKYDAYPWLKDIHRDAHAQPFANLHKAFSAFFKGTAQRPTFKKKGKCRDSFYVANDKLHLDGYRLRLPVLGWVRLREQLRFAGKIVGAVVRREAQRWFVSIQVDMGDYQRPRTGDGELGLDVGLAAFATLSTSEKIAAPKPLRRALGQLRRSCRKVSRRQCGSARRDRVKRVLARVHAKLTNIRRDFLHQLSTRLCRENQALGVESLAVTNLLRNTKLALSIADASWGEFLRQLHYKGPIFDCEVIEAERFYPSSKRCHRCGCVKERLALSERVFVCETCGLVCDRDINAAWNLVPQALREVTAVDSTVRPGQPTGSEDEAATIPCALARTK

SEQ ID NO: 46237 - protein, 399 aa, unknown
  TnpB Polypeptide
MLRSHKITLNPNNKQRTYFAKACGVSRFAYNWALARWKERYETGEKVSESALRKELNSIKREQFPWMLEVTKCAPQLAIMDLGEAFNNFFKKKTKFPRFKKKGIRDSFELSNDQFKTDGKRLWIPNLGWVRMRESVRFAGKAMKATVSRRADTWFVSITVETDDIPKTSENQAEAKPHVVGVDVGINALATLSDGRSIAGVKAHKHLLPRLRRQSQALSRKVVRSNNHRKAARRLARTHYRISCLREDCLHKLTTDLVQNYGVIAIEDLNVSGMVKNRRLARSLMDSSFGELRRQVEYKAALCGRTVVVAPQFFASSKLCSACAVKNDELRLGARTWQCASCATVHQRDLNAAYNLRDYAVQYVADEKEHSIVRIETAGSSPVEACGEPSVATLCEAGR

SEQ ID NO: 46238 - protein, 390 aa, Ferroplasma sp.
MTHPWISSGSKRTVWWNYVPSPNIMQYLGDMRDAIHEGTMKAEEIRRMNGKIPSPIDLRKAIKPWFDMKYDYARHHVNPVCRSSIAILRSFRKNRKGKRYPEVKKLAMRLDSELVKIVDNAMRITIRPGEYELIPLNTKNRKFYEYAKYRISEVLITDRIVSVTFIIPDVKPVGKEITGADLNFKTVDMTTVELANKEIANVETEKVGAIVKIQNDFSRRRQKIQKHIRNPQKRTKKLKETRGRQRRRIKDAMHKQSTTIVREHPDTSFVLEDMKGIRKSGEDKGKKFRTYLNRWPYSEFQKMIEYKSQKKTIYVNPRGTSSECPVCGEKVKHPAWKISRCDNCDRDYDRDRLASLAITHRGIDLCGDPFPVSALASWQSMKNEYLYIRD

SEQ ID NO: 46239 - protein, 374 aa, Crenarchaeota sp.
MVNESIRIGLANDVSSLKRLSLLSYNQLAHYDSPSYYKLCAISRAAGILASRRKSLRRGFPTREPYALRPQLVSCYGFKVNNGGLEIPVSRGRRLSLPLTKHTLAVVSEPGVQVRSFNLTRNRLCLSIAREALRIECASTVGVDRNLRNLTVGNDDQTRHYDLSKTVRIAKTTMRIVASFKRDDHRTRGIIASKYGERRTARTGHLLHTATKTIVALAVQRRQAIVLEDIQGIRCLYRKGNGQGRRHRGRMNGWSFSEAKRQLEYKARWVGLPIIRLSRRETRGSSVTCPRCGERLQSDKRLERKLWCGKCRIVMDRDRVAAVILARRGRVRFARSRPPIIEAQGGAAEAMKGNPTPTVIPGVDAPKLTQPTKS

SEQ ID NO: 46240 - protein, 442 aa, unknown
  TnpB Polypeptide
MQTVSSYGVELRKQNIPVRQTLEIYRSAVCYLTEIYEQVWEELAEIPDAKRRFNAAEHLVHTTKKNPARFDFDLRFPKMPSYLRRAAIQHALGSVSSYETRMDLWEKSGEKAGKPRLAYENHAMPVFYRDVMYREEKEGKDEAYLKLYDGHDWKWFCVRLNHTDMEYLRRNWWGKKASAPTLEKRHHKYFLRFSYTEEVTLTKTPVKEQIICSVDLGINTDAVCTIMRADGTVLGRKFINHPSEKDRMYRTLGRIRRFQREHSSAQSRGRWAYTKRLNIELGRKIAGAIVKNAEENHADVIVFEYLEMQGKISGKKKQKLHLWRKRDIQKRCEHQAHRKGMRVSRVCAWNTSSLAYDGSGSVSRDPKNHSLCVFQTGKRYNCDLSASYNIGARYFIRELLKPLPVTERSLLEAKVPSVKRRISCVYADLRELFSEMELLRAA

SEQ ID NO: 46241 - protein, 566 aa, unknown
  TnpB Polypeptide
MITLHTRIRNLTLAQDSALSTYAQRFNHVAHHLAVDMVKERRTGPSFKNTYLRRFDITSRQFNAVRLYVEGLATNRVENLKHQENILSDKIAATKNLLPKIGKQIEKAKKNGVSTSDLQHLENRLHQKKRKLRNLLERQSKTIDALHRPFASGICFGGRRLFHSQFHLEENGYADHAEWLTEWKSARASQFFVLGSKDETTGCQGCVARVQEDGSFLLDVRLPGDGEKCVTIGPLRFPYGDEKLRAALSLHAGLSKTKLPRITKLSKAGKPYSRIVYPDDLSALSWRFQRDGKGWRVLVSFKEPQVTVTTDTKAGVLAIDLNADHLAWAELDRFGNPVETGSIPCVTYGKTTEQASAIIEAAAITLTKRAKQAGKPLVLEKLDFSKKKGQLTEVDGPRYARMLSSLSYQKILGAVQARAGKENVALLQVNPAFTSVIGRINYAHRYGLTVHQGAAVAIGRRAFGRFVKNARTGKNHKQFGLRETPIGQAGRDGVKTVTAPDGRGAQVTFPYPEWNKRKHVWTLLGKVSRKMKAALAAQCVAEKSDPPERTVESVRMKPEVPVVAAA

SEQ ID NO: 46242 - protein, 367 aa, unknown
  TnpB Polypeptide
MLKAYKYRLYPNKEQEIYFAKTFGCVRFIYNKMLSDKIDYYNETKQKLNNTPAQYKKEFEWLKEVDSLALANAQMNLQTAYNNFFKRPEVGFPKFKSKKNHHHSYTTNNQGGNIYVSDRYIKLPKIGLVRVKKHRDFWGLIKSVTISKTPSNKYFVSVLVDCEEQTKLPETDNKVGIDLGIKEFAITSDGEMISNPKYLTKSGKRLRKLQKDLSRCKKGSKNREKARIKVAKKHEKITNQRKDFLHKVSKQIIDDNQIIVLENLKVKNMMGNHKLAKAIADASWSEFDRQLEYKANWYGREVIKIDTWYPSSQICSHCGCNTGKKTLDIREWTCPECGTHHDRDINAAINILNEGLRIRTVGTTEIA

SEQ ID NO: 46243 - protein, 372 aa, unknown
  TnpB Polypeptide
VEKSYKFRIYPNNIQIQQIEQTFGNCRFIYNYYLDKRVKAYQENKETLNYCACANDLTNLKKGKDKEWLNLSASCALQQTLKDLDKAYKNFFRRIKQGQQTGFPKFKSKKSSRHSYRCTNTNSSIKVLDTKYLKFPKLGKVRCKFSRVVEGRILNATISKNPSGKYFVSICCTDVDIQPKELTGSAVGIDLGIKDFAIDSNGNKYSNPKYLAKSEKKLAQLQRKLSRKTIGSSNRNKARIKVARCYNHITNQRTDYLQKLSTKLIGENDIICLETLKVKNMVKNRKLAKAISDCSWSEFVRMLEYKVNWYGKQLVKIDTFYPSSRMCSCCGYKLENLTLDIREWDCPNCNTHLDRDVNAAINILNEGLRILE

SEQ ID NO: 46244 - protein, 348 aa, unknown
  TnpB Polypeptide
MIQRQLKLRLTKKQEALLYEQLPILTSVWNWAIHKIELDAKGGIFYTPKDFQNLLSGTSKTLGIPSHSIQGMLALAHQSWQRCFKKLAKKPKLKGNRNRLNSIPFPDPIGRPAGKKIKVPGLGMIRYHKQDLPEGKIKCGRIVKRASGWHLCLFIDAEPTAIPRTSDNIIGIDPGYKHLITTSDGEKVEHPKELQCSIKRVGQAQRGGNKRLAARINERIANQRKDRNHKLSRRLVSENSIIAFSKDDIRGLSRAGFGKSVSAAAHGQLRSMLDYKSRIGGGRYIEVPSRNSTRICSACGSSTGPRGHAGLSVRQWECSACGTPHDRDINAAINTLIAAVGTTVERAA

SEQ ID NO: 46245 - protein, 386 aa, Rahnella sp.
MKRATKVRIYPDGEQAVFLNAQFGAVRFAYNKALHISRHMYQRHGVSVSIKRDLKPLLAVGKKSRRYSWLKEYDSLALQQAVINLNTAFGNFFKKRAHFPTFKSKHGKQSSYHPNGKVLTDAIQLPKMKPVRANIHREIIGKVSSITISRNATGKYFASILCDDGQEAPEKPSLITCVTGYDMGLSHYLIPSSGDKVNNPRHLINASRNLRRKQKALSRKKQGSANRSKARLLLAAVHERVANARADFQHKLSRAIVDENQAVIVETLKSANMMKNHCLARAIGDAAWQGFIMKVEYKAAAEGVHLVKLNQWFASSKTCHCCGHKMVDMPLHKRIWQCPTCNIEHDRDINAAMNIQNKGITELMAAGLVVTAHRGQCKSVIKAVAA

SEQ ID NO: 46246 - protein, 372 aa, unknown
  TnpB Polypeptide
VYFTLERTYKFRIYPNREQKILLAKTFGCVRFIYNHYLDLRQKKWKEEQITFNFYDCSKDLTVLKQEKEWLKEVDKWSLQNSLKDLEFAYKMFWKKNNGYPKFRSKHSNYFSYRTTFTKNNIEFLGNNIKLPKLKKVKIKDKTLKPQGRILNAIITQAPSGKYYVSIVCTDVEIQPLKKTNKNVGIDLGIKELATLSDNTKYENRHYLKNSLKRLELLHKRLTRKPKGSQNRNKARIKLVKLYEKITNQRQAYLQKVTTEIVRKYDIICIEDLKISNMLKNHKLAQAISDCGWYIFTEMLKYKCNWYGKQIIKVPTFYASSQLCSNCGYKNKDMKNLKVRIWTCPNCNEIHDRDVNASKNILQKGLEILNNN

SEQ ID NO: 46247 - protein, 408 aa, unknown
  TnpB Polypeptide
MILVERHIIKPKHKYYDEIYNLCRLSKNLYNSTLYDVRKYYFENKKFLKYQVINKMYVKDNNPDYRALPAKVAQHTQMLVERNFKSFFELLKLKTLGQYNKPVKIPKYLNKKTGRQVVHYDKGAISFKKQGYVKLSKTNIKIKTKLTKNKVQFVRLVPSNNRMIIEIGYNVQEKEPMQNGHSLAIDIGINNIAACVTTKGDKFLINGKPLKYINYNYNKKIADIQSKLKLTHNTYKSKYTTNITNNRNNRITDYLHKITTYIVNHAVSNNIATIIVGYNKDWKQDTNMGKVNTQNFVNIPFYKFISMLEYKCNLNGISFKTITEEYTSKCSFVDNEKIARHINYAGKRITRELFKTKKGIIINADINGAYNILKKYMTTNATWNEKISQTLVKVCSIPSVRKINIALA

SEQ ID NO: 46248 - protein, 405 aa, unknown
  TnpB Polypeptide
MIIRKAYKFRLNTNLETEQLMSQYAGNCRFLWNKVLDLNLHYLNNKQAILWYQELDWFTKLWKKSDKYEFLKLSPAQTLQQTLKQLERAFKDAFDKKQPLKKIPTFKKRGDRDSFSFPQGFKLDGRRIFLPKIGWVNFRKSREIEGTAKNTTVSRQGKHWFVSIQVEIELEEPVHSSVSMIGVDMGVKRLFTLSNGDFEEPVNVNFFKDKIKRLQKHLARMVRFSNNWRKIKGKINRLHIKIANIRHDILHKLSTALSKSHAMIVLENLQIKNMTKSSKGDMDNHGSMVKQKSGLNRVILEQGWGIFKTFLEYKQLWSGGQLLFVDPKYTSQTCPACNHRSKDNRQIQAEFECVLCGHKEHADVVGARNVLERGHRLLACGETDISLLCEAGTRQIRNDLEPALV

SEQ ID NO: 46249 - protein, 375 aa, Acidobacteria sp.
MKLIVNLKLKPLESQHADLLRTLERAGEACNWISEQAFENKVFKQFAIHKIVYLSAKDKFSLSSQMVIRAISKVADSYQIQKAKQTFFKKHGSIAYDSRILTFKSSNKVSLWTLNGRQTIPFVCGEYQRKLLPFLKGEVDLIYRKGQFFLNAVCDVPEEHPMIPDNVIGVDFGIVQLATDSTGESFTGAFVERVRQKFSNQRQLLQHKASKQTQSGKRPRHIHKLIKRLSGREKNFRKHQNHVISKKLVEKAKALNSGIALENLEGIRKRIEKRLRVSQRAKISGWSFFQLREFVTYKSKLNGVPIILVNPKYTSQECSECGHTEKANRKSQSEFECKNCHVSINADINASRNIRSRAFVNTLQSSENIVLKNAV

SEQ ID NO: 46250 - protein, 406 aa, Brasilonema sp.
VLKAIKVRLYPTTKQEIALAKSFGCARWYWNYALNACIQHYQETGKSLKLSVYKAYLPQLKVEHPWLKEDCYSAVLQCVAINLNKAYANFFEGRAKPPRFKSKHHKQSIQYPQNVKVAGDCLDVPKIGVIKAVFHRPIEGKVKTVTISKTPTDKYFASILLEVEGGVGQPSGDKTLGIDLGLKDFAIVNDGEQTTKHSNPKHLKRHEKNLARKQKKFARKVKGSNSRNKYKKLVAKVHERVSNSRQDFLHKLSRKLVDESQVIIVENLNVKGMVRNLRLSKSISDVGWGMFVNFLDYKLKRKEGRLVEIGRFFPSSKTCSSCGHVLDELTLDIREWACPSCGTHHDRDGNAALNIRKEGIRMLQTNDGGNPVIADGGCVRPPTRKGKGQRSMKSEAHTVPVRVGVG

SEQ ID NO: 46251 - protein, 654 aa, unknown
  TnpB Polypeptide
LLGPDDRLAIQADGKAVLTRKSGRSEFALDGDTMSGLRALFEQAEFTRLRKEYLPPRPSADLFEYVVTYKGHTVRTMDGAIPHLSSRSWMRLTKSSNAKEARKASQKSNITSASSIHWESKTLEHAAPRSQPAGPSDALPARPSMASPRRREPAGFRLTGLTTAGDFMIIHFSHEALGLGSSAGDQRYHRLAVVSGGEAPRPVEPGEAGAGGDGMRVIQAFRFELDPNREARIALAKHVGTARFAYNWGLARCLEAKERGERIPSAADLHKDWNEWKRKNAPWWVEVSKCAPQEAFRDLERAVRNGREGRAGFPRFKRKKALADNKARLTGQIRVTPRHVQLPRIGKVRAKERTDQLLELLQSGKARILSATISREADRWFVILTCEVERPDPEPREVQGPEDVVGIDVGLESFAVLSDGTRIEAPKPLEKALRLLKRRSKQLSRKQKKTVVEQNPETGEERKRTVFSRNYEKAVLSLARLHRRIRNIRQDFLHKVATERAKAKPVLVVEDLNVRGLARSGSLSRAILDAGWGAFRRMLEYKCAWYGAVLLIAPRDFPSTRMCSRCGWVGPALPLSQRVFRCGACGLEMDRDLNAALNLRNYGLAALKGPTGSSPGSDACGDPSGGGTGKARSTSHGSMKQEAARHGFHPRRVK

SEQ ID NO: 46252 - protein, 421 aa, unknown
  TnpB Polypeptide
MQLVEQHVIKRDDPRFAAIDAASFASKNLYNAALYEIRQSFFANGTRLRYAQMDKRMQSQEAYKALPAKVSQQVLKQLDDAWAAFFEACKAYKETPAKFTGRPRLPKYKDKVKGRNFLVYTKQAVSRRGLNRGLIQPSMLPIEVQTKQKDISQVRIVPRKGFYVVEVVYEKEVKQAAVNPAYYAGIDMGVNTLVALTSNKPKFQSVIINGRPVKSINQWYNKRKADLQKCLGRTGTTKRMERLTNKRNRRIDQYMHTASKRIVALLVKEGIGTLVIGKNDGWKQEATMGKRNNQNFCSIPHARLIAMLTYKAELVGIHVVVTEESYTSKASLLDLDPLPVRTKSGEQHTLSGKRIKRGLYRASDGRVLNADINGAGNTIRKVAPDAFGSKGVEDGKGVLASLVVHPVRFVIAPSRTQQGKS

SEQ ID NO: 46253 - protein, 576 aa, Halobacteriales sp.
MTQLTEQFHIPSEHHNACDRLTTLVEIHTRRLLAEEYWRDNHLDAISDHAGQSYTYIRDNDREDFAGVDEYLYSRFKRCVYHRVTHVLDAHTDEYHAFQFVTDTVSERKIRRVGWQRIRTRLFDDDNSPYIEWRVLESVVDQLNSYYDTHGRFPESYTELVECPEPNGTLPFAPDKGDYHIHGLSVDGGELVVTLNAPDSLSPDSHHDWTDHELRFPTHSRFQEMVNSGDLKAPTLHASEHGYTLDVPVALPAQETDTVTDRVLAVDLGVTTQATVVPVEHGADTHQQVAPPAFLDHPATDNLFRLKTDSEGVNDRLAELRRQGKAHTDRFDHLLAEYRQTRRKERRLRQQIQHSIATELVWLAADSGCDTIVFESLGQIDATEPDGAVAWSISSWARGELLDIVEYKAELLGIEFETVNPWGTSRHCPRCGERGQTVKAPDDHTEQRHGGHFHCPACGYECDRDVVGAVNVGRKYLSDSKMEEANPAAYTEAGNHASFPSPSGARSTGVQSATDKQDQASGRQTQLSQCRISSLTAKRDERDMGGLHHHHGRNRGQRRPSGSITRYVLASTTECD

SEQ ID NO: 46254 - protein, 363 aa, Clostridiales sp.
VNKSFKVRIYPNQEQQELIDKTFNYVRYTYNFMLNLKQKLYEYFGLNLNYNNMSKILTELKKHKLWLREIDSVSLQQILKDLDDAFQKFFDGAGYPKFKSRKRDKNSYRTNMNIHLDQDMRRIKIPKIGWIKFRDKSNFNNLTKIYNITISKTSSNKYFASISAEVNIKVFEKANQNCGIDLGLKDFCILNDETKFNNPRFFVSSQKKLAKMQRKLHKKVFDSNNYLKYKIKVARLQEKIKNQRLDFLHKISIFLVKNYDIICAETLKVKNMMKNHKLAKDIGDVSWYEFCRQLEYKCLWYGKKFVQINTYFASSQICSDCGFKNSEVKNLEIREWTCPNCGSHHDRDINAATNILNEGLKLI

SEQ ID NO: 46255 - protein, 362 aa, Clostridiales sp.
VNKSFKVRIYPNQKQQALINKTFGHTRYLYNFMLNLKQKLYKFSKLSLRYYDASKILTELKKHKSWLCEVDKCSLQECLKDLDYAYKKYFDGAGFPKFKSKRGKNSYRTNSCLHLDQDNKKIKIPKVSWIKFRDKTNFSGLTKINNITISKTPSGKYFASISTEVDIKAFAKTKKSCGIDLGLKNFCILNDRTKFENPRFLVQSERRLRLLQKSLSRKVYDSKNYEKARIKLAKFYEYIANCRKDYLHKISLFLVRNYDIICAETLQVKNMLKNRKLAKAISDVSWYEFCQQLRYKCLWYNKQFIQIDIYFASSQICSNCGYKNSDIKNLDVREYDCPECGQHHDRDINAATNILNQGLTLI

SEQ ID NO: 46256 - protein, 476 aa, unknown
  TnpB Polypeptide
MPRQRATDAPKVVHRTARVALRTTPAQRRRCFGLLRSGGDVWATVLEFNEIRRQRGEYPVVNYQALCRELTAAGPGCFGELSTTGARSILRRYADAWVTTAKRRRQGDSSAHYPRRKKGLVPSRYYAGRFSLCGRHLTLPVARGAPALVLRLTRSVPYEASGIRSVTLVAEGSRLYVDVSAEVPLDSYPKGQEPDPARIAGVDLGIIHPYALAGPDGALVVSGRALRAESRLHLAESKARRRAVARRAPSRGQRGSRRWRHYRARTKVLEARHRRRLSQARHEAARAVIEHAQAQRIGTLVLGDPRGLLGRDAGRRQNLATRNWVPGQLISALKDKAEVANIAVVLVDERGTSSTCPRCATRVPKPKGRCFSCPTCLLRAHRDVVGAANIAARSPRGGTVIDPTGLVTTHRRAGRHLPGRTRRDPRRVALGNRVRDGRPWPAVARQSDVDPGAAQESLALDAKASRARNRPSLPKG

SEQ ID NO: 46257 - protein, 476 aa, unknown; identical to SEQ ID NO: 46256
  TnpB Polypeptide

SEQ ID NO: 46258 - protein, 384 aa, Chloroflexi sp.
MMKLTAKIKLQPTPEQHDALLKTLETANDACNYASQQAWDTKTFTQFPLHRIVYRKLREQFGLSAQVTIRAIAKVSDAYKLDRRAQRKFKPHGAFPYDNRILSIKTSEQAISIWTLAGRQPMPYLCGERQRQWLVGDRGEADLCYIEGAFYLFVTCKVETPEPADVEEFLGVDTGVKNVATDSDGNNYSSAHLNSLRHRHASLRSKLQKKGTKSAKRLLKKRGRKEKRFAQDVNHCVSKQIVQRAKDTGRGIAIENLKGIRNRVTARKAHRRQLHSWAFSDLHTKIMYKAALIGVKIVVVDPRNTSLTCPICGYTDKRNRPDQSGFSCIQCGCSGHADYIAACNIAGRAVVNQPNVSDVGISPPPLGGLPTAPGTSYRLLVGSS

SEQ ID NO: 46259 - protein, 330 aa, unknown
  TnpB Polypeptide
MNLQRLEKAWKRWLFPDKTGKRGGRPKFKKRGEKPSFSFSRVNHPKAVCFLEGNILRIPKIGNIPVIVHRPIPDGFVLKTATITFRADGFYVSIGASDETVPEPLPLDTIKSAVGIDLGLKCFLASSDGQFVPVPQIYRQAQTHLARQQRTLARRQSGSSNQKKQKSQIAKIHQRIARLREKFHYQIAHQLCRNYDLIAVEDLNIRGLARTHLAKSIYDVAWGKFLTILESVAVKCGVHFVKVNPHNTTQDCSRCGTKVPKTLSVRLHECTKCGLSMDRDENAAVNILYKALVAVGLTASACGALVDRQAWKQEISGVTPGSSRHTTLSG

SEQ ID NO: 46260 - protein, 432 aa, unknown
  TnpB Polypeptide
MSVTIQRASKGQIVNLSDDAAGAIEFHLRDQRRVWNLALRLNEMFYRNNRQFVFYHELAACLTIARTVRQFNAGGVAAQQQCLRAFDRALRESLPSASSRKGFPKPRKRTSDCSIRVPAVSVKTVRQDGEITHVGFPKIGLLRVHNLRVPPGAKINSFSLTTLAGKYYVSVQYAVEIEVPKPSNDRIIGIDSGLSVYATLSNGEQVQALRPFRSSVKRLRRAQRALSRKRRGSINYRRQRQKVARVHARIADVRRNAQHQLSRHLVDEHGTVAIETLSLAGLKRLKHQGKAWSDIGVGELYRQVRYKAETAGVTVYEHPRFARSTGCCPDCGYVGEKLPLYIRSWSCPACGREHDRDIAAARWLALCARQASQVGAACPEPSGAPPQTKRGKRGSNRAVAVMRSDPSGPPAHDGSPANRPSMRVAQPHASKG

SEQ ID NO: 46261 - protein, 390 aa, unknown
  TnpB Polypeptide
MIRTLKIKLDKSNDLIQTARIFNLACQDVLDYGFEHKDYNKTRLNRGTYHEVRTKYPTLPSALVQTARDQASDILKRNKFKHRPKKKELSSIRYDKRTMKVFLESGYCKLTTIFGRMTYNFKLPGYYGQYTDWEVKNAQMIPNRDCCYLHVQIEKKTPETRGDDRRLGIDLGINNIAVCSDNTFYNSKHLKNVKGRYQHIKAELQSKGTRSAKRKLKKISGRERRFVKDVNHCLAKELAKKPYGVFAMEDLSGVLNQKSKGRMFNRKLGNWSFRQLQQFVEYKAEVLGKGTIYVNPKYTSQTCSKCGHKAKSNRAGSQFKCQQCGFTLHADLNASRNIATFSRSVGGRLCVNQPNVASVEVEGSNATETEGSYKSSDERGRHHATRFSGW

SEQ ID NO: 46262 - protein, 185 aa, unknown
  TnpB Polypeptide
VGLHVFAADSNGNTYENPHCLIYNEKRLAREQRKLFRMHKDSSNYKKQRLKVAAIHEHIANQRRDYIHKLSRKFVNENQVIAVEDLNIKGMVKNHKKAKAITDVSWGGFFRMLEYKSQWAGRTFVQIDRFFPSSQTCSFCGYKNVAVKDEKVRAWTCPKCGAHHDRDINAAINILRKAKETCATV

SEQ ID NO: 46263 - protein, 454 aa, unknown
  TnpB Polypeptide
MTNRNVIQARYRVLADAGGGEGERAVVVVQAYRFALDPAPGQERALRSHAGAARFGWNWGLAACLERYRAERRWYSGAELHKLWNARKKADPAMAWWEQNSKCAYQEAFRDLDRALREFTRSKRGERQGRRLGFPRFKKKGRCRDSFRLTGTLGCGRGTVTLPRLGTIRTHESTRKLARRLEDGTARILSATVSRRAQRWFVSFTVEVDRTVPETHARPGTAIGIDLGIKSLLTGADDTGTVITVPGPRPLAAGLRRLRRAARAHTRKKPGSAGRRKAAAGLARLHARVANIRADALHKATSMLAGRYKSIVAEDLNVAGMTRNRRLARALSDQGFGTARRMLGYKTAWYGGTLVLADRWYPSSKTCSGCGTVKAKLALSERIYRCGECGLVMDRDVNAARNLLSLAASGAERRNAGGGTVRPCPARHDPSNPEPGTPHGDQTGTAARQQAAAA

SEQ ID NO: 46264 - protein, 277 aa, Scytonema sp.
GVPQFKKKGQHDSFTLEGTVKTLGSRSIQVPKIGVLKTYECLPTHCPRKKKKSPHKVPPNSFQPKSVTISREADKWFISFRFEASKPDLKLEDTWFFSEHSVVGVDLGVSNLATLSTGEIVEGAKSYKRFKDKLARLQWLNRQKVIGSANWKKAQLQIARLHRKIANIRKDTLHKLTILLAKNHSVIVIEDLNVKGMMANHKLAASIQDMGFFEFRRQLTYKCDLFGSKLVIVDRWFPSSKTCSNCGTVKKELSLKERTFNCECGLSINRDLNAAIN

SEQ ID NO: 46265 - protein, 597 aa, unknown
  TnpB Polypeptide
LDGRIFCLQCRKCIRRDVEKIYRKSRVGRWRQWVLKAYKYRIYPNSEQRIQIAKTFGCCRFVYNQTLAYRKEIYEKEKKSVSKTDCNNYCNRELKKDYEWLKEIDKFALTNAIYNMDVAYQKFFKEHAGYPKFKSKHDNYKSYTTNFTNGNIAVDFETGKIKLPKLKAVKARLHREYSGQIKSATVSQVSSGKYYVSILVETEHKELAHTNHNIGIDLGIKDLCITSDGKAYENLKIIKKYEKQLVKLQRQLSHKGKRSKNYYKTKKKIALCHEKIRNIRKDYLHKVSHEIISENQVIVSENLQIKNMVKNHHLAKAISDVSWYELTRQLEYKAKWNGRKYIKIDTFYASSQLCSVCGYQNPDTKDLSVRTWICPKCGAEHDKTTRLMLKLKFDGVIDMKIREVNENKKQFIALLLLADEQENMIDHYLEKGTMYVLEDGNVKAECVVTDEDNGILEIKNIAVDPKNQGQSYGKALIDFLVGKYADEYSILQVGTGDSPLTVPFYEKCGFVRSHNIPNFFTDNYDHPIYECGVQLIDMVYLQRCSEENKLMNILVLNGSPHVNANTMAMVNAFADGAREKNHDIQTVQVMKITINSF

SEQ ID NO: 46266 - protein, 239 aa, unknown
  TnpB Polypeptide
MVKRREFQRAYRFRFYPTPEQENLLRRTLGCARLVYNKALEARSEAWTSERRNVSYSDTSSMLTGWKKTDELSFLNDVSCVPLQQALRHLQRAFSGFFKQENAYPTFKKKTHGGSAEFTRSAFDWNGRELRLAKTKEPLPIVWSRTLPKGAEPSTVTVSLDPAQRWHVSILVEEESETSTRLPNARSASIWAPNTSPSSAPGRKSPTHATSTITRRSLNKPNKLSPESRKEATTIAKPV

SEQ ID NO: 46267 - protein, 468 aa, unknown
  TnpB Polypeptide
MYYQQDENKMYQAQTIVVNKLKEQKLFHYCEEQCHAAKLLRNATVFRGRQLLFAYNNDYKNLKNHQIEVIDEFNTYTSDKYGKISKDHYLPYSQEFEYLYKQSNNPDYFNPILTAQTRTRVVKQAMEDFSSFFKNAKKYYSDSKNYTGKPNYPKYTKVETITVDYSNQDCTIYEIDGITYLKLPHMQKNKNAKLKPKKCGYINLGKLKIRKLMNLKISPYYDTYKISLVYEIEKFTTSLDNTRILGLDPGLNNFLTSSNNCGLHPFIINGRDMKSYNQHYNEKLAYLRSRLPKKQYTSKQIQRLSKKRDCYFNNKFHKIINYIIQYCIKNNIGTIVIGHNKLQKQKYHKGKIQNQHFCFISHTKFLMMFKLKCTVCNINIIETEESYTSQASFLDMDKIPTYKKGNNKNYQFSGKRTYRGLYKSKDEILINADVNGASNIIKKVFPHAFDKITDFTYLTETVNKITVK

SEQ ID NO: 46268 - protein, 301 aa, Cupriavidus sp.
MMRKYFRHGVSRCDNQFIVRSDKHQSRVRDGHLVISIHIARQYGPSIELTTNSNGKNVDLTGCNLRVIVKGEAVEIHYATSKAEGRPCGTGEIGVDKGYTEAFADSDGERHGQTFGAVLSAYSDQVSKTGKARNRLHALEKAHRKAGRIAKAERIRKCNLGRVKLQARRDRAKQRLRTIAYQSAHTIVDKAAAVGSEDLTSPIKGRCQWRNYNRRMSAWAKGVLAQALDEFARSVGRRTSSSTPPTRRKWTRSRACCKASARATNFTVPTGTFFRRIPMQRGTCGTGFTTGKLPGICLTSK

SEQ ID NO: 46269 - protein, 426 aa, Streptomyces sp.
VSQDTLASQQFGHRARLALSPAGVRAADDQAHAARTMWNLLHAWWRMMPQEMRTLANADAAIRQAREDIDFLAVLPAQAAQGVLKAYFRAWKNCWEGRADAPNFKGRLRTVMSVDIPQGRDLNIVRVHRRWGQVNIPKAGRVRFRWTKGLPVGKRANTENRITGARLVRDALGWHVAFRVQTLEVKPKPHQEPDVGIDVGVIVPIALSDGETYEHGECVTGKEKARLLHLEQRAARRKQHRKSGERTSRRLHRTYDQIAGLRAKAKRRALDWQHQTTTAIARTYGTVVVEALTITNMVKSARGTIEEPGKNVARKSGLNRSISGEAWGRTVTMLTYKTAQHGGTLHKVPAPGTSQRCSACGFTTPGSRESQAVFVCKNPGCGWSGNADHNAARNVLHLYRMGLALIPAAGRAVVRRAKRVKPAAAR

SEQ ID NO: 46270 - protein, 386 aa, unknown
  TnpB Polypeptide
MKIVKAYKFRLYPNKTQKVLLAKTFGCVRFSWNSWVEAFNKREQEKNVKELRQQYNWMKEVSSGALNQKQNDFNETRRQFFSKKRKKKLGRPKFKKKGYKECFRLPHSKFNLDTEIHKIRLEKIGWVKIINHQEILNDVKFLSVTVSKNSCNDYYASICIEQEVQELPKTGNVVGIDVGLKEFITTSDGLQIKNPKYFRKSQSNLARAQRHLSRKVKGSKRYHRQRLKVARINRKIVRQREWFLHNVSKWLVINYDVICLENLNVKGMVRNHKLAKSINDAAFSELNGMIKYKTKWFGKINLKVDRFYPSSKICNKCGQKKENLTLSDRIFVCNNCGNIEHRDFNASKNIRDEAMGVNVAQRAWRECQTKVDLSTLAVPYEMLNAS

SEQ ID NO: 46271 - protein, 419 aa, Cylindrospermum sp.
MRLTYQYRLRPTSEQIATFETWGELLRRHYNYALGQRLDWLRRTRSQIDRCSLVCEPIGEIPSKADYYTQASDLKQTKDIFPDYKNIYTDCQQQNLMRLDKAWKRWLMPDKNGKRGGRPRFKKRGDILSFTFPRVNNAKAGAHLIGNVLKLSKIGEIEVILHRPIPDGFEIKQATILRKADGWYCSLSIEDKTVPTLLPVDEIKTATGIDVGLEKFLTTGDGQSIAVPQYYRKAQAILARQQRKLAHKSKGSKNYQKQANKVARTHLHVARQRKEFHYHVSHWLINCYDLIIFENLNIRGLAKTRLAKSILDVAWGAFLEIMQAVAVKRGKLTLGVDPRGTSINCSSCGERVEKALSVRVHSCSCGLVIDRDWNASLNILKRGSVGLPIPVCGGLDSSQPMKQKVSFVNLRCSRYIACN

SEQ ID NO: 46272 - protein, 382 aa, Lactobacillus sp.
MLRAQKVRLYPNRHMVKVLDSLCDYRRYCWNQGLATWNDMYDLHTIEHSSLRPSAYSVRNELVAAKADWQYGLSARTLQLAIADLGKSWQNFFDKSLPDWGKPRFKSKRAPRQGFKTDRAKIINGKLRLDRPRDVKVWYDIRINRHVDLTGVLKVVSIYRENGQYWASLPFEVAVEAKPKTGKSSAVDVNVGHLNYTAGVVNTLPTRLQRLYQRIKFYQKRLARKRVVNGKQATKSNNYQATRAKLQRDYRKVTNIQHDIMQKFTTQLVTDYDRIVIEDLSVKKMQMTHVASKGLQRSMFGYFRQTLSYKCEWYGKVLILADKHYPSTQRCSKCGYIKSGNDKITLQGNIAHKTKHHEYVCYHCGATLERNENAVTNLLALI

SEQ ID NO: 46273 - protein, 407 aa, Streptomyces sp.
MQLRYNFRAYPTPGQVNSLARAFGCARVVFNDGLRARQEAHTAGLAYIKDTDLQKQVITAAKRTEERAWLGEVSSVVLVQSLRDLHTAYRNFFSSVTGKRKGTKIAPPRFKSKRDGKQSIRLTANGFSLRDNGTLYVARIGDLAIRWSRQLPAVPTSVTVTKDAADRYWVSFVVDTEPDVLPETTVEVGMDLGLTHFAVMSDGRKVDSPKFLRRAEKKLKRMQKDLSRCAKGSNNRDKARKKVARQHARVADRRRDWHHKLSTEIIRETQAVYVEDLAVKGLARTNLAKSVHDAGWSAFVTMLEYKAIKHGRHFGRIGRFEPTSQVCSACGIKDGPKPLSVRMWTCGDCGTVHDRDINAARNILAAGRADRLNASQSAGKTGSVPAQRVEAGTHRDGQPTVVGIQVL

SEQ ID NO: 46274 - protein, 406 aa, Hydrococcus sp.
VIIYESKLEGTQNQYERLDEAIRTGRFVRNSIIRSWMDGQIKNRNDAYAYCKVLSDNPEFPWANQLNSMARQAHAERAWASIERFYRNCKAKIPGKKGFPKFKKYQVRDSIEYKTSGWKLSEDRRYLIFTDGFSAGSFKLWGSRDLHFYLLNQIKRVRVVRRHDGYSAQFLIDHQREENKELTGRQIGLDLGLNHFYTDNFGEKVDNPRFLRKDERKIKRLQRRLSKTEKRSKNRTKARNKLGRAHLKGSRRRNDWVCKLAQRVIQSNDLVAIENLRVRNMVKNHCLAKSISDAAWYRFREWLEYFGVVYGVPVIAVNPRYTSQNCSNCGQKVVKTLSTRTHRCPHCGYIADRDENAAINILKEALKQWANTMGRIEFQVSGEIPLCLSLETKASKGTQRKRKPKK

SEQ ID NO: 46275 - protein, 429 aa, unknown
  TnpB Polypeptide
MRDFKFHIGVNVRAYFSDKQKQIVRFNGGAANFVYNRLVAVNREKHQLKKTAHLSPTDKNRLAYLDFTYKDTKHLRNAVPFLNNPKIDGYAIANAKQDYQHAWNQFRKVKGTSIPTFHKKDNTYSYGTNCHYDKKALSNPNTIGLFEGSVRFLDKTHIVLPILGTVRIKGSDKLLSNLLSRSDVTRIGTVRITLDNCDNAYLSISLSSDRQFHEYYEKTHKAVGIDMNLTNFLYDSDGLEVPTPKYLRKAEANLKKEQRKLSRKLEAAKKDKRDYSRCKNYKEQRLKLARLHKHVANQRLDFIRNVVNEEVKNHDYLFAEDLKTCNLIKNPKLTKAISDSGWRMFLIELQNCASKRGKTCLLVNPKNTTQTCSNCGYVCHGNTHITLGKEEWVCPNCGAYHIRDYNAGKNILATGLALLKESIVTLSIT

SEQ ID NO: 46276 - protein, 420 aa, unknown
  TnpB Polypeptide
LVTKTKCACSENTTCLPVLIDIVLLIGHEYTVTMQINKAYRYRLKPTPSQVSQLESYTGHCRFLWNKCWRMNIDRLKNKQRIMYYQEMDFFSKLWKKSVEYNFLKECPAHCLQQKLKDLERAFLDCFDKRQPGKRLPTKRKKNIHDSIRFPEPKHIELEHSRIKLPKLGWIKFYNSLKLHGIIRNVTISRQGNHWYISICVAQELMIPKELPTLAIGIDCGIANFVATSKGALIAPINSYRHWMGRLAVLQRRLAKKVKFSNNWKKFLVKIRKLHCKIANIRRDFLHKITTGLSKSHAMVVVEALRIKNMSKSAKGTLDKPGQNVKAKSGLNKSILDQGWGEFKRQLKYKLEWAGGVLVEVNPQYTSQKCSQCGHTHANNRTTQQSFCCMACNYNEHADINAAKNILAAGHVAMACGASA

SEQ ID NO: 46277 - protein, 429 aa, unknown
  TnpB Polypeptide
VRQVERHWIKEGHTMYPICDDLTFKAKNLYNAGLYQIRQSIFERNKHQEEKLSVPSWMTLVSKFRKEKQSDMLALPSKVSACILKTLGSSVNSYYQLLKRYHDKSNVSVTRKPRLPGYLHKTDGRYVVEFTNQTISRKRGSNGELILCPKDLNLSIPTKVKTPKCVRIVPKVRAFVIEVIHEVEVPPLKHTGNYAAIDLGVDNLATITFSNGVNPLVVKGTRLKSINQGYNRLISKAQSKLPANQKTSQHIHRLWRNRELKLQSEIHKITSFLSHYFDEMAIETVFVGKNNGWKQEVSLGKKTNQSFTQIPFNTFISQLTYKCLLRGITVVGQEESYTSKASFLDNDEIPDYGNVQVKSQFSGRRISRGLYKSKDGRALNADVNGSYNILVKGLLSLGKTLNRENVPFHTRSLKDWQSVSNETLLLQYM

SEQ ID NO: 46278 - protein, 411 aa, unknown
  TnpB Polypeptide
MKRCRVRLKLSQEQEQLAFQHATTARKYWNLLVEIDNANNRGAYDAFCKSQNWRTYESKTHNRDVFHLGIQEYVTLASYVASSGSASSPEEWVWFYRPNQSRIYNALAKEAVRVRNQNKGKLRFRSIRRTVPTFAVACHKSSNGKRPSRIYEKPNGRAQIPSIGDVKIGTVPKTVDISCAKKSAKIIHDGKYWYLSFVYEDKPKQPSKSMTEGIGIDFGVKNLMTCSNGFVVENINKSRRVKLLERRLRRLQRRVSKKYMLNDPTKATKSANIKKMEHDIRLIYRTLKNIRKTHMQTAVARIIQLNPEYIAIEDLDVKGLMQNRHMSKQIGDCGFYVMREQITRKAREHGIELRIVNRYYASSKTCSCCGHKNSQLRLVDREFTCDNCGAQFDRDMNASINLKNATDYTVM

SEQ ID NO: 46279 - protein, 475 aa, Brevibacillus sp.
MWIKPGHRLFPYFQGLCGQSKNLYNTTNFFIRQAYTALTQDKELQPLQQEVLDTLHYWIDKMNEAKLLAYEKKVAKELLKSADERKRVKPTLFSLPKKESPMVSYFFLDALFKAMGQENYRSLPTQSSQNIMKGVFQNWKSFFASRKAYQKNPEAFTGMPRIPKYFRTLQKEVILTNQDCVIKEGKYLKLPFTKHRLNIGKVGSTKGNLMQVRVIPSYGRYVVECVFSCESHPQEHPLDRVMAIDLGIDNLATIVTNTGKTPTLVKGKAVKSINQFYNKQKAYYLGILRQGKQPNEGQKTSHCLERLHRKRFLKIKDFFHKASHHIVQIALQEKIGTIVIGHNTHWKSESNMGKRNNQSFCHIPHTLLIQMIVYKAKHLGIETIVREESYTSKASFLDGDEAPTYGEKGTKKSFSGKRIHRGMYRSAKGTLINADVNGAYNILRKEVPNAFANGIEGLDSLLAVAVSTPLVLIVR

SEQ ID NO: 46280 - protein, 196 aa, Methanoculleus sp.
VPQSYTLDFKQGTVKLPKIGAVNVKYHRTFVGTTKSATVIRRSTGRYFISIVVEDGRKPPQPADPIPDQTVGIDMGLKHYAVLSTGDAVANPKHLRSAQTRLAVLQRRLDRKQKGSQNRNTARLKVARCHQKIADQRKDFQHQLSSRLVRENQALAVESLNVDGMVKNHKLARAIGDAGWGTFLSMLAYNPNYSLT

SEQ ID NO: 46281 - protein, 365 aa, Sporomusaceae sp.
VQITTQIKLLPTSEQITLLKNTMQEYINTANNIVNDYVVGDNNIKHTSKSVIANLPSALKNQAIQDAKSIFKKYTKNLKSNAKKETDKQKEITVPILKKPIAIWNNQNYAIKFGYITFPVWLNGKSARILVKAVITDHQENLLTNKLGALRITKKLGKYIAQIAVEVEAIQSTGTIAMGIDLGLKIPAVAITETGKTKFCGNGRQNKYFKRKHRATRKKLGKLKKQKAINKLDNKEQRWMQDTDHKVSRQLINFAQDNNVLVIRLEKLSGIRQTARTSRKNERNLHTWSFYRLATFIEYKAVLAGIKVEYVNPKYTSQICPACGEKNKAKDRKYQCGCGCKKHRDMVGAINIISAPVVSGNSLSA

SEQ ID NO: 46282 - protein, 445 aa, Halobacteriales sp.
MVEATRTVRIPLIIPADRRDDLHQTRPKYQHCQNRTVEYCWPTTPKQSDNLITDKGDAEAALYDQLREETNGLHANLVQKAIKDATSAVGAAKSNWESGDRVSKPDFDDTDDPSWSMTYDKRAATYHRHKVSLATVNGRLEARYVLPRKLDGTPYARYVLDRRWSFSTSKLVYDGDRFWLHAVMKRHYTASKAVDESGSDTHSGDCTRVLGVDLNVDGYSAVTSAGGFHGNADYLNHRRKQFESLRAELQQTGTRSAHRRMKQRKGNEWRWFDQYAHDVANGIVADAVQVGATHVVFERLTHIRQRISNLPKFQQWFFRRVQEYAEYKLEEYGIEYRQVNPRNTSRACSRTDCDCVSAANRKEKTFRCTECGYEVNADYNAAKNVGFALLDDLSDGTDVPASHTRSPGRARSQLALMSGTLTPAGSFASREWESTDKPTASALGG

SEQ ID NO: 46283 - protein, 394 aa, Nonomuraea sp.
VRRSFKFLLRPTSKQAAALTQCLEDHRQLYNAALEHRRIAYRKAGVTVRYGDQAGELKHIRADDPEGQSRWSFSSQQATLRRLDKAFAAFFARVKAGRTPGFPRFKGRGWFDTVEWPKDGDGCRWDSQPQHPTATYVRLQGVGHVRVHQHRPVLGTVKTVSVKREGSRWYVVLSCDDVPAEPLPATGAVVGIDMGVASLVTTSDNVHRENPRYLAVAADRLAAAQRDLARKKPGSKRRRKEVARIAALHGKVRRQRLDYAHKAANALVRDYDVIVHEDLRISNMTRSASGTIEAPGRNVAQKSGLNRSILDAGWGVFLQILAHKAESAGRELIAVNPASTSRTCSCCGHCAKENRATQAEFRCTACGHAAHADVNAAINILRAGLALRRAAEAA

SEQ ID NO: 46284 - protein, 251 aa, unknown
  TnpB Polypeptide
MKNTAIAVNNDTFKFNGIKFNFWKSREILGNIKSASISQDSQNKWYINITTDYQPELYSGDGIVGGDLGSKDLLTLSNGVKYANPKYYREYQRKLANAQRYKKSKLVRKFHKKIANSRKDYLHKITTQIANDNKIIVLGDITSKNIAKNHRLSKSVYDAGWFMLKTLLGYKAIERGSVFLLVNEYNTTRLCNVCKVVDANSPKGISELNIREWKCKGCGTTHDRDVNASLNILAIGLNSLANKTTSIQKLS

SEQ ID NO: 46285 - protein, 370 aa, unknown
  TnpB Polypeptide
MRKSFKYRLFTNKTQEAKLNSFLDSARFLYNCALEQRIVCYKEYNKSINYYDQANSLKEIRSFDEGVALLNYTATQNILRQLDKAFQSFFRRIKSGDKPGFPRFKGKDTFNSITFPAYGDGVKLKKGKLYIQNIGLIRIKLHRKLEGIIKTVTIKRKNGRFYASFSCNDVPHNILPASNKEVALDAGIKSFAVMSNGQVVDNPKYLKQSETKFKETQSQYSKKRSKNLKKKLNDLHEKVNNQRKDFQHKLSRKIVNESGFIFVENLKPKEMVKNNFRVLNKYINDAAWTQFFNFISYKAEWAGRVFVKVNPKNTTQACSECGQIVPKDLSVRIHSCPYCGLKISRDFNSAKNIHRLGHSLVVKTEAVCFS

SEQ ID NO: 46286 - protein, 467 aa, Gammaproteobacteria sp.
MEYTMLMGIRFKANPTAHQRRVLSQWMGCARLIWNAKCDEERYYTTFARKYYPIGTYAPIDQTTAQFKSPELTPWLSLCPSQILRNSAVNWHQTFQKFMKGQCGKPKRKSKSDQGSIHVTRELFCFEKGRDGVTRLFIGSKRNNIGYLSFKKHRAFQLPHSLYIKKERGRYTLSFCYDNGQDARDLKTGQEHLAYLHGATREYLERYTIGIDRGVVIPAQAGDQAFDLTPAQKQHKARAERYIKRLQKRLSRQQKGSSHRRKTKYRIAAYHAKSTHIRRDFCHQTSRKLINSTPKIFIFEDLRTAYMTRHPKPQQDPQNNFIPNKAAQKAGLNRAILDKGWHQLETFTEYKAYQAGKAVFKVSANHTSQECADCGHIHPDNRKSQALFQCGRCGHTDNADRNASLIIKKRAIHFILDTGSVLSERGVLSSSGTGRGVMSKTDKGKPLSASDREASKKKRVRLPVKAA

SEQ ID NO: 46287 - protein, 382 aa, unknown
  TnpB Polypeptide
LRPLPEQLPVLAETLAQFTQSFNAVCRYGWEHSEKNGVTLHHATYYDQKAALPTLVSDLHVQARVKATEAVKSALTVRKQGRKVSCPQATVCPARYNVHTYKLDWEARTVRLSTTQGRQTLRFDLPAYAAKYAECPTATADLLCRKGRWRLHVVVTVPAPEIAPTDAVMGVDLGVVRPAVTSTAQFLGERRWRELEARTFRLRRKLQAKGTRSAKRHLKRLSGKTMRRRRDHDHVLSKRIVQAVPVGGTVVLENLTNIRQRIRVKKGTQVSRRIHCWSFAQLKGFIEYKAEERGLKVVGVDPRHTSQTCHACGHQARNNRRSQGDFWCRACGYRCNADWNGAANIAAKYLASRGTSLAGGQPVNLATVSHSEPLCADASLRL

SEQ ID NO: 46288 - protein, 442 aa, unknown
  TnpB Polypeptide
MQIISSYGVELRKQNIPIRQTLEIYRSAVSYLIGIYVQVWEKLAEIPDAKRRFNAAEHLVHTTKKNHACFDFDIRFPKMPSYLRRSAIQHALGTVSSYKTRLDLWEKTDGKSGKPKLVYENHAMPVFYRDVMYREGAEGKDEAYLKLYDGHDWKWSCVRLDHTDMEYLRKCWSGKKASAPTLEKRHQKYFLRFSYKEEVTLTKTPVKEQIICSVDLGINTDAVCTIMRADGTVLGRRFISFPSDKDRLYRVLGRIRRFQRQHGAGQTHNRWAYAKRLNMELSRNVSGAIAAYAREQQADVIVFEYLEMQGKKTGSRKQRLHMWRKRDIQKLCEHQAHRSGIRVSRVSARNTSRLAFDGSGRVARNPENHSLCTFTTGKQYNCDLSAAYNIGARYFIRELIKPLPETERSSLEAKVPAVKRRTSCVYADLRLLSQELGSRYTA

SEQ ID NO: 46289 - protein, 577 aa, Acaryochloris sp.
MKTIEFPLYLDSSQQVKVTDWMDILKHVYNRGIALLEWRQFYNRLQKVREVDPEYNIPVQLNVNRLGGEWSMSCECRIKTRLDKSKSWDEANIEHRPACTLVKPHWLTVPLIAGFSPVDLRKSFARKRYKNLGDIPQVYVNDFIGLVVFKAWANYLDQTRPEIKRPRYKGKYARVNTIPCESFRSLVKIDFATDHLQLPGLGWISVPALSTRLKSVMDRQRLHMEQHPDHYPELAKKLIERNALLRVAHWLEQGVPMPEEVFGDIKKAIKHAEHAIEKTGNVSFAITKLRELAIKRELNQAINDLCTPGVFRICRKADKFYLQITVRSVVNQGNPRPEPIGLDMGLNLLCHTTNGVKVKHPDLSQLTNKINRLKQKQSKMKLGSQNWHRIQKKISLAEQRKTRAKRSRQHYIAGWLVDANQNMAIKKFSHKDVVARPLPRPSKKTEQYLKNGREEQRIINNQVREAALGQFTSFIQLKAADRENHVIEFIECDSSATPNEILETSSFHSGGPQSEKAQNLQRTREGGRVTTTTREESESNSSTTRRLKQAPLLVNPAQSPKPFKRLRRMPQAERKVL

SEQ ID NO: 46290 - protein, 417 aa, Nocardiopsis sp.
MRTAYKVRAYPDSEQAAQLGRTFGCVRLVWNKTLAERHRAYHQHGTKTSYKQTDRALTGWKKTTDLAFLSEVSSVPLQQALRHQHTAFANFFAGRAHHPRFKNRDGRQSAHYTRSAFRLKDGCLFLAKQKRPLRVAWSFDDVDIASLNPTMVVVSREPDGRFYVTFAVETEDPEPAPDTGGEVGIDLGVKEFATLSTGEKIANPGHLDRKAERLARYQRMTARKQRGSNNRRKAKRKVAAAHRKIRHARNDFLHKTSTRIVREHDVIVIEDLNVHGMTVSARGTVKEPGRNVRAKAGLNRSVRDAALGEFRRRLEYKAARAGRTLVVIDRWFPSSKTCSRCGHLLKKLSLNTRAWTCPACRTRHDRDLNAAKNILAAGRVAAREHAGDACGAGVSRQGSSLPRSATNQETAAVRQSA

SEQ ID NO: 46291 - protein, 339 aa, unknown
  TnpB Polypeptide
MVLKAILEVVGNWTACIANEKDKFEAPTKKTLSMVLDKRLYSNLTSSSVDLTIPGFKRVRCTFDSYKQLSKLFELYKPQNCNVFYRNGRFFLTIQFDVPELEHTEGEALGVDRGIRRIVTCSDGTGWINRDFNRERRKLRYLRRCLKSKNTKSAKRHLKKTSKTERNRSKNEVHRVVNWLLAKDYTTYVLEDLSKIKKSTSTKTIKVDGKNTEVKRKKHNNRFGQIPLKEIQTTLEYKAPLLGKEVVTVEPAYTSRLDYRGLPEGKRLGTRYFTSDGELLDADGNGACNIVLRHRPDSIVVKPTYGSMVFSGRPMSTGQSWLQLIQTFATTSSHPKGCA

SEQ ID NO: 46292 - protein, 329 aa, unknown
  TnpB Polypeptide
MSGGVFIGYDFVQLPILGKVKLKEKGYIKIPEDKVKVSIAMATVSREADRWFVSFAYVTDVIPANADKVVITDDEYDIVGVDLGVKDLAITSCGEVIANPAAYRKQMQRLRRYQRAVSRKKKGSKNRKKAVTRLAKLHRRITNIRNNSAHQCTTSLTRKLAPKVLVIETLKPKNMARNRKLASSIMDANFGRIHEQLEYKCKWNNIQLVKAPQFYPSSQICSECGCYQKTDLKLTDREWTCPHCGCHHDRDVNAARNLRFYGLWLYGFVQSTPTARYAANACPDGKYRQEGNGSEPCPRDLRLQFFETQEQCKSLKQEITNTYLIGRNV

SEQ ID NO: 46293 - protein, 493 aa, Lutimaribacter sp.
MHQQVDVIVLAVALDQFRLEIPTDFGEDVAKVADSRLRQHIAAVFRNEDQVSMQHVNYMPSSSVIHICYPWTNCYTGTMIQRGYRYKLKPTPAQDRLFSQCAGVCRLIYNLALEQRRDHWRAFKRQTENSISYPSQARELTCLRAEYDWIAAVSQTCQQQALRDLDRAYQNWFKGIARYPSPRKKGRNDTFRFQGREVQVRKLNDKWSEVRLPKIGWVRFRDTRQLVGKLNNATISLAPNGWHISFVLAIEHDAPASIAPAVGVDRGVANTLALSTGERLSVPASLEALEQRQRRAQRALSRRKRGSKRYAKARRRVAALSARRARIRKDWHHRTSLELSKRFGTVVIEDLNTKGMTASAKGTVAEPGRMVRQKSGLNRSILNQGWHIFETLLSYKLEERGGELIRVPAQHTSQTCSACGAVDSRSRKNQASFVCTSCGHFENADTNAAKVILRRNTASMFVEEGYWVSVEARTIGEAKGQTGNLRPSGRGRC

SEQ ID NO: 46294 - protein, 373 aa, unknown
  TnpB Polypeptide
MNTFVRAHKIRLNPTPEQEHHLRQAAGTARFCFNWGLQRVKEALDAEQPIPTARALRDAFKRLRTADFPWTFAVGKSAIDGAFVNLGWALKNFFDSKHGTRKGKRMGFPRFKSKKRGYGSFYVANDRLRVDGHWVTVQKLGRVNMTEPVRCIGKILGATISYRAGWWWVSIQVETTHTPPVHMGEAIGVDLGVKSLAVTSDGEVFENQKHLKRAVRQVKRLHRVVSRRHTSSNNRKKAVVKLAKAHFKVACKRLDGLHKVTTHLVQKASLIGIEDLNVSGMLKNHRLAQAISEVSFAECRRQLAYKAPAHGSRVVVIERFFPSSKTCNQCGHVNHALTLDMRTWKCPTCDCTLDRDVNAARNIRDRALRLAHA

SEQ ID NO: 46295 - protein, 420 aa, unknown
  TnpB Polypeptide
MRGPEPRAPELESPRLARGAGYGGKKRKKGVVEGFRVLTLLYYASELPPSAFQRLVELFKAYRAVGALYFWSKRLGIEEGVELALERACQQLPSYYRHAFDEESQVYQFSEVEKMGRPRKVVLKLPLADALHPNCGCYIKENMLVVRLGGGERLELPLPERALRWLQEKEAEVAPLKVTKIVRIQWREDNPSFLKVQIVLRVERKKPKMPDPKGSLLVYVDANSDYGIACVYAVSDGSETRVLETPKLKPPNRGRRLMEAARRKRAAAQGRKPSVNYALARLSERFDARGWVKSAAARIFKKAFKRASGMSVVMNFDIPDPESIKGSYLQKTLLSLEKVAKNLANWFGTYATFECYPSTVCPYCGSKLKMAYTRRTRVAYCTRCGFYDDRDFVPFYHWVKALGLPLPKWPLRTLQLPEVN

SEQ ID NO: 46296 - protein, 366 aa, unknown
  TnpB Polypeptide
MKLVATIKLKVSSEHKMLFSMSKKFSRAVQFIINKGFKAKISNRFALHRLVYKDVRKYLPADFAVEAIGKASECLKSTKLKVKPLIKKQTISWNRKLFTFTFDNLRIATFKKGDRKDIKIFIPEYYRKYLDWKYQTLELINIKGVLYWHITFSREVNPSISCGNEKLGVDLGVNNLAVTSNGKVFKTPKTRINQFRFLRKHLQAKGTKSAKRHLRVLRGRQKRYMTCINHNVSKEIVKDADIIVLEDLTGIRKGNRKGKRFNRWLNGWSFYQLQSFIKYKAERQGKKVFFVNPYLTSQTCSSCNSLGSRNGDFFFCSHCGFSSQSDYNASCNLRRLIVNEPIVSNYEGKASTDDLRLSSGTSSASI

SEQ ID NO: 46297 - protein, 415 aa, Desulfurispora sp.
MSRCKNNAVKKLKRTIEQSVDILVEKFPLHLNQEQINLARNLQMEAAKVWNATCNIHRTVYGRHHYWLKEGAIKSLLKGKYDIHSQSVQAVVETYFECCERTAELHKQGGTAWKYPYRRKRFFTVTWKESAITHMGRTLRLSNGRGAEPLMVKLPERLAGAVIHQAQLVWRRNQYWLHVTVEKPALTKVRGDVTAAIDPGEVHAITITEGNDALVISGRLLRSLNRLRNKELCKYQRAISKTKKGSRKRRRLLVKKYRFLNWIERRIEHILHNISTNAVRWCMERNVKTVYIGNPEGVRKKDCGKKHNQRISQWAFGKLRDMLEYKLKRHGIELIPVDERGTSGTCPVCGEYTKQTGRVYRCGNASCGFTGIHRDVLGASGILDKSVNGGFTNGRKLPLMVDYLRPMVLAPQRVA

SEQ ID NO: 46298 - protein, 376 aa, unknown
  TnpB Polypeptide
LLKRVDDRFFDLLDGKTPVAIIGKSVKGTIRKIRPLANLVRAEVRKAAGRTPCHSRCRSLTLTNECYTVIKNKDGKYAIQFITRKPNSRMVIDLPSGIHFDRTIKLVYDHGGLYLHVPHKVTVQPLKNVPQVVTTKGKPALYTVGLDMGVSEVYVDDSGKQFGTRLGKTLWDYAQSLDKKLRERNKFETAYRLTKNKAKKKNIKRCNLGKKVWDEKIERYRETLKNIVNEAINQIFKQCPADVYVVEQFSNLFSMKGISKKVRRMLSSWIRGIIDERLAFKAATHGLWIIHVPASYSSQRCPFCGHVERGNRNKDKFNCCSCHHQAHSDANGALNLLLAAHKPKIKKGLDRFAIKAIYRKEYEKYCKKNRITPIPA

SEQ ID NO: 46299 - protein, 372 aa, unknown
  TnpB Polypeptide
VKLTVQIKLLPTPIQADALRATLETVNSAANRLSQLAWDAKEFRRFPLHKTYYRQIRDEFPLSAQIVCLLNAKVVDAYKLDKKVQRVFRKHGSIAYDSRILGLNLAASTISIWTLGGREKMPFVCGEKQRALLVYPRGESDLILRKGKWFLNITVDVPEDKEIEAVDVLGIDLGIAEIAADSDGNKYSGAKLNKVRHRNRALRRKLQRIGTKSAKRLLKKRNRKEQRFAKDTNHTISRRIVSLAKRTNRMVAVEELTGIRSRVRARKRERTKLHSWAFAQLGSFLEYKCARAGIPLLRIDPRFTSQACSQCGHTEKANRKSRDNFVCKSCGHTSHADTNGAANIRLKGLTLAGAGAFNHPNVATIFCGNIHN

SEQ ID NO: 46300 - protein, 230 aa, unknown
  TnpB Polypeptide
MGEVKGVVVKREPPGKWHAIFQCENVAKPLPKVNKSVGIDVGLKHFLSDSDGRQLENPRLYEKTLKRVQMVQRELSRKKKGSKNRGKQKLKLAKLHEKLVNQRNDFLHKLSRFYVNNYDAIAVEDLNIIHMVRNRNLAGKIHDASWGKFLQMLAYKAENAGRQLVRVNPRGTSREYRYGELDRDYNASLNILERGLSGLGRPFEPAEVKPLLVEIPASNIIETGSPYPSE

SEQ ID NO: 46301 - protein, 410 aa, unknown
  TnpB Polypeptide
MQLTQKIKIHPTKEQETILWVLSEKCRLIYNFGLAERKEAYKKHEKISYCIQQNGLTLTKKAYPEYGIVYSKVLQMTLRQLDADYRSFFALKRNGDKTAKSPRFKGKDHFTTMTYNQSGFKIEKGKVTLAQYCSKTPLTFEVPEKFVFGRVFQVSVFHDGDDYYVSVVYEKAAMAYVDNGLYQAFDLGVTKQSAVNSHGKFVVFKNSRPDKYWNPIVNALQSRRDHCREGSRKWKHFHEALKKRKRKCSNQTWDFQHKLTRKIVDNTRANTIIVGNLNVKGMAQSKQSCSGLNRSTQNNGFLSRFVWFLTYKAQLAGKKVIEIDERNTSKRCYACGREHDMPLWRRVMECDCGNAVDRDRNSAVAIMLRFLSHNALWTGYQQFVGNLRKTGLPTPKLEVHSQEALPLRVG

SEQ ID NO: 46302 - protein, 566 aa, Streptomyces sp.
MGQGARVSRKLPLGEGETARTACARGLLRAGVVAKTGEVLSAAALAERVGWAAGLVSGMAAELLAAHWNAADVGMLASGVDGGGRTLPSKAWMALRRLGWSVAPPGGVRVNDRIVRMAQEQAGRMLRSATWRAGLTAAVLTTWPAEAGKRTAEEWDAVREAVPGGRHVPSSVINSRTRQIAAFTKKHGRLPADVFELEAAPGSARMLSLAACDGQQAIIARGDDPGRALLRLQLPTRPDPRSYRDWTWVECPLTLPPTVPPGAVLHLPTLRLHRGRVRADLAYTHAVTRTRRSGHTVALGVDWGLNTLLSAGTVRLHDDGSITALGSGAQFRAAGVLAKQHRLCRLSEHLHAKADHHQRLIGDNAEHPLGARHEVLRQEIRRVSARRSNLNDALAQSAARWTVDQAIAAGASVIYVEDLRSLEARGMGRTLNTRLSQQIRGQIVDRMRHLAAEAGIAVVTVPARNTSRHCPRCLVPLRHRKAPDQPAAPGWKWARPLGPAGQRPEGHAPPGRRRLPRAAHRHQDVTTISTPTSRQAATRSGTGRRLPPARSRHPSTMGTTHTRHHV

SEQ ID NO: 46303 - protein, 663 aa, Streptomyces sp.
MLPLGRGETARTASARGLLRAGVVEKTGEVLSASVLAERVGWAAGLVSGMTTELLAAYWNATHVDMLASGTDAEGRALPSNAWMALRRLGWTVTPTKNIRVNDRIVRMAQEQAGRTLRSVKWRADLTAAILATWPACSAKRTPNEWDAVRATVPHGRHLPSSVIRSRTQQITAFERRYGRFPVDVFELEAAPHTAQMLLLSACDRQQASIARADDPSRALLRVQLPTRPDPRSYTDWTWVACPIVLPPTVPSNAALHLPTLRVHQNTVRADLAYTHAVPKARRSGHAIALGVDWGLNTLLSVGAVRLHGDGKITALGAGGMFRAGGVLAKQHRLRRESEYLHTKTDQYQRLMVDDAQHPLRDKHHVLAEEIRHVSLRRSNLNGALAWAAARWVVDQAITSSATVIYIEDLRSMEARGMGRTVNTRLSQQVRGQIMERTQHLAAEAGIAVVTVPARGTSRHCPRCLVPLRHRKAPNRPTAPGWKWAVCPSPECGWQGDRDTGAWQRIAARGLAHQTKTVTDRADGTMAIRSVVDKLEANAVVAPATKTRRDRSKSGPTRRQSPRPAPRRRGAPSPTRPSGPAGQRPEGHAPPGRRWLPRAAHRHQGVTTISTPSPSLHPGGPPSGRHRPRGAARGAGFHLHAHATPPRWADPAPDIGSGMGSLS

SEQ ID NO: 46304 - protein, 486 aa, unknown
  TnpB Polypeptide
MSQKVRIDGVKHNGASVFLGVDHCDNPCWTRNPERIMVWLCDGWRSRFNQRREQRPRSTPVKDDATGEITDWTEEPLGGPNILPLVSDSQARTSCLWMAGIPSAILASTNRIENTEWFAGLKRKKTSGGRTPGFKSRRRGLGFVCWRNASKTGNAIFRKTGRKSGVVVITGMNPTGWVKPGEKAHWRIVIHVRVSQPIQPYTSVHVDWTHRSLVFVNMPSPLPRMGNGMVGIDRGCVHTLASSDGIFRDMPKPSKAELKRLKYLQRRMARQDRVNEARGGRTAKLTSKRRRRTLSEFNTLNSRIIRRRNDWIEKTTTSLAKANILIAMEDLDVKAMTRRPKPRPGPANPGQYLHNGAKAKAGLNRSILSNNWSRLMKRLKDKMDANGGNLVIVPAAYTSQTCHECGHIAKENRESQAVFKCVECGYMANADTNAAMNILDRALRKTGGDTASDVEEPQWRSREASTPSTQAGSSVGVRAVKGIPRL

SEQ ID NO: 46305 - protein, 456 aa, Thermococcus sp.
MKRAVTLKLQPSKAQEKILFELADIGAKVWNRVNYLRRQEFFEGKPVDFNKTEKIAYEEFKTEIGSATVQQIARKNAESWRAFFSLLRKKRNGELPDWLKPKPPSYTKEAGLIVLRNDQYKIEGNKLILKGLGRFKRLEVQFKGRIHLKGKQGRLEITYDDVKRKWYAHVSFTVEEKLINGEWVEVPRRPLDNLSAGIDLGVNNLMAVYVENGESFLVNGRPLKAIAFYWQKRIAEYQSKLNKSGAKTSRKLKRLHAKAKLQAKHYINTAVRQTVERLYRLGVSKIVVGYPKGISRNSDKGKRQNFLLSHVWRFNYVIKRLKEVSEEYGISVVVVDEAFTSKLCPVCGKPHEGARFVRGLFKCPATGLVFNADLVGAFNILKKAVKTITPSLGEFYAQRRGNWPKTRPEGLKSPSLLGFDEAPQTSPSLARVNSLEPSPFTARRRSARLGYQRRLL

SEQ ID NO: 46306 - protein, 365 aa, unknown
  TnpB Polypeptide
MFRAYKMRIFPTEEQKTLITKTFGCCRWYWNQALHDNIEYYKENGKGKITTPAKYKAENEWLKEVDAVALCCTQMDLQSAFSKFFKKPNVGFPKYKSKKRPKNSYKTTQTRGFVVGDDYVKLTKLGKVKLINHRHKTGTCKSATISLTSSGKYYVSCLFEEDIDFLSETNKEVGIDLGLADLAICSDGTKFPVLRALRKNLAKLKREQRKLSKMTFGSNCYLKQKQRVAELHEHIANQRKDYLHKVSHKLINENQVVCLEDLNVKGLLKNHHLALSISDVGWSKFVSMLQYKADWYGRTVQKIGRFYPSSQICSSCGCVTGKKPLHIREWVCPECGAKHDRDVNAAKNILQEGKRILAASTCRDR

SEQ ID NO: 46307 - protein, 412 aa, unknown
  TnpB Polypeptide
MPVVVKDWMLVKGVVFRLESGLPSEAKLLLEDFRLAVNNAIRAGLQARVTSRNAMVKIAYKDFRREHPRMYSQHLVSAFEVAGNVLKNHRKRAREGVTCRIPYVMRLLMKAENQAYKLDRKSGVIDLPIRAGCHVELRLVVSQYHRKYLDDMALCLGSLTVLPDRVIVAFRKDAPKPFLPESALSLDTNERSLDGIFVEGDIAKAARAKFPDVAIIQQRHHDRRKGLQKKKAHDRRTSRNLCRTEGAREHHRIDSRLHQVANSVLMFAEERRSAIVLEDLKGMRPKRNKELNRRLSMWPRRKLHQIIEYKAQWRGVPVVKVDPRNSSRTCPICGRIRYSRMGAEFVCECGWRLDRHINASINLLQTAISKGMAGGLRFDPGAFQYDVMMILYEPAMAARSEPNGTSGVVEVT

SEQ ID NO: 46308 - protein, 407 aa, Methylophaga sp.
MIQRSYRFRFYPTRAQQQQLAIEFGHARFVYNFALNARNKAWQRRKESLNYVGLSKLIGQIKKTSRFDFLRQATAACHTQKLIDLDKAFKAFFDGRARFPKFKSKHDKQSIRYQLDQRHIARAFSNTPGAESIQLPKLGKLKLRWSRRVAGVPKMVTLSKTASGKFYVSFSCEEVFEARPAVPMVVGLDVGIKDLVTVSTGEKIAPVKSYHKAQHKLARLQRVLARRKKGSNRRQAIRLKIARLHERIADIRRDFHHKTSSRLISENQVICLEDLNVKGMVKNHKLARALSDNALGELRRMLEYKAGWSGRDIVVVDRWYPSSKTCSCCEHKLKALPLSVRQWRCLKCETLHDRDINAANNILTEGLKQYREVHGNCPFWGAGIVPDDASAYTPSMGINGQGVRRVA

SEQ ID NO: 46309 - protein, 408 aa, unknown
  TnpB Polypeptide
MQKAFKVTLIPSNKQEILINKSIGCARFVYNHFLALRQELYQTEQKNLNYNACSQRLTLLKKEIEWLQEVDKFALQNSLKNLETAYKNFFADLKKAKGKKGVGFPEFKKKHGCKQSYKTNLTNGNIQAIENRLKLPKLGWVKFHKSQEITGKLVNVTVTRTSSGKYIASILCETEVEKYPQVVQNIGLDLGIKSYLVTSNGEIVNNPKYYRTQKRKLRKANKELSRSVKGSNNRVKAKTKLACIYERITNLRDDFLHKLSTRLIKENSIICIEDLRVANMVKNHKLALSISDASWSKFVAMLEYKALWHDRVVQKVGTFYPSSQTCNCCGLINPEVKDLKLREWSCPGCSNYNLRDKNAALNILSEGLRLLTAVGTPEVIKNACGELVNPEVIPVEIVETGITRLQVV

SEQ ID NO: 46310 - protein, 392 aa, unknown
  TnpB Polypeptide
VIRSTKHHLKDLNKAKALRYKNFVLEYSRVVRLLVDQAWVALPTSLVVPKYYNYKEFDVETDLSARALSSAVTQVSGILRASVEKQRRRLWVRENKNQKVKDVLIRKPELKFVAPNLSSKCCDIVEVKGSKFWGFVRVKSLGKAYGAFNIPIIRHPRIRGTVKSGVIFFLDAVQLAWEVQTTPALKGDRIMGLDQGYRTVATLSDGQASPDLDSHGHSLVSVIDKLTRKRKGSKAFKRAQEHRKNFVNWSINQLNFSNLKELRLEKIVNIRKGVKSSKTMSHWCNPEIRDKIKRRCEELEVPVVEQSCAYRSQRCSSCGQVRKANRKGKIYECKACGHVCDADLNAAMNHEQDLPPVQWAFLGHKLNLGNGFFWKPDGFWDCDGAEIRVPCS

SEQ ID NO: 46311 - protein, 418 aa, unknown
  TnpB Polypeptide
VRKAFKYRLYPNRTTEKKLYFTLNRCRELYNAALSERKDSYQLHERTQLQINSESGQVVAATMTAKQRVKAIGYYGQKRDLVEIKAVREEYQGIASHVLQDVILRVERAFQHFFDGAGFPRFKGRTRYDSFSYPDGAGWKLDVEEQGNSFKGTLHLTKIGDIKVRLHRKIEGKMKTVTMKREVDQWFVVFSCEVEEPAKLPVSYEDVGIDLGVTHLAALSNGEMIEHPRYYRRAKKMLEKRQQALSRKKKGSHRRERAKKLIGKAHRKIANQRRDFHHKQSRKLVNRYQVIVFENLQIANLVKRPKVKQDEETGQYLPNGAAAKGGLTKSILDAGWGMFVAMCSSKAAGAGRTLLKVNPQYTSQICSACGKSRKKTLEERWHSCECGAEMDRDVNAAKNILVLGQQHLGGKRPTSATA

SEQ ID NO: 46312 - protein, 372 aa, unknown
  TnpB Polypeptide
MKKLSPPGYWKDMETGEKKIHILIRNDRYHVEPISENEGYIVLEDFDLRIRYVGRIRWEGRQGRLEIIYVNGRWFALVPIEVGVDPSKSNKKGYVKPNYKDKKGRIVNPRSIKQRDPIGDREAFMDMGLNNLFAVVTTDGSEMLIKGGSIKSEYCWWKRGIAAYQSIRDVLRRLGVSTWIYYHEKYLDAMYKRDERLRHLYITATRFLADELYRRDVRKLYIGYPIMLSQDNGNEYNTNIWRFRKIVLWIVDIFMEYGIEVEIAPEDYTSKERSICGIRHKNGRIYRGLYICSKTGRKINADINAALNIARRLGYRIRVSRKIESYLVTHSGVKPLNPLQGANTQDPGIETPPLKGGEGSCSTRLEARYMQS

SEQ ID NO: 46313 - protein, 393 aa, unknown
  TnpB Polypeptide
MRRGSERPAKCDEARGRGLDRYYLEPINEGEGYLVLKDFNLRIRYAGRIRWEGKQGRLEIIYVNGRWFALVPIEVGVDPPKSNKRGYVEPNYEDKKGRIVNPRSIRQKDPIGDREAFIDMGLNNLFAVTISDGSAMLIKGGTIKSEYYWWKGEIATYQAVRDMLKNAGLSTWREYHEKYLKAIYKRDERLRHLCITAIRLLADELYRRDVRKLYIGYPIMLSQDNGNEYNTNIWWFRKIVLWIVDIFMEYNIDVEIVPEDYTSKECSICGIKHKNGRKHRGLYICSKTGKKINADINAALNIARRLGHRIRIARKIMSYLVTHNGVKPLNPLQGANTRDPSIETPPLKGGEGVIGNEKEELKSQILAYKILEACHLCDVRAIYILVLIINLIW

SEQ ID NO: 46314 - protein, 454 aa, Acidimicrobiaceae sp.
MPRRYSPPDGQIVQAFTFALEPTDEQSAQIARFFGARRFAFNWALATITTDLERYRATGESTSSPSFYSLRKRWNAEKDVVCVNAETGEVWWPEVSKEVFADGVRGASDAYWRWQKSRSGRTAGRPVGFPRFKKRGHDRDRFSFTTGTMRLEADRRHLTLPVLGTLRTHENTRRLERLIALGRAKVLGVMLSRHGDRIIAAVRVSVARPQRAGVARPDSIVGIDVGVRRLATVATTTEVIGELANPRALERRLKELRRLQRQRCRRTRGSRQYAETGAKITRLHAEVAHIRQHNIHVFTTNLAKTHGVVVVEGLDAASLLHQKGLPGARARRRGLSDAAMSEIRRQLRYKCPWYGSTLIEADRFFPSSKTCHGCGHVQHIGWSEHWTCEECSSTHQRDDNAAINLARWASLGSVGAPVKRGAEHQTEFRSAAGDDTRKGGPESSGPNNSVRSAA

SEQ ID NO: 46315 - protein, 423 aa, unknown
  TnpB Polypeptide
MMQGVLRTEVMETKAHPELSSLCHQVKNLYNRANYLYKQAQQQRTTLSYYELNGQLKGEECYMLLPAHTAQHTLKLLCRNWKAFYQARKEWKVHPERFLGSPQPPKYKSPGGEMVAIITNQQVRIQNGWLLLPKKVGFKIKTRLTSLDSIREVRIVPRGVGYTVEIVYHKNIPKRLQKKNTRKGAMDLGLTNLVTFVDNIGSRSIIVKDEGKGIKSTTQYYLKRISQLQEQYAQQQRKQLRQQNRLVYGQVYHRLRERWRRKVKEYFHQLSRFLVNLWKERELSTIYIGYNPLWKQQVRLRKKTTQLFVIIPFHHLISLLEYKAAEEGIDIVLVDESYTSKCSFLDNEPVQKQTSYQGRRVKRGMFKSATGQLINADVNAAYNILLKSDPQALPPRSVGGVGGYVIYPHRVSYSTMTSTKTLV

SEQ ID NO: 46316 - protein, 490 aa, Bacillus sp.
VKTLVKEKQQEGKSYSTQQVWIKKGHRMYNYFQTMCENSKNMYNTTNFYIRQVFTALTSDNGRHPLQKEVIDTLVNHIEAMNEVQRVAYEKRLAKELAKPVEQRKEVKCNVFSLPDSSNPYVDYNFLDALFKRIAQNDYTSLPVQSSQAMMKKVFKDWKSYFAGLKDWKVNPSKYTGRPRIPRYSRASMKEVEFTNQDCVIKEKKYLKFPKTKERLNIGRLGCTANKLKCVRVIPRYEQLVVEIVFEKPKVDSKTKNESSRLMSIDLGIDNLATITTNTGMAPVLLKGKTIKSVNQYYNKMRAHYYGILRQGKEPKEGSFSSKRLLRLDAVRHRKIKDLFHKCSFFITELASFENIDTIIIGQNKGWKQHSNIGKKSNQQFVQIPYSLLISMIQYKAEELGMAVIVTEESYTSKASFLDGDDIPTYGEEGEKMFSGRRISRGLYRSKNKTIINADVNGSANIMRKYAKKEGLFLHIEDVLVDNPLSYTVA

SEQ ID NO: 46317 - protein, 362 aa, unknown
  TnpB Polypeptide
MKLSMKLKLITTETQKQALLDTMQRFNSACDYISDIAFENKAFGQIGLHKLTYYDIRDKFGLGAQMAVRAIGKVVESYKIEKKHKHTFKPSGAIVYDSRILKFKYPDKINISTIQGREVIPFIFKNYRDVELRRASGQADLVYHDGFFYLVVCVDVPEPPEDDTKEFLGIDLGIVNIASDNFGTQYTGNKLNSVRNRYFRIRKKLQKKGTKSAKRLLAKRKRKERRFANNTNHIISKKLVDKAKALGLGIALEDLKGIRDRVTVKKAQRRTHANWSFYDLRSKIAYKAILAGVKVVFIDPRNTSRMCSKCGYISKKNRPNQSTFLCQQCGFSSNADLNAARNISCRAIVNLPNVVCVETKAA

SEQ ID NO: 46318 - protein, 369 aa, unknown
  TnpB Polypeptide
MMQTLKVKLGTSSEDSKALLETMHQFNAACNFVAEKAHEMHTANKIKLQPFVYHEIRERFGLSAQMTVRAISKACEAYKRDKSIKPAFDPEGAMIYDQRIMTWKSLDMVSLLTLKGRIKVPVMICDYHAHRLDRIRGQADLILDKGIFYLCVVVDVPEPSKIEPKGVIGVDLGIKNIAVDSTGEVFSGEKIESARVKMQNLRSDLQSCGTKSAKRHLKKLSGREARFKRDVNHCISKKLVMKAKDTSSLIALEDLKGIRERATVKKSQRHRHSSWSFGQLRQFVDYKAALAGVGVVYIDPAYTSQECPICHHTSKSNRPTRDEFACVCCGFSGPADAIAATNIAARVAVNLPIVARFFAQPQATPFRAW

SEQ ID NO: 46319 - protein, 448 aa, Peptostreptococcaceae sp.
MTVLSTRLYNTSNYYYRQVLTGTRKVHLSDNEAEAIDYINNHLDLLNQVRYEKYLKKLEKNSTKKAFLEFKKLSKDDYLTYELLDGILKVTKHPDYYALPGQVNQQVIKNLFRNWKSYFEAIADYRLHPEKYEAMPKIPKYKKNTKHMITLSNQVCVLKSSHLKFPKTKQTLNVSKYFSKSGNLKEVRVLPRANFILLELVFAVEINNEILPSQNVASIDLGVNNLVTMINNVEKSPIIVKGTVVKSINQYYNKTRGKYYSDLRKGKKKNEGQFTSKRLNRLNEKRHSKIKDYFHKTSYLIIKECLVMSCGTLVIGLNQDFKKNVKLRKSDKQNFIHIPFAMLINMLKYKAEAAGIQVIITEESYTSKASFLDGDYIPVYGEHVESQFSGRRISRGLYRSKEDMIINADVNAALNIMKKAVPEAANELWDRGVGFKAIMSTPLVIKVS

SEQ ID NO: 46320 - protein, 354 aa, unknown
  TnpB Polypeptide
LAREIENYEKGGKFISDAELRKEFTKLRHSDEYAWLLSISNNVTKQAIKDACTAYKNFFKGLQKFPRFKPKKRSIPKFYQDNIKIQFSNTHVKFEGFSSSRKRNKQKLNWVRLAEHGRIPTDAKYMNPRISFDGLNWWISVCVEFPDCIEKLNDDGIGIDLGIKDLAICSDGAKYKNINKSQKVKKLEKQKRRLQRSISRSYEKNKKGESYCKTNNVIKKEKLLLKRNHRLTNIRKNYLNQTTSEIVSRKPRFICIEDLNVSGMMKNRHLSKAVQNQGFFEFKKQLEHKCSDKGIQLIVADRFYPSSKLCSCCGNIKKDLKLSDRIYKCDCGNVIDRDFQASINLKAYGERVAS

SEQ ID NO: 46321 - protein, 664 aa, Actinomadura sp.
VQPGKPLRRVAGVDPRRVDLVPVPGAARQPGPRQQIPLGPHDLVVEAPERGRVAPAQRLVRARLQRLRRAPPGPGLRDVARDVHDDRPEPLALLGGEAGQVSGGLRRVRAVPHRDHVGVGEPQRRDPGQPRHRRVVLPRRVAEVRRPVEVVAGAVVVPGRARRRGPEVHGGHSIPLEERLEVRAAADAVDRGLAAVLRLPRLVQRPVRAGPPHLLGGVHHRPVEGGRRRRTEPRPSGAVIGFFCGDSAFVGLAHVRVSRVQDVARQVRRAFKYRFYPTEEQAAELSRTFGCVRLVYNKALEERTRAWHVERRRISYTQSSALLTQWKKTREFAFLAEVSCVPLQQALRHLQMAFTNFFAKRAAYPRFKSRKRSRASAEYTRSAFTWRDGHLTLAKMTAPLDIRWSRPLPQGAEPSTVTVSRDSAGRWFVSLLCKDIIPAAPATESAVGIDAGITSLVVLSSGEKVDNPRHERRDRARLAKAQRDLSRKAPGSANRDKARRRVAQVHARIADRRRDFLHKVSTRLVRENQTVVIEDLTVGNMLKNRKLARAMSDAAWRELRSMLEYKCAWYGRDLVVVDRWFPSTKLCGTCGTVRAKLPLDLREWTCECGAVHDRDVNAARNILAAGLAVTACGDGVRPQRDTSRTGRSSAKQETRRATAGALRL

SEQ ID NO: 46322 - protein, 332 aa, unknown
  TnpB Polypeptide
MQIISSYGVELRKQNIPIRQTLEIYRSAVSYLIGIYVQVWEELAEIPDAKRRFNAAEHLVHTTKKNHACFDFDIRFPKMPSYLRRSAIQHALGTVSSYKTRLDLWEKTDGKSGKPKLVYENHAMPVFYRDVMYREGAEGKDEAYLKLYDGHDWKWSCVRLDHTDMEYLRKCWSGKKASAPTLEKRHQKYFLRFSYKEEVTLTKTPVKEQIICSVDLGINTDAVCTIMRADGTVLGRRFIDHPSEKDRMYRTLGRIRRFQREHGSAQTQGRWAYTKRLNTELGKKIAGAIVRYAEENHADVIVFEYLEMQGKISGKKKTETAPVEKKRYPEVL

SEQ ID NO: 46323 - protein, 361 aa, Sulfolobus sp.
MTNKLIGSKEALEHFQFVTINGKVNFEDKERVVRIAKAYSQVVKSTIRPLFDGKSIDELTKEFYNLLPNYLETALKQAKTIIDGLLEREENRGEMIHARIRKFWFGSRGNKADKGNRNVKFHVLEDHVLIKVRDPWNKEWIFGKAYFGKEYLPLLKELEDLSQRKEEGYGAVISFKEKPMIHLQVPVWLYLKHFSSLKPAGYGLIAGFDLNSDRLNVVVINKDGKVITTRTFWYSDVTRPGFPKVKARALRLNALSNALEFLSRIGVDYVVFEDLFLVKKRKFTRSKSGNRKITRFAKKQLLTHGVIKSLRLGFNVVLVNPKGTTNSEEHDRAMREKGFDRHIASAYLIALKGLGMLNDIK

SEQ ID NO: 46324 - protein, 385 aa, Sulfolobus sp.
MARRVKAIRATVSMKVALSEPLLALVNNYVKALRFTLFWLKENVPNPEEKGVLGRIHEELYERLRGEYNLPSKVAEDCYRDALSVYKGWYNNPKKGRFPRVYKPTVWLTPKASYNVDLDNMTVRISGVGELQILGYPRNIKEYMNWKMKEARLVVKGDKAFLKVVFEKPLEKVEPRESVAVDINMGEIVVGKDDTHYVRIPTRLYEVHHLKSLAERLQKKYPRRWKENKGILYRIRSFHQKARRIMEDFARKVGKWVVEVARDFGANVIKLENLENLIKNVDKLPKEFRDKLYLMQYRRIQYWIEWQARKHGILVQYVNPKYSSVSCPKCGNKMVEVSYRWFKCICGYENDRDVIAIVNLNGRGSLTLSSAHQMRDVNPNQWWER

SEQ ID NO: 46325 - protein, 253 aa, Sulfolobus sp.
VETKEGNYVSIDVNENNATLAVFEDFKLKEIRRYETGLGRIVVNYSIRRKEITKGYSTKDELIKKKLRRLRERERKLDVLRKTVKRIVELARDLNARVIVGKFSSRAKKRMEGDKSSKLRHRIHQWSVVKFTEMLKTQPIEVTEVSESYTSSLNPFTGEKLKKSKQLIERVVKVFNPYLMTGTAHEGRVIKVFKVNARYLESGEVLLERDSIAPLNLMKKVDGRVVVFPSTSPNDLRVTVYDPLRGYVTISHR

SEQ ID NO: 46326 - protein, 281 aa, Sulfolobus sp.
MARRVKAIRATVSMKIALSEPLLALVNNYVKALRFTLFWLKENVPNPEEKGVLGRVHEELYDKLRGEYNLPSKVAEDCYRDALSVYKGWYNNPRRGRFPRVYRPTVWLTPKASYNVDLERMTVRIAGVGELPILGYPRNIKDYVNWKMKEARLVLKDGKAFLKVVFEKPLEKVEPRESVAVDINMNEIVVGKDDTRYVRIFTRLHEVHHWKSLAEALQMKYPRRWRVNKRILVRIKYFYSKAKRIMEDFARKVGKWVVEVAEDFNANVIKLENLKNLIKHA

SEQ ID NO: 46327 - protein, 434 aa, Sulfolobus sp.
VKRTNVVKLQVDKQTHERLKELAITTAKCWNEVNWLRMQQYKEGKRADFNGSEKTVYSKYKTVLKVNAGQVARKNAEDWRSFFALIEMKKEGKLPSWFKPRPPGYWKENGKYKLMVIIRNDRYVVNEEKREIYLKDFHLTLKFKGKLKWEGKQGRLEIIYNEARKSWYAHIPVELEHKVEKGNLTASVDLGIVNLATVYVEDGSWYLFKSGSVLSQYEYYSKKIQVAQKTLARHKQRRSRKLKLLYEKRSRFLKHALNSMVRKVMELLKDKGVGKIVVGHPKDIVRGRGNKLTVNFWNYGYVIKRFKGVGEEVGIDVVEVGEAYTSKTCSLCGEAHKSGRIKRGLFKCPRTGKVINADLNGAINILHIPESRGARGGGQPLARDRGNGLKAQPVVYRWTNGAGWVCITPTSYEVVRMKVVNHKPVNHPKGTLAL

SEQ ID NO: 46328 - protein, 399 aa, Sulfolobus sp.
MQQYKEGERVDFAKTEKEVYEKYKHVLKVNVQQVARKNAEDWRSFFSLIEEKKEGKLPKWFKPRPPGYWKDKSGNYKLILIIRNDRYEVDENKRIIYLKDFKLSLRFKGKLKWHGKQGRLEIIYNEAKRSWYAHIPVEVESETKVEGNLRASVDLGIINLATVYVEDGNWYLFKGGSVLSQYEYYSKKIRIVQKTLARHKQNRSKKLKLLYENRSRFLKHALNSMVRKVVELLKDKRVSEVVIGYPKEINRNHGNKLTVNFWNYRYVIKRFEEIGEELGIRVVKVDESYTSKTCSLCGEAHESGRVKRGLFKCPRIGKVINADLNGAINILHIPESLGSGSGGQLPVRDRGNGLKTQPVVYRWTNGAGWVLYAPTNYEVVRMKVVNHKPMNRPKGTLAL

SEQ ID NO: 46329 - protein, 404 aa, Sulfolobus sp.
MIETILKENLPTTRKRLHERFYKYYKAKYPSLPSRVIEGAYIVAGRIVKSFRERRKKGLTKKDKPEYKKVVVIYPNKINWRFNKLSVSVLTHKGWVEIPLRITKQLIRYLYEGWRVAEELKLRLIGRKVVIWLTFEKEEEVNVKEGNYLSIDVNENNVTVAVFEGFKLKEIRRYETNLGRIVVNYAIRRKEITKGYSTKEELIKKKLRRLRERERKLDVLRKTVKRIAELAKSFNARVVVGKFSSMAKERMEKDKNDELRHRVHQWSVVKFVELLKAQPVDVEEVSEAYTSSINPFNGKKLKKSKQIIERIVKVFNPYLMTGTAHEGRGIKVFRVNARYLDGGDVLLERDSIAPLNLMKKVDGRVVVFPSTSPNELRVTVYEPSRGVPVVELEVIKSKDKLRHG

SEQ ID NO: 46330 - protein, 382 aa, Sulfolobus sp.
MARRVKAIRATVSMKIALSEPLLALVNNYVKALRYSLFWLKENVKNPEEKGVLGRVHEELYDKLRGEYNLPSKVAEDCYRDALSVYKGWYNNPRRGRFPRVYKPTVWLTPKASYNIDFNKMVARIAGVGELPILGYPRNIKDYMDWKMKEARLVIKGDKAFLKVVFEKKKVKIQPRGSVAVDINMNEIVVGKDDTRYVRISTRLHEVHHWKSLAEVLQRKYPKRWRVNKRILVRIKYFYSKAKRIMEDFARKVGKWVVEVAEDFGANVIKLENLKNLIKHVNKLPSEFRDKLYLMQYRRVQYWIEWQAKKHGLLVVYVNPHYSSVSCPKCGKKMKEVGYRYFSCPSCGYENDRDVIGIMNLNRRGSLTLSSAPQMRDVVPNR

SEQ ID NO: 46331 - protein, 437 aa, Sulfolobus sp.
LKRTVKLESDPLNYWKYHVLKEVEEYQKVIVNEMINIILSEDLPTTRKKLHERFYNYYKKKYPFLPSRVIEGAYIIAGRIIKSFRKRKKRGLTRKDKPEYRRVMISIPNTINWRFNKISVSILTHKGWIDIPLKVTKQFIHYVSKGWRVSQELKLRLVGRKVLVWLTFEKEVEVETKEGNYVSIDVNENNATLAVFEDFKLKEIRRYETGLGRIVVNYSIRRKEITKGYSTKDELIKKKLRRLRERERKLDVLRKTVKRIVELARDLNARVIVGKFSSRAKKRMEGDKSSKLRHRIHQWSVVKFTEMLKTQPIEVTEVSESYTSSLNPFTGEKLKKSKQLIERVVKVFNPYLMTGTAHEGRVIKVFKVNARYLESGEVLLERDSIAPLNLMKKVDGRVVVFPSTSPNDLRVTVYDPLRGVPVAELEVIKSKGKLRHG

SEQ ID NO: 46332 - protein, 428 aa, Sulfolobus sp.
VSKNLRLKPEEEYIYLTYSIKNDKKEESKILLENYRVLLQKALDWLWEKTKVEKKEMKKGKKIFMKIKITLPKKKEVYKTLRDELEKNNTLASHYVDKAINDAYSILRGWKRRAEKGQASLRKPRLKKVYVRVKSTLRKVEGESVRITVRPYDYITFSWSQTWFSRRVKGLELGEPIIKEDKVYLPFRYKLPWFTPLDFLAIDSNLYTLDAYDGDKFITFSLKELYSLKFGMELKRSRIQRFASKHGRKGKELLKKYSHRERNRVLDYIHKLVNELLEMYPITMFAVEKLNKQLMFDDANDSLSKKISRTVWRTIHHVLRYKAPLYGSFVKEANPYLTSKSCPRCGWVSRKVGGTFRCERCGFTLDRQLNASLNIYLKMCGLPHIRDIPRVWVGVTPLKGRRRMSRAMPRDPGEAQGLRIGFKFMKIQ

SEQ ID NO: 46333 - protein, 469 aa, unknown
  TnpB Polypeptide
VSDRPQRTNEYTATPTTERYRQCLFEWLVAHAPLWNQINYRRRQQYFDEDGDVWAADYTDLYDEYAPVLGKAACQQVARKNSEAWRSHFDLLDTYYSDDPSVTEKPSPPGYWGNRDDGYELHGLVRNDLYTFDWNEDRSTLEFGVGDVLEEKYDFEYQERVTLEVRGNPQWDGDDARLELVYDEAADTLRVKHPVRIRPDNLREQRLDAYTHTLNAENTTHSAAIDVGANNTLAIVTSTGDTAVYHARPEFDQFQALSALIAELQSQLPDDQYTSQRIRRVYDERGEKRDHSRDAAVKHASEWLLERNVDTVYVGDLTNVLDAHWSAAVNEKTHAFWSHRQLIERIDLTLGDVGITVEQVSEFDSSSECPKCGSDDVTRAGDSFRCHACELDAHSDIAGAWNLLQAEVGPMARPAALSAERGRDVPDNTACDGAYWEWNGHDWIPCRFGEHSYPLDQTSISEPASSQPG

SEQ ID NO: 46334 - protein, 335 aa, unknown
  TnpB Polypeptide
MLLFAAENWNGSNCRLEISYDETSDCFRVKQPVEVQPDYVEQLRQVEFPSHTPSENAESEDRVAAIDVGANNTLTIITDTGDARIYHARPQFHHFQANYEHIATLQSHLPPDTYSSRRIRRKYGETYGQRDHHRDAAIKSAMQWLRSEGVDTVYVGDLSDVLDTHWCAEVNTKTHNYWSHGQVTEKLDETGTLAGVNVEEVSEAGTSSQCPCCGSDDVCRDGDELSCRECSVESHADIVGAALILEGEADVAVSEWFESESVRPMARPAPRRAERCRDGDQYTVTYLQWDDHEWTPLLSESVGTLGSFDQRGVSKPASSKEATAGCVANEGIPRL

SEQ ID NO: 46335 - protein, 268 aa, unknown
  TnpB Polypeptide
VSIVVDTDDEDYPEKPDPADIEPEDTVGVDLGILSFTHDTDQLAVNPPDVTDDVHRTRRCHQRLSRKEHGSANWEDARQDLAKSYETLRRKFKDFREKLASDYTQAFDAVFLEDLDVRGLLRLPSNGRNIMLMSWRETINTFERHGDKNACHVITVPPEGTTKRCAYCSTEVEKPLWVREHACPSCGFETDRDQNAAFEVQQLGLEELGVQYALDELLGLGESDERPAETGLPADTFEWDYHEVSAKTVIETGTPLREGGSHGSGDPW

SEQ ID NO: 46336 - protein, 433 aa, unknown
  TnpB Polypeptide
VEPTFKYRARPETDEDEESALYQINLNREVYNHALTQYYNPAPEHDKPTYTTLQNKLPEWKREYPTWSNAHSKALQMAVRRIYDAQDALDELEERGHNVGDLKWKNPHNYRSVTYNQSGFNVDSNTGQDGHATLWLSEIGNFDLEYHRPLPDDADIKQVILKQEKSGKWFASIVVDNEPDYPEPPEPSTIDVEDTVGIDLGIISFTHDSNGIAVTPPEFSDDIERIDKRHRELSRKEHGSNNWEKARRRLAEAYEDLHNKFKDFREKLARAYTREYNAVFLEDLNTRGLLRLSSKGRNIALMSWYETIQTFKRHGRKNGCHVITVPPEGTTKRCAKCSVETAKPLWVREHSCPACGFEADRDRNAAFEVQKLGLEELGIDFSIDVLLGLGESEETPVETVAAVDTLDVSASHVVETGSLPSRDAGRPASPHAG

SEQ ID NO: 46337 - protein, 576 aa, unknown
  TnpB Polypeptide
MSSTHLSLPLRLPDEDRERYDRLDTLTTQTANPLIEQYWTPYHLTEINDSSYQAWKYFDEHEAFDEFDIYLPSRYKRCLLQKVGETLRSHADKREVFQTIKPLLPDHKIRRIHTRRIKERLWDSDEYLSSGYIELLIEQLNAYYDVHGEYPESYFDFQDCPEYSSGVLPYSADDGPTSGQAVKYNYDESTHQVTIELKTPDTLEPETYGDWTWTEYTLDGYEAFHELVERGSLSAPSFQPNTSKRGDDYHELSFPVEVEHADNPDDVDTVLAIDSGLRKDATAVVVDEEGEQLSTPYFIQNTERERMRNLNRERNQLNAKLADLRRQGCNHTDQFKHIQSEYERVNNKIRHKREQLVHDIANQILALALVYDVGAIVHEDLRSLSSPRGEGQLSWELSSWARREIIENIEYRADIAGIHVERVYAGNTSRSCPRCGSTGHTTKSPDHYFEVWHGGHFRCDNTRCGFQGDRDYVGAVNVARVFFSETDLLDSDFTSSYTGDCEIELASRSAGSRPTFGTSLIAYTGQSRVTAGGGSAFIAPAVTPTGTKNAVSSKSSVSSPATHSYSLFVRDAAVCC

SEQ ID NO: 46338 - protein, 172 aa, unknown
  TnpB Polypeptide
VARAHRKVRHARSDFLHRASTGLVCQHDVIAIEDLAVRSMVRNRHLARAISGCGWGEFRRQLEYKCQRYGRELVVIDRWYPSSRICSECGHLLAELSLSTRQWSCPCCGARHDRDVNAAKNILAAGRAVARGSPGGACGAEVRHTGSSRVHSAANQEPRPARAGIPVLHGGE

SEQ ID NO: 46339 - protein, 375 aa, unknown
  TnpB Polypeptide
MGRPKDERKYHTAFDQINELTDLRAEVEWIADVPRNVLTQVLVELDRAWQRCFKGLGKRPLFKRKGRNQAPLIEPHSKLFRVQGESVVFPKLGAIPAVIHRAIEGKAKTCAIVRDGDAWFACIACEVELPEPTPSTKPAVAIDLGVVNLIADSNGRTVPNPRPFEQNRRRLARGQRKVARRKKGSKNQHKARTKVARLQRKVRRQRDHILHVESNHYAKNHGTVIVEALKVRSMTRSAKGTPEEPGTNVVQKAGLNRTILDGGWSRFVNFVRYKVLPEGGSVVEVPAAYSSQTCAVCGVIDEASRRSQSKFECVVCGHKDHADTNAAKVLLSRGSHGGAGCGGSAVGRPAKQQLRVVRRGTRSNVEAKASAFRPG

SEQ ID NO: 46340 - protein, 347 aa, unknown
  TnpB Polypeptide
MLKAYKYRLLPNTQQAEYIRRTIGCARFVYNGLLADYKQQLTHYNETKADEDKPKLKLVTALKQDNDFLNEADSLALMNGRANLEKALKNFFDSRKGKRKGKHVGFPTPHKKTKCRWSYTTNNQGGNIRVENTMICLPKVKWVKLKQHRELQGEIRSVTVSLERNGEFYVSILCNIEQIQRQKQISGSLRVVGLDMSYSDFAVDSENTYDDTKPKYVRQYRVNEKKRARLNRSMPRKQKGSSNRNKARIILANMDGHIANCRKDFAHKMSKHYASNYDVIVIEDINMQDQAKSKLRGHGKSANDLGWGMFKTFLKYKCEEYGSLLVIADKWFPSSKTCNHCGPLIKS

SEQ ID NO: 46341 - protein, 404 aa, unknown
  TnpB Polypeptide
MIRAHKIRLHPTREQANYFARAAGTSRFVWNWALAEWNRQYAAGEKPTALKLKKQFNQIRREHFPWTWEVTKNASDQPFLDLGKAWTAFFAGKASRPRFKSKKRSHSSFYLANDQFELGDFRMWIPKLGWVNLAENLRFQGRIIGARVTKVASWWFVSIQVEMPDGRPVNTNPPVGVDVGINRLATLSDSTVFENQKPLRNALKKLAHAQRSLSRKQPGSKNREKARAKVARCYYKIACVRDDVLHKLTTTIAKTYGLVGIENLHVKGLLRNHCLALSLSDAALGRLLTLLETKMLAAGGQVIKVDRYFPSSKRCSHCHFVNPDLTLADRIYVCSNPICGFTSDRDLNAALNMLQEALRLWGELRVVLRTGSEQTEKMPVGGEVRPQGAITLWLSPMNQEQRKV

SEQ ID NO: 46342 - protein, 436 aa, Cyanobacteria sp.
MLTMNYTFRIYPDAVQQTELIEWLETCRGVYNYALRELKDWLNSRKCQIDRCPLDKEYIIPANAPFPSYQLQQNHLPKAKKQFPHLGKVHSQVLQTTVRRLHDTWEAFQKRGHGFPRFKKFGQFKSFVFPQFKAHPINGATLKLPKIGEVTINLHRPIPDGFKVKQVRIVSKVRHTQWYAVVTIESDVSVSDAPVHGRAIGIDLGLERFLTASDGSSEERPKFFKSMQSKLKLLQRKAAKKQKGSNNREKAQTKVARMHHRINNRRKDFHLKAAHKLCDQAQTIFAEDLNAKGLTRGMLRKDCVDAAFGQFISLLEWVCFKRGVYFAKVNPNGTSHTCPACLAAVRKDLGVREHHCPECGYRVHRDHAAAEMVLIRGLESVVAQGLWGTETACQVGLSGVYDLDKWRGAGILKSDRGCARALPLGERREDVTKFVK

SEQ ID NO: 46343 - protein, 533 aa, unknown
  TnpB Polypeptide
MPLVNRSVKRHAALGLTRAKHDELRELARRSTRARFLFVALYWHPRFLSAIQQSPRNLIEEHRRAGTLGTHGLTVHQTEMALKEALWILRVSWGRCLQVARKRIYQNPEMGDRKRRWQFFVMRWPALLEACLLGQTVHLSRDWAMGLDERRLSGDLRRLIFRSRGRRPRPGKNLWFEADTNLYRTFTRPEDRRFRGAWLAITGLEKGKRICVPLAGRTLDDFRPRTSKRKSLPTLHVEVGDRVVFHLRERVRCGEPAGSLEAGIDKGYSTLLTVSVGDPRVAEGYGVGAADLIGPIAEAAFRRRKARQRLMALERSLRNADSAKARRIRRRNLGRTRSARASRRDRAQLVQQIGLALNQLFLAHPDLSVLHVEHLRFGGSKFSRPMRRRLARWLKGYLQRSLEYKAQLYGVRLNVVNASWTSLTCPRCGYPSRNNRSGERFVCGSCRYTGGADAVAATNVLTRGSDREITRYMRKERVEQILVNRWRSALTGGAWDSSVESDGLSARSREKLAVSTAGPAFRSQNLGATQSPQ

SEQ ID NO: 46344 - protein, 442 aa, unknown
  TnpB Polypeptide
MITISHKIELVPNNKQKSYFRKAFGCARLAYNWGLAEWQRRYKEGQKVDAYRLKKSFNAIKRDEFPFVLEVTKYATQQPFLNLGKALKKFFEDLKKGIVSYPNFKKKKDNEGSFYIGGDQVSLSYTNRNSKAFKQIIHNEKQKHQYLKIPNLGWVKMTERLRFVGKVNGVVISQQGSKFFASFSVQVTDDEYRRTHKNAVKRNEDLITGIDLGIKFALMLSDGIAVKNPKPLKKNIRKIKRINKQLSKRTHAKTKQERLEGKRKSNNYRKLSVSLYNVQRKVANIRRDFIHKVTTILTTHYTYIAMEDLNVKGMMRNHRIAQCVSDVAFGELSRQFIYKSALNGTNILKADRFYPSSKKCVKCGYIKKDLKLSNRVYHCDICGAVMDRDYNASLNLLSLIIEKQIGADYPESTPDDLTALLSRFKKNGIATIKVDTGRQHKL

SEQ ID NO: 46345 - protein, 395 aa, unknown
  TnpB Polypeptide
MKLVEKHIVKDNRFEDICLKSGLLYNYVLYNVRQGIFNEEYLKEYEFSTKLCKENQFDFRNLPSAISQQVVAQVFSNIKGWIKSKKEFEKNPSKFRSKPKLPKYKKGKKQNMVVFTTSACRVKKDGCIHFIKNIISPIKTKIGDNKLCQVRIIPQATCYVVEVIYEKKEQDLNLNKDNVLSIDLGLNNLCSCVNNVDKQPFIVNGRIMKSFNQWYNKRKAKLMSFAGDKGTSKRLRQLNNYRNFWIEDHIHKVSRFVINYCVDNNIGSLVVGLNKGWKQEINLEKKANQKFVEIPFSKFVDKISYKCKLVGISFYLSEESYTSKVDHLVFEELEKHDVYLGKRKRRGLFQSSVNKLINADINGAIGIGRKVFGDSYVNRVIDSGLAFNPIKVNIV

SEQ ID NO: 46346 - protein, 397 aa, Sporolactobacillus sp.
MVTKGLKLRIYPNKQQRQQLAQNFGCTRFVWNQMLAMLNERHENSPQASFLTAYALNHLLPLLKKEHPFLKEAESTSLQVTNQHLIEAFHAFFRKEKGHPKFKAKHAFKQSYTSKFVNGNIQPVGDHGIRLPKLGILRFKAGQRIPETIKQVTLSRTPTGKYFAVLTVEGENQAFPKTCQTIGCDLGVADLLVGSVEDLRWPTTRFDQGLAHKLRIWQRKLARRQQLAKKAITWDRHLKVPVPRTMDHFKNVARARLQVARIQEKIANQRADKLHKLTTQLVKAYDRIALENLKTKNLLRNHTLARAIANQAWGELRRLLTYKCAWYGKELVLVNPYKTSQLCSTCGHDDGKKALAIREWTCPQCGTHHDRDVNAAKNIERLALVKQTVCGLGTSPG

SEQ ID NO: 46347 - protein, 386 aa, Sporolactobacillus sp.
MVTKGLKLRIYPNQQQRQQLAQNFGCTRFVWNQMLAMLNERQENNPKASFLHVYELNNLLPQLKKEHPFLKDAESTSLQMVNKYLADAFIAFFKTEKKHPKFKTKRFFRQSYTSKCVNGNIQPVGRHGIRLPKLGILRFKAGQRIPETIKQVSLSRTPTGKYFAVLTVEGENQAFPKTGKTIGYDLGVKDLLVGSVEDLRWPTTRFDQGLARKLRLWQRTLARRQRLAKKAIAWDHHQKLPVPRTLADFKNVAKARLQVALIHEKIANQRADKLHKLTTQLVKTYDRIALENLKTKNLLRNHTLARAIANQAWGELRRLLTYKCAWYGKELKLVNPYKTSQLCSTCGHDDGKKALAIREWTCPQCGTHHDRDVNAAINIKQLAFGR

SEQ ID NO: 46348 - protein, 385 aa, Kocuria sp.
MVGSMTKRTYKYRFYPTAEQASFLMRTFGCVRVVYNKALEERTRAWATERKTLDYADTSALLTQWKRTEEYKWLSEVSSVPLQQTLRHLQKAFMGFWAKRTGYPKYKSRRASRHSAEYTASAFRWCNGELTLAKMSDPLNIVWSRPLPEHAVPSTVTVSRDRAGRWHVCLLTATKVASFPEARSAVGVDMGLKSFAVLSTGEKIANPRHTRKESARVARVRREMARRQKGSANHGKTRLKVARIEARIADRRRDFLHNVSTRLIRENQTVVIEDLPTAAMSAAGGRRKAGLNRGIRDASWTEFRSMLEYKARWYGRNVVVIDRWFPSTQLCSACGTAAGRMPLNVRFWTCKCGATHDRDINAARNILAAGLAVAVCGDGRSLAHA

SEQ ID NO: 46349 - protein, 395 aa, Symploca sp.
MLVLEAKLKGKQYQYNCLDEAIRTALFIRNKALRHWMDNKNIGKNDLQKLCAVLAKEFGFAKKLNSMARQASADRAWLAIKRFYDNCQTNKPGKKGFPRFKKRGHSVEYKTSGWQLYADKKHIIFTDGFKAGKFKLVGTRDLSFYSVKQIKRVRIVKRADGYYCQFCVDVERKVPHQHCGRQVGIDVGLEFFYTDSNGNTVDNPRLLRKAEKSLKRKQRRVSQREKGSSNRRKAVQKLAKKHLKVSRQRKDFAVKTARALVQSNDLVVYVSEAGRSPDLQVKNMVKNHHLAKSISDASWSLFTNWIDYYAKVFDIWAIAVAPHYTSTDCSVCGTRVKKSLSTRTHRCHSCGTVMHRDHNAAKLILLKGIQSTAGHSVSKACGQNNLCLGGETPLI

SEQ ID NO: 46350 - protein, 241 aa, Borreliella sp.
LALHRNIKSNEVIKNVVVEKDTDNKYYISVAVECLDVKNNDKTKDNKKEVVGIDMSMRHFLVSSEGEKINHPKYLLKNESKLKKYQRKLSKKQKGSRNRAKSRLRVAKLHGKISNQRKDFLHKLSYYFVANYKNMVIENLSIKGMQKGMFGKSVNNLGWYEFVRQLSYKSEWYGSHFHKADRYFPSSKLCNNCGIKNTTLKLSDTRWTCSGCNTLHDRDINAAALNLKNYYKEIKTKAGTA

SEQ ID NO: 46351 - protein, 395 aa, Coleofasciculus sp.
MYAIKLQLKLNNRERSLMAQHAGFSRFVYNYGLALYKQVMDIKGGVTKKISAIRKVLTNFTKKKPEFIWMNELSSRVYQNAFIALKNALTRFFKGLGEFPKFKRKRDKHSFTVDSSNGVVTVNTGNTIKIPTLGTFRLHESVPFTCASQTFTVSRQADKWYVSFAIHAEKLPLNQHSVEKIGIDIGVKTFATFSDGTTVKAPASLLGAKIKLAKLQWRNRNKQLGDKPKGIPASNNAKKYFLQSAKLHAHIANIREDFLQKLTTWISQTYKVIRIEDLNISGMMANHKLADAIGNLGFYEFRRQLTYKQPMFDTLVELVDRWFPSSKSCSECGHVQAMKLSDRIFHCQGCASVKCRDFNASVNLKNAPPEKVRAACSELNDCGQEAADSPGGSSK

SEQ ID NO: 46352 - protein, 410 aa, Lyngbya sp.
MRHQAVKVRLYPTTEQQEILAQHFGCARWWWNRALNLCIETYQATGKSLSQSALNKFLPKLKKQEDTEWLSECYSQVLQATTLNLVTAYRNFFERRAKYPRFKAKKNKQSIQYPQSVKVVDGCLKFPGRVGVVKAKIHRPIEETIKTVTISMMPSGKYFASVLMELEGDKPPTNTDGKVAGIDLGLKDFAIVNDGVKTSKYANPRHLAKPERNLKRKQRKLARKEKGSKSRDKARKLVARVHERVRNVRQDYLHKLSRKLVDENQVIVVESLNTKGMVRNHKLAKAISDVGWGMFVNFLSYKLEKEGKVLVEIDRWFPSSKLCSNCHYQVSEMPLEVRSWTCPSCGIHHDRDGNASANIRAEGIRILSVLGTRTAAGGGDVSPKLGRKSKLTQSPVKSEAHAIPDRVSDG

SEQ ID NO: 46353 - protein, 399 aa, unknown
  TnpB Polypeptide
MPPHRNKRLGAWQTPFEEVALIQTTTHIKAFKYRLRPTKSQEAALTEQLRLCRQLYNGALEERIGAYKKAKKTISGYDQMKYLTEIKATLPEYRGVYSQVLQDVLKRLDRTYQSFFRRVKQGAKKVGFPRFKGAGWYDSFTYPQTGFSVAGDVAYFSKIGNIRLRLSRPLEGKVRTATITRDCGEWYVSYACEVETRPLPATGNSVGVDVGTTWFAVTSDGEFVENPRHFQNSMKKLRLVQRSLSRKKRGSSSRKKVKVQVAKLHRKVSRQRLDFHHKTAVKLIKENDLIAHEDLNVGGLSRGNLARGIHDVGWSQFFSLLSQKAASAARTVIRVDPRYTSQACFQCGHTCRANRVSQSRFVCVNCGHRENADVNAARNILGRAVPLSVNVGISGPCVA

SEQ ID NO: 46354 - protein, 334 aa, unknown
  TnpB Polypeptide
MTGLPDTPYMKAVRSQTVLYADVVYTYLKRIEFSAGFHYYVIITLRGEAPKNFHKCNHKNRTGVDFGTSSIATSSNNVLHLEELAPLSDRYERQIRHLQNLADRSMRLHNPENYNSNGTVKKGKHHWELTKRCRKLKRMIRVLYRKQSAYVRDSHRAFINTLLQESSEFILEPMEFAGLQKKAKTTERSDKLSTVTAKDGTVKKIHKFKRKKRYGRSIKNRSPGLMQSELKRKAEQYDIPYFEINRTAYKASQLHHDTGEYIKPKLSERFKVIDGHKVQRDLYSAFLICNTSSSLTIPDFEICNSSFPRFVEIHNTLINNMKKRGFSMKQCFGF

SEQ ID NO: 46355 - protein, 427 aa, Thioclava sp.
MQTIRGHVYTLKPSSEQEALLAQTAGVVRLIYNLAREQRRTWGRRPYAGGAHRNLGAMSMSGELSALRASEPWIKAVSQTAQIQALIDLDRAYANFFEGRAGYPRARQKWRDDSFRQAGREITVRRLNAKWSEVRIPKIGWVRYRDTRPLPAKKDGAADIRNATISRRSGGGWQISIAVRYEIEERPIPAGAVGVDRGVAVPFALSTGEMVHLPKAMRSRQAAQRRAQKVLSRRKRGSARYAKARARLSALKARDARARAHVAHVLSWRLVKDFGLIAIENLKIANMTRSARGTIEEPGSNVAQKAGLNRSILNVGWYAFERMLSYKLEETGGVLSKVPAAYTSQTCAACGHVDARSRESQALFACTACGVTTNADINAAKNILARALARDEDRRGNTPLLDVEASTLAACEASTRFRSKGLNAALA

SEQ ID NO: 46356 - protein, 419 aa, unknown
  TnpB Polypeptide
MGERLLRRDSRARIERDGQELHPASRGGRVVTTLTKTLELKLVEPNAHKRRKLRETREAYQQGASRRLRRWLYHTDRSERRGGQLQAEWIRKECAQEVRPATHDDVQRRRTSRCPPRPFHERRATTRPQARERYRVVRQNPAPRGLPPLDASTTESRTTDWLEALNAGDATMGESRLFERDGTWYLHVTATRDAEGGSEVSDEERTPIGVDIGEASLVTVCHRDDHGCPTAPELWADEGKTVRRLRKTYFTATRRLQTRGSERIAESFGDDLWNQIDDVFHRVTREVVDYAESVKNPVLVLENLTYIRESMDYGEYMNRRLHGWGFAKLHAQIRYKAVEKGIPVKTVNPRNTSKECHACGEVGYRPQQATFKCTNDACWMGEYQADVNGAVNIADRYLSGESRFREHENDDDSVEDGGV

SEQ ID NO: 46357 - protein, 385 aa, Actinomadura sp.
VKLVVRVKLLPDARQAVALAATLRVVNEHANRVSQVAFEHGLRREYQLRKHTYAGLKASGLGAQAAQHTIKKVCDAYTTLRANLNAGNYGEPGSKRWRKAESKPVVFRPDAAQPFDDRCLSWQYDAGTVSIWTVAGRMRDIAFTGSAEQVKTLREYRKGESDLIEREGVFYLYAVCEVPQAEQYEPAGFIGVDLGIANIATTSSGYRAAGRGLNRHRKRQQDLRAKLQAKGTKSARRRLKARRRKEQRHAANINHIISKKVVTEAERTSSGIALEDLGGIRERGRLRKPQRVTLHSWAFHQLGSFVEYKARRAGVPLVYVDPAYTSQTCADCHHVDRANRVDQATFICRGCGVVAHADRNASRNIAARGETAWAAGRESRVPATG

SEQ ID NO: 46358 - protein, 387 aa, Escherichia sp.
VKRLQAFKFQLRPGGQQECEMRRFAGACRFVFNRALARQNENHEVGNKYIPYGKMASWLVEWKNATETQWLKDAPSQPLQQSLKDLERAYKNFFQNRAAFPRFKKRGQNDVFRYPQGVKLDQENSRIFLPKLGWMRYRNSRQVTGVVKNVTVSQSCGKWYISIQTESEVSTPVHPSASMVGLDAGVAKLATLSDGTVFEPVNSFQKNQKKLARLQRQLSRKVKFSNNWQKQKRKIQRLHSCIANIRRDYLHKVTTTVSKNHAMIVIEDLKVSNMSKSAAGTVSQPGRNVRAKSGLNRSILDQGWYEMRRQLAYKQLWRGGQVLAVPPAYTSQRCACCGHTAKENRLSQSKFRCQVCGYTANADVNGARNILAAGHAVLACGGCQQTG

SEQ ID NO: 46359 - protein, 589 aa, unknown
  TnpB Polypeptide
MEITRTINANKRYYIDENLIINPESLVNTEYKFNDMKIQMYNLLYDKKYKGSGTLTEETYSKWCKDTFGTNDYYNCAVYTCASGMISSQNELNKMYMKTKKSDLDARDAKIASTIEQIGKKQAIKDSLVAYAKAQKWKTPYPGCQTKMTGKSVTLPGDKKVDVDTYERNIEADIRRLKSRLRLLISARNRAQDKLDCLKANPPKRIIFGSKKIYSEKDSEDTNIETWKRKFFNKRHASMSLPGRHTSKNCNFLARRASAADFATKKELYNHKEALIVTCMDGKETIFLDFQLARDNNLWIDALNVKAEDRKPVCYNFQLKCDENGRLYFIPSITIVLENVYCNESLEDGCVSIDLNYDHVALTDIDKYGNRISGEVLRFNPENKTSGQISDEIGRIMSKVGKYCEDRKKPLVMEDIDTTISKHGMRYGSKKGNRHASVFAYKKMESCIENQSYRRSFGIIKINPAYTSQIGKILYMRKLGISIHEAASYVIGLKGMGLRSKLIPEEKITVRLTDSLKEELANGEDIYGLMKVWKYISTKLSGIYTHSFYRPIPYEYEKGHELTKSGKPRKLKSLSAIATEMKGWTARNY

SEQ ID NO: 46360 - protein, 423 aa, unknown
  TnpB Polypeptide
MQLTEKIRIFPTPEQEEVLWHLSEQCRLIYNFALAERRKEWELNNLKCSFDVFPWGKPKYEIKYKKQQNDLPAIKEKYPRYSVVYSKVLQMVLRGLDGDYESFIQQRVNGDADVHPPGFKGKSFFTTMMYNQSGFKIKDGKISLSHFYNEVPLVFELLRNYKRVYQVTVFQKDEKYYLGIVHEVPEKPYVDNRLYQAIDLGITKTITAVNTESKFYEATNPRPDKYWNPKVDELQSRRDHCIKGSRHWHRLDRAKNKLIRKCSNQIKDIQHKLTRKMVDNTRANTIIIGDLDVKEMAQSKKTKLPKKAKKSLNRSTQNNGYLSQFVRFLTYKAALIGKKVIEIDERGTSKRCYVCGKTHDMPLWKRTMECDCGNVIDRDRNSSIYIMLRFLSQNAMWTGYQLFVGNLRQTGLMLPKQAPQAYS

SEQ ID NO: 46361 - protein, 360 aa, unknown
  TnpB Polypeptide
LQERKDAYKLQKKSITYNQQANQLPEIKEIRPEYKDIHSQVLQDTLRRVDKAMQNFFRRVKNGKKPGYPRFKGYNRFDSFTYPQVGFALDAEGKHISLSKIGNIKVKLHRKIEGKMKTCTVKREIDHWYIVLSCEIEDTKQLPDNIEVVGIDMGVTHFATLSTGETIENPRQFRRAEKRLEKLQQKLAKKKKGSHRRGKAKKAVAKLHRKIKNQRKDFLHKQSRKLVNAYGTVVFEKLQTANITRRPKPKRDDKTGEYLPNGATAKAGLNKSILDAGWYQFQQYCTYKAESAGRAVLFVSPNYTSQACSGCGQIRKKTLAERWHSCECGTELDRDHNAAINILRLGSSQQVTISVEAPCL

SEQ ID NO: 46362 - protein, 370 aa, unknown
  TnpB Polypeptide
VKTVEKAYKYRIYPNKKQKELIHKTFGCTRFVYNTYLAKRIEKYEKDKTTFTYIQCANDMKNLKTELEWLKEVDSTALQSSLKDLDFAYQKFFKEHAGYPKFKSKKTHKYSYKSKCTNGNIKYSDKYIKLPKLGMVKTRNKLIPQGRILNATVSQESSGKYYVSLCCTDVDIKPLEKTRNSIGIDLGIKEFCITSDEEMIENPKYLKKSLDKLAKLQRKLSRKSKDGSNRNKARIKVAKLQEYIKNQRRDFLQKLSTEIIKNNDIICLEDLQVSNMIKNHKLARSIADVSWYEFVRQLEYKANWYGRNVIKVDKFFASSQTCNVCGYVNKKTKNLNVREWDCPCCHIHHDRDVNAAINILNEGLKLLEVI

SEQ ID NO: 46363 - protein, 463 aa, Anaerobacillus sp.
VIFNRKIKLITTKEQELQLDGQSKMCNWLYNQLFQLVEEDYKNGRQEKLLNGRNLRNKVPKIKAQSPFLYKVHSSPLKNTALRLKEAYDRFFDKKLDNQKPKFRSWKKKWFSLFYDEPNKGFKLIDEGKLSITFGKLSVEEHQELKKKDKKVKKQLSTVVTLVEPLALGENEKVKTLRITKDIGGYYAIFTIENSKGIEMVKENSYIVFDPNHKNLAVGIDHKGRSYELKALSSTLKYWDKRIDQIKSKRDKCERFARLVTTPNTQYWKPSKRWNYLNRALERAELTRREQIKQVLYSYAHYFSKKYDHILIGDYVPTPDVAKHGSMKRAMLNQTPIGQFRKILEWVQEKNRKYYTKVDETSTTKECCVCGHHEKKEPDVRVFTCKSCETTMYRDMNSVVNIGKKEGKLLPRLGYVGVKSPTYTVWWDWKRQSIVRGKYRQLASVNESLGEIKRTLRLKKSSS

SEQ ID NO: 46364 - protein, 379 aa, Methanosarcina sp.
MLLKSIIPCVVKAFKFRLYPTTAQAVQLNQHIGSCRFVYNWALDQKIKTYEQTGKSISRFDLNKLIPTLKASNEWLGEVNSQSLQGMTKQVESAFTRFFRGKTGFPKFKSKKNPIQSFPVPQHYSVDFEKNTIKLPKIEPIKAVFHRKFEGELKTATVSRTCKGHYYISILVEDGKELPVKEAFAESTTIGIDVGIKDFAVLSNGEKIENPKYLKNSLKRLKVLQKRVSKKQKGSKNRAKAKQRLAVLHDKITNQRNDFQNKLSFKLISENQAVALETLNVKGMVKNHHLAQSISDSAWSSFVTKLEYKAEWFGKTILRIGQFEPSSKLCSVCGYHNKELQLKDREWTCPDCKTKHDRDINAAINIKKFALVDQNLIGL

SEQ ID NO: 46365 - protein, 434 aa, unknown
  TnpB Polypeptide
LVTKTKWAWIANTQCLPVRKSLASAIDQWYHRQVLRRQAYRYRLTPTTAQATVFQQFLGCSRLVWNAILAENEYRFEQGDPLPLKLGAFCERLNMLKTRLPFLREVHSQPLQQTLRDLARAYQSAFDPKLSAEMPTFKKKRNGGGFRFPQGFKVERSGVYLPKIGWVSFRVSKRTAKRKFDGKVKNVTVRLESGRWFVSLQVEREVAEPVHPNNGSGVGVDLGIARFAALSNRAFFDGANAFKKYERKLAILQRRFARKVKFSANWKKAKARITAVHSRIANIRKDQLHKASATISKKHAVVVLEDLAITNMSASAKGTVDEPGTNVAAKSGLNRRIMDQGWGEFRRQLGYKLAWNGGTLLLVDPRNTSRTCNACGHVSAENRKTQAIFVCVECGYASNADTNAAKNIFGRAGLARIACGELQDSAKQEALCLA

SEQ ID NO: 46366 - protein, 378 aa, Bacillus sp.
MEVNQIMMNKAYKFRIYPNQAQAILINKTIGCSRFVFNHFLSLWDQAYKETGKGLTYGTCSAKLPAMKKELVWLKEVDSIAIQSSVRNLADAYTRFFKKQNSAPRFKSKKNNVQSYTTKQTNENIAVVGNKIKLPKLGLVRFAKSREVEGRIVNATVRRNPSGRYFVSLLVETEVQELPKTHSYIGIDVGLKDFAILSDGTHYENPKFFRSLEDKLAKAQRVLSRRMKGSSRWNKQRVKVARIHEYISNTRKDYLDKISTEIIKNHDVIGIEDLQVSNMLKNHKLAKAISKVSWSQFRSMLEYKAKWYGKQVIVVSKTFASSQLCSCCGYQNKDVKNLNLREWDCPSCGTNHDRDINASLNLKNEAIRLLTASTAGLA

SEQ ID NO: 46367 - protein, 378 aa, unknown
  TnpB Polypeptide
MQLSETVKLYMTKEQKALVVMAMNEYINTVNSLVCVAVNGVSISKYTTADVNAYLPSALTNQCIRDAKSIISKYNKECHKVSVKNKKLTKQKSAGIVKKPKIPVLKRPCCYINNQNFKIKNACIEFPVLINGKSKRISIRSSITDKQKAIFVNSRLGTMRIVYKGNKIVAQIVYEVAEPKYSEDGNVMGIDLGIKCPAVSYISDSSVKFYGNGRNNKYMRRHYKYLRRKLQKAKHMNTVKRINNKEQRIMKDIDHKLSHSIIETAAAHNVKVIKLERLANIRSTTRTSRKNNHSLHTWSFYRLAQYIEYKARLEGIKVEYVNPAYTSQTCPVCGHVHHANDRNYTCKCGFHIHRDLLGAMNICNSTEYVGDSNVRHTA

SEQ ID NO: 46368 - protein, 545 aa, Streptomyces sp.
VGELREVAAPFVVPGPAGVSIRCGLEGLTGQDEEVLRTVGGLLGSLASRDLKARCAAGLDHDSDQWARRKRVVTGQSSSRWAGSITKATHDQWALARRGQLAHIQHLRTSIDMIAFRLSLPVGAKGSKGSPGGYRSRQEWFAKARRLHLLQDRLERERADREAGRVRVVRGGKKLLRHRHNLQAARLTGTRWRERWEAGRWFLQADGESGKRCGNETIRVTPDGEVSIKLPAPLAGLANAPHGRYVLACRTGFRHRGEQWADRISANGAVAYRIHYDVERDRWYLTASWQNPPVRTMPLEAPRSGGLIGVDTNADHLAAWRLDPHGNPVGEPRRFPYDLSGNAPHRDAQVRHALIRLLHWARRHHLAIAIEDLDFTAEKTREKHGRRKSFRKLISGLPVSTLRARLVAMAAELGIVIVAVDPAYTSKWGAQHWLRPLTSKNRATTRHDAASVAIGRRALGHRIRRRTAPPHTHQSDGCRHRTAQAGHGAQGREESRPRIPGPRTRSDGAECGAKAADQYAQHRSGHTAGHGFWQQDPLPLSLQER

SEQ ID NO: 46369 - protein, 406 aa, Streptomyces sp.
LLRAYKFLLRPTARQTVALGEMLRDHCSLYNGALQERRDAYRHASRTSIKYGDQSAQLKEIRAFDPERQGRWSFSSQQATLRRLDKAFQAFFRRVKAGQKPGYPRFKGVGHFDTVTFPKDGDGCRWDSTPHDPQTRIRFQGIGHVRVHQHRPVRGRVKTISVKREGNRWYAVLSCDDVPAEPLPATGAVVGIDMGTTHFLTTSDGAHIARPRFLDQAADELAEAQRHLATFPKRTRRRTKAHRAAVRRVAKLYARIRRQRLDHAHKTALTLVRDHDVIAHEKLNTAGMTRAPQPKPDPDAPGTFLPNGAAAKAGLNRSILDAGWAQFLTILANKAESAGRLVVAVDARNTSRTCPPGLGGCGHVAKENRVTQAKFACTACGFTAHADHVGATNVLDRAGLALCDAA

SEQ ID NO: 46370 - protein, 575 aa, Streptomyces sp.
MRRRGWLVARKRGRERELRVIAAPFTVAAPCGARIRDRPKDLTAGDVKVLTLVGEHLGHHQRADLAARVRTGNVPARQTGRAGRAGRKKQLTAVSSSRWAGAMTRVSEDQYQLSMRCLIDERAGLRCRIRKIEQRLAVACGHRQGRVRGYADRAERWQKQRHLSKLQARLAVVEQQIDQGRPSVTVGGRRQARARHRLAETGLTEADWRKRWDAARMFLTADGESGAPHGNYSITVDPADGSLTLVLPEPLRYLSNAPRGRYRLSCTVTFHHRRPEWLDRVSAHRAVRYDIVYDPARDRWYLDASWSTSTTAPPSPEEIRASGARLLAVDLNTDHLATIVLDPHGNPISEPHTIPLELTGPTTTRDGRQRAAITRLIALAHEHDCAAIVIENLGFSDARTTGRETMGRGRRGKAFRRTVAQIPTARFRERLRSMACHQGLAVIAVDPAYTSIWGERYWKSPLQQQTKTTVTRHHSAAVAIGRRGLGHRIRRRPGVTAPDQRIGQRRATGQTASLPRPRGTTSPPRTAGTPHQGSKTRPRRSDQLVPLPDLEDRSRGHQAPNSLVCGEITDTGQLP

SEQ ID NO: 46371 - protein, 400 aa, Streptomyces sp.
VNMTEVCVKRAYRYRFYPTDAQAAELSRTFGCVRKVYNLALAARTQAWARQERVNYNATSAMLTAWKKTEELAYLNDVSSVPLQQCLRHLQTAFTNFFGKRAKYPRFKSRKKSRKSAEYTTSGFRFRDGKLLLAKMTEPLDIVWSRPLPEEAKPSTVTVSQDPAGRWFVSILCDDPGIGPLVLTDAAVGIDVGLDHLLTLSTGEKIANPRHERRDRSRLAWTQRRLAKKAKGDGANRRKARRKVARIHARIADRRRDHLHKLTTRLVRENQTLVIEDLTVRNMVKNRSLARAISDAAWSDFRDMLEYKARWYGRDVVAVDRFFPSSRLCSACGTLREKMPLHVRTWTCDCGTAHDRDVNAARNLLAAGLAVTVCGAGVRPQRSTPGGQSAAKQKTSQREP

SEQ ID NO: 46372 - protein, 376 aa, Streptomyces sp.
  misc_feature (376)..(376): Xaa can be any naturally occurring amino acid
VARQVKRAFKYRFYPTDEQAAELSRTFGCVRLVYNKALEERTRAWYGEQRRISYVQSSAALTEWKKTEELAFLCEVSSVPLQQALRHLQTAFGNFFAKRARYPRYKSRKQSRASAEYTRSAFTWRDGTLTLAKMAGSLDIRWSRPLPEGAEPTTVTVSRDRAGRWFVSLLVEDTIAPAPATSAAVGLDAGITSLVTLSTGEKIANRARARVKVARVHARIADRRRDSLHKLTTRLVRENQTVVIEDLTVRNLLKNSRLARAISDAAWANLRMMLEYKCAWYGRELVVIDRWFPSSKLCGNCGTVREKLPLNVREWTCDCGAVHDRDVNAARNILAAGLAASACGDGVRPQRESSRTGRSSVKQETQRATAGILRRX

SEQ ID NO: 46373 - protein, 428 aa, Geoglobus sp.
MYLTQKNHIRCDRRTYKILRILTRLSKNLYNFTLYTVRQYYFNNGKYLPYEQAYHLVKHNENYQLLPSQVAQQTMKVVDRNMRSFFHVLNERKKGNFNRPVSMPGYLPKDGYFVCIFQKDMFKVIGNKIRLSLGRNFAKEFGIRYLEFKLPSTVVGKKIKEVRILPRYKALWFEIEYVYDVEPERVDLDYGQYLAIDLGLGNFATCISTGGTPFIIEGRGLKSFNRWWNRENAKLQSIYDKQGIKMGRKIAWLLRKRKNVINNFMNQAVSHIVKYCLSNRIGNVVIGELKDIKQNINLGRINNQNFQYIPYGLFKQKLKTKCEYYGINYIEVNEAYTSQTCSVCGDINRNNRKHRGLYVCGECGSVLNADVNGALNILKKVAPESVRIGSSGGVNPPVRIRVASFGNQTPHEALSVRARQFTVTNRKG

SEQ ID NO: 46374 - protein, 397 aa, Actinoplanes sp.
VKRVFKYRFYPTDTQAVELSRTFGCVRKVYNLALAARTEAWTLRQERVTYNATSALLTGWKKTEELAFLNEVSCVPLQQGLRHLQAAFTNFFAKRSRYPRFKSKKRSRRSAEYTNSAFRYRDGRLTLAKMTEPLDIVWSRPLPEGASPSTVTVSRDSADRWFVSLLCNDVIPETTATGAVGIDAGLAHLFTLSTGEKMANPQHERADRARLARAQRNLARKEKGSDNRAKARLKVARIHTRIADRRRDHLHKLTTRLVRDNQTIVIEDLTVRNMVKNHTLARAISDAAWRQFRTMLKYKAEWHGRDVVTVDRWFPSSKLCSACGAQAEKMPLNIRQWTCRCGVVHDRDVNAARNILAEGLSVIACGGGVRPQRESSRTGQSPVKQETRRVTAGIPRL

SEQ ID NO: 46375 - protein, 377 aa, unknown
  TnpB Polypeptide
VDIKRAYRFRFYPSPEQESILARTFGCARFAYNHMLRMRSDAWLKEQKRVGYHETSAALTLLKKQPEFVWLNEVSSVPVQQALRHLQTAFVNFFAKRARYPQFKRKDGPQSAEYTTSAFKWDGQTLKLAKMEEPLAIRWSRQLPKAAKVTTVTVSRDASGRYFVSMLCDDVVAAKPAVSAKVGIDLGLSHFAILSTGEKVAAPNTFRKNEAKLAKLQRRLAKKTKGSNRRRKAKLKVAKLHAKIADSRRDFLHKLSTRLINENQVIAVESLSVSNMQKNRRLSKSIADASWSEFLRQLEYKAKWYGRELIGIDRWYPSSKRCSDCGYTAPKMPLNVRQWTCPECGSIHDRDVNAARNVLAAGLAASARREAVSPVSL

SEQ ID NO: 46376 - protein, 312 aa, Bacillus sp.
MKKEFVWLKEVDSIAIQSSVRNLADAYTRFFKKQNSAPRFKSKKNNVQSYTTKQTNENIAVIENKIKLPKLGLVRFAKSSEVKGRIVNATVRRNPSGRYFVSLLVETEVQELPKTNSYIGIDVGLKDFAILSDGRPYKNPKFFRSLEAKLAKAQRVLSRRMKGSSRWNKQRVKVARIHEYISNARKDYLDKISTEIIKNHDVIGIENLQVSNMLKNHKLAKAISEVSWSQFRYMLEYKAKWYGKQVIVVSKTFASSQLCSCCGYQNKDVKNLNLREWDCPSCRTHHDRDINASINIKNEAIRLLTARTAGLA

SEQ ID NO: 46377 - protein, 395 aa, Oligoflexia sp.
MQIAHKIELKTNNVQVTYFKRACGVARFAWNWGLAEWDQQFKSGQKPSGMALKKQFNALKEAEFPWTYEVTKYASQQPFLDLQDAWKRFFKKLGGKPRFKKKGKSHDSFYVGGDQIKLDESKRRIKIPNLGWVKMRESLRFEGKINSVVISRTADRWFASIQVETPISFPRHENQVSVGVDLGVLQLATLSDGVMFQSPKPLQKLLRRLKRLSRKFSKKIKGSGRSKKTAESLARLHMRIANIRRDTLHKVTTTIADNYSHIGIEELHVKGMVRNSKLARAISDVGLGEFRRQLTYKAEWRGSTVVIHSRFFPSSKKCSSCSNVKETLSLSERIYRCECGLTIDRDLNAAMNLNPVPKALREITPAEMTALRRSVHPVFVTSIAETGNQLQLLCG

SEQ ID NO: 46378 - protein, 442 aa, unknown
  TnpB Polypeptide
MKITSSYGVELRKQNIPIRQTLDVYRSAVSYLTEIYEQVWEELERIPETKKRFNEAEHLIHTTKKNQARFDFDIRFPKMPSYLRRASIQHALGSISSYKTRMGMWEKLGQIGGKPKLVHENHAMPVFYRDVMYRENENGKDAAYLKLYDGHDWKWFHVRLSHTDMEYLRKNWSGKKASAPTLERRYRKYFLRFSYTEDVILTKVPIREQIICSVDLGINTDAVCTIMQSDGTVLGRKFINFSSEKDRMYRVLGRISRFQRKHGSVQVKSRWAYAKRLNTELGRKIAGAVTGYAEENHADVIVFEYLEIKGKISGRKKQKLHLWKKRDIQKRCEHQAHRRGMRISRICAWNTSRLAYDGSGTVVRDSGNHSLCTFQNGKRYNCDLSASYNIGARYFIRELLKPLPATERSLLEAKVPSVKRRISCVYADLRELFSEMELLKTA

SEQ ID NO: 46379 - protein, 555 aa, Kibdelosporangium sp.
MAERLERLRPIDTPFVASGPSGVAVRDRLKQLTPADERVLRLIGGHLGRLASLDLKQRCVDGLGHSTDAWAVRKRELTVESSSRWAGSITKATHDQWARARRCQAAHIQALEAGVRILGHRLSLPIGQKGTKRAPGGYRSRREWFHKSRRLASLGTRLEQERADREAGVVHVVRGGKKVARTRHNLDAAGLTEAEWRERWEVERWFLAADGESGKRWGNETIRVTPDGEVSIRLPAPLAYLANAAHGRYVLAARVQFAHRGTEWRDRIEGNQAVAYRIHLDVDRGRWYLTASWQRPAVHTISLETARARGMVGVDFNADHLACFQLDVHGNPIGDPRRFVYDLSGSADHRDAQVRHAITRLLHWATRTGVAAVGIEGLDFTAEKTREKHGRRKRFRQLISGMPTGKLKARLVSMAAEAGLAIVAVDPAYTSKWGAQHWQKPLSTPHRTLSRHDAASIAIGRRALGHPIRRRTTPPRTHQSDGYGHRTVQADRGVRGRDGTRPPATDHAHRSVPPNGTRKREPSTPNTVRGVPVQPMFTDQERCRSLGCRSVVIPS

SEQ ID NO: 46380 - protein, 375 aa, Nostoc sp.
MSPLSILFHLNPYEQTNKQGIRWTGYSVEWLGLKLSGIIDSNDPVLLHGLNSRIKYVRLVRRIINQKTYWYAQLVCEGLAYQKPKNVIGDGIVGIDLGVSTVAIVGDNQTIWQPFAEELTSKQKKIRRLQRKMDRQRRANNPDNFNPNGTVKKGVKRWHTSKRYQKTANKKREIDRKQAGHRKSLHGQLVNQTLALGKTVKTEKINVKAWQQIYGKSIGFKAPSSFQSELVRKAESAGGTVLKFSTRKTALSQTCLCGNRQKKSLSQRVHDCSECGLRMQRDIFSAYLSRYVDPKTETLSIPSARNGWLGMEQSLLDGWRSGSNQSARTATSSKSPINNGSELMSSNPIAREESEPVRANETCYASWNLMSLGMG

SEQ ID NO: 46381 - protein, 468 aa, Chlamydiia sp.
MPQDQALKNIKLPMSPAKTDADTIDGQSRICNWVYNQLLQTAEGLRLDYIQTQNKESARTLYSPRGLRNLLPSLKENNSFIKVVHSSPIKNTALRLSKAIEAHQKSKKGKRKGGEIGWPRFNSWSAHWFSLLYDEPKKGFKVENGVLIISLGRGRDRTQRSLAIPLIGAEALIGKEIRTLRIIKELGVFYAIFTVRVPVPKTKPVAKVIALDPNHKNFTYGADTEKTGIEIEAPMWLKAYDHRTDELRALRDRCQRKSQKIPVVDEHGQHTGKTFWKPSKRWEKRNRVLERVLKKRREQTKTFLFTTAHALYARYDCVGIGDYAPHGDGITTKMRRAMNNRSLIGRFKQVLSWVACKSGKTFLDYDEKGTTRTCHPCGYVVEGGLSPSIRHWKCPACSSENGRDENAAKNGLRKVLRDLSTKSETFVSQMSGSDLVSLVERWVWRVLPGGVIQIPRRQNGELIAAPGN

SEQ ID NO: 46382 - protein, 387 aa, unknown
  TnpB Polypeptide
VILFKGYKTELDPTKQQIDIINKTINACVFVYNFYINYNQELYYTENRHLTGREFSVWLNNYFLVNNNDYSWIKKVSSKAIKQSIENAHKAYRKFLKGEKKFPTEKRKAKMYFVRNSSKSTICCERHKIKIPCLGWVKLKEKGYLPATDKGIVIISGYVSCVLGRYYVSVLVNEDTKNVSLPKTKGIGIDVGIKNYAVLSSGKVYMNINKTERVKKLEKQIITKKRQLSRKYESNKRQKKKKGDATKRNIQKQELRIALLYQKLTRIRHDYFNKVINEIVKDNPEYITVENLNVIKMSQKSSLAKNIYDQSFKYFYKKLRVKCHENNIEFRCVSKYYPSSKKCNRCGKIKKVLLLNERIFKCDCGYENDRDFNASLNLRDTKEYKVL

SEQ ID NO: 46383 - protein, 429 aa, Streptomyces sp.
MPHAQYNRGLRAISCREISAFPSANLLAVAPVLGRKGQGNVHLRNCMYIFANFILLARKANLWSHSCSFAITTGSTRTPRSAARWRVRSAVRVSCGTTACATGRKHTRQSIRLNGNAFSFQDNGTVYVAKVGNIRVKWSRLLPAAPTSLTVTKDSVDRYFMSFVVDTEPDILPQLDTEVGIDLGLSTFAVLSDGTRIHSPKFLRRAERTLKRLQKDLSRKAKGSKNRAKARVRVARQHARVADRRRDWHHKASTQIIRDNQAVYVEDLAVSGLARTRLAKSVHDAGWSAFVNMLEYKAVKHGRYFGKIGRFEPTSQVCSVCGVKDGPKPLHVREWTCAGCGTVHDRDDNASRNTLAAGRADRLNASRSVGKTRTKVPAQRVEAGSHPDGHPTVAGIPGASDRGARQGCVMRSTSSASSSCSRVSRPRST

SEQ ID NO: 46384 - protein, 210 aa, Escherichia sp.
MRRFAGACRFVFNRALARQNENHEAGNKYIPYGKMASWLVEWKNATETQWLKDSPSQPLQQSLKGLERAYKNFFRKRAAFPRFKKRGQNDAFRYPQGVKLDQENSRIFLPKLGWMRYRNSRQVTGVVKNVTVSQSCGTWYISIQTESEVSTPVHPSASMVGLDAGVAKLATLSDGTVFEPVNSFQKNQKTLARLQRQLSRKVKFSNNWQK

SEQ ID NO: 46385 - protein, 423 aa, unknown
  TnpB Polypeptide
MQGTKRCFLSWDERTDFRGNDECLRIFIKDVFSNIFMKTTRAWKFRLYPSKTQQRELTDYLDECKTLWNELLECTKKYYEETGRFPIRKQLYLQTKETPLFSQVAQNVADRLVKSLKGAIARKKAGRKVGFPRFKALERMKSFTYPQFGFRLDERLELSGVGIVSIKKHRQVQGKVKTLTIKKMPSGKWFAVFTTKTETTIPCRKTGPEVGIDVGLEHFACLSDGEVIENPRYLKQAEERLKETHQQLSSKKKGSKNRQKARHRVAIAYETITNRRLDFLHKTSRKLVNSYSFLALENLNVAELAGGYLAKSVLDCSWAEFVSMISYKAEEAGCEVVLVDPAHTSQKCSSCGLIRKKSLAERWHDCPCGASMHRDLNAAINILNRATGGTPGSQACGEETPTSYKHNWQVSSLKQEAHAFRHG

SEQ ID NO: 46386 - protein, 411 aa, unknown
  TnpB Polypeptide
VAKSWFSTKLFTVPNQNLQQTCYKYFTSSLAECPDSGSTLKKSKKVRIYPTTEQKKLMKHWWGVSRFVFNQTIKYLQEPDRKANWKAIKTGIINDLPEWAKEVPYQIKSIAVKDACEAVQNAQRKYQKTGEIQKVKFRSHKDKQQSCYIPKSAISEKGIYHTKLGQIRFTESLPDNFGDSRLVSRNGQYYLAIPHEVQRWESDNQGRIVALDPGVRDFLALFSPNSFGSIGSQDIGKIQRLCYHLDDLISRSTKVNAKTRNRYRKAANRLRNKIRNLVDELHHQVARFLVDNFDVILLPTFEVSEMVLKNSRKIRSKSVRQMLNWSHYRFKQFLKHKAFEMGKLVIDCCEAYTSKTVSWTGELIHNLGGKKVIKSKIDGKKMDRDINGARGIFLRALGDTPSLRDSLRVHC

SEQ ID NO: 46387 - protein, 382 aa, unknown
  TnpB Polypeptide
MYRFRIYPSQKQKLRIINSFKICKAIYNELLETSIKTYKESGKTLRKFDYNKHLTGKYLEIYSQSKQNVSDRVHKAFSNFFRRVKDKSCKKKGFPRFKSRVNSITYPQSGFKLLSDKRLKLSKIGNVPIVLHRVPKGKIKTLTIKQNTAGQWFATFACEVKIPEVKHTSSEKVGLDVGLESYAVLSNGKFIDNPRHILKAEKVLKRLQRRLSRKKKGSVNRRKAKFRLAKQHIKVANQRIDFMHKLSHKLTQSYSFIAVEDLNIKSMLGNHWLAKSISDASWNSFVQMLSYKAVTCGGQLVKVNPRNTSKTCSKCGKIVDMPLSKRTFHCPNCGFVCHRDLNASINILKVGQDLPKLNACEDTVRPSLLKARVVEAGTICGN

SEQ ID NO: 46388 - protein, 201 aa, Exiguobacterium sp.
LKNFAILSDGTVYKNDRHFRTLEKKLAREQRKLSRRQLIAMNKKIKLSESKNYQKQKRKVARIHEKIANKRNDFLHKVSTEIVKNHDVIGIETLQVKNMRQNRKLSKAISEVSWSEFFRLLEYKADWYGKTVVKVGKAFASSQLCSSCGHQHKDVKHLGLREWTCPGCGVHHDRDVNAGLNLKQEAERILASSTVGTTGLA

SEQ ID NO: 46389 - protein, 528 aa, unknown
  TnpB Polypeptide
MPKAKKKKSSSFQKTITKSVFLYGQPNKEKLITLQQMQRSYTDLINRDIELLEKESSVLLQLVKNDKKDPDMRKLEKKLRPEGINSAFCQNAFDAAIVCLSNRLDSIRLDLLSEGMDLFARSKVLFAMSIMRCSKTEMEDRMNAIGKAFHKECAEKLHQMSEREFSYLQMEFQERYASKSLEYRIPKLHSVSVPLDSRLMKIEPSTDTKMPYVITITNPLKGRQRITVPINTSNHSLHKIKSNQMAGTILMQIRKGKLRIAWLYDSSIKQPVTTKVVGVDTGISDCFHTSDGKAIGSMKSILDFYHNEVEPSFAKLSELRNKKRKISHFVRKHKLPEDVRRSLIKKMDRLEHMIRTAKAPYRKKRCYYEQLDHEIKKSVTSYIDSITSDTLTVIEKLDIKEFDKSRRVNGMFSTFARGKLQSKLMEKLNQRGYDFLEVEPDFTSQVCPICSNLTSENRHEKKFCCTACGYQDDADHVGAVNIKKRAEDEELQELCEKDKYNHKNLQNAIKIVYSKRHVAYQKEQAASA

SEQ ID NO: 46390 - protein, 510 aa, unknown
  TnpB Polypeptide
MAKATKTIRQSLIYRPNHASWFAATKALFNQVAAFYFDVIQAHPGILDLSSKDALTALETLTHTTKANPHPVMPLSKAITADIPAMFRRAAIHAALGSAHSFYSHLEKWRKQKEKATARGKKFSVRPPVPPRSWNKSVTLYAGQWKERTAKSIMLKLWTGSSWAWIKCGIQGRSIPDEWEMISPTLVQDGQHWKLHTALEKKFSAPAKVQQQVTRSPETRICSIDLNITKHLAVCTILTVEGTIVATRFIKGGKQLHGLRKRRLGRVAHNRSKTGIIAEGEQDNAALWAKIRALDEDCAHQVSHRIVQFAQCHQASILVFEHLGHFKPEKGKYSKRGNEKRSYWLRGKIFNYTKYKAWNEYGIITCRVSPRNTSRECARCGNLVARYDAASPAEGYTPGAPLVFCAHCGVRGNADRNASIVIGQRLFARYQTSSSQTTSKEKPHTSLPRAERPAKAGGDFGSQDAESRGRPSTDPARHGTGVEQGTAQGEVSWMEETSSGIPHQLRLFDE

SEQ ID NO: 46391 - protein, 383 aa, unknown
  TnpB Polypeptide
MISYKFRLYPNKEQREELDFALEACRQTYNFLLEELKNQIKIDMGTIQHKIVELKDANPELKRVYSKTLQYECYRLFSNLSALRASKKKGNKVGRLRFKGKNWFKTISYNQCGFWFEQKGKKGILELSRIGIIKVNSHRQVKGKIKQITIKRSLNKWFAIIITDAVIKKESGNRILGIDVGINNYLVDSEGNKVEHPKIINKYLRQLKKAQQDLFRKKKGSKNRDRARKSIAKIHEKIENTRIDFLHKLSNSYIRNSKIIVVEDLRLKDMLSSFYNARNIADASWGKFIQFLTYKAENASCKIIKVNPKNTTKTCSKCGHIQDMPIWKRIYKCNRCSTEIDRDYNSAINILNKFLGSERANVENNPSVQIEQGLSMKQEAMAL

SEQ ID NO: 46392 - protein, 335 aa, Rhizobiales sp.
VNFVWNYCCQIDREAASRWKAGRRVKCPSAFDLANLCRGVTKELGIHSDTVDAICRKFADARQACFPKTPHFRSYKRNLDFVPFSNFARPAKLDGGKMTVLGRAYHLWLSRPIPEGGKPKSWEFSTDSRGRWYVNIHVDLPDVPHRAGEAIGIDLGLKDLATLSTGEKIAAPQIYRAEERQLALFQSRGQTARARALSAKIANRRKHFLHVATTNIVDRFAQIYVGDVNAARLKRTNMAKSVSDASWSAFRTMLVYKSRLRGGMCEVVSERYSSQTCSHCGALPEGRPRGIAGLGVRSWHCDDCGSLLDRDANAARNILRTGAERRPPVVGIPVL

SEQ ID NO: 46393 - protein, 402 aa, Escherichia sp.
VKRLQAFKFQLRPGAQQECEMRRFAGACRFVFNRALARQNENHEAGNKYIPYGKMASWLVEWKNATETQWLKDSPSQPLQQSLKDLERAYKNFFRKRAAFPRFKKRGQNDAFRYPQGVKLDQENSRIFLPKLGWMRYRNSRQVTGVVKNVTVSQSCGKWYISIQTESEVSTPVHPSASMIGLDAGVAKLATLSDGTVFGPVNSFQKNQKTLARLQRQLSRKVKFSNNWQKQKRKIQRLHSRIANIRRDYLHKVTTTVSKNHAMIVIEDLKVSNMSKSAAGTVSQPGRNVRAKSGLNRSILDQGWYEMRRQLEYKQLWRGGQVLAVPPAYTSQRCACCGHTAKENRLSQSKFRCQVCGYTANADVNGARNILAAGHAVLACGEMVQSGRPLKQEPTEMIQATA

SEQ ID NO: 46394 - protein, 469 aa, Mycobacterium sp.
  misc_feature (384)..(398): Xaa can be any naturally occurring amino acid
MAKFEIPEGWMVQAFRFTLDPTAEQARALARHFGARRKAYNWTVATLKADIDAWQATGIQTAKPSLRVLRKRWNTVKNDVCVNIETGVVWWPECSKEAYADGIDGAVDAYWNWQNSRSGKRDGKRMGFPRFKKKGRDPDRVTFTTGAMRVEPDRRHLTLPVIGTVRTHENTRRVERLIAKGRSRVLAITVRRNGTRIDASVRVLVQRPQQPKVTDPGSRVGVDVGVRRLATVATADGAVLERVPNPRPLDAALNELRHVCRARSRCTKGSRRYRERTTEISRLHRRVNDVRTHHLHCLTTHLAKTHGRIVVEGLDAAGMLRQQGLSGARARRRGLSDAALGTPRRHLSYKTGWYGSQLVVADRWFPSSKTCHACRHVQDIGWGXXXXXXXXXXXXXXXGNATAVRSRTNVTTTPRSTSHATRNHLASSAQLGPPSSVEPTVRPGLARRVAVKRGREPATRLANNPETGC

SEQ ID NO: 46395 - protein, 155 aa, unknown
  TnpB Polypeptide
LKCSANRERARKNLVRKYEDISNRRSDWFWKLAHNLTNKFDVLCFETLNLAGMQRLWGRKISDLAFGEFLQILEWIAKKKSKQVVYIDRWYPSTKACNACTHVLDDLDLSTRVWRCPFCQSVNGRDENAAKNIQTVGALTVKLGDVRQVMPAVAV

SEQ ID NO: 46396 - protein, 425 aa, unknown
  TnpB Polypeptide
VATVIQAYRFALDPTAIQRRALASHCGAARVAYNWGLALVKTRLDQLQADPSNRVPWTLPDLRREWNRSKQQVAPWWPENSKEAYNSGLDGLSRALENWRDSRRGSRKGRSVGFPRFKKKGRCRDACRFTTGAIKVMSDRKHVQLPRIGVLKTHESTRKLARRLEQGTARILAATISRQADRWYVSFTVEVERAVSARNGSTSVVGVDVGIRHLAVLSNGAPPIPNPRALERSLRALRRVGRELARREPGSRRRYRTRCRLARIHGRAANLRRDAMHKLTTSLATEHGVVVVEQLNIAGMVRNRRLARALSDTGMAELRRQLTYKTTWYGSRLLVADRFYPSSKTCSACGWVKAKLILAERTFTCEACGLGVDRDLNAARNLAKLAQHVAQSGWETRNARGADISPGTFGQAVLKREAGIGSSSR

SEQ ID NO: 46397 - protein, 424 aa, unknown
  TnpB Polypeptide
MKTLKLRIKDKHATQLNRLSGSVNFVWNYVNDLGYKYLQCTGKFLSAYDLNEYTKGSGELLGLHSQTIQAINETHTKSRKQFKKAKLNWRTNNPNSKRKSLGWIPFKKSAIKHPATRQSGKKALKSTLQLSLAKGQKLILDLWDSYNLSLYQINTCELVRGSRNRWYACITVKNYPKQTCGTGSVGIGLGLKDSATTSNGNKLQIKQTLKYAKDLAIAQRAKNKQRVKAIHAKIKNTRLDLIHKFTTQLVRDNALIVVGDVKSNQFNSKKGKLAKSVYDAGWFELKRQLEYKCQQTGCRLEIVSERYTTQTCSCCGDMSSGPKGRAGLAIREWACAECGTWHDSDLMPLRTFLRSGLTVLQKESPNDRKGRKSKGMLIRLTCTNANDLFKRGNKNLTIANLTCPCGVNNSTDDTINHIISTGDF

SEQ ID NO: 46398 - protein, 394 aa, unknown
  TnpB Polypeptide
MRMGVHLSIKAKLVMASSAAQELKSTMEEFNRACNTLSELAFQQDLHRRYDIHHEGYRLIRKETSLPAQHVVNAIAKVSAVYTRDQNKWHQFKLHSSVRYDAKSMTLSQDCQTASLTVCPKGRVTGRLQMSAKMRKQLRQGKLGSAELVYRKGNFYLHISITIPAPEVKQPQGSLGVDLGFSRVAVTSDEKFHTAKNIRHKKACYKRTRRSLQANGSKSAKRALKRVSGRERRFVADTNHCVSKQIVADAKANDQRIVLEDLNGIRETGKAKCVHKWSFAELQQMIRYKAARAGVEVVIVSPRYTSQTCSRCLHLGVRPSQSNFQCRDCGYQINADLNGAKSIAKRHDLMAMGRYFCEYPQKEVNRPGAVRSSEKKRQVRNLKPQAPSTARPRA

SEQ ID NO: 46399 - protein, 286 aa, Okeania sp.
MKSIRTKLKLNNKQKTLMAQHAGYSRWCYNWGLSLWNAAYKTGEKPNIRIIREVFTNHTKPLYPWMKKLSSKVYQYAFRNLGEAFKRFFKGLGKYPKFKKKGRSDSFTIDNSGKLIELNGWNHKLPFIGIVKTYEPIEATTKKITISRQARDWYLSCSYEFHPHNPPLLLPSQEGMGVGDIIGVDLGVKTLATLSDGKVFASVKAYRSLEEKLSRLQYLNRNKIIGSANWKKAQLKIVALHGRVANIRKDALHKLTTYLAKNHGRVVIEDLNVRGMLANHKLAKIS

SEQ ID NO: 46400 - protein, 250 aa, unknown
  TnpB Polypeptide
LQLSKIGFFTLIIHRDFPLERVSRVRVKLYPSGKIYLVFLVVEPEAQKEQPREPRKAVDVDLGIGRLATLSDGGILGNPRPLERSLERIRVLQRNLSRKRFLSKNWLKAKRKLAKEHEYLKDFRRDLFFKLGALLAQEYDVLVLEDLDVQGLIQRGEAKRRMRLYDSSFSEIRRILEWEFRKRGRVVLAVPAFNSSCECFLCGEINRGLTLEDRVFHCPHCGFTLDRDLNASLVLLKRAGWVPPFQCACL

SEQ ID NO: 46401 - protein, 183 aa, Anoxybacillus sp.
MIQTDRRYFSKVDKSNTNGQSINNSADNYKKSKTPSARRRLKKIGQRENRWMQDVNHCISKALVERYGKNTLFVLEDLTGIRQATEKVSVNHRYEMVSWAFYDLRQKIEYKARKHQAKVIAVDPTYTSQTCPKCGHTEKANRNKKTHTFCCQTCQYTSNDDRVGAMNLQRKGIEYIVEVTTNA

SEQ ID NO: 46402 - protein, 435 aa, Saccharomonospora sp.
VVVVVLRRFGRLGQRRDRAAVHRYPVGAGVAVRRSYKFLLRPTSKQQQAMRAMLADHCDLYNAALQERRDAYAHPSKTSVRYGDQSAQLKDIRTADPDGQGRWSFSSQQATLRRLNKAFEAFFRRIRNGDEPGYPRFKGKGHFDTVDFPKDGDGCRWNSTPHDTQVRVRLQGVGHVRVHQHRPVQGRVKTVSVKREANRWFVVLSCDDVPAEPLPATGRAVGIDMGVEHFATTSDGERFANPRHARRAADELAEAQRALDAFPKRVRKSLRTKKHRQSARRVGKLHAKVRRQRLDHHHKTALALVRAHDVIAHEDLNISGMTAAAKPKADSDQPGVFLPNGATAKSGLNRSILDAGWGQFLGILAGKAESAGRHVIRVDARNTSRTCAECGHVAKENRVSQAEFVCGRCGHAANADVNAAINIATRAGLALSDAA

SEQ ID NO: 46403 - protein, 469 aa, unknown
  TnpB Polypeptide
LRPDPQNEDGPLGRAQHLQRRPSTQVRQGPRSPVGRPGARRHRRMTKCATSPVLQGREGYNEFMQRRQAFKFELRPSGWQEQLMSRFAGSCRFVFNKALALQKEHYAQGKKKLSYAGLCKLLTEWRASPETAWLADAPVHPLQQSLKNLDRAYTNFFAKRANFPRFKKKGQRDGFRYPDPKQIKIDQANSRLFLPKLGWLRYRNSREVLGTVKTVTVSRSCDKWYVSIQTEREVKQPIPTGGTVGIDMGIARFATLSDGTFYAPLNTFKQHEVALRKAQQALSRKVKFSKNWRKAKAKVEKIHARIGNTRRDYLHKASTTISQNHAIVYIEDLQVRNLSKSAAGTTNQPGRHVRAKSSLNKAILDQGWFEFRRQLDYKLAWNGGSLIAVPPHNTSRTCPSCRHISASNRRTQAQFRCVECGLKEHADVVAAINIRRAGHARIACEVSGAVRPPAAGTHRSDSSTAVRHP

SEQ ID NO: 46404 - protein, 330 aa, Okeania sp.
LILDSAWSSYFAALKAWQKQPNKFLGKPKIPKYKHKTKGRNILPYPDESIYKKALKKGICHLSMSEIKIPTSQTEIIEARIVPKSSCYLIEIVYEKQEEITNNQQIAGIDLGVNNLIAVTTNQTGISPILIKGRPLKAINTFYNKQRSCLQSQLNSHNQSNSHRLKKLTHKRNCRVENYLHTASKRVIDWCVNHEIGTLIIGHNQTWKQEIKLGKKNNQQFVNIPHYRLIEMLTYKAQLRGIKVIITEESYTSQSSCLDGDNLPKYGDKKPKFSGKRVTRGLYKTRENKLLNADVNGSFNIIRKVIPDVLDQGIKGLPFNPVVVDPLAFD

SEQ ID NO: 46405 - protein, 281 aa, Okeania sp.
VTISRKADGYYLTLSLEEKSVPALSCEVEPTLKNTLGIDMGLKEFLVTSEGESVPIPQYYRSSQQRLKILQKRLSRKKKGSKRWLKALLAVAKQHKKVADKRKDFHFKTANELLSKAEVIAHVDAERGVPEANLNIKGLTKTRLSKSINDAGWGQFLSILNVKAVSAAPPQEANAGQKTIAVNPKNTSQDCSNCGEKVDKELNMRTHCCPHCGIVIDRDLNAAINIKNRAAGHSVLKARACPTGYRGCETRSPHYSACLVWEYVTNLHKNKYSCDYLDKLQ

SEQ ID NO: 46406 - protein, 339 aa, unknown
  TnpB Polypeptide
MERANACCDWISDVAWEEKRFGQFGLHKILYKDARAAFPELSSQVVIRCEAKVSQAYALDKKVKRTFKPLGAIEYDARLLTWYVNKREVSIWVCGGRLRLAFQCGEHQLDLLQGKIGQADLVLIDGVFYLFASCWVEEGKPIDVVGVLGVDLGIVNIATDSDGQIFSGKDIDDNRRKFEHRRRNLQRNGSKSAKRKLKSISGKQSRFQKHTNHRISKAIVRKAQDTNRSIALEELGGIRDRVTVRRKQRARHANWSFYDLRAKIEYKAKRVGIPVVLVDPRNTSKMCSACGHIDSSNRPTQSSFKCVACGFADLADHNAAVNISAKGDVNHPMVSTLMG

SEQ ID NO: 46407 - protein, 365 aa, unknown
  TnpB Polypeptide
MEKAYKLRLYPNKQQQELLTKTFGCQRYVYNYFLDRRITLYKEQGKSLSFAECSKELTTLKKENEWLKEPDKCSLQNAIKDLDMAYKKFFKEHTGFPKFKSKKDRHRSYRTNITGTNIAFLGKQIKLPKLGLVKCKGYKEIDGRILNATISQVPSGKYYASICVTDVEIPTLQKTGKQVGLDLGIKDFCIASDGVKYANPKYLAQSIKKLQRLQRELSRKTSGGSNWNKNRIKVAKLQEHIANQRLDYLHKLSNKLVQENDVICMENLKVQNMMKNHKLARNIADVSWSEFKRQLQYKAGWYGKQVIQVDTFFASSQLCSKCGYQNPATKKLSVRKWVCPVCGEVHDRDVNASLNILNEGLRQIA

SEQ ID NO: 46408 - protein, 493 aa, Bacillus sp.
MAKKKNSLQLTYVGVFVQPNVIFTRILDELMRKFLSSKRYSRERIFEGGTRKQVVEQTKQLFIPNSRYMRDSFLEAEASISSQEELLPMYVLQNNKKIEQSQQKLEKLHSRKPKNVKQAYKIEQSVFYTQYKIKKLTKQRDYYQHHIDNGTVPKMVDGTKKRMELLKKGKITKEEWRESRSDSLYSRGEKSKGGNENMKLTYLEGNLFEIAILNPLSAKRNDRLRFTVRFPEKFVHTIASYLETGESYSIRLKRRNGTYQVHLALEGEITAQPNFSKGVAGMDINPDNLSVTIVHANGNFRTSKVFWIHDVNTVSANKRDFIIQETLYEVMRWIQSFDIDTLVIENLKFLQTNGGKSFKRMASNFSYSSMIKSLVSISFKENIALVEVGAYYSSFIGRVKYQQQYGLSIHQSAAFVLARRGMGFEEKVPKELLSVLFTKEVKKGQKVSDLFKHWKKAKQWFEDTKKDLMELGVYDNSMYFKEILHYQTITVPF

SEQ ID NO: 46409 - protein, 304 aa, Klebsiella sp.
MYRATKVRIYPTQEQTELLDKQFGAVRFAYNKALHIRSHWYKKHGVSLNNAKHIQPLLPIAKKSRRYSWIKEADSNALQVSLHNLDRAFQNFFEKRAKYPKFKRKHGPQSSYHCSSLKITADTIKIPKISPIRANIHREIVGKVKSITISRAPTGKYYASILSDDGQEAPAKPNFITKLTGYDIGLKDYLIRDDGKKISNPRHLVNAYRRLRRDSKALSRKLKGSANRRKARIRLAAQYERVANARTDFQHKLSRAIVDENQAVIVETLKVANMMKNHHLARSIGDAGWAGFITKLEYKAAEKG

SEQ ID NO: 46410 - protein, 224 aa, Dolichospermum sp.
MDNQNVKYYDLNKYTAVLANEFDFADKLNSMARQSAAERAAFAIKRFFDNCKAKVPGKKGYPRFQKNNRSVEYKTGWKLLDDRKHITFIDKCGIGQLKLIGTWDLHFYQIKQIKRVRIVKRSDGYYIQFCVDAERNIDINATGQTVGLDVGLNSFYTNSQGDKIDNPRYLRKSEKSLKRLQKKVSRKNKGSNNRKKAINRLGRKHLQVSRQRKDFAVKTALCVV

SEQ ID NO: 46411 - protein, 319 aa, Dolichospermum sp.
  misc_feature (225)..(317): Xaa can be any naturally occurring amino acid
MDNQNVKYYDLNKYTAVLANEFDFADKLNSMARQSAAERAAFAIKRFFDNCKAKVPGKKGYPRFQKNNRSVEYKTGWKLLDDRKHITFIDKCGIGQLKLIGTWDLHFYQIKQIKRVRIVKRSDGYYIQFCVDAERNIDINATGQTVGLDVGLNSFYTNSQGDKIDNPRYLRKSEKSLKRLQKKVSRKNKGSNNRKKAINRLGRKHLQVSRQRKDFAVKTALCVVXXXXXXXXXXXXXXXXXXXXXXXXXXXXXXXXXXXXXXXXXXXXXXXXXXXXXXXXXXXXXXXXXXXXXXXXXXXXXXXXXXXXXXXXXXXXXHT

SEQ ID NO: 46412 - protein, 406 aa, unknown
  TnpB Polypeptide
MRTLKLKIPHTEQLDILNAASADVWNECLNLKSVWDYAHGYRTTGRIDTQCELWMDKQLSKSQPLHSQSIQAVRERYFKNRKAYRALRRNGNTTAKPPHKPKAFQTTTWKKSAIRFKETLFGYVVVLSNGRGNPPLQIPLPKLFNLSIVSDIVIVNLVYTHGHYELHFVYNTEKPDVSRADGVAGVDIGEIHPIVSHDGQHTLIFNGRYIRSLYRLRNKVIASFGKKIDRCQRHSKRWWHLVRRKWKRIRQIDNQIKDALHKHTATFVKHCSESGVGTIAIGDLTGIRENIDYGKRANQKLHQWAFGKVSELITYKAKAVGIKVELVDEAYTSQTCPNCGNRKKPTHRNYTCKCGFRYHRDGVGAINIRKKYRGHFGVPVAADMGNQTMKMTPPIGFRLEVRCCSA

SEQ ID NO: 46413 - protein, 424 aa, unknown
  TnpB Polypeptide
VKKSYKYRIYPNKEQQEKISQFFGCSRKMYNLLLDWWISAYKEYKTNSTPIGALPQPTFYKKQEEYSYLKDCDAVALATARINLSRALDNYFKSKKGKRKGKKVQFPTFKKKGKCRDSYGTFNNSDCIKVTDDHISLPKIGSVKIVLHRSYEGTIKSVHVSCTKSNHYYVSLTCEVSDEATVTNVSHINNLNVVGLDMSLSQFVVSSNRDDNTKTKYVRLFRKNEKRLAHLCRNLSKKKFIDNKPSNNRLKAQLRYAKLSEHISNQRKDYCIKEAVYYATHYDVIVLEDLDMQSMSRSLHLGKSVNDLGFGMFKSWLSHECKKHDSIIMFADKYFASSKTCFECGAKNDLLKLSDREWVCPHCGAIIDRDYNAALNLRDYFYKVIYNTVGTTEIKACGETSSTLRETLMQVVSVKQEAPSFRWE

SEQ ID NO: 46414 - protein, 307 aa, Cyanothece sp.
MKQVLTLVVKLQPAPEHTQLLGDTAQAFADACNYINKTVKPNLTNRNSIQAVCYQDVKERFGLTANHVVRACARVASNRLTAKQKGRKVKHFKPTSFDCDTRTFRFIETGYLASISTIGKRAKIPMRVSNYHIGKLSGQNPTSAQVCQHKDGDWYVHIQLKSDAPKSIKTKNVIGIDFGRRDIAVTSTNKSWSGKEIQEKRDKFNRIRAFLQKKATQGTRSTRRRCRQILKRLSGKERRYQAWLNHNISKAIINEAKQTQSFVSIEDLTGIRERTNQQPRNKTERRRSNSWAFYQLRTFIDYVYSTM

SEQ ID NO: 46415 - protein, 332 aa, Mycobacterium sp.
LVVAKFEIPEGWTAQAYRYALDPTPTQLRALASHAGAARFAHNHMLALVKAVMDQRVAERSYGVPEDRLTSVLGWSLPALRKVWNQRKPSCAPWWAENSKEAYNTGLDGLAHGLDAWSKSRKGERAGRAAGFPRFKTARAPRSVRFTTGVIRCEADRRHITLPRLGAVRSHESTRKLARRIEAGTARILSATVRQDSAGRWYCALQVIVAVKARPAHARRSIHPIVGVDVGVKADSLLVVATPGGTEIDRVAAPKSLTAAQGRLRALQRRAARQHGPYDPATKTKQVPSKRWRRTQARIGRTHVHAAAVRRDVLHKATTALAQQHQVVVVEL

SEQ ID NO: 46416 - protein, 374 aa, unknown
  TnpB Polypeptide
MQRTIKIKLEDNEDLINTLEISSIITQTINDVGNMEGTFNKSNLHKLTYKKLRMAYPYFPSGLLQTVRDVASEQLKRNRLKRSCFKQFTSLRLDKRNLRISLEHKIISISSINGRLKFNFKSHKQLDKYKEWKAIAGTLSYRQNKLFLNIIVEKETPKINLGRINIEKDILGIDRGVNNILVCSNNQFFNSKYLKKIKGKYQHLKQMLQKKGTKSAKRKLKKISGKETRFVSDTNHRLSKLLAESDFKVFVLENLKDMKRKNNGRKFNKKLGGWSFKQFENYLTYKLEEKNKLLILVNPKYTSQTCSECGYKEKSNRNGNKFKCRRCGYELHSDLNASLNIAQLGKSFLSRLPVNQPIVATQVSYKPIISMVGH

SEQ ID NO: 46417 - protein, 359 aa, unknown
  TnpB Polypeptide
MKLTLQLQLLPTVEQKTALLQTMERFNAAATYAAQVGFAAGVFGQVSIHHLAYTAIRARFGLSSQMAVRAMAKAVECFQRDKTVCPAFKPHSAICYDQRVLSFKGVHEVSLWALTGRLRMPFVCGAYQHARQGRIQGQADLVFRHGKLYLLCTIDMPEGAPITPVDVIGVDLGIVNLAVDSTGETFSGSDVDATRERYARRRRLLNKVGTKSARRRLTKIRTREASFRRNTNHVISKRLVLKAQGTPAAIALEDLRGIRQQGVTVRKAQRPRHTGWAFGQLRAFVTYKAQLAGMPLLLVDPRHTSQTCAVCGHCEKANRKSQAEFVCRHCGYAAGADYNAARNIRFRAFVNTPMVGTLA

SEQ ID NO: 46418 - protein, 384 aa, Bacillus sp.
MLVHKAYKFRIFPNKEQKIVIAKTMGCSRFVFNRFLSLWNYTYKETGKGLTYNACSSQLPQLKKEFPWLKEVDSIALQSSLKHLADSYARYFKKQTKAPRFKAKNNNVQSYTTKNTNENIAIVGNKLKLPKLGLIRFVKSREVEGRMLSATIRRNATGKYVVSILVETDIYDQPKTHSSVGIDVGLKDFAILSDGTVYKNPRFLRALETKLADAQRVLSRRKEQALKDGKPLDEAKNYQKQKRMVARIHETIANARTDYLHKLSSTIIKNHDVIGIEDLQVSNLLKNRKLAKAISEVSWSEFRTMLEYKATWYGKQVVTVAKNFPSSQLCSCCGYRYKDVKNLALREWDCPSCGTHHDRDVNASINVKNEALRLLTVGTTGLAY

SEQ ID NO: 46419 - protein, 371 aa, unknown
  TnpB Polypeptide
MEKSYTFRLYPNKEQELLIQKTFGCTRYVFNHYLSQRIEAYKKTGIAPTRYSQDKQLTALKRELTWLKEVDATALQASLQALDAAYQNFFRRIKQSGKPGFPRFKSKKNNHRSYKSKNNRNTIDVLYKHIKLPKLGLVKCRVSRQMEGRILSATVRQKPCGKYFVSVCCTDVERKPLEPTGAVVGIDLGLHDFAVTSEGNAIPNPRYLAKSQQKLAKLQRQLSRKTIGSSNRNKARIKVARQHEKVVNQRQDFFHKQSTQLIQNYDLICLEDLQVKNMVRNHKLAKSLSDAAWREFVRLLQYKADWYGMCIQRVDRFFPSSQICSTCGFQWPGTKNLGVREWTCQVCGTHHDRDINAAKNILAEGLRLLSA

SEQ ID NO: 46420 - protein, 249 aa, Ruminococcus sp.
MVKAIKVMLIPNNVQKTKMFQYAGASRFAYNWALAREIENYEKGGGFISDAELRKEFTKLRHSDEYTWLLNISNNVTKQAIKDACTAYKNFFRGLQKFPRFKSKKRSMPKFYQDNVKIRFSNTHVKFEGFSSSRKANKQKMNWVRLAEHGRIPTNAKYMNPRISFDGLNWWISVCVEFPDCRETLNDDGVGIDLGIKDLAVCSDGTKYKNINKSQKVKKSENRNADYSVVSLVLTRKIRKGKVTVKQIM

SEQ ID NO: 46421 - protein, 247 aa, unknown
  TnpB Polypeptide
MDFEKGKVKLPKLKTVKAKLHRGFMGEIKSATISQVPSGKYFVSVLVETEYAEMPHKNKSIGLDLGIKDLCITSDGKKYENPKTTRKYERKLVKLQRQLAHKEKGSGNYYKKKRQIALCHEKITNTRKDYLHKVSQEIISENQVIVSENLQIKNMVKNHHLAKSISDVSWYELTRQLEYKAAWNGKQYIRINTFYASSQICSDCGYQNVDTKDLSVREWICPICGAKHDRDINAARNILAEGLRQIA

SEQ ID NO: 46422 - protein, 214 aa, Proteobacteria sp.
MPKEPHDIIGVDLGFVNLATTDDGETFSGDAVEAVRQRYGRMRRTCQQAGTKSAKRKLQKIRLRESRMRANENHRMINRLIAKAKDTGSAIACEHLAGIGDRTTARKAQRSRLKGWAFYQMRTFITYKAKREGILVLPVDPRNTSRTCSACGHCEQRNRKSRDTCVCRHCGYALPADWNAAKHIKAGVKSCTLLLDPLTLGLRTRLRVLTSHAT

SEQ ID NO: 46423 - protein, 145 aa, Okeania sp.
MLKREFKINDYLHKSSRLIINTLINQKIGTLIIRHNEEWKQKINLGKRNNQNFVSVPYNKLIEMLSYKAKMVGIDVIITEESYTSASSFIDNDLIPVYKEGENNQVTFSGKRVKRGLYRTASIGLINELRERFSKYYEKSSPKCL

SEQ ID NO: 46424 - protein, 488 aa, Vulcanisaeta sp.
MLRRAVAVELETTRELNKFLYSVESVYLNIVHEVAMYAVVNNVTSATQLQRLLYRKYRLEYQDLNSQLVIQAIRQAAQIAKSFVERKKRGLVSKPYPEVKAVSIRFTEFTWNYEQFVRSIAPVRLSLSLPGGRREVWLRPHRRFWLYWWRVLTGEAELASTLVAKRRLNRWYAVFVFEIKPREEEPKSIIAFDINENTVAVSRIDIIATIDKIADWNRRYLMPELYSIRTDFGRLARRYERVRNTIIERLKPHFTLPSGNYVNVANTREFRKRVKHLRERSRKVGRVKYVASELTKNPSIIVTEELGENPQESMINEIKRNKTRHRIKQTPFKSIEEAVGDKALERGSKLIRVSSYRNSRVCPIHFTRLEKTNDWHTLQCPKGHYVDRDYASVANMAWKLTPEAWTRGVWWNLRREINWREHEDKSNPIIPKYIIQHLYAILKTLTASEESPAMPARAKPMNPAGRADEGRARKPPQDGEEASLENSY

SEQ ID NO: 46425 - protein, 571 aa, Desulfobacterales sp.
MQDGAKMDGKLMTVYRAFRFKVAPVHQKQELFQYFAYLVQLASQQLLERLWTEDWLDKVARSMKKTYKVINEAQVSLQVANQAIYFPSRIRRGISERVGRILRAQHTQKECFYDCLQAVEQIGLESNLNTLVKKVARTIQLVNGQYYRYTLIRQTLGLLRRLNFKYGLDVWTLRYTDVVQPAIKQFVFPYGPDDGQALRYTCTGYIINYQMKLPVVSVPITRRDWQWLAGTIIIPVRLQKKIQEAVDIQPQRPLLKYQRLKGGIVVPVLQFPWKFPENPLIKRNTKIKAQRVLCVDLGVRNLATLVVCEAGYQISPPTFIKLLKSRFRHIERLYNHVAGIQRKLSYYPVHCVGQGRRREERIRVYNKLDRLRQELAHAVSNEIVTTAWRTGCTMILLEDLRSFNPPKGKKNVSRRLNNWLRGRISDLLTYKCKQVGLQLLKVNPWQTSTICPRCGQRGKKIKDPTSHIEKKTGRFFSCTHCGFQADRDYIATLNVYRAAQINRRQQETLYTTKPVPYKGTGTPPDRPGGDPVALKPTLGLAVTGGCLFKMSTMKGTVPSMASSTTRDPLLK

SEQ ID NO: 46426 - protein, 449 aa, unknown
  TnpB Polypeptide
MIGLKSFVKNSILQLLWLIMKHYLQMKSWFRISYLYCMCLAVDYMVCVSIKNRSRRMRKLLKSYKTEIDPTPEQIQIIHRTIGTCRFVYNFYLAHNQEIYQKEKRFISGMDFSKWLNNEYIPNNPEYQWIKEVSSKSVKKSIMNAETAFKRFFKHQSRFPRFKKKGKSDVKMYFVKTDKRVVIQCERHRIKMPTLGWVRLKEKGYLPTSKSGCLIKSGHVSIRAGRYYVSVLVDIPDISHEELNEFGIGIDLGVKDFAVISNGKVYKSINKSSNIKKLEKQLKREQRCLSRKYEDYKKRLKKKKGEATRQNINKQVLKVQKLHQRIEYIRSDYINKTINEIAKTKPSYITIEDLNVSGMMKNRHLSKAIVSQKFYEFRTKLEAKCKEYGIELRVVDRWYPSSKLCHECGQIKSDLKLSDREYICDCGYHMDRDLNAALNLRDALIYKVA

SEQ ID NO: 46427 - protein, 391 aa, unknown
  TnpB Polypeptide
VQQLVKAKYRIRIKPNKKQLQQIMQFAGCSRFVYNHLLAIQNKLYESDSKLMNTKEMEAETKALKEEFDWLNDCSAVALQQSRIDLQRAFTNFFKGLKGEYKQKYGYPKFKSRHSQISFRVPSNNGKVAIQKRSLKLPKIGLVKIKTRHIPKFLKLTSVTVIVEPSGKVYASLTVEKYVTQKARTGENAGIDLGLESFITLSNGIKIPPFNYAKSNRNKIASMDRKLSKMRDKLKKVSIDYENASNYQAYKKKVAKYKTHIANKRKDALNKLTTQLVTKYDFIAVEDLNVKGMSKNHKLAYAIQDASWSMFVSMLEYKCAWYGKVFHKINRFKPTSTLCSSCGTKHKEIVNSLDVREWVCPDCGTHHDRDVNAAVNILTVGINELVNTRCG

SEQ ID NO: 46428 - protein, 396 aa, unknown
  TnpB Polypeptide
VVSHRNIEIAWTPNGKAAWATFTASRKEAARLWCDLVKRHARLRRLNWKWPSLSRWQRWGKKRYPGLLAQSVQQIITEFCEAVNSATQLRKRGHADARYPCRLPKYHDVTYTNQGARIRDGNLFLPNGKSGTLRVKIPSTLTLPGRLMEVQVAFGRVLISCEIADDVRHVSGVIGVDLGVNTLIAAGDDQRAVLVSGREAKATVQWRAKKLASIWSAQSSRTKGSRRWRRLERRKHRMLDKAQFRIRDITHKATRIVADAFPRASAVVGKPFNGAGDKLGKKQAQQVSQACNAKIIALLDYKCSGAVEIPEPYTSQTCPVCGERRRCGRVFRCACGLVVPRDVVGFTNIRRIGLRGRMAPSPEVATNIMFVRPTRKYPVAARVVPAEPRQVAQAQA

SEQ ID NO: 46429 - protein, 353 aa, unknown
  TnpB Polypeptide
LTDLPANLCVRAYSKAVEMMKSTVADWEQGNSRPVPTFDQPTVVYDKRTLTITDRSATLSTVDSRVEVRFDIGKYQADYLDDDDYEKRMGTLHYNEQADDFYLHIVIQKEVEEREGDRVLGVDLNLKNVAVTSTGSFYDGGELLWGQNHYFRVRRSLQDKGTRSAKQALARLSGRENRFVLDRLHTISRRLVEEARSHDCSYIAVERLTHIRERMDHRDDRIKRQMHNWAFRELQEMVAYKAAEYGIRVEDVNPAFSSQTCSKCGHQSSTNRNSDGWFGCNKCGYEVDGDYNASKNIGKRLLSLPEGKRPPGLGDGHLALKSGTLTLNGDYTAYDTVSAEGESHAQAHGFSRG

SEQ ID NO: 46430 - protein, 387 aa, Nonomuraea sp.
MIYLVQLRYNFRLYPTPGQRQALAKAFGCARTVYNDGLRARQEARENGLPYISDGDLSKRVITQAKKTPERAWLSDVSAVVLQQALADLNTAYRNFFASLTGKRKGPKIAPPRFRSRKDNRQAIRFTKNARFAITPGGKLRLPKVGDVPIRWSRDLPAEPSSVTVIKDASGRYFASFVVEMAGRPLPEVAPEVGIDLGLTHFAVLSDGRKVDNPRLLRRTERRLHKAQQALSRKDKGSANRAKAKLKVAKAHARVADARRDFAHKLSTQIIRDNQAVYVENLSVRGLARTRLARSVHDAGWSQFVNMLEYKAKRYGRTFAKIDRWFPSSKLCSACGMVAESMPLNIRSWTCPCGAVHDRDVNAAINILAAGRADRLNACGGTVRPAA

SEQ ID NO: 46431 - protein, 205 aa, Nonomuraea sp.
MGVASFLTTSDGEQVGNPRHLAASAGKLATAQRDLARKKRGSKRRRKAIARVAALHSKVRRQRLDGAHKAANALIRGYDMIVHEDLRIANMTKRPAQKPDGEGGFLPNRAAAKAGLNKSILDASWGVFLTVLAHKAESAGRELIAVNPAHTSRTCARCGHCAKENRLTQAEFACTACGHAAHADVNAAKNILRAGLALRRAAEAA

SEQ ID NO: 46432 - protein, 356 aa, Nonomuraea sp.
VQLRYNVRLYPTPGQQIALAKAFGCVRTVFNDGLRARREAREQGLPYISDGDLSKLVITRAKKTPERAWLGEVSAVILQQALADLNTAYRNFFASLAGRRKGPKVAPPRFRSRKDNRQAVRFTKNARFTVTANGKLRLPKIGDVPVRWSRTLPVEPSSVTVVKDAAGRYFASFVVETADDPLPDTTPDVGIDLGLTHFMVLSDGRKVDNPRLLRRAERRLRKAQKALSRKEKGSANRQKARLKVAKAHARVADARRDWVHKLSTQIIRDNQAVYVENLAVSGLGRTRLAKSVHDAGWSQFVTMLEYKAKRHGRTFAKIDRFFPSSKLCSACGALADKMPLTFARGRARAGHSTTGT

SEQ ID NO: 46433 - protein, 402 aa, unknown
  TnpB Polypeptide
MPKKTIFKSYKFRLYPEDKDKAFLSQHFGHCRFVYNYFLKEKQNFYLKNKKTLNYNNCSAALTTLKKQKEYSWLKDVNSQSLQQSLKHLETAFGKFFKKETKFPVYKNKHSFNSFSIPQNIRIVKNRIFIPKFKQGIRFVKHRELKGKILSATISLNPSGRYFVSILTSQEIDVKKSVKNPKIIGLDLGIKDFLITSDGSRFSNFKFKRQYQTKLSKLQKYLSRKPQPSNSKIKLKQKIAKLHEKIANSREYLQHCISKQLVEENDVICLETLSVKNMMKNHKLAYAISDSAWTSFVSKLEYKSKWKGKDIVKIDHFFPSSKTCNSCGYINQKLTLKDRSWICPKCGKLLDRDINAAKNILTRGLTIILSSATDDYRHGAEIRLGLDNLSKPSISDEVFKIE

SEQ ID NO: 46434 - protein, 505 aa, unknown
  TnpB Polypeptide
MKRVLLVRLSSKYRSKVRRFVYDLAQFQNLLRLFVLEWNRKTNGIFKLFNQSLLYSLLADKIKSDKSDWQRKELEEVKEVIEQSDELKKWIVLLKEQKRKVRNAVACQNVIIQEVNNLKSWVRLLREYKKNPEKFRGRPGLPKPRKLRDLVKFCVPVRFERDERKLVLVLKAHDKGGKSEKVEVLLPDWFDYLVKEVKLIYDMGWVEAQVVYEKELEMVCNGNYQAGIDIGLDNLLSVVSDNPEMRSFIVSGKELKSYNRWFNKKRSEIRSHMDLVRNMINEEKDEERKKDLEKHYWWLKKYFWNLHKIRDRKLNTWIHQITRRVADLLYETGHKKVYVGKEGIDKNGVNLGKVVNQNYVSIPHRKLVNMLKYKCKELGIEVKEVDERYTSKSSPVSDDIVEIQSRRRGEEGEEIEFSGKRVKRGLYKDLVLGKVFNADLVGAMNILKVGAKLREVMLSIKTLFVKLCNPVKFKLFDLIYKSNPESLKVGIGDSMPVVTQEALAP

SEQ ID NO: 46435 - protein, 396 aa, unknown
  TnpB Polypeptide
VRRTTTFKLSPTKEQEVELFNRADACAGMWNQITYKRRQSFFSGQMDWNTDEAYHHYKKIVGSASAQQIIRKNNEAWKSFFALVKQKKEGTLPPHINKIRPPGYWKDRRTGKRKLRYLVRCDNYTLGVTMLKLPFKLQLKWKGSNRWQGKQGRLEISCDELTGQWYAFMPVEVKPPHQLQGTKKAYVDLGVKVPIMAMLEGTTQVFGYRANSMLAEWWYWNHKLAQHESLLKTTNDVHASKTFSRLFRTRKRRFRDVINKVVNDFVIRCWSQGVSEIVLGELTNIRATAQFSKKSNSMILLFWSHRYLVNRIKEKAEEYGITVREIDERGTSSVCPRCGAKRIVRKGRLFRCIQCKLEAHRDAVGCVNIRLAQGDPLAAGVINRAVTRPSFLSVEV

SEQ ID NO: 46436 - protein, 367 aa, unknown
  TnpB Polypeptide
VLREPSNNKDKWITFMSMLLESWQTKNYSTYTVELKLREGEIYGSVSFELPTPEVKYTKENGVIAIDTNASPLHLAIAEVSKTGELLSYQTISLHNLLGLSQNSKDHQEWILAHKIVDLAIQKNKAIAIENLKKLKKGRRGNGKAKLRKILHQWNAKKFLQKLKRVAMIKGVEVVEVNPAYTSVIGMLKYAPQLNIDKDVAGAYVIGRRALGFKEDTPENYEKLLKDRAYLEFALKRYEEREKELTELAEKETNEYKRNAIKSGLENVEDAKKLLTSLIQSLQSEPSGCEGAYGRNPAWQVLEVALLFPVLGRVLPRDLSPLKPVLVEGVWDRVRSRLVPSEAGGTVPIRDFQNSLTDFGPLHPPPV

SEQ ID NO: 46437 - protein, 332 aa, unknown
  TnpB Polypeptide
VLHRLDLAMAAFFRRCQGGETAGFPRFRSWRRWQQVEFPHGGRALRFDQAQQRVTIPGVGAVKLRKGRQVPVTYGRAWVVRKNDRWYASFECERAARPLPATNEVIGVDRGVHVLAALSDGRLLANAAVGEKRKAATARMQRELEAATVRDGKRRVINGRDHRRLKARERLARAREREANARRDYAHKVARQLVNGADVIALEKLSLRAMTRSARGSVECPGRNVRAKAGLNRVVLDSGFGLLRQMIVAKAEEAARTVVEVAARFSSQECSRCGHVARESRRRRRFCCARCGYRNHADVNAALVIRRRAQLALKSELNPAEEAGRRRKEAAA

SEQ ID NO: 46438 - protein, 409 aa, unknown
  TnpB Polypeptide
MKTKPLKWGVWTVPELTYRYRLYPTLQQEEDILRTCNAARFLYNQLLTDRTKHYRETRTWKKIDSSPYKALSFMMSIDPGALQWAENSLRTAYRLFFHAERTQLDQYRPESLVKAKEDPKYQLMDTDLLNYPRFKRKKNTKTSYTTCLPNLEVQNSRIHLPRIGRVKIKLHRPIPENAEQICCTVLKKRCGHYYLLIRLKLPEVEKKADLHTPLGVAFVPGKLAVRSDDEPVLFRHQDVKLRKRINKAYKALCRRTPGSKGYEEMRLYLARLNEYRVNQRRDDLHKIARQITNAADTIYVQQPDVHSHLKTLGNNKAAKAKLLDESWWRCSEFIQYKAKLEGKQFWNVAKGFPIYSLCSACDHWHKEAGMNEMWKCPACGLELNLHTNAARNLENLGAKYIRETTAQKT

SEQ ID NO: 46439 - protein, 256 aa, unknown
  TnpB Polypeptide
VLIRTERHIIDKNNINYKNCIEICHLSKNLYNYVNYILRQSFLATKRLPSEYEINTLLAKDNQQDFRALPSNVSQQTVKLVFKAWKSFFKALKSYRKDKSKFTSNPKLPKYKSKNGLYVCVFTYNCSRIKDNKINFVKNILKPIKTKVSRVEQARVVPNSSCFIVEIVYEKDVKETLKTSGSIASIDLGLNNFITYIDNLGNTPLIINGKGLKSYNRLFNKKKAKLQSLLPLKHYSSNKIRQLEFNRYKFVSNFMH

SEQ ID NO: 46440 - protein, 485 aa, Aphanothece sp.
MIIAYKFKLKPNQSQKALMDKWLDMLRSHYNFCLRDRIESYEQVKQPKLGDYCSLKPKAECCPLTCSVSKNSSIGEPFKGNKKRNAYEQQSSELPKLKKERTWYQNIHSTVLQQNLRKLDTAFKNFFAGKGYPKFKARHRFKSFNYPPNQVKLKGNKIYLPSIGWMRFFASRSIPDGFSLRSVTVRQKADGWYVACSIEDLTIPQSRSLNLEQVNSVIGGDLGVKKLLALSNGEQIKNPQFEKQLERTITIRQRRISRKKRGSLNQKKAYQKLARVNQRIVNLRTDYQWKIANHLARLADVIVLEDLNISGMSKRCQLKQDENSKYLKNGQSAKRALNRLIRDCSWGELKLKIHSVAEKFGCIVVEVDPKWTSLKCSNCGHIDRENRQGEKFACTNCSHLADADNQAAINIGKKGIELLNLSISKLLGVTQEVTAKSESTGLTNSQEISMALAVEPSNPRQLSLFEWMNGQVIGCSESPTIPNLG

SEQ ID NO: 46441 - protein, 417 aa, unknown
  TnpB Polypeptide
VHSEAEEEMNRSNIFSLAPTREQHHILEELAGNCAKLWNEVNYLHRQQYENYLRLDWNPQAYKKYVPLVGSATAQQVVRKNNEAWRAFLALKRMEKNGKLPSTIKRVKPPGYWKREGRYVLRVLFRCDSYHLREGRVDLPRHLSIPFKGELKWTGKQGRLEVAWDELSKKWRVFQSVHVKPIITPLGSKTCYIDMGVRNLATVWLTEWRQPIAYQSGRLLADWWYWTNRIARHQQRLIRVNGRKKSKQLSKLYRIRKNRFRHAVATFARQLVKDLYRQGVSTIVIGELTGIRSNSDHGRQGNAMVHNYWSHKHVADRLKWTAEEYGIKIETVSEAYTSQTCPRCHSRHSLRVLRGFRCLDCGLEAHRDAVGVLNIAARCGEHAARPMVWPMLLRWDGCGWNRNNGMPTQAKRIRVEA

SEQ ID NO: 46442 - protein, 398 aa, Moorea sp.
MTEKSYRYRFYPTPEQENLLRRTLGCVRLVYNKALAARTEGWYERKERISYKQTSSMLTGWKKLNELDFLNEVSSVPIQQGLRHLQTAFTNFFAGRTKYPNFKKKRNGGSAEFTKSAFKFKDGQVYLAKCKQPLPIRWSRQLPNGCEPSTITVKLDPSGRWFVSLRVDDPTDHKLKPIKKQIGIDLGISSLFTTSDGDKAANPKHFNKLYKKLRFAQKSLSRKVKGSKNREKARVQVARIKASIADARGDHTHKLTTQLIRENQTIVVEDLAVKNMVKNHKLARAISDANWGELVRQLTYKAEWYGRELIKIDRWFPSSKRCSSCGHIVEKMPLNIRKWEGPQCKTHHDRDINASINILAAGLAVSVCGATVRPEQSKSVKAGAKNSPKGRRKQKPKL

SEQ ID NO: 46443 - protein, 404 aa, Streptomyces sp.
MQLRYAFRLDPGPGQRTALARAFGCARVVYNDAIAARERAAGEAFPTAASLSKTLITEAKKTPERHWLGEVSAVVLQQSLRDVESAYRNFFASLKGARTGARVGAPRFKSRRDAQQAIRFTRNARWKITENGRLLLPKIGEVRVRWSRALPSIPSSVTVIRDAAGRFFASFVIETDPDADLARMPDTDQTVGVDLGLNHFAVLSDGTKVDSPRFLRRAEKKLKKAQRELSRKQKGSKNREKARLKVARAHARVADARREFHHQLSTKLIRENQAVAVEDLAVRALARTRLGKSVHDAGWSAFVAMLEYKAARYGRTFVKIGRFEPTSQVCSACGIKDGPKPLHVREWTCPACGTVHDRDHNAAKNIKAAGLAASACGAQVRPERVPAQRGEAGSHGIRTGASAA

SEQ ID NO: 46444 - protein, 416 aa, Nostoc sp.
LVEQVKTSYQYRLKPTKEQAEKIDNTLDMLRCQYNYQLAQRFDWYEQNRCPQDRCSLIVCHIPELKDKPNRFSQQATLTQLKKDRPWYKSIHSQVLQEVPKKVEIAFDRWLKGDANGKRSGKPRFKGKGQYKTFTYPQFKKEHFQNDCLGKSLHLGRPQVRVFRKITLSKIGVIKVIVHRPIPDGFDIKTLSITKKADGYYATLSLDDKTVPTIKPDFKPDNIVGIDVGLIDFYVASDGSRIAAPKHLRKAERRLKSAQRKVSRRKKGSNRRKKAIQKLGKQHKKVADTRKDFHFKTAKHLLKKYDVVAVEKLNIKGLAKTRLAKSINDAGWGQFISILTVKAENAGLSVVAINPNGTSQECSGCGQKVKKPLSQRIHNCPNCNISLCRDLNAAINIKNRGTHDLKAQNMSSMRSL

SEQ ID NO: 46445 - protein, 360 aa, unknown
  TnpB Polypeptide
MLGECCFVWNHALSLQKRYYRMSGKYISIGRMQKHFAKRIKRNLLHSQTVQEILERLDESYSRFFKKRSKRPPKFKRFDRFNSFVFKQGGFMLNGNIFTINKGKKRFKFSYSRHYEGNIKQIRIIRETCHRFSLIIVTDHNPVNSYRKTHDGASVGLDFGLKTYLTKSDGSDIASPLFFKRYQDKIKKCGKRVSNAKKGSNNRSRRLFELQQVHRKINNLKSDFQWKLAHELCKRYDYIFIEDLNIEAMRRIWGKKISDLCHSSFIDKLMYVSLKYGVIVHKIDKWYPSSKTCECGYINKLLSLKDRKWICPECESINDRDVLAARNILRKGISELESKSNSSDSNIGVSCVCIQESHLL

SEQ ID NO: 46446 - protein, 268 aa, Proteus sp.
MRYRNSREVVGEVRNVTVSQSCGKWYVSIQTEYEATEPQHGSTSIVGLDAGVTKLATLSDGTVYPPVSSFKVNQRKLARLQRKLSRKIKFSANWQKQKRKIQRLHSHIANIRKDYLHKVTSEISKNHAMIVIEDLKVSNMSKSAKGATERPGRNVKAKSGLNRSILEQGWYEMRRQLEYKQLWRGGQVVAIPPAYTSQKCACCGHTAKENRQSQSQFECLECGYTANADINGARNILAAGHAVLACGGRVQSDRPSKQEPAEVIQTSV

SEQ ID NO: 46447 - protein, 334 aa, Proteus sp.
MVEGSPIHNRYNSHLKIWNGLTKNFFQKRTAFPRFKKRGKNEAFRYPQGVKLDQSNSRISLPKLGWMRYRNGREVVGEVRNVTVSQSCGKWYVSIQTEYEATEPQHESTSIVGLDAGVTKLATLSDGTVYPPVSSFKVNQRKLARLQRKLSRKIQFSANWQKQKRKIQRLHSHIANIRKDYLHKVTNEISKNHAMIVIEDLKVSNMSKSAKGTTERHGRNVKAKSGLNRSILEQGWYEMRRQLEYKQLWRGGQVLAIPPAYTSQKCACCGHTAKENRQSQSQFECLECGYTANADINGARNILAAGHAVLACGGRVQSDRPSKQELAEVIQTSV

SEQ ID NO: 46448 - protein, 285 aa, Proteus sp.
MKRLQAFKFQLRPNGQQVREMRRFAGACRFVFNRALARQNEDHEAGNKYIPYTKMASWLIEWKSDTETQWLKEAPSQPLLKDLERAYKNFFQKRTAFPRFKKRGKNDAFRYPQGVKLDQSNSRISLPKLGWMRYRNSREVVGEVRNVTVSQSCGKWYVSIQTEYEATEAQPESTSIVGLDAGVTKLATLSDGTVYPPVSSFKVNQRKLARLQRKLSRKIKFSANWQKQKRKIQRLHSHTANIRKDYLHKVTSEISKNHAMIVIEDLKVSNMSKSAKGTTEGMDGT

SEQ ID NO: 46449 - protein, 485 aa, Nocardia sp.
MSRSAVMSRHTAFRYCLDPTVEQQQVLARHAGAARFAFNKCLDLVKTALDQRKVDPEQQVPWTGFSLINAFNAWKKTEAAGRVIAVDRGGVAEIVVTGLVWRNEVCQQVFEEAAVDCGRALAAFSDSRTGKRRGRKVGFPRFKKKNATTAVSFRLRNKTAKSGRTAIRVGDNGIPRSVTLPGLGTLRVREDTRRLRRLLANRRAKVLYTTVTHRAGRWQISVTTQAADLHPARHHTPRVVGDDGGWVGIDRGLSAFLVAATADGTEVARVDNPPKPLAVGLRKQRRLAKSLSRKQKGSINRKDAAAALARHHHRVATTRRHFLHQVTNQLVNTHDRLVIEDLNVAGLLGNRSLARAISDAGWTEFARLLRYKQQWRNGTIVTADRWYPSSKRCSACTAVNSGLTLADRMFACGCGFRADRDHNAAMNLAVWPMIKPEDSPRSPDPQAGGRVTNARRREGADRHPGGVGETGPNDARTDVHATQVA

SEQ ID NO: 46450 - protein, 405 aa, Deinococcus sp.
MAPRSSYLPGPWQTPFKEVPHIQTTTHLKTFRYRLRPTKAQESVLLEQLRFCRNLYNAALQERRDAYRKAGVSITAYDQMKDLTEIKAALPEYAGVYSQVLQDVLKRLDKAFKAFFRRVKAGQTPGYPRFKGAGWYDSICYPQSGFSVSAKTAFFSKIGNLRIRLHRPLEGKVKTATIRRECGEWYVSYVCEVQAQPLPATGSAVGVDVGTTWFAITSDGEFVENPRHFQRGMKKLRVAQRALSRRKRGSNRRKKAKAVVAKLHRKVARQRLDFHHKTATKLIRENDLVAHEALNVSGMGRGNLARSIHDVGWGQFFSLLSLKAASAGRTVTTVDPRYTSQTCHECGRACRENRIGQAKFRCVNCGHTANADHNAALNILARALPSVQNVEVIRGLRSLALQCVE

SEQ ID NO: 46451 - protein, 348 aa, unknown
  TnpB Polypeptide
VQLTYKFRLRDKHRRELNRQSRAVNFVWNFCNETQRDAVHNVRKWPTGYDLEKLAAGTSKELDLHAHTIAKTCSQYARSREQHKRPWLRWRGRKSLGWVPFNTGHVRFDGAVFVFRGVRYEPMHLRDLLPGAKFGAGSFSADSRGRWYINVPVEVECATEAPVGEVGIDLGLKTLATLSNGDVVETPSFYRKSEAVLATAQRRKKSKRTKAIHAKVRNRRKEFLHQASAKIARDNGLIVVGDVSPSKIAKTRMAKSVLDAGWANFKTMLSYKSMRNGGTFFEVAEAYSSQVCSACWTLPASRPRGIADLSKRIWTCSECGVDHDRDANAALNILRAGRSALFGGAHAA

SEQ ID NO: 46452 - protein, 348 aa, unknown; identical to SEQ ID NO: 46451
  TnpB Polypeptide

SEQ ID NO: 46453 - protein, 420 aa, unknown
  TnpB Polypeptide
MSKPKKLMGVQQCLISADRETMAILEYICSESNKLNNCAVYYARQVYFKTKKYVTGFDLVKAIGSNKHFSALPSDAACQNCLSVGESVKSFSELLKMWFNGELENKPKFPNYRKSGYQLVSFPKRSIRLIDGMIRFPLGLQVKAWFGLKEFFLPMPSNLDFAALREVRILPRNGCFYAEFVYPVSVVNVDLDPAKCLGLDHGINNWLTGVSNVGTSFVIDGKHLKSTNQWYNKSVARLMEGKDNGFWSKRLARATEKRNRQMRDAVNKTARLIVNHCLDNRIGTVVFGWNKGQKDGANMGKKTNQKFVQIPTARLKERIKQLCEQYGIQFVETEEAYTSKASFLDSDSLPKHGEKPEGWKASGNRVKRGLYKASNGFRINADCNGAANILSKVAMMLGLDLSGISRGDLTAPLKFRFWTL

SEQ ID NO: 46454 - protein, 409 aa, unknown
  TnpB Polypeptide
MVASTIIRSYKVELDPNNRQRTLLMKSAGAARFAYNWGIRRHEEVRMMNLLPVPHIKYPTAIDLHRELNALKKEQFPWMYEVSKCCPQEALRDLEVAYQRFFKGISRYPRMKSRKRGIGGFTVTDRNNIRIWPDSIQIPRLGRIRLKERGYLPSGSISEATMSERAGRWYVSLHRENEVEIPEKPRETIVGLDVGIKNLATLSDGTIFPNPRVLPKAMRKLNRLQRAVSRKVKGGANKKKAMMKLVRMHARIHNIRQDNINKITTILTKTKSVIGVESLNVAGMIKNHSLAGALADASMSEFLRQLKYKAGWYGCRIVEADQFFPSTKRCPVCGHVKAEMPLSERTYHCEFCGYIGDRDVTAAMNLKIVAVSSTETINACLRMEVTDLHSRCHPVMQESNTMPESVLHG

SEQ ID NO: 46455 - protein, 388 aa, unknown
  TnpB Polypeptide
MKILKAFKFRLKTNNTTSVRLASIAGSNRFVWNWALANQKERLEKNEYTENYASLCNSLLQIKKDEATKWLNDSPSQTLQQSLKNLDRAIKDAFNKKSPKKFPQFKKKGQHDSFRYPQGIKISDNRVFLPKVGWVGFFKSRDILGTIKNATVSKKGEHWFVSIQTEIEAEKPVHSAKSAIGVDLGVKKFATLSDGRVYEGKNSFKKRQARLAKLQQRLSKKKKGSSNFKKLKKRINKLHTKIANIRQDYLHQVSTDISKNHALVVLEDLKVANMSKSASGTLEEPGKMVAAKSGLNRSILDQGWQSFKSMLNYKLDHLGGELLLVDPRYTSQKCSSCGHTEKENRLSQPQFACMRCGHRENADINAAKNVLAAGHAVLSLNPEVALAA

SEQ ID NO: 46456 - protein, 132 aa, Salmonella sp.
MYNLHRLFRKRINGNQVVCVESLKVKNMFRNQNLSKAIADASRGERVRQLQYKGERTGRSVVAIDQFFPSSRRCGCCGFTMKKMPPDVRNRTCPECGEAHERDINAARNINAAGLEVLAHGKSVNPESHKAT

SEQ ID NO: 46457 - protein, 553 aa, unknown
  TnpB Polypeptide
VSGLRPVAAPFVAAAPAGARVRARLRVSAVDAAVLRATGRHLGSLAGRDLAARCAEGRLDAKGRAMSRAARKRALTAEASSRWAGAITRTTEDQLRLAERNLSAEKASLQARIRRIEARLAVPAGGKSGRVRGYATAAERHAKAIRLKSLRGRLAQVSRQVDAGTVSVVRGGKGLLRKRANLAAAGLTETEWRAEWEAARLFLTADGEADKTWGNETIRWHPGEQWLEVKLPAPLAQLANRPHGRYRLSCPVAFAYRGDEVAAQAATGAIRYDITCDPASGRWYADASWKTAPSPAPSLAELRCHPVVAVDVNAGHLAVAVVTADGNVLGTPVTVPLDLAGLPATTRDGRLRAAISGLIATARTHGARAVVIEDLDFAAARAEGRERHGNRPSRGRRGRGFRRAVAGIPTARFRDRLVQMAANAGLHVIVVDPAYTSRWGAEHWLAPLREHHKEATGHHAAALVTGRRGLGHRARTRASGNRTAPEDAARPAQARTRTRPAASTAPRKPATPRDSRQPPGDKTTQPHRTTAGGQAAQHRTGPPASQDHVLLVQ

SEQ ID NO: 46458 - protein, 546 aa, unknown
  TnpB Polypeptide
MIIQSKYTKMFHSKDLTRQKYDELYDFAVLIQNHKNIVSRYVNENLFYYLDCTKFQFSKKMRAKYKGSVTSSFDTQIYTQVFTCYENKFRNIQRRLIFEMSVLKSFEYYKRDTNNHKKGNLKRVIVEKKQTKLSSCLTYLARYGNEDTIAYIKSNFDKCDTNKRDFYDNIIRCCEKFGFERLYALALSKRKRIIDKYANNPIEFKSLTFSGRCRKKRIIDYNHRFGSVINSFISLSGFSRKSFDIPVSFNKGWHGNMRDYRKNTPDYVYTLTFDEKKHQVNVNICKDGERYIPEPNGQTIGIDVNCKHNLFCLSDETTYDYDRKLVNDFCKSSLEIDRLKGKNKEYKVGKRKQRKLNKLKEKVIKNEQQTIAIMCKNEKAKGTGHIVMENLNNGFGKCYFKDGDNEDINYNRKVKFLGLSSLKQEVEHIARKYDIAVSTVQASYTSKMCPMCGCIEDGNRPDQETFECIECGHKDNADFNAAKNIRNRVLVTVLRDKLLKQLDNGAFEPRLLSRDKVKEVLLSFRRSLPKVGSECIGNCIMSSEYV

SEQ ID NO: 46459 - protein, 179 aa, unknown
  TnpB Polypeptide
MEPSGKYFASLLYEGYSCENQAADEDYSNAKILGIDYAMQGMAVFSEEIELEKAGFFRRNEKRLAREQRKLSRCVKESRNYVRQKKKVARCHEKIRNQRKDYLHKLSRRITDQYDIVAVEDIDMKAMGQCLHFGKSVQDNGYGMFRNMLDYKLTWKGKKLVKIDRFFPFKQKNAVNAER

SEQ ID NO: 46460 - protein, 547 aa, unknown
  TnpB Polypeptide
LIPITTRYKYDIIKSRNKTKGLEIMRTQTPSFIVKAKLHLQDNVKNHLNKSFHIADSAYNETLNFGLKRFSAMKKNERYQELLELRREIVKTQENIKKETNKKIKQKLKEDAKQIKAQLEEIDKELGKIRMNYGLTKYQLSTWLLERRKHTEAYQHLNSAELQVIAENAYQTLSQVIFYKIKPEKVKFRSKYSLDHSFRNRVNNTGTRLVESEKPGIAYRLYIHKRTTFIDIPAIAFTEYQQMQLLRADKIKYVQIISKTIRGKQVFYLQIVCQGIPVTKIQKGEGVTGIDPGISTVAYVSKDTCELVDLVPENFARKERLIQNLSRKIERSCKVNDPEAYNENGTRKKNVRFKPLSKRARRLAVRRQTAYRKLTEERRKLQGSLVNRIVSQSSTIKIEALNVKGLQKRKRETRINPKTGRPFSKKRYGKATFKAAPGQFRMLLTQRAHATGCKVDIISPKKTKPSQYNHITGEFEKKELKIRIYNLTDEITDVQRDLYSAFLIAHIENDEYLTEQLVENFDVFYENMKEQLHKLRQKPTRLSWYIE

SEQ ID NO: 46461 - protein, 362 aa, unknown
  TnpB Polypeptide
MNRTFKYRIYANKSTSAKMEKWISFCRQLYNLALEQRIQAYKTHQKSISKFQQMREVTELRRAFSDYNEINSSVLCNVIKRLDRAYSSFFRRIKLKEKAGFPRFKNVNRYNSITFRDGWKLKGKYLNITKVGIFKIKLSRPILGDIQEVIIKKSNDKFYVSFCCKNVPQKILPKTNNEIAIDVGCESFLTDSNNRKVINPRFFKQTQEKLTKLQQSFSRKKRFSNRRKKQKIIIAKKHQKIFNQRQDFHYKVANQLIKKYGVIYIEKLNSWTSWRSLNRSMRDVAWFQFFDILRFKAEEAGRDVVEVPAKNTSKMCSACGEIVPKDLSCRIHSCSCGLKIDRDYNAALNILKLGQSSQLVPS

SEQ ID NO: 46462 - protein, 463 aa, unknown
  TnpB Polypeptide
MGQATRTTKLLLDLGNREEGGANPGKRASLEATADVLNQARAFYLDFFLAHAQKLTERVSYYSEKHLEMRTRAISPNELLTWAESHTVATRDHPHPWEGWNFSERFPGMPFAYRRAAIKDAIGKGRSYLSNLARWKKSGKKAGEPGVPGAGNHPTLYEGTVELDLESRGKEHARFVRLKVYTGTSWQWCNYPIKHSRYFQQRLTDPAWEKQSPKLVVRKNEASLHFSQTQEVKAQKIVESKQDPDLVTVAVDLNVKMLAVITVRQRGTIRETVFVRDQGLDQARYRHLKCIAKKQWQSGKPVKGEQSNQQLWKHVRRMNEHAAHGVARRIANVCAKYPGCVLVFERLRKIRRAAGSKSRRMNRKQANQLRGKINQDAREKAYALGVVTVETNPHGTSQYCSRCGARGERFSNLNGTPITLKWGKLFRCPVCHYEAQADFNASSNVHHSFYGEYHWQPRLKRSG

SEQ ID NO: 46463 - protein, 476 aa, unknown
  TnpB Polypeptide
MANYVLTLPLKTEKWQEDILEKRLNIARMIYNACLSEILSRYYKMKKDAEYQNIKELDKKEQTKKYKELDKKYGVSKFELNKYMKPMTQKFKKNIGSQMGQEIAERAFLTFEKLKYGKAKKVFFKKYGEFYSVREKGDKTGLRFFKESQSINWLGLDIPVVIKKNDEYAQKCFLDKLKFCKLIKKKIKGKNKYYVQITFEGVPPQKREIKINNSEVGIDIGTSTIAIVSDKKVNFKILAENIEINESEKNKLQRKLDRQRRSNNPKKYNKDGTINILNKEKWIKSKNYLKTQNKLAEIQRVIADKRKQSHNILANEIIQLGTNIKVETMNFQGLQKRAKNTEISEKTEKYKKKKRFGKSLSNRAPAMLIEIINQKLKYLGKSIKKINTFKVKASQLNHSSGEFEKKNLSQRWANVNGIKVQRDLYSAFLIKNVKENLEEVDIEKTKKEFTNFVKLHNLEIERIKKSHTKTLKSMGT

SEQ ID NO: 46464 - protein, 363 aa, unknown
  TnpB Polypeptide
MHQFNAACSDIAKTAFDLHIANKVELQKIVYYPIREKYGLSAQMTVRAISKAVEAYKRDRSIQVVFDLDGAMPYDQRFMSWKGLDRVSLLTLKKGRVILPIRICDYHAPRMQNRPRGQVDLLFRNKTFYLAVVVDAPEASHINAVDVIGIDLGVNNIAVDSDGEVFSGAAIEKTRRKIDNIKADLQHCGTPSAKRHLAKIGKRESRFRRDVNHCISKKMVAKAKDTSSIIALEDLSGIRERTTVKKAERRRRLSWSFYQLGTFIDYKAAIAGVPVVYINPAYTSQECHICHHISKANRPTRDDFHCVCCGSSAPADYNAALTIKARVAVNLPIVSRLFAEIQSYQELSRLPTPFMPANELAGC

SEQ ID NO: 46465 - protein, 363 aa, unknown; identical to SEQ ID NO: 46464
  TnpB Polypeptide

SEQ ID NO: 46466 - protein, 430 aa, Caldivirga sp.
MPDVGTTRTVVVRLLPNDVQEGELGRLANASTSLFNEVNYERRRRFFNKQKMDFKGTYKKYYEKYKGILKVNAQAVIQKNNEAWSSFFSLLKKGEKASPPGYWKRGGGRVLILVVRQDRYYVDVENHKLVLRDFKLEIPFAGRVRWFGKQGRLEIHYDDTRNRWYAYIPVEVGVTTTRTGKESKFIVKGERKGIQLYQPKGNKVASADLGINILASVVVNDGTWILYKSRAKEDYFYFQRRIAEVQSIVGKAKNAGELEAYEEARREEGRLYGKLYRRLLHLYRSFASHLMKTLYEMGVSTLIVGYPYLIAQDKGNKFTVNMWSYSKLFEAILLKAQEYGIKVMKVVEYNTSRVCAFHDVEVVRKPRGVISCPHGHKLHADLNGALNIMKLGVGIVINEVKNPLSFFIDHNQVAPTKGGNTQDPNETPTL

SEQ ID NO: 46467 - protein, 429 aa, Caldivirga sp.
MKRSNIVKLIVDEETKKRLLGLLEVYRACWNTVNWLRMQQFKNHERVGFGETEKETYEKFKRILKVNAQQVTRKNAEAWRSFFALIKEKRQNKNLKPRPPGYWKQGIILVRNDRYTIDEEKREIYLKDFKMRLKYAGKLKWKGKQGRLEIHYDEVRGRFYAFIPMSVEDVKPKESGLKASIDLGIVNLVTMFIENGKWFLFKGGSILSQYEYYSKKIAITQKKLALHGQRRSRRLSMLYRKRSLFMRHVVNSMVRRIMNILSKEGVIEVRVGYPKEITKNHGNKLTVNFWNYRLIIRRLKEVGEELGIKVIEVNEAYTSKTCTLCGETHPNGRIHRGLFKCPRMGKVINADLNAAVNILRMHISPSPSEAGVGGYSRGGIGVIGLKTQPVVYRWTNGAGWRSSSTSNEAMRMKAVNHKPMNHPKGNPTL

SEQ ID NO: 46468 - protein, 431 aa, Caldivirga sp.
MVRVARTVIVRSVRLPRGVFRVFIELEDVYRSIVEQLTMYAVANNIRSFTRLRALKYHEMRNLHPQLPSHYVYTACQDASARAKSFMRLRKLGLAGKNYPEVKSVSIWLDDHLWRPNGYTSIEVATHEGWVRVGIEPHRQYWRYINGGWRLASEARVRLDRRNRWLIIYFTFTKEVEEYKPKDFIPVDVNENNVTVLIDGAAYLLETNIEKLTLGYYYRRRSVQEKYDKVYGVESRVKRRVLRKLKERRKKDDIRWKIAHLIVKAAGERRYGIVLERLGRKPAGSMISRIKDKQLRHRIYQAAFRGIQRVIEEKAREYGVPVVYVNPSNTSKMCPVHKAPITYNDSRIGECSSGGELWHRDVTATWNLLIRARQGDGSSAPSPGGLPHIDGSPVPLGSTATHDPITLPKGLWARRNSLPPNETVGRNGGFN

SEQ ID NO: 46469 - protein, 394 aa, Caldivirga sp.
MPTLGFRFRAYTSELTLRALKAQLKLACEIYNTLRWADIYFYHRDGEGLTQTELRQLALDLRKQDDEYKQLYSQVVQQIADRYYDARSRFFKDLARFPREKKPHKYYSLVYSQYGWRIISEREVRTRSKHRERLLTLRLSNLGVFKVLVHRDFPLDEVKRVAVKLTPSERVFITFIVENVALDVGIEKMLTSSDGWFIENLKPYEKALNRLRRLHRALSRKKFLSHNWQKTKVRLAKAYEHLRNLRRDIAFKSGAFLARHYDVVVMENINVKKLVGESVRKLRMRLLDVGFHELREIIRYQVEKYGKEFRTANPAYTSKTCAKCSYVKKDLTLKDRVFICPKCGWTADHDFNASLNLLRNAGWEPPKAPAEPHPLPLLGQGGAMKQETPPIRVR

SEQ ID NO: 46470 - protein, 387 aa, Caldivirga sp.
VKIRPSGLGLPLLVERYMNAKRLVLKWLFESRINPNEKGVLSMVHNNMYRVLREKFSLNSRLAEDCYRDALALYKAWYNNPRKGRYPVLRNVSLWLTSRYSFSLDLEKMKCTILGKHVEVTGYPHNIGFYRGWFVKEARLVKRSGEWFLKVIVSKEKKRRGRRGEGDGFTPTGLVAVDINMSGVVVGSDDEHYVRIPTRLEDAHHYKALAELLQRKYPKRWRESRRILNRIRHFHNHAGNILNDSARKTGKLVVDIAEGMNANVIVLENLNNMITCVEKLGKAYRDKLYLMQYRRIQYWIEWQALKRGLKVIYVNPAYTSTQCPKCGVEMREVRHRWFKCLKCGYENDRDIIAIINLYIRGRGSLTLSTAPQVRDVNPNQWGEPPTL

SEQ ID NO: 46471 - protein, 187 aa, unknown
  TnpB Polypeptide
MDNGISKRIVTNKMAALWHKRERQINGYIAQTVGLLFKKVKEFDIDTIVIGYNAGWKQNSHMGKKNNQKFVQIPFQKLMAAIENKCIKEGIRFFKQEESYTSKASFLDKDPVPVWSKNDRTQYRFSGKRITRGLYQSKAGTCIHADINGAMNILKKSGVVELDDNLKVKTPILLEVQKRKAIASRIA

SEQ ID NO: 46472 - protein, 386 aa, unknown
  TnpB Polypeptide
VLNRTFGCVRVVWNRTLAWRHARYQSEHVKTNFTQANAYLTAMKATEDLGWLNEVSSVPLQQAIRHQQVAFSNFFAKRARYPRFKSRTGRQSAEYTRSGFRYRDGRLFLAKMDAPLAFAWSWPDVDAASIDPTTVTVSKDPCGRWYVSFVVDVADPVQLPVTGAVVGVDLGIKDFAVTSDGEKIPNPRGLARREQNLARYQRRLARCQQGSANRAKARAKVARAHRKVRAARADFLHRASARLVRDHDVIVIEDLAVKNMVRNRALAKAISDCGWGAFRRMVEYKAARAGRRLVVIDRWYPSSRTCSACGHLLADLSISTRTWQCPSCGTRHDRDINAAKNILAAGLAVSACGADVRHSGSARMRSAVKQEPRPARTGISILQDGE

SEQ ID NO: 46473 - protein, 488 aa, Oligoflexia sp.
MSKENLVLKLKLEGTDSSIAELNGQSRICNWLYNHLLQKCHELKSEFIHSGSPEASKTLYTKRGLRNALPKLKQEHPFLKVVHSSPLKNTALRLSDAIQVHQKSRKGKRKGKQVGWPKFRAWKQNWFSLFYDEPEKGFKIQDQTLVLSLGIGEDRKRRSITLNLPEAFLLKNKIVRNLRIISELGQYYAIFTIQKELPVRKSISKIIALDPNHKNLAYGVDTNGAAIEIASPKWLKNYDKRLDELKSKRDSCNKKSKKLPVTDAKGIPTGKEFYLPSKNWAKYDHALKKALRKRREQTKTFMFTSAHQLFKNYDCVGIGDYTPNGEGITTPMRRAMNNRSLNRRWKNTLAWVARKSGKTFIEFDEKGTTRTCHHCLHVVEQGIPVTLREWQCPQCQTEHIRDENAAINGLKKVLRDLPQKNEGKHPSIVSGSDLAFVKERWAWCVLPSGVFIHSRGQNGEVIRNTRKLNRGHDSPRSKADHLVMYDHV

SEQ ID NO: 46474 - protein, 367 aa, unknown
  TnpB Polypeptide
MIARRAILIKLPRDRCDVDYIKRLMALTNLAYRNYEVWVTDMPKNIQHQLYGSFKNYMGSLVFGAEPKRWFAETWVPLKTLRVFQDGSMKGDRNASVVLDFRSNTIRLRQVCKSEPRYSIELPMPRWVVERVREGGDIKFARIGLKDNEPYLALIAERVVEPYQPSGYVLVVDVNSWRYGIAWGLIKNGKLITWKTEKPDTFLINTLYHQAVDRERKAGKLKGLGYSKSVRVDRIKEQAHARKSRIYRVTRDKAYFLAGKLVRKALKYRAVLIIDDMTEESRKELLEEKLPPDVIKLLMSNLRRFVHQLETLARWYGVPYEFKRLPSTICPICQHELTQLPDRVMVCPNCGFKAPRDQVPIYWALAF

SEQ ID NO: 46475 - protein, 396 aa, unknown
  TnpB Polypeptide
MEVTRVLTIQLNPNKEQTIVLGHLTYSASKLWNVANYKVANKQVKLNQLKQTLKQDFWYKNLHSQAAQAVLEKLQIAWENCYKKHTKKPRYQPKDGHFPVRWKKQGFVVENNRLRLSLSKQTKTYLKEEYSIESNYLWIDLPKNLSLSRVQEVEIKPHTIYGHTVYVMHIVYRKEIIPIKLNSKKTMAIDLGVTNLATCVAENVKPTIYDGKFLISKLRLHNKKKSKLQSVIKLSGYSTSKKLFNLIIKEKNYTKDYIHKVSTLIVRQAKQNDIGCIVIGAMSDGITLMDIGSKNNEKLHKIPFGRLYSLIRYKAEEIGISVIKVDEAYTSQTCCSCGIVKKSNRKHRGLYICSTCKTVINADVNGAVNILKRVTPNLEIDRSRGFLDNPVRIRIS

SEQ ID NO: 46476 - protein, 433 aa, unknown
  TnpB Polypeptide
MYRRTMLEMTRSYVACITNHEQVRDDLSDCRFSVSKLWNIGRYYIQQQWDEDDQIPGEAEVKSELKHHERDNDLHSQSSQRVLEELAEAFSGWYDSDDNANPPGYRKRDEDHPRSTVTWKQKGIKHDTKHGQGRLSKGWNLNLNLNLKDGGSDFIFVEYETPPNVEGENIQQVRAVWNGDEWELHLVCQKEIPDAQDDKTAGIDLGNSNYLAISYEDGAHELYPEYVPKQNKHYLTREEYQTEGENSSWKRGRKARRKLSRPKDHFLHTLSKHVVQWCVKEGVAQIAVSDPSNIHGDENGDSRNWGQSRNKKSQGWESARFTRMLEYNAEEHGIVVDQVDEEIPSKTCSCCRQIRESNRVERGLYVCELCETTMNADVNVCRQIAQNPPTGHMSNGWLAQPGVFLCDRESGQFTPRKRGDCKPSYPNARESHP

SEQ ID NO: 46477 - protein, 381 aa, unknown
  TnpB Polypeptide
VTKSKKLRCSPTPAQRQILKRWCGTSRFVYNKTVEYFKQPDTKAQWKKIKGPLLDSLPPWCAAVPYQIKSLAIRDACKAFTQVKILTKQGKRKDDGALPEIHFRSRHDPVQSFYVPKSAVSVRGIYHTLLGTLRFREALPALHGDGRVLCAYGAVYLSVPVPGQQHAAENQGRVVALDPGIRSFLTFFAEESCGWLASGDFSRIQRLCTYLDRLISKADTSKSHAKARLRKAASRIRRTIRNLIDELHHKVALFLVQNFDVILLPTFETSQMVSNGARKLRAKSVRSMLTFAHYRFKMFLKHKAFEYGKTVRDVCEAYTSKTVSWNGEIIKNLGGRKVIQSTQDGQRMDRDLNGARGILLRALEDTPLVRDLLVPCIVNER

SEQ ID NO: 46478 - protein, 238 aa, Escherichia sp.
  misc_feature (116)..(189): Xaa can be any naturally occurring amino acid
MRYRNSRQVTGVVKNVTASQSCGKWYISIQTENEVSTPVHPSALMVGLDAGVAKLATLSDGTVFGPVNSFQKNQKTLARLQRQLSRKVKFSNNWQKQKRKIQRLHSCIANIRRDYXXXXXXXXXXXXXXXXXXXXXXXXXXXXXXXXXXXXXXXXXXXXXXXXXXXXXXXXXXXXXXXXXXXXXXXXXXSSGVAVRCLLFRQRTQASVARAVVIQRKKIACHKVNSDARHVDIQRTLM

SEQ ID NO: 46479 - protein, 379 aa, Sharpea sp.
MANKAIKYRVYPTTEQGTMFSKTFGCCRKVYNLMLSDKIEGYRTTGKFPAVTPAQYKDEYPYLREVDSLALANVQMNLQAAFRHAFSKSRKKNNGFPKFKSAKHSRRSYTTNNQKGTVAIIDNKYIRLPKIGKVKAVIHRVPESGWLIKSATVSQESDGRYYVSVLFEFENAENNYIVDKANAIGLDYASDGLYVDSNGNAGTNHKYYRESHDKLAKAQRKLSRMKGSKKHEDKSNNYIKQLRKVNKIHRHIANQRLDNLHKISTEIANQYDVVCVESLNMRSMANRSFGNGKATLDNGYGMLLNMLEYKLSDRNKYLIKVNKWFPSSQICSCCNTLHPEMKDLSKRKMICDCGLTISRDQNAAINILNEGLRLLSEVA

SEQ ID NO: 46480 - protein, 598 aa, Moorea sp.
MLVLEYKVKAKQAQYRAIDEAIRTVQFVRNKCLRYWIDAPREATIKRFDLNKYSTELRQEFTFVKDLNSMACQASAERAWLAISRFYDNCNSQKPGKKGYPRFQKDNRSVEYKTTGWGLHPTKRRVTITDKKGIGTLKLLGKWDIHTYPVKSIKRVRLLRRADGYYCQFCVDVECIDPQPHTGHEIGLDVGLQSFYTDSNGYTEANPRFLRKAESNIKHAQRRIYKKKKGSTRRCKARARYSRKHLRVSRQRNEHAKRLARNVCKSNDLVAYEDLRVSNMLKNHCLAKSIADASWYQFRQWIEYFADKFEKLAVAVPPQYTSQECSQCKRVVKKSLSTRTHICQCGCTLDRDTNAAINILLKAKSRVGHTQSKAKGVATSTLLGATLVEQVVTKNLESPLLKHGECQLEELKSSAMNVTVECQKRPEGSKPRALRRSGLIPTVLYGHNGAESVSLTMTAKAAEDLLKAASVNNTLIELSIPDLSWNGPVLLREIQSHPWKNSLYHLSFFSVASQNKVEVVVPLKLVGESVGVKQGGILQQRLTTVKVQCPPDKIPETIDIDISNLELGKMFYINELVLPEGIQVIDDPKLSVLAITSK

SEQ ID NO: 46481 - protein, 147 aa, unknown
  TnpB Polypeptide
MKGEATRQNIQKQVLKVQKLHHRIDGIRTDYINKTIAEIVKTKPSYIVIEDLNVKGMMKNRHLSKAVASQKFYEFRTKLEAKCKELGIELRIVDRWYPSSKLCHKCGGIKKDLKLSDREYICECGYRADRDFNASLNLRDAKTYEVA

SEQ ID NO: 46482 - protein, 514 aa, Cyanothece sp.
MGKSTTPSFVTELPLVVNSRSEKELLSRFQAGRQLYNALLSEAMTRMNLVRNSQAYQEAKKIPKTETKKRQKAFQEARIAYRYSDYDLQAYATVVSNQSRWIGSKVDSNTQQKLATRAFKASEKVMFGQAKRVRFKVSSRLRSLEGKTNKQGIRWSNNQFVWGKLKLKAIINPLNLVTQHGLNAPIKLVRILWRELNGKRRWYVQLVCEGKPFIKPKNTVSDGLIGLDLNLHNLAFVGDEQAGLLPFAEGVPDLSREIRRLQRRMERSRRANNPDNYYPSFKARKGRKQILKKGKAKKGKRQWRISQIYGLSARQKRELERKRTAYARTQNRRLVNEVLRHGKHIKTEKVSLKGWQKRFGKAIGAKSPSFVQSELKRKAENANGSFIAFSTQTTALSQTHLTGERIKKSLSERIHDDVTGVIMQRDLFSAYLSRFVEDNKLSCADAQFEYPRSESILKGAWESFDLQMAKRVGASESPQLVVTSTPAEPFPLKLGKISQIAIPKGFGRQANSHS

SEQ ID NO: 46483 - protein, 212 aa, Cyanothece sp.
MYAGHKFRLYPTNEQKEALDKAFGCARWYWNYSLELCQKTFQETGKGLTRNKIQSLLPGLKKEHEWLKRDIYSQCLQVVALNLSTAYKNFFEKRAGLPRFKSRRVKQSISYPQNTKIKQDCIHFPKLGDIYCRFTRKFEGEVKMMTISKTPEQKYLVSILVDDGQDAPPLSSEGKAVGIDVGLLDFCVTSDGSKYNNPKHWNKHFKKLKRRQ

SEQ ID NO: 46484 - protein, 386 aa, Cyanothece sp.
LCQETYSKTGKGLSRGYIQGLLPGLKKEYPWLTDAYSQCLQVVALNLSTAYKNFFDKRTKLPRFKSKHGRQSISYPANVKFKDDYLKLPKIGLVYCRRHRDFEGTIKTVTVSLNPDGKYFASVLVDDGKETLEPSTEGKAIGIDLGLTHFCITSMGSKYDNPRHISKHSKNLKKKQQSLSRKKKGSNRRNKAKKLVAKVHSKIARCREDFLHKLSRKIVNENQVIAVENLKVKGMVRNHNLAKAISDVGWGMFCTILKYKAHREGKTYIEIDRFFPSSKTCNVCLNQVGSLPLDIRNWTCEHCQTNHDRDINAAINIKNEALRILSLGTRGSAVLGSPQVERLPCDTANGGDVRRLGGRIPCLLDQSPMKLEAPTNLRYSWGSSHL

SEQ ID NO: 46485 - protein, 552 aa, Cyanothece sp.
MGQKKSLKASLTRISRSKIKTDKPVYQMLRGIESKIEYHPFLEDWGNSYQSILRAALNDRQKGLSETEIEKSYQKKYNIQWAWADSLATNATAVFDQLTTAKINQIEQIETELKTGLIKSQEQIEKLEISLSNPNRKNTRNLTKKLLGLKSKLQRLQRKKQQLEQLKQSKRLHICWGSKKLFNAQYHLEENGYSSHDEWFYDWRKKRGGNFYSVGKGSVDGNNPVTKIHHSSEDIFTVTITVPRCYQDTYGQNLTLKFEVTQARKHDLLYALEANKPVTVQIFRREHKDDQWYIHLSTYIQAVPYISSLKNGCLGIDLNANSIDLVYIKRDGNLHQIQGQKTVFSWEIPTGTTGQVEAALRDIVAEIVRIAESFQCPVACEDLDFSKKKASLRHQSKKYSRMLSGFVYDKFRSFLVARAEKYGIEVIFKNPFATSVIGLIKYMPKYGLNSASAAAMVIARRALGYSERIPSSYLSLICPELPEDGSGHSWSQWGKICKLLNLQKIPRHSLFEPAKVLEVLQIAVSRTKEAQYKPEYGEESQIYFFISSSLKQ

SEQ ID NO: 46486 - protein, 425 aa, Cyanothece sp.
MLVLEFKVRAKKHQYLAIDEAIRTAQFVQNKCLRYWMDNKGVNKYDLNKYCRVLAHNFEFANKLNSQARQSSAERAWSAISRFYDNCKKKVPGKKGYPKFKKNCHSVEYKTTGWSLDNNTRKAITFTDKKGIGRLRLVGTYGLHFYPIESIKRVRLVRRADGYYCQFILSVDLKIETEPTGKAIGLDVGLESFYTDHEGNKIENPRFLRRGEKKLKKLQRRVSKKKKGSSNRRKARQRLAKKHLKISRQRKEFAKRVAYCVVQSRDLIAYEDLRIKNLVKNHCLAKSINDAAWYQFRLWLEYFGTKYGKVTIAVPPQYTSQNCSKCGETVKKSLSTRTHVCSCGCKLHRDENAAKNVLKLGLSTSGHCGTWLTDSLNAWGDDASTLTEVILSKQATSVNQESPTLLALRLVVGVSILHENYLTNG

SEQ ID NO: 46487 - protein, 303 aa, Cyanothece sp.
MKSRSGAPQYALKYLREAWGKCFLHQGGSPKFKKKNRDDSFTLDGSIRVDNFKIKVPRIGWLKTYERLPQGVKPSSVTIRRKADKWFISFKVEVDPKPTDKSPDVLGVDLGVNRLATCSNGQVFSGVKAYRKLEKKLTKLQYHNRNKTLKSSNWYKAQNKIALLHLRIANVRKDYIHKMTTEIAKNHSQVVIEDLNVKGMLKGGKLAKAISDGAFYEIRRQLAYKCELYGSELILADRWFPSSKTCCICGSKKESLSLSERVFDCEKCHNKLDRDLNAALNLSKLGQAMPEVTPVDKKTSVAP

SEQ ID NO: 46488 - protein, 396 aa, Cyanothece sp.
MYKAYKFRLYPNTEQQIALAKSFGCARWYWNYSLNLCQETYNKTGKGLSRGYIQGLLPGLKKEYPWLTDAYSQCLQVVALNLTTAYKNFFDKRAKLPRFKSKHGRQSISYPANVKFEGDYLKLPGKVGLVYCRRHRDMTGTIKTVTVSKNSDGKYFASVLVDDGKEQPESSTDGNAIGIDLGLTHFAITSNGSKYDNPRHVSKHSKNLKKKQQSLSRKKKGSNKRNKARRLVAKVHSKIARCREDFLHKLSRKIVNENQVIAVENLNVKGMVRNHNLAKAIYDVSWGQFCTMLKYKAEREGKTYIEIDRFFPSSKTCNVCLNQVGSLPLDVRNWTCEHCQSHHDRDINAATNIKNEALRILSLGTSDTANGGDVRRLGGRIPCLLDAIPDEVGSPN

SEQ ID NO: 46489 - protein, 400 aa, Cyanothece sp.
MPEVQTITIACKLKVGSELAKEIDETFLTFAIACDWINNNTPVKLTNKTAMQSLVYQDVRAKFGLSSNLAIQALRRVCANRKTAKQKGRKVKEFSPTSVSYDARIFSFKESDWTVSLKLLHKRRKFELLIGNYHRGMLKGTNPTSATLVKRKNGDYYIHINLDKPVPEPIKTDDVIGVDLGRTDIAVTSEGDSWSGKQITDLRNHYAKMRAILQRKATKGTRTTRGRCRQLLKRLSGHEKRFQSWLNHCISRKLVDNAVANKKAIAIEDLTGIRERTNKKSRSKKDKRLGNNWAFYQLREYLTYKCLLAGVKLILVNPAYTSLTCHKCFVIGDRNGKKFTCSSCGTMDSDWNGSKNIAALGAIITRPRGTGLSCEIKREVQYIQLTLFDALGLPKTATSA

SEQ ID NO: 46490 - protein, 402 aa, Cyanothece sp.
MLNVLKVRIYPNKEQEIALAKNFGSVRFVWNYYLNKTNTQYVETGKGMTYCQMAKHLTLLKKNSDYEWLKEATAATLQQSLKNLETAFKNFFSKRAKFPKFKSKHKKQSIRYPESCSIRNNGLKLPKLGVVKAKISKNINGKIKSVTVSKTSTDKYFAAILFETDDLITIDKLKISGIDLGLNSLVTVFDGEITYKVDPIKPTRKYAKRLRRRQQTLSRRVKGSNNRRKAIKKVARIHEKISNTRQDFLHKLSRKLCDENQIVVSENLNIKGLARTKLAKSIHDAGFGMLLNFLSYKLEREGGKLIEVDRFYPSTKLCSCCGFKNDVLTLSIRDWVCPSCLTNHDRDGNAARNLRQEGIRILSTNTVGHTEFQACGETVRLIGTCTKKQVSENQESVVTALA

SEQ ID NO: 46491 - protein, 500 aa, Cyanothece sp.
MLLGYLYKLRPNQEQSAKIDSWLDLLRSTYNWSLADRINSYHQSFIQGEYCDLRSKAVASPLTCCIVKGGATGEPWKDNGKKRSVCEMQMTSLPELKKARPWYKEIDSTVLQQNLKRLEVAYKNFFSSNRKFPKFKNCSTFRSFTYTVGVKLKGNKIYLPKLGWIKYYNSRPLPDGFKIKSVTVRKKSDGYYVSIRIEDVSVPSFPIKPVEEIKTVIGLDMGLGKLIYCSDNSAINNPKFATNPKTKRLQRIIQRRVSRKKKRSNNRKKAQKKLSLFQHKIAQKREAYQWQAAQKIVNSSDAIAVEDLKISNMVKRCKPKYDKEKGRFLKNGQSAKRALNRLILDASWYSLIQKIEYLAAKSGKIVLKVNPKHTSQECSKCHHIDSSNRKGEKFLCVRCGHVDDANFQACLNIKNKAINQYQLKIKKRTFSQKKCELIKVGRDLPEPKQLNLFQTSTSELTGGKRRKHSARNGKQNVPGNLGKQLNLFEQENNYRASDTL

SEQ ID NO: 46492 - protein, 510 aa, Cyanothece sp.
MTKASSPSFVTELPLVVDSQQEKELLSKFQAARQLYNALLGEAEKRRKLVQKSPIYQEAKATSRTEKKLRNQRFTKARQQYRYSDYDLQAYATIVSNSSKWIADKLDSNTQQTLASRAFRASERILLRKAKKVRFKVPTRFKSVEGKTNKQGIRWKNNHVVWGKLKIRPIINNDPLILHGLNSRIKLVRLLWRELNGKRRWYAQLICEGIPYQKPANYVKEGIVGIDLNISNIAFVGNEKAGLLPFAVNVPTYSKEIRFLQRKMERSRRVLNPHKYYPDFEGKKGRKTVTKKGKVKKGRGKWNNSKTYLKTAQKKRELERRKTAYAKSKNRQIVNEILRHGNQIKTENVSVKGWQKRYGKAILAKSPGFVQSELKRKAENANGSFNLFSTQKTALSQTHLTGSRVKKSLSQRIHVDETGVIMHRDLFSAYLSRFVNDEDNLLLHFAVEQWKRSEPVLLQAWKEFQINCKQVSASESRLCHSSSEQFCTKLEKDIQIANLLRLGRQDISSF

SEQ ID NO: 46493 - protein, 427 aa, Cyanothece sp.
MLLTQTVRLKLTKPEKDMLSDLCHLSKNLFNVGLYTVRQYFFQENKYLSYESNYHLCKENENYQLLATDCGQQTLKYVDRCFKAFFRLLSMRKEGTYRERVNLPRYLPKDGYFPLIIPIRKRHDFVKDDWKFKIPTSRKYAREHGSVYITVPPNIRDYQIKEIRILPRQKGKFLEAAFIYESSNEQVNFVNDEAISIDLGLNNLATVVSSTNESFIIDGRWLKSINQWFNKRRAKLVHHKDKQGIKHLTKQEAWLSYRRKNQVNDYLNKAARYIINFCISRKIGTIVVGYNPTLKQETQLGKRNNQNFVQIPIFTLRAKLESLCERYGLNYVEQEESYTSKASSLDHDEIPVYNADNPVNPSFSGRRVKRGLYKTKNGHLINADANGSLGIGLKSSYKEIFLRVGRVCLTQPVRVNVLQKSPITASA

SEQ ID NO: 46494 - protein, 399 aa, Cyanothece sp.
MYKAYKFKIYPNTEQQIALAKAFGCCRWYWNYSLNLCQETYNKTGKGLSRGYIQGLLPGLKKEYPWLTDAYSQCLQVVALNLSTAYKNFFDKRAKLPRFKSKHGRQSISYPANVKFEDDYLKLPKIGLVYCRRHRDFEGTIKTVTISKNPDEKYFASVLVDDGKEQTEPSVEGKAIGIDLGLTHFAITSNGSKYDNPKHLVKHSRNLKKKQQSLSRKKKGSNRRNKARKLVAKVHSKIARCREDFIHKLSRKLVNENQVIAVENLNVKGMVRNHNLAKAISDVGWGQFCTMLKYKAQREGKTYIEIDRFFPSSKTCNVCLNQVGSLPLDVRSWTCEHCQTNHDRDINAAINIRNESLRILSLGTSDTANGGDVRRMGGKLDYLLDAIPCEVGSPNYTVG

SEQ ID NO: 46495 - protein, 383 aa, Cyanothece sp.
MGNKAYRFRLYPNQEQQAFLAKCFGCSRFVYNHFLRVTTDVYAESKKHFRYKEWARLLVQLKKEFQWLAEVNSQSLQQTLKDLESAFTRFFKKLAKFPRFKKRLSRQSFRVPQHFSVTSDGKLKLPKMNPIKMVVHREIEGTLKNVTISKTPSGKYYASIVTETEIYKAPLTGEKIGLDLGLKDFVITSKPEKFPNPRYFQKSLRRLKIRQRRLSRKVKGANNRSKARLIVAKIHEKVANQRLDYQHKISLKLTCENQAISCEDLNIKGMVKNRKLAKQISDVAWGQFLTLLEYKGDIYGCEIHRVDRFFPSSKRCSKCGYIKEDLTLTDREWTCPECSEHHDRDVNACYNLLQFSDLKIPLEEREFTPNQTVEMLCIKSVSS

SEQ ID NO: 46496 - protein, 303 aa, Cyanothece sp.
MGEVKEKIVRKGTRTDKKGIGTIKLKGTRDLNFYPLDQIKRVRLVRRADGYYVQFCISVDIREYSKPLEPTKHCMGIDVGLKVFYADSDGKTVEIPQYYRKAQKQLNRLNRRKSKKFKKGKQQSNNYKKAQAKYARKHLRVSRQRKGFVQREALRVIQSNDLVAYEDLNVKGLAKSKLAKSVNDAAWSTFREWLEYFGFKYGKATVAVPPHNTSQNCSNCGEKVKKSLSTRTHKCPHCLYEEDRDVNAAINILKLGLSTVGHTGSKAWGDLPSSSIGEILLGYGESVNQESLASRDGSVNLLK

SEQ ID NO: 46497 - protein, 463 aa, Cyanothece sp.
MFQNLSIKLKLNLNKEQKESLRQVSLAYRDALNYTSQIAFENGKSSNGTKLQKLVYYKIRERFKLPAQMACNVPRQVSASYKGLWTKFRQNKQAREKGITKKRYKGLDKTPKFASRTCTLNYLRDYSFKNGHKVSIVTLSGRIVVSYSGYNKHIDWIKDKGKIGAAKIFYNRTNKTYYLLVSVEIELPDINPENVSRVYGIDVGQRYLAVKAGIDDSAEFFSGKEIRHKANRYHRARKTLQRKGTRSAKRRLVALSGRERRFIAGINHQISKHIAQPNSLIGLEQLAHIRERTQSKSGKRASKRQRKAKRNKAKWSFAELHSCIDYKAIMNGSLAIKVMANYTSQCCPKCGHVSKENRPNKGLNFVCQSCDYQLHADLVGGRNIALRALLIRQDWISTGILSASPNVSDDEAKAKSLQRFLELRWSPDASPDLSFLRVGVVDLQSGENPPTLVFDASGTHPTI

SEQ ID NO: 46498 - protein, 304 aa, Cyanothece sp.
LKDLESAFTRFFKKLAKFPRFKKRLSRQSFRVPQHFSVTSDGKIKLPKMTPIKMIIHREIEGTLKNVTISKTPSGKYYASLVTETEIHKAPLNGEKIGLDLGLKDFVITSKPEKFPNPRYFQKSLRRLKIRQRRLSRKVKGSNNRGKARLRVAKIQEKVTNQRLDYQHKISLKLTCENQAISCEDLNLKGMVKNRKLAKQISDVAWGQFLTLLEYKGDIYGCEIHRVDRFFPSSKRCSNCGYIKEDLTLKDREWTCPECSKHHDRDVNACQNLLMFSDLKIGQEVPEFTPNQTVEMLCIKSVSS

SEQ ID NO: 46499 - protein, 405 aa, Cyanothece sp.
MQKKVVKIRLYPTNEQQHQLAKTFGASRWWWNFALNKSIEEYEKTGKGLGQSALNALLPKLKKDEDTKWLKECYSQVLQATTLNLTVAYKNFFAKRAGFPRFKSKKNKQSAQYPQNVKVLESAIVVPKIGEIKAKIHRPIDGIIKTVTISRNPSGKYFASILFEVEEDDPKVSTEGSTIGIDLGLTHFAIVNNGSKTSKFDNPKHLAKHEKNLKRKQKKLSRKQKDSISRQKYRKFVAKVHERVSNSRQDFLQKLSHKLVDENQVIVVENLHVKGMVRNHKLAKAISDVGWGTFVDFLDYKLQKKGGKLVEIDRWFPSSKLCSNCFYQVEEMPLDVREWTCPNCGVKHDRDGNAAYNIRAEGIRILQADGAAVSAVGGEVRPMRGRKSKLRHSPLSTEAAPIASA

SEQ ID NO: 46500 - protein, 392 aa, Cyanothece sp.
MEQLLTLVVKLQPNNQQKELLVDTAVAFANACTWINNNVNSNLTNRNSIQAVCYKNIKEQFGLTANHVVRACARVGANRLTAKHKKSKVKAFKPSSFDCDARTFRFIEDGYKVSISTTGKRVTIPLRVSNYHIGKLKGQNPTSAQICQHRDGNWYAHIQLKSTAPEPTKNSNVIGVDFGRRDIAVTSLGQAWSGKDIQQTRDKYSRVRASVQKKASQGTRSTRRRCRKIGQRLSGRERRYQTWLNHNISKSIISDALASNSLVAIENLTGIRERTNEKPRSKTERRRSNSWAFFQLRTFLEYKGIKEGIEVIAIPPAYTSQTCHCCLHIGIRSHKNFKCNNKACGWIGDSDRNGAEMIRLWGCSVSQPRGSELLACPIDSRATKSPRILCVG

SEQ ID NO: 46501 - protein, 405 aa, Cyanothece sp.
MYLNIEQQIALAKSFGCARWYWNYSLNLCQETYNKTGKGLSRGYIQGLLPGLKKEYPWLTDAYSQCLQVVALNLSTAYKNFFDKRAKLPRFKSKHGRQSISYPANVKFEGDYIKLPKIGLVYCRRHRDMMGTIKTVTISKNPDGKYFACVLVDDGKDTPTPSTEGNAIGIDLGLTHFCITSNGSKSDNPRHIAKHSKNLKKKQQGLSRKKKGSIRRGKARKLVAKVHSKIARCREDFLHKLSRKIVNENQVIAVENLNVKGMVRNRNLAKAISDVGWGMFCTMLKYKAQREGKTYIEIDRFFPSSKTCNVCLNQVGSLPLDVRSWTCEHCQTNHDRDINAAINIKNEALRTLELGTRGSAVLGSPQVERLPCDTADGGDVRRIGGKLDYLLDAIPDEIGSRNHNL

SEQ ID NO: 46502 - protein, 404 aa, Cyanothece sp.
MLLCHDVSFARCMEQVLTLVVKLQTNDQQKELLVDMAVAFAGACTWINNNVNSNLTNRNSIQAVCYALVKKQFGLTANHVVRACARVGANRLTAKQKSKKVKGFKPTSFDCDARTFRFIEEGYLASISTTGKRVKIPMRVSNYHIGKLSGQNPTSAQVCQHKDGDWYVHIQLKSDAPKPIKTDKVIGVDLGRRDIAVTSTNKSWSGKEIQEKRDKYARVRASLQRKATQGTRSTRRRCRQIWQRLSGKERRYQQWLNHNISKVIINEAKQSQSVVAIEDLKGIRERTNQKPRSKTERRRSNSWAFYQLRTFLTYKGISEGVEVIAINPAYTSQTCHCCLHIGLRSNKSFKCSNKACNWIGDADLNGSLMIAIVGRSVNTPRGSELLACPIDSRATESPRIPCVG

SEQ ID NO: 46503 - protein, 406 aa, Cyanothece sp.
MLTCNYQFKLKPARQQVKEIENYLTACRKVWNYALAERKDWSNSRKSDTNKCSLEKEYIIPADAPYPSYKLQTASLTEARKVCTDLKDINAQVLQQVLRQLDRAFAQMKSLNKGFPRFKNKYRMRSFVFPQFKTNPIANNYIKLPSIGLVKMKLSRPIPEGFVLKQARVIRKASGYFINLCFQADVNVPNPFPHGNPLGIDIGLDYFAVTSNNELIKRPRFFNKLHRKLRLLQRRLKNKKKGSNNRHKLNRKIARLHQTLSDTRKDFHYKLAHRLCDGNGMIFVEDIDFRAWGRNMLCKHNLDASFGQFFEILSHVCWKRDVYFAKVDKNYTSQICPNCGVHTGKKELSERLYTCPECGFSCNRDFAASLVIRNRGLVAVGQPVNENACGDGLTGLDSNIKLVKNL

SEQ ID NO: 46504 - protein, 446 aa, Cyanothece sp.
MRIAHQYRLLPTTNQKATINRWLDMLRHQYNHLLSDRFNWWECNRSPVNSCPLVCHLPELREQPDYYSQKRSLVELKDSRPWYKDIHSQVLQNCVERVKLAMNRFIKRDSKGQKSGKPRFKAKNRYRTFTYPQGDNKWIVGNKINLPKIGLIKVIWHRPIPDGFTVKTVSITKKADGFYVTLSLEDKTISDFIPVEILPTMGNSIGIDMGLEKFATTSDGVLIEPSKFLRKNEEKLNSLQSKASSRPKKSRARKLLYKKVAKLHQKIARQRKQFHFEESQKLLSRADVIFVEDLSVKNMSRRCKPKIDEKGNYLPNGQSAKSGLNKSFADAGLSQFVEILSFKAEKAGLKVIKVDPKGTSQHCSNCLEKVPKELSDRWHCCPFCSTILDRDLNSAILIKKVGLGIASLKNAQPTPKGRKRSPRRTASAVGDGSMSLKMIMSKAHPN

SEQ ID NO: 46505 - protein, 418 aa, Cyanothece sp.
MQLVQRHIVSQSHSYWKYFDQQCFLSKNLFNLTNYEMRQYFFSTKSVLGFTELYHKVSQTDAYYSMPNTKVAKQVIRRIHKAWVGYKSAHKDWQKNPHKYLGEPRLPKYKPKEKGRYMLVFPLETVSKPYLRKGRVKLTPCPIQIETGLQEVIEVRVVPRSGCYVIEVVYEQQELEKTTGNIVAGLDIGLVNLATLTTNQSGVKPLLIKGGALKAINTYYNKQKSKIQSNLELRHKVKTSNRLNALTHKRNCRIDNYLHTTSRRIIDWCIANQINTLVIGKNEGWKQSINIGKRNNQQFVNVPHAKLIDQIIYKATLVGIEVITTEESYSSQASFLHFDPLPKYGEKKPKFSGKRVCRGLYKSDLGILNADINGSYNIIRKQVKSNAIFDSHDLKALPFMPSVLDPLRTHNINFLQVV

SEQ ID NO: 46506 - protein, 440 aa, Cyanothece sp.
MLVQKAFKVTLIPNRTQEVLISKTIGCARYVYNRFLARRKELYESEKKTLTYTGCSQELTQLKKEVEWLKEVDKFALQNSLKNLETAYKNFFSDLKKPKNQRRFYFPNFKNKHGFKQSYKTNLTNGNIQIRENYLKLPKLGWVRFHLSQEIDGNLVNVTVTRTKTGKYIASILCETKIEKHPDLNKSIGLDLGIKSYLVTSDSEEIENPKHYRKALRKLRKANKKLSRTIKGSKNRVKAKTKLARIYERITNLRNDFLHKLSTRLIRENSVICIEVLRVNNMIKNHKLALSIQDASWSKFVAMLEYKANWHDRIVQKVSAFFPSSQTCSCCGFVNREVKDLSVREWDCPGCNTHHLRDFTAATNILNEGLRILQEGLCGEVSSQGAVSAVRRRTLYAPPPCTPRAVAGSSKAQNACGESVRPDNIQAGIVETGITPLPVV

SEQ ID NO: 46507 - protein, 396 aa, Cyanothece sp.
MLTCNYQYKLKPTKRQIVEIENYLNACRKVWNYALTQRKDWSNSRKSDLNKCSLLKEYIIPADASYPSYKLQSASLTEARKFCPDLKGINAQVLQQVLRQLDRAFTEMKSLNKGFPRFKNKYRMRSFVFPQFKTNPIVNNSIKLPGLGLIKMKLSRPIPEAFTLKQARVIRKASGYFINLCFQALVNVPSPFPHGNPLGIDIGLDYFAVTSSNELIKRPRFFNKLHSKLRLLQRRLKNKHQRSNNRHKLNRKIARLHQTLSDTRKDFHYKLAHRLCDGNGMIFVEDIDFKAWGRNMFCKQNLDASFGQFFEILSHVCWKRDVYFAKVDKNYTSQICPNCGVHTGKKELSERIHTCPECGFICNRDFAASLVIRNRGVSAVGQSVLENACGDGRYGV

SEQ ID NO: 46508 - protein, 227 aa, Cyanothece sp.
MSESPVTDTEIEVIKTDIKEIKGSQKAQIWALIGVLATAVVGTVIRFVITALPGNPYTDKKGIGRLKLIGTYDLHFYKIDSIKRIRLVRRADGYYCQFILSVDVKIEIQPTGKAIGLDVGLESFYTDHEGNKIENPRFLRKGEKKLKKLQRRVSSKKKGSSNRKKARQKLGRGHLKISRQRQEFAKRVAYCVVQSRDLIAYEDLRIKNLVKNHCIANDLYSGRRNPV

SEQ ID NO: 46509 - protein, 418 aa, Cyanothece sp.
MATKRITFRLYPNKAQNDKLHYWRKLHCLLYNACVYHRKTEYKKFGKSVNYFDQQNCLPEFKKCWTEYLELGSHALQATVKRVDFAFQRFFKLKLGYPRFKSSRHYKGWTYPEQAGWKIESSGHHGFLNISKLGRIKIRGKARDWGIPNTCTIMFKQGKWFASITVECNPIRPTTNTGAIGLDFGLNHAVADSNENFIENPRFLKVAQEKIKKAAKKARRKRNPKRGVRASRRWKKAARKVGKIQSKVARQRQDWQHKVAVEIVSRNSFIATEKLTLKGMTKKAKKGSKRKKQKSGLNKSILDVGIGNLKALIKEKVTDAGGFYIEVPTTKVKPSQTCSNCGHQKKKTLAERIHVCERCNFTCNRDTNAAKVMLNYAKRGQELPSTDLESSTSVLCGSMRQVGAKKSQKHLSQRSGQM

SEQ ID NO: 46510 - protein, 405 aa, Cyanothece sp.
MFILEFKLYGKKTQYKTIDEATRTVQFIRNKCLRYWQDNRGIGQKAIYAYSTVLRKEFDFVGKLNSMACQASAERAWSSISRFYGNCRKQVKGNIGYPKYQKRCRSVEYKTSGWVLSKDRKKITFTDKNGIGTLKMKGTRDLSYFSIDQIKRVRIVKRADGYYVQFCLKEDIRCVKPKELEPTKHCVGIDVGLKYFYVDSDNNQVQIPQYYRQAEKRLNRLNRRKSKKFRKGIKRQSNNYLKARNRYARKHLRVSRQRRAFAERTALDVIQSNDLIAYEDLKVKNMVKNRHLAKSINDAAWSLFRHWLEYFGYKYGKVTIAIPPHNTSQNCSKCGQKVKKSLSTRTHICSCGYIDCRDRNAAINILKLGLRTAGHAGTTILEIGNASGEETSILVGSDLLRQVSS

SEQ ID NO: 46511 - protein, 399 aa, Cyanothece sp.
MSNYIVRKLKLEKTPQLDHLARAAGELYSRTVVSFWRTVRKKNIWLSGYTMERWHTSSSLHAHSSDAIVQCFYNSLKSWRIRRKTDPHSKPPRRRRWYFKVIWKSAAIKLKGGKLRLSNGQSNSPLIVDWYWEKPSIIELGWNKASQCYELRACYKEEIAQPINDGNVAAVDLGEIHPMVIADGVNTDIFNGRYLRSVRRYQNKLKVRLSKLIDRKKFRSKRRKRSIKSKQKQLAKLNNQIKDIEHKLTSRAVSMLKLRGIQTLVIGDVRDIRNGLDYGKKNNQKLHQWSFGSIRIHLEYKCKKAGIKTVLITEEYTSQECLNCRKRNKPKNRNYRCSCSFEFHRDGVGSNNIRAKYLGIVPVVGLMARPSGLRFHSHIQCNLTDNILLGNPRDSIAGE

SEQ ID NO: 46512 - protein, 398 aa, Cyanothece sp.
MLVFEFKCKATKQQYQAIDEAIRIGQFIRNKCLRYWMDASREKKVNYAVLCQIIPDLCKEFPFAEKLNSMARQASAERTWFAVSRFFDNCKKKVPGKKGYPKFKKHSRSVEYKTSGYKISDERKYLTITDKTGIGKLKLIGSHNLSFYDNKLIKRVRLIRRADGYYAQFCIDFSREELLPSTGKIVGIDVGITSFYTDSNGNKVDNPKYLRKSEKRLKKAQRRLSKRFKKGKQQSKRYHKQRNKVAKIHLKVSRQRKDFAVKTAKTLICSNDAVVYEELKIKNMVKNRKLSKSISDASWSIFTNWLDYFGKIHGRYVESVAPHFTSQNCSTCGEIVKKSLSVRTHICSCGCVLDRDENAAVNILRKVFPNTAGQAGIYAQGQTDLCLISESLLDKLTG

SEQ ID NO: 46513 - protein, 421 aa, Cyanothece sp.
MLTCNYQYKLKPTKRQIVEIEKYFTACRKVWNYALAQRKDWSKSRKSDLNKCSLDKEYIIPADTPYPSYKLQTASLTEARKVCTDLKDVNAQVLQQVLRQLDRAFAQMKSLNKGFPRFKNKYRMRSFVFPQFKTNPIANNYIKLPSIGLVKMKLSRPIPEGFVLKQARVIRKASGYFINLCFQADVNIPNPFPHGNPLGIDIGLDYFVATSNNELIKRPRFFNKLHRQLRLLQRRLKNKPIGSNNRHRLNRKIARLHQAVSETRKDFHYKLAHRLCDGNGMVFVEDIDFRAWGRNMLCKHNLDASFGQFFEILSHVCWKRDVYFAKVDKNYTSQICPNCGVHTGKKNKSERVHTCPECGFSCNRDFAASLVIRNRGLNKVASAEDTSAVYDDRAVGHTVLENACGDGLTGFDSKIKLVKNL

SEQ ID NO: 46514 - protein, 383 aa, Cyanothece sp.
MGNKAYKFRIYPNQEQQVFLAKCFGCSRFVYNHFLRVTTDVYAESKKNFRYKEWAKLLVQLKKEFEWLSEVNSQSLQQTLKDLEAAFTRFLKKLALFPRFKKRLLRQSFRVPQHFSLTEDGKLKLPKMTPIKMVIHREVEGTLKNVTISKTPSGKYYASIVTETEIDKAPLNGEKIGLDLGLKDFVITSKPEKFPNPRYFQKSLRRLKIRQRRLSRKVKGSSNRGKARLVVAKIHEKVANQRLDYQHKISLKLTCENQAISCEDLNIKGMVKNRKLAKQISDVAWGQFLAFLEYKGDIYGCEINRVDRFFPSSKRCSNCGYIKEDLTLTDREWICPECSKFHDRDVNACLNILQFSELKIGQEVPEFTPKETVEMQCIKTVMP

SEQ ID NO: 46515 - protein, 400 aa, Cyanothece sp.
MTYDFKLKPNQSQVQMIEAYLETCRKVYNYALRERKDWVNSRKSPVNACSIHSEYIISPDTPRPTYNSQCKSLTEAKKNYPQLTEPHSQVLQQTLRTLEAAFVNMWERGFGFPRFKKKMRSFLYPCVKQEWVGDGWVKLPKIGKVKMRRSRPISNGFLLKQIRVLKRASGYFVQLIYQLAFNVPETPIHGHPLGVDIGLDSYLATSEGELVKRPRFFNQLHGQLKSLQRRLKNKKKGSNNWHKLQGKIARIHQKVDWARKDWHFKLAHHLCDQAGMIFVEDINFKAWAKGLFCKYTLDAGFGQFFNILAYICWKRDVYFLKVDKDYTSQICPNCNTQTGKKDLSTRIHKCPSCGYQTNRDVAASQIIRNRGLVAVGQPVKENACGDVLSGLICDWLDKCQ

SEQ ID NO: 46516 - protein, 494 aa, Cyanothece sp.
MKRKKINTETHYAVTRIGYCIGGDVEKARIMAKRAGRLRSDIWNKYGSLQAWGISHQELYKEFQKTNPPSMYQLPQKQWQKTFERVINDIHACQEAASTIVIRKIYRHFKPEKDKTGKDIHSTSFRGELIKSLKTQEWMQYPLLHRWMRKAYHRGHTYVNNQICVGISNGAKVERVSRNVVKITISGDLIKPRQYEKLTLLFKVGRVTPKGLFQIIFDDVQNEVRLHFPHIVKIKPASGEGKCGLDKGYTEAFTDSQNVTYGDGIGKVMERSVSKRHIRGKGRNKLYQIAIEKNKHHIFQCNLTKKRHQTSENRKKQTLNTMIRTGVNQFFDTYQHAITEDLSFVIKNKKMNRQVNRNLTEWCKGTLSLALEEISYRRSSSVTVVNAAYTSQVDSRYGVLLGTRSGDQFFTFDGKVLQADGNAGRNIEARLDDPHISRFMKSNEVREVLIKRTVSFLEQRDLTLDDAINLGWFNPRHLKGISKEAGGRSESPVA

SEQ ID NO: 46517 - protein, 406 aa, Cyanothece sp.
MIVIEYKVKAKQHQFLAIDEAIRTTQFIRNKSIRYWMDNEKVNGADLNKNCTKLAKEFSFVKDLNSMARQSAAERAWLAISRFYSNCKKKIPGKKGYPSFKKNVRSVEYKTCGWKLDKSNKSITFKDGKGIGKVKLIGSRELNFYSDSEIKRARIVKRADGYYVQFCLSIDPRVAVNTSLEATGNAVGIDLGLIDFMTDNQGLKVPTPKFYRQGEKQLNRTNRKKSKKFKKGQKHQSNNYHKARKRYSLKHLRVSRQRKEWLKRLALRLVKSKDLIVYEDLNVKGLVKNPKLAKSISDAGWSIFRQWLDYFAYKYGKVSLAVAPHYTSQECSNCGMIVKKALSERTHVCSECKSVLDRDENAAINILRKGIYQLSTTLGRRECEASGDETSALIGEILLRASFVNE

SEQ ID NO: 46518 - protein, 348 aa, unknown
  TnpB Polypeptide
MNGNSNGAIPYVNGGLAVPCCVKVKVREFFWKGLDNLLGRCALALERMLAHRDWSSSKYYGDLVPCVVSKSLIAKYQQNPKCCRVRNIVIPVCGDKGKQIKLVEGGIRVPTLFKKAVLPVNWPRSIVGHVRSIELYRREGEWFASICYYAAKDPPVACEGVIGVDRNSVGNIAVFADPQSGTVRKVGIFPARTKFVFRRRRKNLQRAGKTRLLKKLHRKQRRRMSYENHRATRAVVDYAATHRRAVVMEHLEGVTAKDSKIRGYSEKNQWAFAQFGSMLRHKCALRGIPLSEVDPAFTSQTCSRCGSIHRPDGKQFICLTCGHNDHRDANSGFAIAQRGIKILTKRWK

SEQ ID NO: 46519 - protein, 412 aa, Okeania sp.
MLTGGIMQLVERTIIKKNHPNYKSLDALAFLSKNLYNMANYIVRQEFINKGSYLDYNKVQKLLQSGADYKAIPAKVSQQVLILLDQNWQSFFQAIRAYNQCPSKFKSRPKLPKYKHKQKGRNILVYTKQAISKPQLVKNQKILLSKSELFFDSKINYDSLQQVRIIPKLNYYVVEVVYESIEVKLDLYKHHVASVDLGVNNLAAVTSNKKGFQPLIINGRPVKSINQFYNKKKGKLQSELKKTKSSNRIKRLSTKRNFKIDDYLHKTSRYIINRLIENQIGVLVIGNNPNWKQGINLGKKNNQNFVQIPFFKLIEQLKYKGKLVGIQVIINEESYTSKASFLDWDDLPVYQKGVKHKFSGQRVKRGLYKASNGLKYNADVNGSLNILRKAVPNAFSNGIEGVVVHPVKVTLN

SEQ ID NO: 46520 - protein, 273 aa, Acidilobus sp.
VKVLFHRPLEDEVKGVIIKRSATGWYAIFQVEAERKPLEKTGKVVGIDLGVENLVTTSDGVVVENPKVFDKVERRVRTLQRTLSRKRKGSRNYEKARKKLAKMHERVKNLMNDYIHKVTSWLVEQYDEIYVEDLDVKEMVEDSESKALRKHILHADFFKFMSHLSYKASRAGRRVAKVDPRNTSRTCARCGYVKKDLTLADRVFVCPRCGWVADRDYNASLNVLRAGSGLPLEPVDRRSLLYIPFSEGVYSKFPGRSRKSSPRGGDAPPVRTG

SEQ ID NO: 46521 - protein, 382 aa, Acidilobus sp.
MLTGGEGALTVTVRMKVSPEPESQQALLDLMRRYRDALNYSVRTLIASRALSLTKAHRLLYSTLRERYGLPARVAQDCYREAIAIARSWLKNPRRGSTPTVKGLSMWLTHGLGYRVKGDHVELAGSYRLRVIGWDRRYDDFPNREARLVFRDGRFDLYVAKRVPRPAKYAPKGVLAVDVNERQIVVGNSSVEQRIETPVERALRYRRLAERLQGKYSSPKYSAWRRRSGVRRRVRHFHRKARNIIEDWARRTAHIIVSLAKQSQLAVAREDLTGLVESLRELPKSHRTALIALGYRRLGFWLDWQAEKGGVPLFVVEPAGTSSTCPRCGTKLVEVGYRRLRCPNCGLEADRDSIAVLNIEGRALGKMGGSLASPTAPQMTTA

SEQ ID NO: 46522 - protein, 420 aa, Acidilobus sp.
MYSVPISDPRVSELITWYQGTLQRAIDVIWDNIEWKYRFPKVEKGGQVIAPSKFKVPYLPKDRSFKRRLRDYLLQDRPYAAHWVDAAIRTAYSVMESWRKRYLKGKARKVKPRVERRFARCKATLMKVDYDKKSIRITLRPGEHVEVSWNGRWFARRVEGWRVGEVILKDDRILIPFETAKVVDVKEVIGWDSNELSLDGFSPRVGFIKVDLRPLQSMKIVYERKKRIAQSKGLKYVYEKYNVRERNREKDFINKLASGLTKLFPNSVHVFEDLEKENLVSRREPKGRRKRNARTPWKLIQGKASERAVIERVSPKNTSRTCPRCGYVVKTRVGRVFRCPRCGLELDRQKVAAVNIYRRYLRMRGFPHSYDPDETKGELWVGVALRGRSPVIRASMKGALRAVKPREEGLISSYIKPNEA

SEQ ID NO: 46523 - protein, 455 aa, Acidilobus sp.
VYRANIARLAVDEGADEEQRGASEVTRTVTVRSEQLPRRTFKVFVELEGMYRNMVEQLVLYAVDNNITKFTRLKAERYREVRSLYPQLPSHYAYTACQDAAERSHSFLKLRRTGRTRKPHPEVRGVSIWLDDHLWRAEGLTSVSLATHRGRVRVSIEINRHILRYVNRGWRLSSEAKVKLDHRERRLIFYLTFRKEVSVYRPKDYITVDVNENAEAVLIDGIVYLFETGLSRVTLGYYYRRKSVQEKYDRVYGPGSRPARRIFRRLGSNEKALKRDIRWKLAALIVREAAKRQAAIVLERLGREPANHMIERIRNPQLRHRIFQAAFKGVQRAIEEKAREYGVPVIYVNPKNTSRKCPIHGAKIVYGKDRHGTCSKGGETWHRDVVACYNLLLRALGGNGGHAPSRVRALTPIDGGPVPLGPTAAHEPTPIARGAWARWKSLGATNKHKQMRTNT

SEQ ID NO: 46524 - protein, 400 aa, Acidilobus sp.
MPAGGEGELTLSVKMRVSPEPEQQQALVNLMKRYRDALNYSVRAIIASRALSLTKAHRLLYNDLRERYGLPSRVAQDCYREAIAIARSWLKNPRRGAVPTARNLSMWLTYEEGYRIKDNHMELAGGYKLRVIGWDRRYDDFPNREARLVFRDGRFDLYVTKRVPRPAKYAPKGVLAVDVNERQIVVGNSRVEVRVETPVERALRYRRLAERLQGKYSSSRYRAWRRRSGVRRRIRHFRRKTKNILEDWARKVSHTIISLAKQSQLAVAREDLTGLIESLRELPKGHRTALIALGYRRLGLWLDWQAEKNGVPLFVVDPADTSSTCPRCGTKLVEVGYRRLRCPKCGFEADRDTIAILNIEGRALSKMGGSLATPTAPQVTDVSPNRWGEPVNRPKGTLAL

SEQ ID NO: 46525 - protein, 506 aa, unknown
  TnpB Polypeptide
VAPPAGVAHEPPVDVAPRERGIEVVGRGLCAVPAIRKADLFAAPTGDPRHGAVAMPGSLHIRFDRAVVPREFSMRSTFTLPDGTFISAEPEETSMPAAQFVRSLSFPLDDPPAPLRWLLGEFRLLVNRSIRFALREDLRSRSRLAKAAYSTLSAEHDVHKQYIPSAFEVALAVLKSYRRRVRRGRRTNVPYLRRPMLKAENQSYRLDRETGRLRIPIRGTEGVQLVLPLSTWHRSMLRDPSWGLGSLTVTPDRIVVVVRKAAPDPYAPQAAIALDTNESSLDGVAVGDGEARLVSVPFPGVRVVQATHVRRRRRLARKKANDRRLMRRLLHREGRRERDRVRQRLHRVSKGLVAAAAERRAAIVLEDLRMPQGGGRGRRMRRRLSSWPQGELHRQIAYKAVAAGVPIINVNPAWTSKTCPACGARRRDRVGQDFVCLACDWEMDRQHNAGLNILKSALASNEALARAVRFRPGALRRDVVIPLYDLLAREGAREEPSGVECLAEAA

SEQ ID NO: 46526 - protein, 365 aa, Trichococcus sp.
MMLTKKVRLIVTDETSKLYQAAGVARWAYNYTIRMQEMNHRFGGTFISDNELRKHITKMKKRKKYAWLNEVSNNVVKQAVKDACKAYKVFFKGQAQHPRFKTKRRSTPSFYNDCIKLKVKGNRILLEKIGWVKTNEPLPVDCKYYNPRIKFDGKYWYLTVGVEVTPKIVELDDRVVGVDVGIKELAVTSDGVFYNNINKTASVRKAEKRLKRLQRRASRKYKKGTPKSKHLLKLEGEIRKQHRRLANIRTNHVHQATAEIVKTKPSRIVMETLNISSMMKDKHMAKAVANQKLYFFKQCLQYKCELNGIEFVEADQWFPSSKLCNNCGTLKKDLKRSDRVYHCACGHHCDRDLNASYNLRDYQAV

SEQ ID NO: 46527 - protein, 492 aa, Opitutae sp.
LRRAELKVEDEAKAAALPPQTLRRRVKASGCVLVMQESAAQVRNDANAPLLAAHHARTKLPSKIDLKKALKHTPCAIAMGRAKQVQYAVDDAYAMVASFRSNLFDWIKDHSSRSGKPKPPRFYRRGQRARLRFDYQDFTVLHDRLYFPESLGLGVIALVDRQGESLLKPGDRLVEVRIEPCRSRQWVDVDLVIRRKPARLMPRLLLRGNLFVDLGVARLVTCLDDENLLAFFVCGGLAKAILQRGAKWHAQFRSESKLGIRHGKRRAGQLAARSARQMDDLMKKVALLVVTYAQVHHLARVVVGRNVDWKQNVDMGAKQNQLFTFIPHAKLIAALRTKCARAGLEFIETEESYTSKTDHLAQEAMGPKPEGYRWLGSRCTRGSFRSSVGCVLQADVNGCIGLGRKVGGEEWLAVFRQKLGTSPGTRLVPRKVQVNGVGPESNSPAAGTRHPRLLSPRTWMNTQVALVKARLIPDLRCVTPVTRNPQAFPIAA

SEQ ID NO: 46528 - protein, 121 aa, unknown
  TnpB Polypeptide
MIAIEDLQVRNMSKSAKGNSEQHGKRVKQKSGLNRSILDQGWCEFRRQLEYKAAWNGGFVVAVPPQYTSQTCPCCGHVSKDNRQKQAGPPHSECIADKRHELRFAPAANLLFTIRLCPSPT

SEQ ID NO: 46529 - protein, 333 aa, Caldanaerobius sp.
VENYFEAVRSYNKHKENGHDEIRPPNYKSKYLWRTIKWKNGNKAFEYKNNAITLKFSRKMESVTIPLPEGANMLMLPDGTKLNGTPIEVKVKAVYRKKEVSHLQLHVTWDYGIVPVSVNVKVSAYDINSAVVARTSTEGNRQLIMCGEILSLVQYRNKVIAEFQSRMSKLKDGSKKMKKLSKAKGRILKKLERRINQLVNSLTKLMGVLDKEENISVSLLGDLTDLRRSAETGDKNKVASHKINQMPYSKIENQHSYKSLMKQIQSKKANERYSSQTCSRCGARNKEYRIERGLWKCEECGETIHADINGNTNILKNYLFGRCDLGWLLRMNR

SEQ ID NO: 46530 - protein, 179 aa, Janthinobacterium sp.
LEKAYKNFFEKSADFPSFKRKGSGDSLRYPDPKQIKLDQANNHLFLPKLGWLRYRNSRDILGELRNVTVSQSGGEWFASIQTQREVDSFKKHQQRLAHYQRRMSRKVKFSNNWQKAKARIQKIHPGIANARRDFLHKTTTTISQNHALVCIEDLQVRNMPRSSKGNSEQHGKKVRQSPA

SEQ ID NO: 46531 - protein, 468 aa, Paraburkholderia sp.
MSCIFQSGVRFSAYPDAGLASLLVRWIGCQRFIYNGKVGEDHLYAAQRRLLIRSGVTDPDALKTPLDQEYSRFKSRELSPWLYDVPSQVLRNGAYRWMCAKTRQLKGLAKAPTRRTRENFNTVMLTSELFRFVRSNGEEVLEIGTEKNPVGLLGFKDHRPYGIPRTIVIRNEAGRWYVSFSYAHEGDKIVREPHEVAYEINGLDNDLLDAATIGLDRNVRDNCFTDSVGRQHKIEQINLDRIARREKGARRYQRQTSRTKEHSANRRKVAQKIARRRNYAHRVRKDFTHKTTHGLVVSEARLFVLEDLRIKGMTRKPKAKQDPVTGKWLRNGARAKAALSKKILASCWGELDRQLQYKAAWHNKLAVKVPAAYSSQECSRCGHTHPGNRDGARFACQRCGFEAHADWNAARVIKARGIRALRGGVYDAPKTRKRVAFRRKDLETGGSPGASGTPEDMSVEQTQDRLAA

SEQ ID NO: 46532 - protein, 383 aa, unknown
  TnpB Polypeptide
LPWTLPSHSAYFARAAGAARFTWNWALAEWDRRYAAGEKLNGQALKAAFNAIKYDAFPWLKDIHRDAHAQPFAHLHKAFAAFFKGTAQRPTFKTKGKCRDSFYVANDKMRLDGYRVRLPVVGWVRLREQLRFAGKIVGAVVSREAQRWFVSILVDVGDYQRPRTSDGELGLDVGLAAFATLSTGEKIAAPKPLRRALGRLRRWGRKVSRRQRGSSRRDRAKRVLARVHAKVKNIRRDFLHQLSTRLCRENQALGVESLAVTNLLRNGKLALSIADASWGEFLRQLHYKGSIFDCEVIEAERFYPSSKRCHRCGQVKQNLALSERTFFCEACGLVCDRDVNAAWNLVPQALREVTAVDSMVRPGLHTGCEDETATIPCALSRTK

SEQ ID NO: 46533 - protein, 277 aa, unknown
  TnpB Polypeptide
MTFKQFRGAAQDWYRRRADRDRFPSSAIYQAASDVQAAFRNWFRRVKPGQGLPRFKPEGRAPGIYLSGAGIRFEVDRVRLPKVGWMRWRGGDLPNLRLPGPKRRATRGLVSGRVWCDAGGRWMLSCVFECGPLPFSAPVAAVAEMRQDGESIVTRLDGRSLDSIWAESDKRLEDDRRRLRRLQRQLSRCQDGSKRKAVLWERYRTVARRIRNRERDRNHKLTTTVVRAAGVVSAVGVQGEILRQLKYKAEWNGRRLKVRRGPPEPGRGSASDARGDR

SEQ ID NO: 46534 - protein, 444 aa, unknown
  TnpB Polypeptide
MKEQRIERVKIHIGAEPYNILEEACFKSRLLYNQANYWQRQEYFNSGRDFNTILTPYDLRRQFIDSEEYKALGGHLSAETVLRLGKEWKGWKASWLKWNEEYKAQTAAQGVKYKRVADGSVKLNRKGGEPVVDKSTKSYKGEPQQPHYIKDRGLAPVYIDSGGVRQLDGAVKLPKRMGEIEIKTDHQVQSIRILPRYRCFIVELIYNIETPPVKDDNGRYFSIDLGVGNFAAVTSNVAGFQPVIVNGKGLKSINRYYNKEKSYYQGVAKQMNDKYMTHRLERLSERRNNQIEDQIHKASSYIVDLAIQNDISVITVGNNKGWKYQVNMGGQNNQNFVQLPFTKFINLLIYKARESGIRVLCVNESYTSKTSFLDGEEPCKHKEYAGQRIHRGLFVSASGKRLNADVNGSYQILKKYSPNAYALGDSGWSLQPKVVDMVKYIGLN

SEQ ID NO: 46535 - protein, 375 aa, unknown
  TnpB Polypeptide
MLKAYKYKIKPNTQQQELLSKFFGCVRYINNWGLNAKTSAYKENGKAVGYVQLAKELTSLKQQQDHEWLNECTTEALQQSLRSLDNAFTAFFRKKAKYPRFKSKKHTRDSVKFINSVHFDFDKWTVKLPKLGRVKLCMNKTFDQSICKQGTCTVSRDHCGTYWCVITVDDLQPKPTKAKLVKDNAIGVDLGIKDYVILSNGIKFTNPKHLEKAQRNLAHLQKVFARKGKDSKNHERMRIKVAKCHRNITNQRSDFLHKLSTHLVRNYDVICLENLNVKGMEQNHHLARAIQGAAWSEFVRQLEYKSEWYGKNVLFIGRFEPSSKLCHKCGYINQDLKLSDREWVCPVCGEKLDRDVNAAMNIKEIAFDKQNLVGV

SEQ ID NO: 46536 - protein, 484 aa, unknown
  TnpB Polypeptide
MKTTMKAILTNLTDEQKAILDHLMLVFCTAIRYSFKRLLEKQAIGDLEKVVANKYNMNIRQAKDAVESARQTIISQHRLVKLHHENSTKKVAVLAKKLKSPKLSDNKIKSLTAKLAKRQRKLDYWTVFLKNETFPPVTFGTKEIFLRRCKGLITKQEWQDRRNNRFYSRGDRSKGGNPNLRVVFKEGVSFLEISTFEKTAVNRAIKVLMPIYLPQKLSKKTGKVNGVHYRGLFMDSLERGEAYQVELLKRDGKYYAHITFEELEAKVLYTGHLGMIGVDTNPDGLGLTKINNTGNYQGHIYLSKPELTFCRSNRRTNLCGELAKEASNSALTRQCGIVVEDLKFKGDRDVSGKLARIQGQFVYAALLLMLERQCLRKGVEFVKVKPQYTSKIGLYKYCHQYGLNVHNGAALVIARRSYGFKESVPKLLRDKLMSKKEIEPFNQTSEWGRWSEVHRRITKLFKKRKEVNTPGLWLVRRKLLLGIA

SEQ ID NO: 46537 - protein, 363 aa, unknown
  TnpB Polypeptide
LRADDEIYRVLNAQSSQVTLKRLDLAFQAFFRRVKSGGEPGFPRFTSFERFSGWGYKNHGDGFRLTPGDGNQHGKLRLSGIGSIRVRGRARTYGEVKTCEIQHKHGSWYASLTIECERKRTSGTKAMGFDWGVTTFATIAREDGEFEDGEFAEIGNPRFFKRHEASVTRASRYLDECTVKDSIGRPTNGKDPKRIEAKRAFGRAKAREANARKDFLHRTSTKIIAENALIATETLQIKSMTGSASGRVDRAGKNVAQKAGLNREILATAPAAFLSMLKYKADEAGAFSIETPTKTLKPSQRCSNCGLLPKVKKALSERQHLCECGCVLTRDQNAARNNLRWALNYFGREPARNAIHRRQPWVA

SEQ ID NO: 46538 - protein, 324 aa, unknown
  TnpB Polypeptide
MKIHTSYSVRIQGYSAVLDRTVALYRSAVDFFIDVMLRNWQQFDGLKQTEFVKLTEVLCIKTAKRPVVAYDFSADFYKFPSYLRRAAIAAAFGAVSSYKTRLAQWEVNPQGKAPGLPRSGRLFPPLYKNQQFVRNGRYCARIKVFVRNTWDWITVGLRKTDVDYIALHCTLRKELCPTVCKRGKVWSLDFAYEEEAALNKTDVNDQVIVAVDLGINNAATAVAMRSDGTVLERRFLHLSSEKDRLERSMGRIGKAQRRGAKKMPRLWARAKGISDEIARKTAAFIIDIAVEAGAHVIVMEHLELNLWTTPRLSRGESDFFSSCR

SEQ ID NO: 46539 - protein, 394 aa, Mycobacterium sp.
VSRYRLLPTGEQAAGLAEHCRHARYVWNLAVEQQQHWQPGRKAPGYNEQCAQLTAARAEYQWLAAGSQTVQQQALRDFTQAMRNFFNGTHRRPTWRKKGVHEGFRQVAVKAHHVERLNRRFGRVWVPKVGWVRFRLSRPIPQGVKSYRVTCDRAGRWHIAFAHPPPPIAGPCDGSVVGIDRGVTVAAALSTGELLHAPGLSPGETRRLKGLQQRLARAERGSNRRARTKCAIAKLKAREADRRKDWVEKATTDIAHRFDTICIEALDVQAMTRSARGTMEQPGVGVAAKRGLNRGISSSCWGLLAARLQHKAFGRVEQVPAAYTSQRCAQCGHTAPGNRKSQAVFECQACTAGSCHADVNAARNIAAGRAVTARGDLGASRSTNREPQLSSPAA

SEQ ID NO: 46540 - protein, 430 aa, unknown
  TnpB Polypeptide
MDDGAISEGLKMLLCTKIKLEVSETDAATLEFMQGKCRGLYNWWVMRLKAGEKWNFKRCKKTLAESRIYDTELDDVYGKLLTEVYYRLDTAMSAFFRRCKAGETPGFPRLRSPHNFFTLCYPAMYLEVEGNTLTLPTGGRGKHKRFPNVIAKLTDTPPVDFGEVAISRDARGYYASFTYKEQEQTPEHKEGQAEYLAFDLGIKTLATGVNEQERVYTVGGFKGHQWYNKQLDKIRSKRDKCKKKSRRYIHLSKVYKRVSEKKRNKRKDSLHKASHLIAHTLVERTVIVGDLSQRQMVTKQHVDRNKHLNRAVYNEWALYTFIQMLKYKCDLYGKELVFLDERNTSKMCSGCGKLQPMPLWKRTYCCTNCGLVMDRDENSAHNILTRFLARLPPYILERECDVLQDIMHEVGIAVMPHASEVQQLSMFEHI

SEQ ID NO: 46541 - protein, 426 aa, unknown
  TnpB Polypeptide
MLISYKYRIYPTEEQKVLFAKTFGCCCFVYNWALNLKIEAYKQGKKSVSYKEVQDRMVNELKKENKWLAEVNSQSLLNSIRNLDAAYKNFFRDTHAMGFPRFKSRKNKQSFQCPQHCSVDFINETISIPKAKDIPAVLHRKFKGTVKTVTVSMTPSGKYFASVLVDTAIHELPAMTIQGDTTLGIDLGIKSLAVCSDGRTFDNPKNLKRNLDRLKFLQKRLSRKQKGSSNRNRERIKVAKLQEHIANRRRDNLHKITYALTHDSQVRTICMEDLNVKGMQRNHHLAQAVGDASFGMFLTMLEYKCRWYGVNLIKIDRFAPSSKTCGKCGYIYKGLKLNERKWTCPECGIHHDRDFNAACNIKEFGLKALPTERGKVKPVDCPLVDDRPRVLKSNGRKKQEKEVDNISIHSCFRREKLTNLSLLKTN

SEQ ID NO: 46542 - protein, 374 aa, unknown
  TnpB Polypeptide
MEYSYKFRIYPTAAQEVLIQKTFGCARFVYNHFLAQRIAEYQATGKAPTRFQQDKMLTSLKKELLWLKEVDSIPLQAELQNLDAAYQGFFRRVKKGEKPGYPRFKSKRDRRKSYKTKQHVSNGKPTIWVDAEHIRLPKLGLVKCRVSKEVEGRILSATVSQAPSGKYFVAICCTDVDIEPLPSTGAVAGLDMGLKSLAITSDGVEYPNHKYLAKSTRKLVRLQRQLSRKSKGSKRREKARVKVARLQEHIASQRQDTLHKLSTQLVRDYDLIAIEDLAPKNMGKSHSLARSISDASWGEFRRQLEYRAQWYGKQVVTVDRFYPSSQLCSACGAQWSGTKDLSVREWVCPVCGELHNRDINAAKNILIEGLRLLA

SEQ ID NO: 46543 - protein, 532 aa, Bacillus sp.
MHRIGKQLRLIRNTVLGELYKNYKQMIRTKEYKRTLKSYRLISDKIEKEKDSKIIKQLKKTKKELNENFEKLRNLHRVTFDFARKYGENIRETTFTLPDAVTVLSVCEMAWHSMENILFGDSKKPNFYKQTDLITFQGKQADRCIILKHNEKEESFHISFNNMKFPLIVKKDDLFIQETLSHIVYYIKNGEEMDKQNVERNQTGLPLLSTYRIRNNRIVRKKIRGKIRYFVQIVLEGFPVVKRRKEGSFRHHYGMGRVAGDIGTQSLAVVTKDQVILKNLAERSENTFSYERKIYLLQRYLDRSRRTMNPHYFDEKGRIKKGKKEWKISKRYLKTQEKLRELHRKAAESRKYAHNEEVNRLRSMGDELIIEQMNIKSLQKKAKEVTVNEKTGKFNRRKRFGKSIGKRSPGYFIQQAKYRFEITGGTVKEVNTWTFKASQYDHVLNNTSKKQLSKRWHLLPNGIRIQRDLYSAFLIYCTENELQKPNKQNCDTFFNHFLMMHNQCIEEIKQNRKLVMNSGIKFNKEKTAEKAV

SEQ ID NO: 46544 - protein, 359 aa, unknown
  TnpB Polypeptide
VKSFKTKLKLNNKQRRSMAKHAGVARHAWNWGLATCQEIYESGGKRPSAVDLHKKLVAEVKSQNPWYYEVSKCAPQEALRNLDKAFKRVWKVQGTGFPKFKKKNVKDSFYLEGSIRISGDWIKLPRIGWVKSHEQLPPVKPKNVVISKRAGDWHISFKIDVEPQATPKTKDCIGVDVGINTLATMSDGATHPNPKAYRSAKRKLAKLQKELSRRQKGGKNREKTKLKLAKAHKRIADVRADNLHKLTTHLAKNHAEVRIEDLNVSGMLNNHCLAGAIADGGFYEFRRQLEYKCQWYGSKLTLIDQWYPSSQICSNCGHRQKMPLNQRTYDCPNCGISIDRDLNAAINLERADSSAVQAW

SEQ ID NO: 46545 - protein, 363 aa, Hazenella sp.
MLKHRKKGGEPMPTITLRLELLKPTQTKQQMYQRMTEINTQFANWLLLHPEVNQATSKIFKAFSDQSFPSAVVNQTIREVKSQKKKQRAKTFRKIWCCFNNQNLKIEKHSEHYTVSFPTLGKRIGVPVITRPFQVAWLDKIIDGNVKQGAGKLYQKKKKWYLAIPITWHVESSQDEKMMGIDLGLRYLAVASVGTKSLFFKGTQVAYSRRRYASRRRKLGKAKKLQAIKKSKNKESRWMKDQNHKMSRQIVNHARTNGVGVIRMEDLTDIRNTAKSRKKDQGRSLHAWSFYQLKQFIKYKAEMVGIRFEEVKAEYTSQTCKCGHREKSNRKGLRFKCKQCGYICHADLNGAINIGKAISGFAA

SEQ ID NO: 46546 - protein, 286 aa, unknown
  TnpB Polypeptide
LGYPRFKSRHCGEQSAVFTTSARFHVRHDHNARWMFLDLPKIDGEIRLRWSRDLPSAPSSVTVMRHADGTYGASFVVKAEPKNPPKPRHNACGIDMGLESLASIVYSDGTREKVAPLRALRKAERKLRKLDKELGRRKRGSNNYSKTRQAKARLYARIGAQRRDWRTNWPPGWRARTKPSPWRPVRQGAHAHPDGQKHGRRRMVDVHRQGRRALRPMGPQGHPHRPVVPEQPGLLAMRTQGRPEAAQRARVECPQCGAFLDRDYNAALNILDAAGLAESLTPVEAM

SEQ ID NO: 46547 - protein, 260 aa, unknown
  TnpB Polypeptide
MCASPRRYGLILASMSIGHRTLVFVNMPLPLPRTGGGVIGLDRGCVHTLASSDGTFMDMPKPSKAELKRLKYLQRRMARQDRVNEARGGKPAKFASKRRQKTLSQFNVLQSRIIRRKNDWIEKTTTRLAQENILVAMEDLDVRAMTKRPKPKPDPAKPSQYLHNGAKVKAGLNRSILSNNWSRLMKRLQDKMNANGGRLVIVLAAYTSQTCHKCGYVTKENRDSQAVFRCVECGYEANADVNAAENILDRALSKTGGGTA

SEQ ID NO: 46548 - protein, 270 aa, Microcoleus sp.
VFKAVKVRIYPTKSQQVHLAQAFGCVRWVWNQSLATMTATYQATGKGVTVMTMKKSIPLWKAEYEWLSECYSQCLQQSVLNLGVAFGNFFDGRAMYPTFKTRHGKQSIQYPQNVKVLSNCQIKFPGKLGVVAAKVHRGINGKVKTVTLSKNPDGRYFASMLVDDETVTSAYNSDGKTIGLDLGLIDFCVTSDGSKYQHPRATKKHEKNLARKQKKLARKKDQTSNKRRKAKLAVAKVHSKIKRFREDFLHKLSRAQSLQRGGPPQRAALR

SEQ ID NO: 46549 - protein, 409 aa, unknown
  TnpB Polypeptide
MDRTVRIQLHPTPEQAQALKETLRKFTYAFNLVCAYGWQHHEKNGVRLHHGTYYQIKEQCPGLVSDLLIQARVKATETLKSAFTWQQKQEQTYPKKVAKALKRGKTAPVFKAVHCPHSTSCPARYNEHTFTLNWITQTVRLSTVAGKQSIPFTVPPNSAKYAGGTICTAELIFRKGTFWLHVVVSVPEPDIRPSEEVIGIDLGLNHPAVTSKRQFLGKRHWKEVERRRFRLKRKLQSKGTKSAKRHLKKLSGKQRRFRRDCDHVLSKRIVQNAIPGSTIVLENLTNIRETSKIGTGKGKKRETYRRFHSWSFAQLYDFIRYKAQERGIRVVKVDPRHTSQTCLRCGHQARNNRRSQSLFLCRKCGYCLNADLNGSYNIRDKHLACLASLGTALAGGPSSSGLSSQPTTG

SEQ ID NO: 46550 - protein, 378 aa, Desulfobacula sp.
MIIRKAYKFRLKTNSEIEGLLFQYSGCNRFVWNRSLALQKESLDKEKKVLPYGHLAACLVRWKKDDASFLKTAPSQTLQQTLKFLDRALKDAFDKKQPNKRFPVFKKKYKCVDSFRCPQGFKIEGNRISLPKIGWVRFYNSRQTLGTPKNVTVSRRGKHWFISIQTEQNVVVPERPVFNPHADIIGIDMGLKRFLTRSDGEYIEPLNSFKKLENKLARAQKLLARKKKFSCNWKKQKQKISRLHIKIADARNDFLQKHSTIMSKNHAVIVAEDLTIDNMTESAKGTMKNPGKNVKKKSDLNKSILDQGWSAFLRMLGYKQKWSGGIFHQVDPAYTSRTCPECDHVSDNRKTQALFECIECGYTANADHVAAINIKAKG

SEQ ID NO: 46551 - protein, 447 aa, Desulfobacula sp.
MHLKDAVPTCSDFKILFHKLDYITGQWYNQYMIIRKAYKFRLKTNSEIEGLLFQYSGCNRFVWNRSLALQKESLDKEKKVLPYGHLAACLVRWKKDDASFLKTAPSQTLQQTLKFLDRALKDAFDKKQPNKRFPVFKKKYKCVDSFRCPQGFKIEGNRISLPKIGWVRFYNSRQTLGTPKNVTVSRRGKHWFISIQTEQNVVVPERPVFNPHADIIGIDMGLKRFLTRSDGEYIEPLNSFKKLENKLARAQKLLARKKKFSCNWKKQKQKISRLHIKIADARNDFLQKHSTIMSKNHAVIVAEDLTIDNMTESAKGTMKNPGKNVKKKSDLNKSILDQGWSAFLRMLGYKQKWSGGIFHQVDPAYTSRTCPECDHVSDNRKTQALFECIECGYTANADHVAAINIKAKGIKELGGGTHRISLRRDGDSHPLSQKPTTLGNQALYLAP

SEQ ID NO: 46552 - protein, 373 aa, unknown
  TnpB Polypeptide
MRKTFCYRLYPTEAQTHEMQRQLDIGREVYNACLDERRACYRTTGKSLTYYDQANQLKSIRRECPDVATVNFSMLQAVCRRAHRSFEGFFRRLKAGQRAGYPRFKSRDRWDSITFPAYGDGCKLTSTRLYLQGVGQIKVKLHRPVTGTIKTVTLRRKAGHWYVCLSCEAAAAPLPATGASVGIDVGLTHFLTTDTGATVANPRPLQEVQRRLRVAGRALARCERGSHRRRKVKRRIAALYEKVANTRKDFHHKTAHALVQANDAICHEDVRVANMVQNHALARSISDAAWGQFIAILTSKAAEAGRQVIAVDPRGTSQTCLCGAHVPKTLKDRWHDCPACGLSLPRDQVSAMLIKRLGHSRQAPTQRDTAHVA

SEQ ID NO: 46553 - protein, 432 aa, unknown
  TnpB Polypeptide
MKTAHKIRINPTPEQVEYFKRACGTRRFIYNWGREQWEKQYQAYKQEQETVPEQERTRRSPSAFALKKQFNEIREQAYPWTYEVTKCVVDQAFDDLSKAYDNFFAGRADYPSYKKKGKSHESFYLSNDKFTVGSHWISIPGLGRFVLDQRQITKGRGKLLRKLGTVNLAEKLRFVEKGKEGTPRKSRNKRKQVICESVKILGATVCCEAGHWYVSIQVEIKKQRPPAPTSVVGVDVGLKQAAVVSDGRKLENQKPFALHVKKLGKLQRKLSKKQKAKDPQTKRTVFSKNYEKQRLKVARKHQQIANIRRDVQHKFTTELARTCGVIGIEDLNILGMMANRKLARAIADAAMGQLLQFLKTKITNAGGDLFIASRWFPSTKRCSCCGHIKKRMPLKHRTYHCLVCGLVMDRDLNAALNLLWFATEQLRQLHVA

SEQ ID NO: 46554 - protein, 613 aa, unknown
  TnpB Polypeptide
MSTKSTLKPATITGSTELIDKVEVNSEAETAAKGSSYASATSACSATSASTAFIRTSKILFRPNGINQGKQTELSNFIDLCSNALHFYVVYFAKYYELDKLLFVGAKDKNNKIFDPNSNLTKLNNIFYELRYDEKKNRDFFGLKLKFYPDEILKILTNEKNSGKAAVASYAAKQERCFNVIAKLSARTLKSVKTQAMGIIRSWVQQILQSYQFGYFNREQYKKSHRKNIRKYCEDKRKVVKNLIRGSVAGTGVAKAGAKQRSKVKAKLNIEKIEFNSINCQLLRAEVDNTQFDLSEYSDFDLLFCLNSMYATSYRKEQGIKNNLSIPLSSHHHFNELKSGIVANVQCKLVEIGKSILVSKEGIEVRFKFKPLARKAEFKNKIVGIDQGQRKLFTAVSVSLETNEDTADQVISYAYANEKTLKETDLKEQLTHSYNEVCDKIARRKKGSKGFKRAQEHRRNLINQAVNLLSEIFGFEDDIAEVRLEKLRHLGEGKKKSRKLQAFNYADLRHKLDRKCHETNVKLTETSNAYRSQRCSLCGFVHKKNRLNGGEKFKCIKCGYAADADYNSAKNQVANLPPIYVNARQNRNNLSYHRLARTTGFYWLCELSESSDK

SEQ ID NO: 46555 - protein, 410 aa, unknown
  TnpB Polypeptide
MYNACLESWKGSYAWWREHNPAEDAKFPRDMSRYDLFKMFTQVRGEDARWAGLDARVGRGVICRFDRARRAFYDRCNTASKKPGYPRFKSRRRWRSIEIPDATPSMVREPGEGSRWWRLRVKGVPSVRFADRGGRLRTALSDGTLVELRIVRTPVRVELHAVIRHAATPEPTGEPANPVGMDKGLTNRLALCDGSYEKARELDLAVIKRRQRALSRAKKESRARAKKRLALAKAWRRETERARNADYRLAHRLVTDHDGIGVEALNVAGMLRSRRNSKKMSEQRWSALDTILEHKAAKAGIHYVRVNAAYTSTDCSACGHRQKMPLNKRVYDCGACGMVLCRDVNAARNICARAFPRLGGRAGKGGNSPRCSAHNNFCQGDRPPPHGCDAGRRYRTVSPEYQLRYISPLD

SEQ ID NO: 46556 - protein, 382 aa, unknown
  TnpB Polypeptide
MFIAVKYRIYPNKEQTNLINKTIGCARFAYNLMLHDFYANNIIKTPAKYKNDYPFLKEVDAFALCNSQLDLRRAVYNHKRNPNHFGKPNFKKKSRSKLSYKTNNNRNRIRIEGNRLLLPKFKSGVKIVLHRKIEGVIKSVTIEHTATDNYTASILYDVPDKPKQSTLSKDKVLGIDLGIKDLAITSDNVKYDNPKYYHKTQAKLKRQQKILSRRLEQNIKQRVYDKTGKCIKTIYKKPLVECKNYQKQRKKVAKIQQKIKNQRLDNLHKVSSDIIKNHDYVVLETLRIKNLMKNRKLSKSITDVGWRLLINMLEYKAERYGKQVIKLDQWFPSSQICSHCQHNDGRKALNIRKWTCSNCQTKHDRDVNAAINIRNKGLEMIA

SEQ ID NO: 46557 - protein, 356 aa, unknown
  TnpB Polypeptide
MIQRQLKLRLNTSQAQQLDTWLFQLTGVWNWAIRKIEQDAQDGIYYSQKAFHNLLADHGKKLGIPSHTLQGMLDTAWLAWQRCYKKLAKKPQLKGKRNRLSSIPFPDAFKSPTGTRIPVPGIGSVRFHKQALPAGRLKSGRIVKRASGWYLCLCIDTQPNSIPVVGTGAIGIDPGFVHLLTLSTGEKIPHPHELRTTAHRLAQAQRGTRRHLTARLQERLANQRKDRNHKLSRRLVADHQTLAWSKDNDKALARMFGKSVASAGHAQLRGMLAYKCTASGRQFLEVPSKNSTRTCSACGAFTGPTGYAGLSVRQWTCTACGADHDRDVNAAVNTLIAGVGITLEHRRKAVPGIPWL

SEQ ID NO: 46558 - protein, 349 aa, unknown
  TnpB Polypeptide
MLISKTLRCKVFNPTEKKLELLNGEYLNFQIYARCGKNFGVYSLTKSTFNFKYKRKSRKRKQPMPLAGQSTQFRITNNKLTPYWFKLPVKGKRGGIWLPIKPHENIDSSWEVREAKVIKRKKDFWIYITIRKEVSLKTSYSSVLALDIGEKVIAAAVLSSVRKPIFLGREVRGIRRHHAWLRKRLQERKLFKKLKEMRGKEGRRVELVLHEVSKYIVELAEENNSIIVLGDLKGIRKGRKGKRFNRIINSFPFNKLSFFIEYKAHLKGIAVVKIGEEYTSKICSRCGERGKRIKQGLFKCPNCGYQANADFNGAMNILKRSLEHVSKDGAVAFSPEPPMTEKTRAEAHV

SEQ ID NO: 46559 - protein, 451 aa, Escherichia sp.
  misc_feature (365)..(418): Xaa can be any naturally occurring amino acid
VKRLQAFKFQLRPGGQQECEMRRFAGACRFVFNRALALQNENHEAGNKYIPYGKMASWLVEWKNATETQWLKDAPSQPLQQSLKDLERAYKNFFQKRAAFPRFKKRGQNDAFRYPQGVKLYQENSRIFLPKLGWMRYRNSRQVTGVVKNVTVSQSCGKWYISIQTESEVSTPVHPSASMVGLDAGVAKLATLSDGTVFEPVNSFQKKQKTLARLQRQLSRKVKFSNNWQKQKRKIQRLHSRIANIRRDYLHKVTTTVSKKHAMIVIEDLKVSNMSKSAAGTVSQPGRNVRAKSGLNRSVLDQGWYEMRRQLEYKQLWRGGQVLAVPPAYTSQRCTCCGHTAKENRLSQSQFRCQVCGYTANADVXXXXXXXXXXXXXXXXXXXXXXXXXXXXXXXXXXXXXXXXXXXXXXXXXXXXXXVLWSYSERKSPVTKSIQMPGMWIYSERRCKWRS

SEQ ID NO: 46560 - protein, 643 aa, unknown
  TnpB Polypeptide
VRKINRAVKIRIYPNAEQRVQIEKTIGCSRFIYNCMLADKMEHYKKEKKMLRNTPASYKKEYPWLKEVDSLALANVQMHLESAFHKFFREPSAGFPRFKSKKSSRKSYTTNVVNGNIFLEGKYLKLPKMTAVRMKLHRPISEKWKLKSVTVSREPSGKYFASLLFCCENQTAEKRPAEKFIGIDFAMQGMCVFSTGKRAEYPMFYRNTEKKLAREQRKLSRCQKGSQNYKKQKKRVALCHEKIRNQRKDFQHKLSASLAESFDAVCVEDLNLKGMAGGLHLGKGVHDNGYGLFLSMLEYKLEERGKYLIKVDRYFASSKICSVCGKKKEELSLSDRIYYCECGNRMDRDVNAAVNIMNEGKRIFAECKKMQKISVLDALKKASEVCKIKKTEIWVCENQDFYSPMLFGVRNTKILIPQGMLETENYSYEEWYLIFLHELTHQKKHDLWYKMFLQIIRDVYWFCIPMLWVQKMANIDMECVCDATVTKYMNLTQRKDYCNVILKVASKQTRKELSGVVSMVSETKILKERFYNVFLARKKLRIYITVFLFGIIILSFSEMQIARQIWSSSCIENCPKCKAAVQGEVVWDGWENEKNVVCTHQYAWGDDLQKARYGVEKIRCNECGNFFEIKIRQEKIVCHGYND

SEQ ID NO: 46561 - protein, 444 aa, unknown
  TnpB Polypeptide
MDVILSYKAKIKDLNHCFVGTVHIYNEAVSFFLNVCDKEWSDYNEITCAQMESLTLVSSKRPSVPYDFNEHFYKMPCYLRRAAINEALGIYSSWYSNHENWVKNPKGKEPKLQLEHNSMPAFYKGNMYKRISDDTAQIKIYHHNDWVWQTVHLRKQDVKYIQRHCSTMHECSPVLAHKGKCWYLSFAFEQKVKLNKTDIKKQKVCAVDLGLNNDAVCSVMDAEGTVIARRFIRQAVEKDHLYTVLNRIRKQQQHGARHCKTLWSIANNINREISRKTAGDILSFAYEYNTDVIVFEHLDTAGKKKGKNKQKLSLWRKKEIQRIVEHRAHRLGIRTSRICARNTSRLAYDGSGYIERGRYIQNDKEKYNYSICIFRSGKQYHCDLNASYNIGARYFIRELLKSDSVRRRLPSQAKDSDYGKGTTRTLSSLIKLYTDLCKASLQTV

SEQ ID NO: 46562 - protein, 350 aa, unknown
  TnpB Polypeptide
MIRRIQFNLADSNHGKLLELDRVLEESVKVVNLFIDRLWDERDFSSKFVTYKVPTWLSARLQQALGKQALEIVKSQRKKRKKSKPTLTRKTINLDARFLDIKLDQNSYDVWFRLSCLGSKIILNLPSRKHRHMLDLLDKGFLIKQSSRLRKAGDRYYLDLYAEKVEPLPVKKGKSVGYDCGYKTLLADSEGVEHGQELEAQYEKIARKKQGSQAFKRALTERDNLINRVVNKLDLAGVREVVVEDLKSVKHKSRGQMSKKFNNKLQRWSYPKVLGKLASVCEEAGLTFTKVNPAYTSQTCSACGVQDRASRKGKAFACTACDNRMDADLNAAINIRNRGVYSPPALYSVQ

SEQ ID NO: 46563 - protein, 460 aa, unknown
  TnpB Polypeptide
MKVTRIINAEPNQALLPICKATAFMRADIWRRYGALGTAGKRLNTVKPELPALYKYLDLDGTIRAETAKDVLNDIYSYKEAAKERVRKSVRKRAETDEELKRLYTLLKKDEWLDDNFLHRQMRKHFKHGVAHCANQFVVRSDRVLTEVVEGRLVVILKIAPKYGNSIRLTTTTSGKNVDLKGSNLRVIVKDTGVEIHYCADKQPGRAPGVGKIGVDKGYTEAFADSRGGLHGQGFGQTMTKFSDRVKETGKSRNKLRALEEKHREAGRVAKADRINKNNLGNKKIERRKERTQKRLRTIAFKAAHAVVDHASHVGAEDLSSPICSKHKWRNYNRRMSSWAKGVLAEALENVTQQRGSKLQLVASAYTSQIDSQTGLLEGQRVGDRFYHVSGDVSQADTNAARVIERRMDDPEIGRYTPFKDIRLILLNRSPAQLSVNRVELGSLDRQPTADKLNAHLYAY

SEQ ID NO: 46564 - protein, 263 aa, unknown
  TnpB Polypeptide
MVDFLLCLTLEEPDVAFDPSGSHVCAIDLGTDNFAAIVCDDHSSAIYKGGAVLSKIQWFHKQRAKYVSIITKGHEKKHAVSKRLRDLSFHYANFMKDQCHKISRSIIDFCMEHQCGTLILGVNLLWKQKSNMNKINNQNFVSMPITLLRTMITYKALNAGIRIIEQEESYTSKADLIANDRIPTYGVDDKDASFSGKRIKRGLYCCSNGMILNADCHAAANIMRKAIPDIWKDTRDYTFLSAPDVYGFHKLNPKGIPVKGIAA

SEQ ID NO: 46565 - protein, 404 aa, unknown
  TnpB Polypeptide
VNVSRLVRRAYKYRFYPTDAQAAELGRTFGCVRKVYNLALDARTAAWYQRQQRVSYVQTSAMLTEWKRSDNLAYLAEVSSVPLQQALRHLQGAFAAFWEKRARYPQFKSRKRSRQSAEYTRSAFRWRDGQLWLAKMSEPLDIRWSRPLPDGAEPSTVTVSRDAAGRWFVSLLCECSIEPHPASASVAGVDAGITSLVTLSTGEKITNPRHERRDRGRLVKAQRDLSRKAKGSANRAKARLKVARAHARIADRRRDHLHKLSTRLVRENQAVVIEDLSVRNMVRNHSLARTISDAAWTDLRGMLEYKADWYGRHLIVIDRWYPSGNTCSACGHVAASLPLHVREWDCGKCGARHDRDANAAVNIRAAGLAVLACGAGVRPQRSIPGGRPAVKQETQRVTAGIPRL

SEQ ID NO: 46566 - protein, 418 aa, unknown
  TnpB Polypeptide
MKESLRKTREKRKSQDCKVFELKIVKDKLFSETLNQLNKLFIEAKQYYNWILSHENIFSIDTKIKEITVFNKKTEETKKVIVSLPAKVRGDLKKRIITAIKSLSTKKKKGKQEEVGKLKFKSFVNSIPLDNQAWRFITPNKIYIVKIKQYLKVMGVDQIPKNAEFANANLVKKNGDFYLYITVFLPKEEKLSHEKSIGIDFGCDKPLTLSNGIQIQYNIPVDRKIKKLHRKFSRQQKHSKNKQKTIIKLNKAYDKKNHQKKDINKKILNILGNNYKIAIQDENIKGWQKGGHGKKINQTAIGGLISGIKKLPGTVIVDRFFPSTKTCSRCGHVQKVELFERVFTCKNCGLVINRDLNSAVNLDNQVPQDMGKLKPVETKSSTLKIMERLNVIPFVKASLVNEIGTVISRKRSQLVKAN

SEQ ID NO: 46567 - protein, 435 aa, unknown
  TnpB Polypeptide
LRSAQPFTVELTTTISTNLAYLPSMQHKPTLKAYKYRIYPTNAQMVFFSKTFGCCRFVWNKMLEEKLQAYKKKERIPRIIPAKYKEEFPFLKEVDGLALCNVQLQLEKAFRDHFRNRKQFKLPKFKKKRDKQSYTTNNTHNSIRVDFEKELLYLPKLRNGVKIELHRAFDGKIKSVTVSRTNDGKYYASVLVETANPRNKVVEPKSRACGVDLGLEHFTTVTNDFGSYKVEHPKYLLKAEERLRRLQRSLSRKQKDSKNSEKARLRLARQHVYVTNARNDFLHKLSKAIIDENQVVVVEDINVKALLRTRLAKSISDSGWSKFLSYLKYKAEWYGRTFIQVDRFFPSSKLCHRCGYKNEDLALHDRTWCCPKCGETHDRDVNASINLYLVGLGRPEVKPVEQALVDDRSPHGLPKKPSCDEAGSSTEKKLSSPRI

SEQ ID NO: 46568 - protein, 308 aa, Calothrix sp.
VICLYGCQQVLIHPNLDLKAILSFICSQSNKLSNCALYYARQIWFKAKRYITKFELDKEMKSNRHFQTLYSQSAQQFCRSVYESFASFKQLNALYQRGELLEKPRPPKYRKNGLNSFSYPKQGLRLIEDGQIRIPLGQTVKVWFKLDCFTIPMPSNLKFESIREVRIVPRNRCFYAEFVYQTEAVISDIDKSRILGIDHGLNNWLTCVDNIGTSFIFDGRHIKSLNRWYNKQVATIKENKPQGFWSNKLAAITEKRNRQIRHGINKTARIVINHCLENRIGRVVFGWGQGIKQEINLGKKCNQQLSAK

SEQ ID NO: 46569 - protein, 300 aa, Streptomyces sp.
LAVEEARQGQPDPNHLQVKRLNRRWGAVKLPKFGWVRFRWTRPLGGTVRNATVLRDGGRWYIAFCVEDGLPEAAPNGQPPVGVDRGVVNAVTCSDGWAKDRELVTPGEAKRLRRLQQQLARQKKGSKRRAVTKAKLARLNARIRNRRNDLCVWVANRLTRRHGLVVVEDLNIKDMTAFAKGTIEAPGRQVRQKAGLNRAILNKGWSRLVLALEHAGRYHGCSVVMVNPAYTSQTCSACGHCASENRESQAVFRCVACGQLDHADVNAAKNILAAGLAVTGRGDLAGRRSVKRQPPVTEVG

SEQ ID NO: 46570 - protein, 428 aa, Prochloron sp.
MYGCQQDLIKTPECLPFLEYLCRTANKLINCGIYLARQRYFKCGYIPGKYELEKQLKQNQNFKFLFSQAAQQTLRGVTESFKSFKKLSEKYQKGELKNRPLLPNYRKKGGMGVITYPKQALKVKEGKVRIPLGLKVKAAFKVDAFFLPFPTNLDFKKIREIRILPRNGCFYVQWVYKLETQQIKVDKEKVLGIDHGLDNWLTCVNNAGKSFIVDGKHLKSVNQWYNKHFGSAVCRQIATIKEGRPQGFWSKKLANITEKRNRQMRDAVNKAARLVINYCLLNGIGRIVFGWNKGQKDGIDIGVKNNQKFVQVPTAKLKERIKQLCEQYGIEFIETEESYTSQASFLDDDFLPTFGAKPESWNPSGKRVKLRLYRPANGSLINADCNGAANILRKVAATLELSLKGVSSGALTTPVRVHFWAACESPSL

SEQ ID NO: 46571 - protein, 402 aa, Escherichia sp.
VKRLQAFKFQLRPGGQQEREMRRFAGACRFVFNRALARQNENHEAGNKYIPYGKMASWLVEWKNATETQWLKDSPSQPLQQSLKDLERAYKNFFQNRAAFPRFKKRGQNDAFRYPQGVKLDQENSRIFLPKLGWMRYRNSRQVTGVVKNVTVSQSSGKWYISIQTESEVSTPVHPSASMVGLDAGVAKLATLSDGTVFEPVNSLQKNQKKLARLQRQLSRKVKFSNNWQKQKCKIQRLHSRIANIRRDYLHKVTTTVSKNHAMIVIEDLKVSNMSKSAAGTVSQPGRNVRAKSGLNRSILDQGWYEMRRQLEYKQLWSGGQVLAVPPAYTSQRCACCGHTAKENRLSQSKFRCQVCGYTANADVNGARNILAAGHAVLACGEMVQSGRPLKQEPTEMIQATA

SEQ ID NO: 46572 - protein, 216 aa, Nonomuraea sp.
VHCQQGRQPGFAHRFQQRCFRNFDLRRHTYEQVKAACGLAAQPAQHVMKKVCDAYRTLHANLAAGNLGKPGSARRVKAESKPISFRPGAAQPYDDRCLSWQHGDRTVSIWTVAGRLRGIAFTGSARQLALLAAHRKGESDLVWRDGMWFLHATVDVPDIAATAPHGFRGVDLGIADIATTSDAARYSGKRLNAVRPAIVSCAAACRPSGPDRPSGC

SEQ ID NO: 46573 - protein, 374 aa, unknown
  TnpB Polypeptide
MRASYKYKIYQSKRNKKADQLFSTACWVYNHCIALHKRYYSLYHKSLKTNTLQKHLVKLKKKDRYSSWRTLSSQSIQQITQKIEKGYKMFFQKQAKRAPGFRGRHKYKSITFKDSGWCLNGNEFIINSIGLRLRFFKSRDIAGNIKTVTLKKDAAGDLWLCFSLDDVKSDPKIIPMTGRTAGFDFGLKTFLTCSDGDRVESPQVLLKSLATLRKRSKLVSKKVKGSAGRKKAKLSLARLHRSVSNQRDDFAWKLATDLLQKYDVLCFEDLNMKGMQMMWGRKISDLGFAGFMNKIEYLALNKGKTVVRIDGLLASSKTCYTCGVKYKELGLAERVWTCAGCGQLHDRDLNASLNIKRAGTSALEVELIRPALAG

SEQ ID NO: 46574 - protein, 207 aa, unknown
  TnpB Polypeptide
MEPGLLDICNVVGVDRGINFVAATYDDNGKSTFVNGRPIKQKRAKYAAVRKQPQKRKTPSARRRLKRIGSRENRWMHDVNHCVSKALVKNNPEHTLFVLEDLSGIRSATERVRTKQRYVTVSWSFYDLGQKLKYKAARAGSKVIEVDPAYTSQRCPTCGHTEKSNRNKRLRLFRCKKCGYSSNDDRIGGMNLHRMGISYLSTGCSCG

SEQ ID NO: 46575 - protein, 434 aa, Campylobacter sp.
MSANSQATPSKENKLLTISHKIELIPNNKAKTHFKKAFGCSRLAYNWGLAKWQEYYKRGIKKSHLELKKEFNAVKKEQYPFVYEVSKYATQQPFLNLNLAFNKFFKDLKQGKISYPKFKKKRENFGSYYIGGDQVVIKDEKYLKVPNFGLVKMRETIRFNGKINSCIISQSGDKFYASFSVEISQDEYDKTQKKVKYNNLGLGIDLGIKSFLSLSNGLQIQAPKPLNKFNRLMIKRDRQLSKKLHPKTKDEVLKGIKKSNNYQKATIKLNKLHKRISNIRNDFLHKLTTNLVRNVDYFSLETLNVKGMMSNHRLAKSISDVSFYEFKRMLEYKSAYNDKQIYQIDRFYPSSKLCSNCGNIKQDLTLKDRTYICKECGIKIDRDYNASLNLYSQLIQVGKVLAEFTTADLTAIQDDLEISQIATSKVETVIQQKP

SEQ ID NO: 46576 - protein, 402 aa, Streptomyces sp.
VGRVIRAYKFLMRPTVGQTIALGEMLRDHCSLYNGALQERRDAYRHVSKTSVKYGMQSAQLKEIRAFDPERQGRWSFSSQQATLRRLDKAMQAFFRRVKSGGTPGHPRFRGVNWFDTVDFPKDGDGCRWDSTPHDPVTRVRFQGIGHVRVNRHRQVVGKVKTVSVKREGRRWYVVLTAEQVLPHPLPATGSVVGIDMGIVSFLTTSGGEHVANPRHGRAAAAKLEAAQQALSRCQRRSNRRQKAADKVAALHRGVRRRRLDHAHKTALGLVRKHDFIAHEDLKIRNMSAAPAPKPDPGKPGAFLSNGAAAKAALNRSIADAGWGVFLTILNAKAESAGREVMAVDPRNTSRRCPECGHTAKENRPTQETFRCVSCGHQAHADAVGALNVLRAGLVRREAQPA

SEQ ID NO: 46577 - protein, 385 aa, Cyanobacteria sp.
MLVLEYKVKGKSTQHQAIEEAIRTVQFIRNKCIRYWMDAPQEAKVNGFALNKYSTELRNQFSFVKDLNSMAVQAAAERGWSSISRFYNNCKSKKPGKKGFPRFQKDNRSLEYKTSGWVLHPGLRRITFTDKKGIGELKLLGKWDIHAYPVKSIKRVRLLRRADGYYCQFVIDIEVKEQVELTGNVIGLDVGLEFFYTDSNGHQEENPRFLRKAETKIKQAQRRIYKREKGKNGRRKARRIFAKKHLKVSRQRNEHAKRLARNVCRSNDLVAYEDLVVRNLVKNHCLALSINDASWTQFRQWLEYFAGKFERVAVAVNPQYTSQKCSNCGAIVKKSLSVRTHVCKCGCNLNRDENAALNILNLALQARGGQPRSNALRSWSHYASW

SEQ ID NO: 46578 - protein, 263 aa, Cyanobacteria sp.
MTQKAFNYRFYPTPEQESLLLRTLGCTRLVYNRALAARTEAWYQEQKRVGYAETSSMLTQWKKTKELDFLNEVSCVPLQQGLRHLQTAFNNFFAGRAKYPVFKKKRNGGSAEFTRSAFRFKDGQVFLAKCTQELPIRWSRMLPSGVEPSTITVKLSTSGRWSVSLLVDVDIEKLPELSSQVGIDLGITSLLTLSTGEKIVNPKGFKSKYRQLRRAQKALSRKQKGSLNRHKARLKVAKLHQEIADARIDYRNCSQLDWCAKTK

SEQ ID NO: 46579 - protein, 376 aa, unknown
  TnpB Polypeptide
MNKSIKYRLYPTQEQEIMFAKTFGCCRKAYNLMLSDKITSYQLTGKIVSVTPAKYKSEYPYLSEVDSLALANAQLNLQTAFKNHFDKSRKKKNGFPKFKSAKHSRKSYTTNNQNGTIAIFEKGVKLPKIGIVKAVIHRFPQDDWKLKSATISQTSDGKYYASVLFEFEKPENNYVADLNNAIGLDYASNGLYVDSNGKIASNHKYYRESHKKLAKEQRRLSRKIGSKKNETKSQNYLKQLKRVNKIHRHIANQRLDNLHKISTEIANQYDVVCVESLNMRAMSNKSFGNGKATLDNGYGIFLSLLEYKLNDRNKYFVKIGKWYSSSQICHNCGTLHPEMKDLNNRTLTCDCGLTINRDYNAAINIKNEGLRILLSA

SEQ ID NO: 46580 - protein, 419 aa, Streptomyces sp.
VSRLGAVQLRYSFRLYPKPAQAGALARAFGCARIVYNDVIAARQAAHANGLPYPDLATLSRTLITEAKRRPERVWLAEVSSVVLQQSLRDAESAYRNFFASLRGDRKGPKVEAPRMKSRKDTRQAIRFTANARWSITRGGRLNLPKIGAVKVAWSRALPTTPSSVTVIKDSAGRYFASFVIETDPVTDAERMPVTVRTTGIDLGLTHFAVLSDGTKIDSPRFLRRAEKKLKKAQRELSRKQKGSNNRDKARLKVARAHAAVADARREFHHQLSTQLIGENQAIAVEDLAVSGLARTRLAKSVHDAGWSSFVNMLTYKAARYGRTLIIIDRFEPTSQTCSTCGAKDGSKPLHIREWTCTACGTVHDRDINAAINVKTAAGLAVAACGARVRPGAIPALREETGSHGLSTQSRVAKRHSTR

SEQ ID NO: 46581 - protein, 638 aa, Saccharothrix sp.
VLPAVRADGGHGQVGDGVPHALGHGTGDGRFGVRQQHHELLAAEAADQVAAPDRAGQQQGHRAERRVARQVADLVVDPLEVVEVEQHHGHRPVAHPCLRQLVAGAAVPVHGVGEAGLRVALGGTPPLRQLGGPFQQGQRRSGHQRVHRGGDGGEAHQATDAHRHDAQHHVDGLADDLLAGRVRAAQLQAERDQARPEQQQHGRAEHHDHQVGPRLGPADGVTGGEHGQCGRGQGEHPAVRLGALGQHAVQRGPEEQHHAKDAVAPWWPENSKEAYASGLANLAAALGNWKASVSGTRSGPKVRSPRFKGKRRAMSCRFTTGALGLVDGDRRHVRLPRIGTVRTHESTRKLARRVEAGTARIRSATISCQGGRWFCSFSVEVHRADPAPIRPVSVVGVDLGVKSLAVLSTGEVIANPKHFETALGRLRRLQRQASRRTGPDQRLLQKPSRRWSRTHDRIVRLHRAVANARRDGLHKLTTHLTATHGTIVIEDLNVAGMLGNRRLARHVAGVGMGEFRRQLHYKTTWRGGRLHVADRWYPSSKTCSACGATRTKLRLSERTFRCGECPLVLDRDLNAARNLAALVVEIVDGGSSPSRGATVNEPDGNPRQTRVARATGTATGRPTPPGAGQRRRRKATAA

SEQ ID NO: 46582 - protein, 401 aa, Lentzea sp.
VRTAYRCRAYPDPDQIAMLNRTFGCVRLVWNKTLAERSHRYRTEGKTTSYRETDAALTAWKRTDDLAFLSEVSCVPLQQTLRHQYTAYRNFFAGHARFPRFKSRTGRQSAHFTRSAFRMRDGQLHLAKTTGPMHFVWSFDQVNLATLEPSMVVVARGPDHRWYVTFTVDISDPVPLPATGHAVGLDLGVKDFVVTSDGQRIANPRYLERKAHNLARYQRRLARAQRGSNNRVKAKRRVAAAHRKVCNARRDFLHRTSTRLVRGADVIAIEDLAVANMIRNRRMARAISDVAWGEFRAMLQYTAHRAGRTLLIADRWCPSSKTCSACGHLLAELSLSVRHWTCPNCRTRHDRDLNAAKNILAAGRAVARQVTGDACGADVRRRGFALPLSAVKQEPRVVRRA

SEQ ID NO: 46583 - protein, 407 aa, Bacteroides sp.
MLKIRKSYKVRLKTNNNIENKLDQYCGSARFVWNKCLAMNLERLEKRQPILWYNELAFWLTLWKRSEEYGFLEESPSQVLQQKLRDLDRAFRDCFDKTQPLKRLPVFKKKGKGDSIRFPQGLKTVGRRIFLPKIGWIGFYKSRSISGKVKNITISKKGERWFASIQVEQMIEIGKHASDSEIGIDAGIKCFAAFSDRTLVEGVNSFRKHEDALSREQRKLSRKRRGSENWKKQKRKISKLHHTIANVRSDFLHKLSTDISKNHAKVYVEGLQVRNMSASAKGTIEEPGRSVKAKSGLNKSILDQGWFEFRRQLDYKLFWRGGMMVEVNPRHTSQRCSSCGHTAKENRVSQDVFRCQVCGHEENADVNAAKNILTVGQTGMIACQANRISGRQQEPAGTREEVLLVAS

SEQ ID NO: 46584 - protein, 378 aa, unknown
  TnpB Polypeptide
MQLSETVKLYPTKYQSELIRAAMSEYISTVNSLVSDAARGMSISKITTADVSAGLPSALTNQCIRDARSIVKKHYKACHGAVLKNRRLAENKSGIRVSAPDLPVLKKPCCYTNNQNFKVNEGNIEFPVMMDGRAKRISVKTRMSDKQKSVFASYRLGTMRIVVKGSSLVAQIVYDADEAVFSDGGNIMGVDLGIKCPAVSSCSDGSVRFYGNGRRNKYMRRHYKYLRKKLGKAKKPDAIKRINNKEQRIMKDIDHKVSHDIVAAAVAHNVRVIKLEQLQNIRSATRTSRKNNPSLHTWSFYRLAQFIEYKAKLAGIKVEYVNPAYTSQKCPVCGSVHHASDRNYTCSCGFHIHRDVLGAMNICSSTEYVGGSNTRHTA

SEQ ID NO: 46585 - protein, 458 aa, unknown
  TnpB Polypeptide
VDRWLSGSTSSVVYNHHHALQEGVMATVIQAYRFALDPTPAQRRTLASHCGAARVAHNWGLHLVQARLEQRRAGEDVDVPWTLPALRQEWNRVKDQVAPWWAENSKEAYSSGLDGLARALKNWTDSCNGRRKGRPVGFPRPKRKSRARDACRFTTGQIKVLNDRKHVQLPRIGVVKTHESTRRLARRLEQGTARILAATISRTADRWFVSFTVEVQRHLPVGKGKTTVVGVDVGVRHLAVLSTGTTVTNPRALERSQRKLRRLNRQLARRNTGSQRRRKTRRRLARTTNLRRDTLHKLTSFLATQHGTVVVEHLNVAGMVRNRRLARAVADAGLAELRRQLGYKTIWYGSRLVVADRFYPSSKTCSACGWVKAKLALAERTFTCETCGLRLDRDLNAARNLAKIAQHVAQSGWETANARGADQKTQLAGQVAMKREPSSPVPHRTWDWDRQVRKHPAT

SEQ ID NO: 46586 - protein, 313 aa, unknown
  TnpB Polypeptide
VNFLEKKIRVQKIPGSFKVYGLEQLPSDAELANAKLIKKASGYFLKITTYTDKIEITGFTPGTAVGIDMGVATHITLSSGEKISTLITEPQRLKRLQRKLDRQYEQAKKQQSILGLSYVPFSQNYYNTLKELQKEHEKLNNKKDNLAKQIVALLLKNEYVFFQDENLTAWKIRSGRRLHHSVLGRVKALLKQHPRAFMVDKFTPTTQYCEHCDKKTKHSLKDRVYTCQYCEYSEDRDAHAADNMVFFGLLEHDIPMERRELTPVLIGQDTILNQLECVHYEYTERIPDLHEPVVTQGIVSSQKQETNLSSASW

SEQ ID NO: 46587 - protein, 361 aa, unknown
  TnpB Polypeptide
VAIHLAHKICLDPTYKQEQYFRQGCGIARFTWNWALKEWKSQYDAGLKQGAFDLKKQFNVIKRSEYPWMYHVTKYANQQPFIQLQTAFKRFFQGISRYPRFKKRGHHDSFYIGSDHIELDGNRIRLPKLGWVRMRESLRFSGKVNSATISRVANRWFVSLSVELDQAPKSCDSQACVGVDLGIKTLATLSNGESFEAPKPLNKFLKKLKRMQRSFSRRKKDSNNRQKLRQKMAKVHARIANVRRDSLHKLTSYLTDHFGGIVIEDLKVSNMLKNHKLSCAIADMGWYTFRQQLEYKSQYKGNYLLIADRWFPSSKTCSNCGQKKDGLKLSERVYRCEACGQSLDRDLNAAINLKNLLYKAS

SEQ ID NO: 46588 - protein, 503 aa, Rickettsiales sp.
MKKCYQLEKKVLKPFWNTQCLEISKLLWYPENTDLQDLQDLQDLEHISSSKLSSVSSNQMMENSSFWITKMKNQKMKNWQTTYSLSSTSLTVDKWEKEDIELKSKMIRIYPTKKQTKILDDWRHTNRYVYNKTIAYTRNNPSEKINFQSFRNSLVTNTIKDVDDKRSQNPNVKLWEMKTPKEIRAYAVKDVVTAYKTAWSNLKNRNISHFKIGFRKKKSPTSSMTIQKQSIDFKNNYFYIYNTFFSGSGISIGKRTLKKIKNDFKDGFKVEHDSKIVYKHGKYYLLIPIDISKKDTNKKIKKNGVIALDPGTRTFMTGYSTSEVIECSRKADIFKKLKNKISILQENRKYKTIQKYYIRIGNLVDDLHWRTIKYLTDNYDEILLPSFESQELVKKNKNKKVREQLLNLKHYQFKRRLICKSNMLGNVKVYIVGEEYTSKTCGRCGALNNNLGSKEIFKCVKDDCNFKTGRDVNGARNILLKHLDVCPRSTQVGSTQDKFASKS

SEQ ID NO: 46589 - protein, 416 aa, unknown
  TnpB Polypeptide
MIRGHVIRLDPTVKQANALARAAGVSRFTYNWALAEWTRQYRAGEKPSAAKLKKQFNAVKGERFPWVYESPRDANSQAFADLNSAFSNFFVSCSGKRKGKKLGYPQFRRRGQHDAFYVSNDKFSLRRRGKRGVVRLPVIGDVKTFEHLRFQGKIMSGHVYRQADHWFIAVNVEVAVEPVQHTHPHAIVGVDLGLKTAVVTSHGEAIDAPKPLKRCLQRLKRAARVVSRREKGGKNRAKARARLARLHQRIANVRKNFWHQVTTDLCRENQTVVIEDLSMAFMLRNRKLARAASDVSLGMFNPLMLYKAKALGGQVVVADRLFPSTQRCSRCGNVKTGDGRLGLADRVYRCAACEASEDRDLNAAVNLEQYPGLLGNWGRQARTPMDDHASTRLAPASRASEIAEVGTKPCARLRTN

SEQ ID NO: 46590 - protein, 336 aa, Sphaerospermopsis sp.
LYRTIPVKGKFTDEEKAFWLDQCQHSNSLINCAIYHVRQSHYAKLESMENAFTTYWCGDELRSGWKTYRCQIRYPELDKALKNNPHYKGLAAQAAQQTLKRVGESITSYNGLVKGYYNSDIDRPSLPKYRQKGGLAAVTFPRQALTFKDGYFYPSISKETKPELITDIKLFLPDFIDSDWVKEVTVRPNYGEFWVDWVIDDGKEPIQNNPHLDYSQAWGFDHGGTNWLTGVSTLGKSLIIDGRKLKSMNQGYCRQVAKYKQGKSDFYWDTNLDRIQRKRNNQMRDAVNKAARFIVNRCLNDQIGNRASLTVPQRYDLFNRLNKLYRQRCVACLETA

SEQ ID NO: 46591 - protein, 382 aa, unknown
  TnpB Polypeptide
MEAVKSYRIPVDAPKDLVDSYFEAKRRALEVVLNYVKLNGKAHLDFKNDDRKRLRDELLKGWRYSKHYVDSAINSVIGLVKGWITLYNKGRAKNLPEITKRTVYVKNTLFSFKDGILKISIEPNRRYLVVDLSRYLWIPKDFDGLGGLILTEKELIITVKKRVEPKADEWASFDVNLTNITALINGRVERYSLKELYHIHRVYEVKRQRIQRLSKFKPKKYMSLMRKYSRREGNRARDFMQKLTTEIARKLKESSSGAIMERLKGIKQKILNRSKEQNRKLSKWNARTFQFMLEYKLKWLELPVKYVNAKNTSKTCPLCSGSMASYGGRLMKCRKCSITMDRDVVAVLNLQMRGAGFPQRAPYELIERKELSRGNNSLLIST

SEQ ID NO: 46592 - protein, 389 aa, Scytonema sp.
LAACCWCYNQAIAYQRDCFVNGEKQPTKFQLRETLLKSCPDWISESPYSPREESIFDAKVAFSKTKDKANPRFRSCRDPVKSFRICAKYWGAFYFGKGKDKQIAGFTHYASSKAFINGESIAIKSLQINPSEPLCEEMPSEFTILLDKGKWFICFAIPLLIKDNSLTNCIGLDPGVRTFLTGFDGGQLLEIGNGSISKIAVLCQRLDKLQSQIAKAKGSINKRLRWKLRRQSEVLRTRIRNLTNEIHNKASVFLTKNYKHIFLPTFETSQMVVKKKRKLTSKTARNMLTWSHYRFKQTLKFHALKRNCVVHDVTEEYTSKTCSKCGHIHEKLGGNKKFVCPNCNHEIPRDWNGAINIFIKSINDLVNALTTVEAGEDTPQYTVEFGTSY

SEQ ID NO: 46593 - protein, 201 aa, Microcystis sp.
  misc_feature (140)..(166): Xaa can be any naturally occurring amino acid
MAIKYLIPSILKSIIGDCEGHRKNLSRKQKGSKNREKARIKVAKIHAQITDSRKDHLHKLTTQLVRENQTIVVENLAVKNMVKNPKLSQAISDVSWGEITRQLAYKCRWYGRNYIEIDRWFPSSKRCSNCGYIVKELPLXXXXXXXXXXXXXXXXXXXXXXXXXXXVAASIAAGVMAAGQFIPVKSLKTREAQGKLIMIKH

SEQ ID NO: 46594 - protein, 542 aa, Streptomyces sp.
MGGLREMAAPFVVLGPSGVAVRDRLKHLTAEDEHVLRLVGDHLGTLASRDLKSRCAAGLEHDSEQWAERKRVLTQESSSRWAGSLTKATHDQWALARRGQLAHIQSLEAGMRMIAHRLSLPVGHKGTKRAPGGYRSRREWHAKTRRLHVLADRLKAARADRDAGRVRVVRGGKRLLNTRHHLQAVQLTEEQWRTRWEAGRRILQADGESGKRFGNETIRVTPGGEVSLKLPAPLAHLANAPHGRYVLTARVSFGHRGEQWADRVTANRAVAYRIQEDTARARWYLTASWTIPPVKTVPLAAARAHGLVGVDTNADHLAAWRLDAHGNPVGEPLRFGYDLTGTAAHRDAQVRHALIRLLHWAKRHGLAIAIEDLDFTAEKTREKHGRRKKFRNLISGMPVARLRARLVSMAAELGITIVAVDPAYTSKWGAQHWRKPLTSTTRKTTRHDTAAVAIGRRALGYAIRRRTAPPPQHRSDAVGHRTVQARPDTPRREGNRPRIPGPRTRSVHAGRGANAVDQDAQHRSGHPAEHKSWKQDSLPLSL

SEQ ID NO: 46595 - protein, 356 aa, Desulfurococcales sp.
MAGEVREPEITYVTITGRVIPLDNESYMELVLLAYRFRKALIKAIKMYAKGLDRNTIVKEITRELNLGYADTIYKLAKLIVKGAKHNNSNPLKIKVRKLFVASRGFTSNKGNRNIRLLSTSELQVNIPWKGWVKYRALFGKRYIPIVRELAEKALSKRMSYTARIVFRNGKIYLHLTVPIELYLKYLKKGEAKGGLIAGFDLNSDRINMVIVDKHGVIRDVKTEWFPEVISHGFPRNKANTMRLQALTRLMEYAYHHGVDTVVFEDLKRIKKRRCTRSKTANRKITRFPKRKLLEHGVVMARKYGFKVYLVNPAYTSKMGEKLGKILGLDRHTASAYILVLKYLGISKIPLSISSS

SEQ ID NO: 46596 - protein, 134 aa, unknown
  TnpB Polypeptide
MRGCVMFLVCRFDLIAIESLNVSGMVKNHNLAQAISDVSWAEIKRQLRYKTQWYGKQLVEIDPWTPSSKTCHECSHRLTALSLCVRDWVCPLCGAVHDRDVNAAVNVLGAGLALAASGLNGRPPLAQATVGVSG

SEQ ID NO: 46597 - protein, 349 aa, Ruminococcaceae sp.
  misc_feature (251)..(335): Xaa can be any naturally occurring amino acid
LNFFKGITKFPNYKSRRKSKPSFYVDTDKISFTDTHVKFEKLTTSKRANKQRFNHIILAEKGRIPVGVKYSNPRVTFDGINWYISVGIETPENTNKPLNDGIGIDIGIKTLAVCSDKAEYKNINKTVKVRKLKKKKRRLQRRISKKYSKNKKGVCYCKTRNIIKSEKQLLKINHRLTNIRHDHIHKTTSEIVNRQPKFIVMEDLNVKGMMKNKHLAKAVQEQCFYEFYRQIQYKCRWNHIEFVTADRYYPXXXXXXXXXXXXXXXXXXXXXXXXXXXXXXXXXXXXXXXXXXXXXXXXXXXXXXXXXXXXXXXXXXXXXXXXXXXXXXXXXXXXXEQGMKHKSCFYNFL

SEQ ID NO: 46598 - protein, 368 aa, unknown
  TnpB Polypeptide
MLVAYKYRLYPNKEQQEYFAKCFGCVRFIYNRMLSDKIDYYKETKKKLNNAPAQYKKKFEWLKEVDSLALANAQMNLQTAYNNFFKRPEVGFPKFKSKKNNHFSYTTNNQGGNIYVTDRYIKLPKIGLVRVRKHRDFEGLIKSVTISKSPSGKYFVSVLVDQKDKEKLIPNNNQIGIDLGIKEFCITSGGKKYENPKIIRKNEKKLEKLQRQLAHKEKKSQNYYKTKKKIALCHEKITNTRKDYLHKISHEIISENQVIVSENLQIKNMVKNHHLAKSILDCGWYELTRQLSYKSDWNNCQYIKINRFYASSQTCNYCGYVNSNTKDLSVRKWTCPQCGAIHDRDINAAKNILNEGLRIKTAGTVEIV

SEQ ID NO: 46599 - protein, 616 aa, unknown
  TnpB Polypeptide
MKNFKQLYLLTIKNILIKHKYISNLSEFKNLVELYKTKKRVAKSQFKELAIDNGLSKSDIKDIIQSLNKSNNFQISNSNINKLTSRINQIYTYYALLEYDNWITCFTTMPEKRNKKKPSTTSFIHEFHLKVSKHSLKKYNIKFNAAKELYNAILGELLKRHKLMLSDIRYQNAIEIYKQDNLKTEAKTIFDKLNIEYQITKNDLQKLAKDIKNKCYMKDHLDSVSIQKLSDRIFDTYYKWVCKKGGKPRFKSWKNGIRSMEGKSNTCLAFKNNIFSWNGIKSEIILQKNDKYGVQEHALNSKVKYCRIVRKIIKGKQKFYLQLILEGLPKLKSNQIFDNGRNGIDIGVSTIASVGKEKALLTPFCQELNDIEKNIKNIQRKKARSLRLNNPDNYENDSWVIKDKRFLKRKGKNIKGKSNWIKSNNYLKLENELKELQRLQTSKRKYLHNVLANKVLENGNDIIIEKNNYKAWQKGLYGKTIGKKAPSLFVQTLKRKALKSSGTFEEVSTWNTKFSQYCHVCDGYHKKPLSQRIHTCGENEITQRDLYTGVLLYHYDLEKKQVNRQSIIDNWSGIETSLRQALLTLIKSRNEGNVPECLIPKGIEKRDWLVKGSLSA

SEQ ID NO: 46600 - protein, 344 aa, unknown
  TnpB Polypeptide
MYLTVKQQVKHLSKEDYRSIKELCHIAKNLTNQAIYNIRQHYFAEGKYLNYEKNYALLKSSDNYRTLNSNMAQQILKEVDGSFKSFFGLLKKAKQGKHALKDCRLPRYLPKDGYTTLVIGFVRLKGNKLILPYSNSFRKTHKAVEITVPPILLDKKVKEIRIIPKADARFFEIQYIYEDECIQRNLNTTNALALDLGINNLVTGVSSKGETFIIDGRRLKSINQLFNKENARLQSIKDKQHFGKKTTNRQKAIARRRNNRINDYMNKTARRVIDYCINHDIGTLVVGYNETFQKDSNIGKRNNQTFVNIPYGKLRDKLEYLCELNGITFVMEGKILHFKSKLLR

SEQ ID NO: 46601 - protein, 424 aa, unknown
  TnpB Polypeptide
LNSFKKKLNQLIKDFGITEYDGHSFIKTHKHYYSKYIDINTAQTIASRAYKAIKLLLFDPNTKKVKFKKELLSVEGKTNKSGIRFKNNCLYWNKLTIPAIIRKNDLYAQECLDTGNIKYCRITKKFIKNKYKYYIQLIMEGEKSVKLNKSGHSKQIYGADKIGIDTSFQFVAVSSTSTVKLLKLGEGLNTTYRAIKLLQRKLDRQRRSNNPNKYNIDGTFKKGNRDKWINSNKMRITQNKLKHLYGLKQRKLKQSHEKLANYLLTLGTDVYVENINYKALKKKIKEPKINPKTGRFKSKKGYGKSIQNKAPALFLETLNKKLNYIGKELNNINIYTFKASQYNHYTDTYEKKKLSERWTTINKAKIQRDLYSAFLIMNSKQDLSHTDREECIKTFKTFKKLHKSEMKRIANLKTIKKIPSAWGF

SEQ ID NO: 46602 - protein, 458 aa, Natronobacterium sp.
MRYNYRYRLNPTDELHERLAWTVDTCRQVYNHFLHRLNREDGTTAYSEQSVLPDLKREWTELKQVHSKVLQKVVQRLYDNLSTLQGRKDNGYPVGELKWKGPQEYCSIKYSQTGFELKNTSGRTVLSLSKIGDIPMVYHRDVPDDATIKEIVVKQEPTGEWFAVLGIETEDEAPEKPKKIEDCAGIDVGILKYAHDTDGTAVERPDLSDERDRLEREQRKLSRKEHGSANYRKQQRVVAKRHADLQQKRQDFLHKLSNHYAREYDLVAVEDLDAKGLMELPSNSRNRAGAAWGTFLRMLEYKCEREGTHFVAVDPDETTKECAACGAESDKPLWVREHSCPSCGFTADRDWNAAYNILVRGLKQVGTGCPESTSSESKDSDGLRKSADDFRTPAETALPTGTDSIRFLQSASWKQEAPSAHGREAPVRMVRETFGLTLPSRSERRKPRASRVGRRSLC

SEQ ID NO: 46603 - protein, 203 aa, unknown
  TnpB Polypeptide
MPLHRHRLLYHRQSLVVLIVPEILPRRRPGERRRRCFAMPPRPDKSFPRRRPGTRHTARFATWVNHNVSKSIVVKAKGTGRGIAIEELNGIRDRVTVRRSQRAILHSWSFFQLRAFLTYKAALAGIPLVAVDPRNTSRLCPACGHISKANRKIQANFLCVSCNFSGLADHIAAGNISRRAVVNLPHVSIAQITVQRQGQSPWL

SEQ ID NO: 46604 - protein, 311 aa, unknown
  TnpB Polypeptide
MVWSLVKYKLEREVRKMIKTIRVMLVPNNKQKAKLFQYANTARFAYNWALGREKENHENRGKFICEGDLRKEFTQLKKKEEYLWLKKISNNVPKQAIRDACTAYQNFFNGVSKAPRFKSKKHSIPKFYQDTKKIKFTDTHVKVEGFATSKRHNKQKLNWIRLAEHCRIPTDCKHFNPRIKYDGLNWYMTVGIEYKDKESIPSNEGIGIDLGIKDLAICSDKNKYKNINKIQKVKKLEKRKRRLQRCISRRYEKNKKGECYCKTSNIIKSEKELLKLNHRLTNIRQNYLHQTTSEIVKREPSFICIEDLNVK

SEQ ID NO: 46605 - protein, 387 aa, unknown
  TnpB Polypeptide
MRTIIKTCKVKLDIPEDRKEDILETFRQYNFALNFCIDKAWEPEKKIINKSKLHKLTYYPLKEQTNLQANYICSARNKACDAIRGNIIKWYNHRRATKPVFKLLSAIQLDKRTLTIKNRDCTFSTVNGRVKAKYLIGNYQRNMLDDPNYEFRTATLSYRNRNFFLNITIIKPAIVKEPKTIMGIDLGIKNIAVTSTGKFFKSSFLNISRKQFREKRGKIQSKGTRSAHKLIQRLGRKENRFADWILHSISRQIVNEAIDKDAQVIAFEKLINIRERAKKWRKSEKAKINLWAFSKLQQFVQYKALEAGIDTFFVEPQYTSQRCSKCGHIEPSNRNGLDFKCKHCGYFLNADYNASKNIAIKAFSDKSSDWARRPSKIALKSGSFMPH

SEQ ID NO: 46606 - protein, 438 aa, Nocardiopsis sp.
MVFGRLFMVRLNKGVGVEIQRGIKFRLYPTPEQAEALQTQGHAARAMWNLLHDWWTWGGRSRRPSLTLADKAIRQARKDIPWLAGLPAQAAQQVLRQYHRAWVNCWEGRAETPRFKSRVRSKMTVDLPQGRDLNITRLSGRWSIVKVPKVGVVRFRAHRPIPGKVTGARVVREANGWHIVLRAHWEQDDPAPHTGPTVGIDRGVVVPLALSDGTDYTHPQWSNPKQSERLVRLERQAARQRRSHKPGDSTSNRLKATYDKIHGLRARLTRRRADWQHKTTHTLASVYSLIGLEDLNIAGMVRSARGTAETPGEQVRQKAGLNRSIQGEAWHQLHTQLTYKTTERGGRVVVVPAPGTSQRCHMCGFVDARNRKSQAVFACTNPTCGWVGNADTNAAKNTHFAALQAAKPTAPGSGVAGRGALQPLGGALKRQPKRKATA

SEQ ID NO: 46607 - protein, 527 aa, unknown
  TnpB Polypeptide
MRYAYQRLLEGEERKELKKHLPKVFNINTRYSDDAIFLAQSVISLCKETDQNPKKVIFGSRKVFEQLKKNHLTGKRRRQLRKKWKESRQRNLYSRGDRSKQGNLNLRFEWIDNELYLRINTGDRQYIYARVIRDVKREKDKWIEFMFMLENAYRYKAWFPYSVRLKVKNGKIYAFISIEEKLPPIKIRRDNGIIGIDVNAYPFHLALTFTSKDGNLEKYERIDLNELLDASSEKRQYLEWQIAHRIVRIAKEERKAISIENLEKLPKGKRGDGFPKLRRKLQKWSYKRLLEKIEVLAKRNGIELIKVNPAYTSVIGKLKYAPQYNIDKDIAGAFVIARRGLGFKERLPKNYKELLNDTDFLSYTIAKIEDDIKRLKDELKEEKSEHKRNGLKSRLSKLRKNLKMMQNYVSHLTSHVLRLENGKSEQATQQPVNQQKEQVRGSGYTGHKSWQVLSIALTFSCLESYRDFSPLKRVIVSGDWAGVVSRLVPVLGTGTMTLPKYRLLGSEVSEMAEYKYPNPSCSFKQFG

SEQ ID NO: 46608 - protein, 367 aa, unknown
  TnpB Polypeptide
VEKAYKYRIYPNRKQKEIITKTFGCCRFVYNTYLAKRIKTYEESKESFSYVQCANDMKNLKAELQWLKEVDSTALQSSLRDLDNAYQKFFKEHSGFPKFKSKKTHRYSYKSKCTNENIQYCNKHIKLPKLGMVKTKNKLIPQGRILNATISQEPSGKYYVSLCCTDVEVKPLEKAGSMIGLDLGIKEFCITSNGEMIENPRYLKKSLNKLVKLQRELSRKSKGGSNRNKARIKVARRFEKIANQRKDFLQKLSTKLIKTNDIICIESLQVKNMIKNHKLAQAISDVSWSEFVRQLEYKTNWYGKQVIKVDKFFASSQLCNVCGYKNIGTKDLFVREWICPNCNTHHDRDINAAINILNEGLRLLKAT

SEQ ID NO: 46609 - protein, 472 aa, Nocardia sp.
MARHTTFRYRLDPTVEQRSALSRHAGAARFAYNHCLAGVKAGMDRRSRDPAVKVPWSGFDQINAFNTFKRSVQAGRTIAVDTVGTAKVVETGLAWRTAVCQQVFEEAAVDLGRGLTAWATAHSGTGNDRVGFPRFKKKSGKRSFRLRNKYTSSTRPPIRVGEDSTARSVRLPGIGVVEVSDDTRPLRRMLAKNRAKILYATVVEKVGRWWVSLTVEACDRHVALRHLARDQNDAGGWVGVDRGLSALIVAAAADGIEVARVVGRPARLAIGARKQRKLARDVNRRIKGSQRRRKAVACLAQHHRRVRDARIHTLHQVSHDLVKTHDRIVLENLNIEGMRSNRHLARAISDAGWGEFARQIQYKQQWYGGQVSIADRWFASSKTCSGCGSRVAALSLAQRVFICADCGHSLDRDLNAAVNLAAWGERHHQAREPEARAPIINVRGREGSGRRSGVGETSPEEAETDTHAGSAA

SEQ ID NO: 46610 - protein, 443 aa, unknown
  TnpB Polypeptide
MLRLQAFKYELIPNGRQERLMRRFAGSCRYVYNKALVLQKERHEKGGKKLGYAGLCRLLTEWRHSEETAWLAKEASGEWRVASGKEANGEWRMVQNPLFAIPYSLLTTRYWLLATRYRKKGRSDSFRYPDPKGIKLDQANSRIFLPKLGWLRYRNSREVLGTVKNVTVSQSCGKWFVSIQTEREVETSRPKRGTVGIDLGIAHFATLSDGTFFAPLNSFKRHEVALRKAQQSLSRKVKGSHNRKKALARVQKIHVRIANVRRDFLHKVSTAISKNHAVVAIEDLKVGNMSRSAAGTADAPGKNVHTKSGLNKSILDQGWYGFRRMLEYKLSWKGGRLVAVPPQNTSRTCPGCGHVSADNRQTQARFVCVACGYENNADVVGAINILSRGIQLLRDEGQDTANALVGMQVDWLPVSARMACGSNCIGSRKQEPAETTARGAIRA

SEQ ID NO: 46611 - protein, 417 aa, Cyanobacteria sp.
MLVFEFKAYGKPSQLAAIDGGIRVVQFIRNKCIRLWIDHPKTGKYDLSKYSAVLAKKFTFANKLNAMSRQASADRAWAAISRFYDNCKKKVPGKKGYPRFQKSNRSIEYKTQSWKIADNRKSITFTDKLGIGKLKLKGTRDLNFYPKEDIKRVRLIKRSDGYYVQFCIKAERRENIEPTHKTIGLDVGIESFYTDSQGSKAENPRFYRVGEAKLKQLQRKISRKAKGSKNRAKARDLFGKAHLKISRQRKDHAIKLARCVITSNDVVVYEDLRVRNLVRNHCLAKSINDAGWHQFRVWLEYFARVFGRITIAVNPAYTSQQCSSCGTIVKKSLSTRTQVCQCGCKLDRDHNAAINILNSGLGTTGHVETSVLNAGNASGESTSILAGESLSGQVGSLKEESPSRDSRRVSISFSVLL

SEQ ID NO: 46612 - protein, 411 aa, unknown
  TnpB Polypeptide
MKTYCVELRFKDETDRRSLLDTMALHNQAFQLVVDWLFEHGLKTGNSKLVHDGTYRKTRKSLANLPSQFAIKARMEAMSTVKTLKAQAKKNKTILKDIAKPIKTKLSMRLDDRVFTMRADGVRLTTKDGRVDCSLKWYSKAREMFSSYAMCDPLVFERDGRVFLAMTFDDPQPTFVPNSCVGIDLGLNRLAVTSEGIIFHDRELLRLKRKIRYNRGCLRRAMAERKSRSAARHIKKAARRERNITRQHIHALCNGILESTKATTLVMEDLSRIKSRDRGRGFNSRQAQVPYCLTKTILTYKARSLGRRVETVNPAYTSKDDYRGLPRGVRKGCRYYASDGVVLDADHNAAVNIARRWTVKNELPVSFVSPERGRQTLWAGRSQSAYRRDAPPTARSEISSACKPTTSVVGS

SEQ ID NO: 46613 - protein, 383 aa, Trichococcus sp.
MKLKGIKVKLLPNQAQKDQIDINIQLRRFIKNKMLDMQQARYKNGGQYVNKFGMNYLVKVLKLEFPFLKQAESTCLEYACADLDQAYQRFFTGQNKHPNFESRKRPHNSYKSKCINQNIQVEDNHYIKLPKLGLVRAYGLERIRGQIKNAVIRKEPTGAYSATIQVEHEPVLLPKTNKQVGIDLGITHLAIQSDGFKLENKNFERSLAKKRSSWERKLARRRTKALVKIKEAEAAGVELDLSEFKNVQKAKQMVAKLNRKIANQREYYLQKCTTDLVRHFDLIVLEDLKTKNLLQNHHLSRSIADAAWAKIKSMLAYKCDWYGKELVLVNPAYTSQVCSHCGENTGKKPLRIRTFACPHCHTKNIDRDVNAAINLLNKALAER

SEQ ID NO: 46614 - protein, 449 aa, Clostridioides sp.
  misc_feature (2)..(84): Xaa can be any naturally occurring amino acid
MXXXXXXXXXXXXXXXXXXXXXXXXXXXXXXXXXXXXXXXXXXXXXXXXXXXXXXXXXXXXXXXXXXXXXXXXXXXXXXXXXXXYKFRMYPNKKQQELINKTFGCCRFVYNKYLAKRIEVYKNDKETFTYKQCSSDLTNLKKELNWLKEPDKFSLQNALKDLDNAYKKFFKEKAGFPKFKSKKINRFSYKTNFTNGNIMYCGQYIKLPKLGMVKIRDKQVPQGRILNATISKEPSGRYYVSLCCTDVDIEAFENTNNHIGLDLGIKEFCISSCGEFIENPKYLKKSLNKLAKLQRELSRKTIGSLNRNKARLKVARLQEHIANQRNDFLQKLSTKLIKENDIICIEDLQVKNMIKNRKLSRSISDVSWSEFIRQLEYKANWHGRQIVKVGKFFASSQICNKCGYKNEEVKDLNIREWICPSCNETHDRDINASINILKEGLRLITIQNK

SEQ ID NO: 46615 - protein, 379 aa, unknown
  TnpB Polypeptide
MSKTFVKTVRLRLREPTVRKRDLIDEAMRQSAIVANEAAKRMPGLPKNYIKNPKAKNSPLYGIVQDMRNDGITLNAACAFEAVHKARESYLSMRRNKNFAIPVFERGFIRLHNRDNIDKFFERDGTYYVVLKIFPDEKITLPFVLGDYQGYFLQRIIEGSLEHGTGEIVKNGGWHLNLTIKRKVNIDYEPETFIGVDLGLNNIAWVTALDKGGKFLGEIHFNGGQTGWIRNRLFKKRRRLQGEGNLKMVKKIKDRESKWMENKNHVVSRRIIEFAKQFEKPIICLEDIDGREIRKRCGKSRRIHSWAHAELRNFIEYKALEAGVLSKLVNPRNTSKTCHRCGHTDDANREGIYFHCQNCGLSTNADFNAAWNIARNCWN

SEQ ID NO: 46616 - protein, 406 aa, Symploca sp.
VKVAYQYRLRPTQQQALEIDRWLSMLCAQYNYLLADRFNWYEQNRSPVNACSVICHLPELRNNPDYYSQKKTLPQLKKDRPWYGDIHSQVLQDVVKRVKVTFDRFLKGDSSGKRSGRPRFKSKSRYKTFTYPQAKQDCLQGNKIKLPKLGEIKVILHRPIPEEFKVKTASVTKKADGYYLTLSLEDKTVPVVTPDIKPDKMVGIDLGLKEFLTTSNGETVAIPQKYRKAQKRLRVIQKKVSRRKKGSNRRLKAIKLLAKQHKKVADRRKDFHFKTAKQLLSKYDVVAYEELNIKGLSRTRLAKSVHDAGWGNFLFILASKAENAGLLTVGVKASGTSQKCSSCGERVPKKLHVRWHDCPHCGCSLDRDHNAALNILNRAVGHPVLKAQLMSDAVAGVAEKPTPTAC

SEQ ID NO: 46617 - protein, 219 aa, Vibrio sp.
MAYRRFYNESKKVNYNTASSKLTELKKQTEFEWLNSVSCVPLQQSLRHQQTAFKNFFEGRAKYPAFKKKRSKQSAEFTKSAFKFKDGNIYIAKSKQPLDIRWSRELPSEPTTVTISKDSAGRYFVSMLCRFEPKPLPVTKKTTGIDLGLTDLVITADGFKSGNPRHTAKYEKKLAQAQRRLSKKKKGTANFHKARIKVARIQAKIATAAATLPTNSPLR

SEQ ID NO: 46618 - protein, 411 aa, Calothrix sp.
MWWEVMIMTFTLTYEFKLKPTAEQKEIFNEWLETNRQVYNYALGERKDWFKSRACDVTSCSIKSQYIIPADTQRPTYNSQAKALTDAKKQYPHLKQVQSQVLQQTLKRVETAFTNMWERNFGFPRFKKRGRMRSFVFPQFKNNPVMGNKIKLPVIGVVGFRKSRPIPEDAKVKQVRIVKRVSGWYAMITLQWDVNVPQPMPHGNALGIDVGLTSMVAASNGLLIKRPRFFVDGSRKLKLLQQRVSRKRKGSNNWLRAQQKVAKLHEYVANRRKDWHRKLSHQLCEGVGMIFVENLNLVGLSRGMLGKHCLDAGFGQFFNILEQTCFKRGVYFQKVDPRKTSQICPNCLHETGNKTLAERVHKCNNCGYITDRDVAASQVVLIRGLAAVGHTVKMLSEGKNTSFPMTKESHG

SEQ ID NO: 46619 - protein, 416 aa, Nitrospiraceae sp.
  misc_feature (393)..(393): Xaa can be any naturally occurring amino acid
MGKQKVYNNTDPISFTAGTLLPDMSFRGSHLFTLHEFCTDMSMFYGRIKRTLFKEVQSTGRPAISFKNEYLKVFGITARQFNAIRIDLQGNIDSAIEVQADRIQDLSDSIKSIRKWLKAKAAKIHKVQSDKKLSNSARHNILQPLRFAVHNKKRRLVIMEAKLAALKQDKEKGLVRICFGSKTLFYKQFELVENGYVFHEEWLKDWQAARDAMFFFVGSHEETGGNQTCTLTADGYLRIRVPDALTKKYGRYVTIPGVHYPYGQEIIDTALIIKQALSHRFLCKDGKWYLHTTVALPCKPKVTHHPRNIGCIAVDVNEKEIAVAETDRFGNYVWSQTYPACVKDLSTEQTEALYGDICKTIIARCVAKGKPLAHERLDFQKKKSTLREQGVRXVRIRNILKYAGPAGFQVRCDRLY

SEQ ID NO: 46620 - protein, 344 aa, Halobacteriales sp.
MKRTNTFAVQPLSDTDEQVLRELLDASAALWNETNYERLMRYNDADGYDDEDVFDADTGSHEGRYKGVLGASTAQQVIEKNSEAWGAFFELKDQYHDPENTSVTEHPEPPGFWGNDDDGRDLHTVIRKDAYSVDWGERSRLEILVGEDLRDRHTSPGSRLRLEIAGEPNWPDYEDHGRLDLWYDETDSTFRASQPVTVSDNARDTPLADEAAALDIGANTLVACTTTTGEQYLYDGRELFQRFRDTTHRIAELQSKLEEGRYSSKRIRRLYRKRTRRRDHAQEALCRDLLERLYEDGVGTLYVGELTDVLGTHWSVETNAKTHNFWAFKQFTERLAYTAAEYGI

SEQ ID NO: 46621 - protein, 232 aa, unknown
  TnpB Polypeptide
MIPEAKKRFNAAEHLIHTTKKNHAHFDFDIRFPKMPSYLRRAAIQHALGSVSSYESRMEQWEAAGELSGKPNFTCENHAMPVFYRDVMYREGTEGKDEAYLKLYDGHDWRWFCVCLSHTDMEYLRKNWYGKKASAPTLEKRHHKYFLRFSYIEEVTLTQTPVKGQIICSVDLGINTDAVCTIMRADGTVLGRSLLTSPVKKTVCTAHWDESGDSRGNMDLRRQGKGGHTPDV

SEQ ID NO: 46622 - protein, 380 aa, unknown
  TnpB Polypeptide
MKINKAFKFRIYPNSQQKQFFAQSFGCARFVYNYFLRQRIDYYAQTGKRLTYHNNALALTQLKKLPEFEWLNNISAQSLQQALRNLDVAYNNFFNNQAKFPNFKKKSNKQSFNVPQDFSVHDNMSGAYALDIPKCKGIKIKLHRDIEGTMKSITISRNPSGKYFASVLCELEIPEPIYSGGEIGIDYGIKAFITTSDVKSIDSPKFLRKSEKRLNQLSRSFSRKQPSVLPLHGGTWNAKNRYKAQKQLARQHEKVSNQRQDFLHKTSKQLVSDNQAIYIESLTIRNMIKLHTLAKSISDSGWNTFVNMLKYKGQWYGCRIIEIDRWFPSSKRCHVCGYINDNLTLSDRSWLCPECNTNHDRDVNASINILTFGRAGIART

SEQ ID NO: 46623 - protein, 414 aa, Helicobacter sp.
MVKAMQLTERHIIKPNHPSFKRIWRFCHLSKNLYNYANFILREHYLAGFKLPTAYDLINRFVKENQKDYRALPAQSAQQTIMLLCQNWKSYFKAIKAYKAKPSKFFSRPKIPKFKPRGQEGVAVGVCTNQQISFTKGTLTKIKFPERANLKRLITKVDRTTSRIKQVRFIPKTTCFIVEVIHEQTTQTPQAQGNGIMGIDLGLNNFVTAIDNQTRPFIIKGGGVKSVNQWFNKLKAHYQAKAKLSNKRFWTKRLGRLALWRDCKLNNFMHKASCYLIQHCLQHRISTIVVGKNDGWKQQIGLGKRNNQNFVSIPYQSFLDKLAYKCELAGIDLILTEENYTSKCDHLANESMQHHEQYLGKRVKRGLFKSSTGKFLNADVNGAIGILRKVFPDVVQTLRDSGVVFTPVKISLAF

SEQ ID NO: 46624 - protein, 170 aa, Streptomyces sp.
VVPDRHVRDGRELNRCRKRQLALRAKLQKKGTKSAKRVLKRQRRKEQRKATETNHIISKRIVTEAQRTGRGIGMEDLAGIRTRARLRKPQRVALHSWAFARLGQFVEYKARRAGVPVLFVDPAYTSRRCAECGHTDKLNRVSQGRFACRSCGFVEPVGLYLQAWPLEPGS

SEQ ID NO: 46625 - protein, 421 aa, Ventosimonas sp.
MQRLQAYQYELIPDGQQKRDMSRFAGSCRFVYNKALALQKERDEADKQTQFSYTMLANRLPAWKRELAWLKFSPAQTLQQSLKDLERAYANFFAKRAEFPRFKRKGVRDSFRYPQPQQIKLDEANGRIFLPKLGWLRYRNSRNIQGQVRNATVSLRAGRWFVSIQTEREVNKPLPEATSAIGIDVGIARFATLSDSSYLAPLNSFKRHETALKKAQQSMSRKEKFSSNWRKAKRKVQRLHARIGHARHDYLHKATTTISQNHAIVCIEDLQVRNMSKSAAGTSEEPGRNVKAKSGLNKAILDQGWFEFRRQLQYKLDWNGGILIAVPLQNTSRTCPVCGHISKDNRQTQAEFVCVECDYENNADVVGAINILRAGHARFACEVNPEVRDQQQEPAEVIQLGKCLAGRGRNPLVLTRGGCQR

SEQ ID NO: 46626 - protein, 439 aa, unknown
  TnpB Polypeptide
MLTLNYTYRIYPDTEQVALLDEWLETCRLSYNYALRELKDWIASRKCPIDRCSLESEYIMSAEYSFPGYHQQQNNLPKAKKLFPRLASVPSQVLQSNIRRLHDAWDFFQKRGYGFPRFKKFGQMKSILFPQFKVNPITGWQISLPKLGKVRSNLHRPIPEGFVVKQIRIVKKAIGWFAIISISSDIEIPHPLPHGHFIGVDVGLLNYLATSDGFVEKVRQFFKTEHRRLKVLQRRLSKKVKRSKNYEKARIRVEKQHNHIHFKRKDYQFKLAHKLCDMADSIFVEDIDFRIMAKGFLGKHTIDAAFGQFRSMLKYVGWMRGKFVAEVDHKGSSQTCPNCRIEVRKELGDRIHSCPECHYETDRDIASAQELCNRGQETYPGTLEKQEIGSQIEDTSVAGFPRLKKVSGVVLSGAMSLDKWRRGAMPNSDIGKPALYSQS

SEQ ID NO: 46627 - protein, 439 aa, Natronorubrum sp.
MLEVHRTHRAKILNHPQAEDSLDRHGWSASKLWNVANYHSREVWEETGEIPDHSDLKDELKTHTKYKGLHSQSSQRVLEELAEAFNSWYGKRKSDTRANPPGYRKRNYYDDHGNRVHEEHPRSTVTWKQNGIRHDTKNNRVRLSKGANHKEHPKAWEYILVEYETRPGVEVENLQQVRAVYDRANERWELHLVCKDEIETPTAPGTETAGVDLGICNFAAVAYSTEEADLYPGNRLKQDGYYFAKEISKCDDSGGETATRLHHKWSERRTHFFHSLAKHIVERCVEKRVGRINVGRLAGVREDENGESKNWGRHGNLDLHGWAFDRFTSILTYKAKGEGIEVVEVSERDTSKTCCVCGREDDNQRVERGLYVCEECDAAFNADVNGAENIRLELNRSNSESSGQVSGDRSTGWLAQPGVYLHDLSRGFQPRREVVDCKP

SEQ ID NO: 46628 - protein, 443 aa, Natronorubrum sp.
LFEWLAAHAPLWNQITYRRRQEYFAEDGDVWDAEYTDLYDEYAPILGKAACQQVARKNSEAWRSHFRLLDNYHDDSDPTVTEKPSSPGYWGNRDDGYDLHGLVRNDLYTLDWDEDRSTLEFGVGDALEEKYDFEYQERITLKVRGNPQWEGDDARLELVYDEAADVLRVKHPVRIRPDNLQEQRLDAFTHTLGPENTTQSAAIDVGANNTLAIVTTTGDTAVYHARPEFDQFQALSELIAQLQSELPDDQYTSRRIQRVYDERGRKRDHSRDAAVKHAADWLLERNVDTVYVGDLTDVLDTHWSSDVNKKTHAFWSHRQLIDRLELTLEDIGIRVEQASEADSSSECPECGSKDVSRDQDEYRCHDCGLDAHSDVAGAWNLLQNEVGPMARPAALSAERGRDAPREGAYWEWNGHDWIPANFGEQSSSIDQTSISKPASSQPG

SEQ ID NO: 46629 - protein, 438 aa, Mycobacterium sp.
MLTGRRFRVEFSDEQAEFAQRIGGACRALWNTGLEQRREYRRRGAWMNYARQAAELAQAKNEQPWLEDVPGHCLQQTLMDLDRACREHGTFRVHWRSSRRWAPSFRFPEGNKMLVEQLNRRHARVKLPKLGWVKFRCARSLNGATIRSATVSRDADQWFVSLLVDDGIQRPDCHAQPGTAVGVDRGVVVAIAASRGDLLNRRFVTVGEQQRRMALQRQLARTTTYSRNRNKIRTKLAGLRARERRRRQDFCAQTAHRLTVGHELVVLEALQIRNMTRRARPVEDPENPGQYLANGAASKSCLNNAILSKGWFRFETALMSASRYSGTQIVKVPAAFTSQRCSACGHVDPKSRESQAVFKCTHCFAPAQHADVNAAKNILAAGLAVTACREAQHRRCWRDSEAGTSRKPRGITAPTRLPGWNPPASATGRTSNAKQRHG

SEQ ID NO: 46630 - protein, 412 aa, Moorea sp.
MIVIEFKAYGKQKQYNAIDEAIKTAKFIRNKCIRHWMDNKGVKKTDLSALCAVLAKEFPFANELNSMARQASAERAWSSIARFYDNCKKKVPGKKGFPKFKKHCHSVEYKTTGWKLCPDKKWINFIDKKGIGKLKLKGTWDLWCLEIKLIKRVRIVRRADGYYVQFCVNTDIYEEIELTGKTIGLDVGLKNFYTDSNGDSQPNPRFYRKGEKRLKFHQRRVSRKKKGKAVGHASRTANRKKAINRLGKTHLNISRQREEHAKRLARCVVQSNDLVAYEDLRVKNLVKNHSLAKSIYDAGWYQFRKWIEHFGTKFGRVTVAVNPSYTSQNCSNCGEVVKKSISTRTHVCSCGCELDRDHNAAINILNRALSTVGHTGTWNNIPNAWGDLASTLIGENLSQQAESLNQESPSRD

SEQ ID NO: 46631 - protein, 438 aa, unknown
  TnpB Polypeptide
MSVPRKKNKEPDNIIEITHRYRAYLTALQEYKAESWLYTLCNLYNSAIKERRNAYRTEKKTITYSQQQNGLLLLKDSDPTLKKVHSQLLQNCLQRVDRAYQKFFEDLKRKKNGKHVKVGYPRLKKLSKYRSFTYPQVWMKQKGELKQVIKFRQDNNKFGTTVLPGFGEVRIRVHRPLDWKQAKTVILKREKSGKWYLCITLKKAVELQLQDNGKSTGIDLGLKKIVNTSDTNYQEHPKFIYRSEARIKRAQKRLSRKQKGSANYEKQRIRLARLHEKVANQRRDFLHKLALWLVVNYSFIAFERLNIRGMVKNHHLAKAILDAGWATLITLTTYKSVMLRGNEVVRVDPRYTSQECSACHALVPKALAERIHKCPYCGIELDRDTNAARVIEQKAFLRETTPFRSPRAGAVRSHACGDRASTHPYGNGQARSLKQESH

SEQ ID NO: 46632 - protein, 423 aa, unknown
  TnpB Polypeptide
MKRTNIIRLVPDKRQNELLMVIGDRVSRLWNAANFLCRQNLVKGKAVPSYAKLCSILKTDENYRFLPSDIAQEVLKKLSKAWTSYFRLVKLQKSGKPMDRPGLPRYRKDRKTGKRPFDFIPIKSLRTYSLSGGIFSITLPSDLRNGRLCIGCKGILRYRGILKTCELKYDRARTRWYAHITVEISKPRRKQKPVKYASGDIGAKRAIAVVIEGSKIAHVFSARELWKDYKYWTRRIAREQSRLSAQGLKTSRQLKRLYRMRKLRVEHGLEALARKVALILKREKVTHFAVGYPKGCREEMQFGKNNALVHNFWSFDRVLNILEKHCTRRDIELKRVDEQATSDVCNMCGKEVKRPVRSVVVCPEHGRYHADVNAAINILLKNTPGYGDGVKATPAWVTHEWNKHLWLPRARSLRYVSQVLQAV

SEQ ID NO: 46633 - protein, 438 aa, unknown
  TnpB Polypeptide
MIVRQAYKFRLKTNEELEQKLVQFSGCCRFVWNKAIALIKFRLDHNISIPWYNDMAGFLGLWKRSEEYAFLNDAHSQILQQTLKDLYKAIESAFARGNGIRFPKFKKKYRHDSFRYPQGVKIDNRRIFLPKIGWVRFYKSREIEGKIKQVIVKREYKHWYVSVITEKEVEPITRLHSPIGIDLGVRKIITLSDGTYFKPLDLTKLEKKLKREQRRLAKKKKFSKNWYKQKARITKLWQKIKNKRYDYVHKLSTAIAKNHGIVVVEDLRIKNMTRSARGTIDNPGYNVKQKAGLNRSILRQAWGIFLRLLEYKLEWSGGRLVVVNPRYSSFTCPVCGLTSRENRKSQARFVCENCGFEANADFVAALNILERGFKNLSEDLCFLTQKRIKELVLELSTAGTAGGNACGGSALLPVKQEPAGNREGVMLPVKLKQGILSL

SEQ ID NO: 46634 - protein, 374 aa, unknown
  TnpB Polypeptide
MKLIAQLQLKPTAQQKAALLATLERANQACDFISELAWEHQVFGQFALHKISYEATRARFDLSAQVVVRCIKKVCDAYALDKKVKRTFKPHGAISYDERILTYKVEAQTVSIWTVEGRNKMPFVCGERQKELLKTRQGESDLALVKGKWFLLATCNVEEPEIDSSRGVIGCDFGIVEIVTTSEGKSYSGEKVKTLRRKLRAHRARLQKCGTHSAKRRLKKAAKRQERFVRNSNHCISKELVKDAKASHKALGLEDLKGIRERSKRLNKEMRWQMGNWAFAQLRGFCEYKAKAAGVAVVCVDAAYTSRTCSACGHCEKGNRKSQKHFKCLACGFEENADFNASLNISERALVNAPIALHLQRIAELGSASLTPRG

SEQ ID NO: 46635 - protein, 307 aa, Acidiphilium sp.
LTLDSQVDCRAIGYKSHGDGFRFEPGANWRHGRLRLSGIGTMRARGEARTPGRVVCADIQRKADGWFLSLVVECEPHRERIGDSVVGLDWGVETMATLCTGPMQFAEVENDRLLVKAQDGLKVAQRELSRPLRGKRSKRAARARKLLARRSRKLANRRKDRNHKTTARLVRDHAVIITEDLSVKNMTASAKGTAERPGKNVRQKAGLNRAILDTAPGSWLSLLTSKAEEAAGRVILVDPRKHRPSQTDPVSGAVRKKALSERTHILPDGQVIGRDQASAWVLWNIGQRILGEERARSIVTETFARAA

SEQ ID NO: 46636 - protein, 399 aa, Acidiphilium sp.
MLIAHRIALDPTNAQRTYFARASGTARFAWNWALAEWQRQFTARKDDPSLPAPSDASLRRRLNGLKREEFPWMFDVTKCAAQEAIIDLGSAFRNFFEKRGRYPRFKKKGVSDSFCAANEAGTFRTDGEKIKLPVVGWVRLHEALRFTGKLKRVTVSREADRWYASIMVETNDIKPVVQPLPAVGVDLGVTTLATLSRGEAIPGPKAHKALLQRLRRASRALTRKRKGSSNRRKAKAKLARLHARISAIRKDATHKATTMLAKTYRRIGIEALNVRGMARNRHLARSIMDGGFFEFRRQLEYKAKFYGAAVVVADRWFPSSKTCSCCGSVKAELALSQRLFHCDECGYEAGRDHNAARNLENMAASFAVSACGEDRSDAVRKPRVKRASMKQEPDSKLAA

SEQ ID NO: 46637 - protein, 439 aa, Halobellus sp.
MEVRRTVPVKLDVADSDADLLHETVSEFLWAANYVVDHAWQGEYKTTSKAELQRETYDHVRAETRLQANLVQNARNKAADAVQSVVARWKQGDYAGKPHFSAPTLVYDKRCATFNDDHATLSTVDGRITAEYVLPDENRETPHSKYLFNTNYEVTGAELHYREGDFYLHVRTKADVEFETADEGNDEHSTVLGVDLGIENVAVTSTGTFWNGSELNHWHREFEKRRGSLQQRGTRAAHETIQSVGRTETGRYDHFLHTVSKELIAEAVETDCDVIAFENLTGIRERMPNAKKFHVWAFRRLFEYVEYKAEVVGISVEQVSPTYTSQRCSKCGTTLRENRQTQEWFCCQKCGYEVNADYNAAKNIGLKYLRSAQKSSSGGAPVNVRLNRGTLNVNGDYEPACEGQNESPRENPSADAQSARRQTKSDGTLNEANGDAVSE

SEQ ID NO: 46638 - protein, 536 aa, Erysipelotrichaceae sp.
MNNEEYKRQLKQFHILSDRHILVVETDMSFSDVQKVVALSDKIRKAGNELVGLMRKHYDQLMRTKRYRKLLRLYGSTENKSIRNNLAIQLNDMQKQYNVTWDYCRRSMIPIGKKYGIDAIFALTKAEDIWHGVEKCLYDNGETIHFSKYEDLPCIRAKQINRGIPISVKDNKLSFKLGKSIFGVKVKDRFQTDEVNAVLDYLVKPETIDNKAIQILADEAYCISTYRPCYATLVPKMIRGKYRIYLHLTIEGKAKPKYDKYGNLRHKYDIGIIGADIGTQTVAYTSDREVGLKNLSERGNSIQVSERKERLYYRAMERSRKATNPQNYNEDGTVKKGHKTWKYSNHYKKLKAKHFELCRINAVNRQLAINEDANYLRSLGDVFITEPKNASKLMKRAKETTVNSKGKFNSKKRFGKSIKNRCPSGFQTTVENKFKATGGTYIEVPNNYRASQYDHTADDYIKKKLSDRMYKLTDGTLVQRDLYSSFLLYCYDYKTNSIDKDKCNMKFNEQYNKEKDLIDWIKANKIKVLNSGIKIA

SEQ ID NO: 46639 - protein, 253 aa, Microcystis sp.
MEKAYSFRFYPTPEQESLLRRTLGCVRLVYNKALHERTQAWYEKQERVGYAQTSSMLTDWKKQEELDFLNEVSCVPLQQGLRHLQTAFTNFFAGRTKYPNFKKKHQGGSAEFTKSAFKFKDRQIYLAKCTEPLPIRWSRQIPESCEPSTVTVRLHPSGRWHISIRFDDPTIKPLPVTDKAIGINLGISSLVITSDGDKVSNPKHFNKHYQRLLKAQKNLSRKQKGSKNREKARIKVARFTLKSPIAEKTIYIS

SEQ ID NO: 46640 - protein, 353 aa, unknown
  TnpB Polypeptide
MRRAIVADALGIVSSYVSNHRNWERLSVFERGSEPKVGYPTAYELTFYDQDRILNLSEGSVGLKLYSGKEWKWYYFRIGESDARYIAKMAASRKLLSPVVEKSKGRYRIRFCFEESRKLIQNEDPFVYTVLAVDLGINAPASWCVMTAEGSVHARGVIRLVGDEDRLRHAINRKRMYQQAGKKSHSIYRRLKHANELLAINTAREIIKTAVLYDVDCIVFEHLDLKGSKVGRRMKERLHLWCADNIQDRVELHAHRNGMRISRVCAWGTSMLAFDGTGRVQRGMDAGLGSYSVCRFQTGKICNSDLNASYNIGARYFLREYKKLPGCPELPKTSRCILADLRNLMSAYPALAA

SEQ ID NO: 46641 - protein, 368 aa, unknown
  TnpB Polypeptide
MANKAYKYRIYPSSEQAFILAKTFGCVRFVYNKCLEKQQHLYANGEKYANRTAMNNYCNHELKEKYPFLREVDKFALTNAVYHLDDGYKRMFKHQGRHPRFKSKHKSRASYTSNWTNGNIKLFDRHIQLPKLGKVKAVIHCQAPKGYILKSATVSMERDGTYYVSVLYEYDEQIPFNAGCKAVGLDYKSDGLYVSSDGETCDMPHYYRESQTALAKAQRKLRHKEKGSCNWEKQQRKIARIHRHTANQRKDFLHKKSTEIANRYDIVCVEDLDMRAMANRRFGNGKATLDNGNGMFQNMLEYKMHDRGKLFVKIDKWYPSSQLCCYCGSRQKLELHERTYRCPVCGAACDRDYNAAVNILIEGVHMIA

SEQ ID NO: 46642 - protein, 323 aa, unknown
  TnpB Polypeptide
MQSDLPDWVKDTPCHIRQNAVFDAHLAFSASKDAKFRSVRSYSQSIKFNASNFSKGTWYSTLTKGLTFNSSETIPECHSGTQLVFCKGRWFAVFPVESAVKDNYSSSVIALDPGIRTFMTGFDSQKFLEFGNGDMGRITRLCQHLDGLMGKIAKAPNGKKRPMRKAAQRLRNKIKNLVNECHKKVACFLTKNYRVIFLPKFETSQMVARAGRKISSKTARKMLTWAHYRFKMELKHQASLRNCQVVDVTEEYTSKTCTKCGKIHPTLGGSKIFSCKSCGNTLPRDFNGALGIMLKALRDTSSVVFNGDSAIVKLSGNALESPA

SEQ ID NO: 46643 - protein, 517 aa, Geobacillus sp.
MAKKAKVQHVKSLMLTYTGVVEKASSEDISGLYQLMRKFESARRFSRERIFEGWDRKETTELTSQLFIPNKRYMRDAFSEAEANIASLRENLPRYVEQEKDNIKNTLKRIKQLKKEMERHIKNKQFQLAQYKEQIIQHKQAKLKKHEKSLRYYRHHMDNGTVPKVVDGSKKLLQALNKGKITKQEWKEARSNNLYSRGERSKGGNENIKFSHLKDNLFEMKVLNPLSGIRGNRLHFIVRFPDKFAAFIASYLETGEAYSVRIKRQNGKILVHFTVEHDIVAKPDFSKGVAGMDINPDNLAVTIVYPNGNFKASKVFWMHDVNTVRAEKRDTIIQNTLYEVVYWMKSFGVDTLVIEDLNFLQTNKGSAFNRIASNFSYSNMIKSLLSVAYKENIALVQVDAYYSSFIGKVKYQQMYGLSVHQSAAFVLARRGMGLKEKMPKNLLPVLFAKEAKKGQEVSDLFKHWKKAKAWYDDLLKQLRNNGIRPNGLLFSQILRIRERIDAEESLPFEMTEHPIFS

SEQ ID NO: 46644 - protein, 379 aa, Geobacillus sp.
MFRSKRGKVMHKAYRFRLYPTRTQAERIHQTIGCCRFVYNHFLSEWNQAYETTGRGLGYNECSKRLTALKQTLPWLKTPDSTALQNALQQLDEAFDRFFDGIANAPRFKSKKHPNQSYTAQCNYSKKGRPSIEVDGHRLKLPKLGWVKFAKSREVEGRILSATIRRNRTGKYFVSILVETEIPPLSTTDKQVGVDVGLKHMVVLSTGEKIEHPRYWRRYEEKLAYWQRVMSRRKPGGSNWHKARLKAAKLHEKIANCRNDFLHKLSTRLIRENQVVCVEDLRVRNMQKNRKLAKRISDSAWGRFLKMLEYKAKWYGRTLVRVASTFPSSQLCSCCGHRQIEVKSLDIREWVCPNCGAEHDRDHNAARNILNEGLRLLSL

SEQ ID NO: 46645 - protein, 394 aa, unknown
  TnpB Polypeptide
MLQGWKYRLYPNKAQAELINKHIGACRFVYNLALETKNYAYASHRKNISCFDLMNQLPELKRECIWLKEIDSQALQQSVINLDKAFTQFFKGYAAFPNFKSKRKGVQSFRNPHGVRVEIRNEKLYQPKFKGVKVVIDREHKGEIKSSTISRSPTGKYYVSILTDNHKAFPKKKPIKESTAVGIDLGLHHFIVTSDGAKIDNPRYLRKKILHLKYLQRQASRKIKGSNNGQKANLKVAIQHERITNSRKDFLHKLSNEITNQYDTLCFEDLNIAGMTKNHKLAQAITDAGWGMYVDFCKYKSEWKGKNVLQIPTFEPSTKLCNVCGAVNRTLTLADREWACANCTALHDRDENAAKVIKNYCLKNCGGVHRKKPVELPTMVGVMKQEVIGVGNRL

SEQ ID NO: 46646 - protein, 428 aa, Leptolyngbyaceae sp.
MFLAVQKDVFSPGKELDGLLCDLARLANNLYNQAVYESRQYFFASDRKPWKVLSYPKLYAALKERENSKLLHSQAAQQVMKSAYEAFKSFKALHKLFRLGELEHEPKLPRYRTKGGLYQVVFTGQSLSVKDGLIRVPLGRGGAEAFDRDCFHIPLPERLKEVEIRELRFIPTNGHWVVEFVHESLETPALSCKLHSESVLALDPGLDNLLAGVTNTGQAFLIDGLPLKAKNQWYNKQVARLKSILTCGLESTRGVTSKQIQRVTHKRNCFVRDYINKAARWVIDFCLDNGIDTIVYGRNKGQKNGVNLGHKTNQEFVQIPHAKLFARIRQLCLIHGLRLVATEESYTSQASFFDNDPLPVFGEKPEGWRASGKRIVRGLYRTARGWLLNADNHGSCNIMRKVATMLGIDLSGVSSGAVAAPFRVRLNG

SEQ ID NO: 46647 - protein, 364 aa, Ruminococcus sp.
MQNKKLLKYGDLDKLLKADAEYPDYQNMPTAQSAQQILRLLDKSWKAFMVSIKDWSKHKEKYTGRPKLPKYLKKNSHYILILTNQNCKIKDGKLHFPKVFQGFTVKPKFTDKENFVSFQQVRLIPHRNRIVAEVVYNIDVPELKSDNQRYIGIDIGVNNLATVCNNTGNKAFIINGKPLKSINQYYNKQISYYREVTKRMNKVDYSKQMDRLTEKRNSKIDDYLHKASRYIINYCVKNDIHTIVIGKNKEWKQNSKLSKKENQNFVQIPFARLIEMIQYKAEEKGIAVILTEESYTSGTSFIDGEAPVKENYNKARRIHRGLFVSNKGIKINADLNGAYQILKKVVPIKWDRGCVLHPFAVNVA

SEQ ID NO: 46648 - protein, 416 aa, Clostridiaceae sp.
MYLTVKQQVKHLSREEYLNIRKLAHAAKNLTNEAIYNIRQYYFREGEYLNYQKNYTLLKDSPNYKTLNSNMAQQILREVDGSFKSFFGLIKLAGQGRYNFRDVVLPHYLPKHGFTTLVIGFVRLKGNKLVLPYSNQFKKKHAKVEIAIPPILLDKKIKEIRIIPKAKARFFEIQYTYEVKEEQRNLDKNKALAVDFGINNLATCVTSAGESFIIDGRRLKSVNQWYNKQNARLQSIKDKQKFGKCTTNRQKSIARRRNNKVNDYMAKTARIIINYCLKSKIGTLVVGYNKTFQTSSRIGKANNQNFVNIPFGKLRDKLEYLCQLYGIKYLKQEESYTSKASFFDRDIVPVYNADNPDVYKFSGRRVKRGLYRTKAGSYINADVNGALNILSKSSVVSLEGLYNRGEVDTPVRIRVA

SEQ ID NO: 46649 - protein, 366 aa, Clostridiaceae sp.
MDAMGIVSSYYSNLENYKEERHTQVSSGKKFKKKAPKLQVKHYKCPALYRGNMFKMLDRNHAQIKIYKNNDWVWLRVSLRKQDIKYIEKNCRGRKFSPILVRKGRNYYLQFAYENKVEFRETSLKDRVVVSVDLGINHSAVCSAVDSKGTVTGRKFINQPEEKDLMNHLVGRLCRKQKQSGKKAKLTRAWNKINNLKREITNRTVHEIVSFAEKVNADTVVFEYLDRFPKIKGSRNKRIRMKLQLWTKIAIQNKVKHKAHSAGMRFSRVTPKNTSLLAYDGSGSVKRNKDNFSLCTFSTGKQYNCDLSASYNIGARYFIREYQKSIPAKEWSEAVAKEPGLLRRTQSTLATLISLAGVVQIEKETA

SEQ ID NO: 46650 - protein, 452 aa, Clostridiaceae sp.
MQVINSYKVKIVNMNDCLKETIEIYRKAVSYFINVVTSERELLEKLSSKYRVNLIEHLTHSTKDNPHPEYDGFDRQFYKFPSYLRRSAIMDAMGIVSSYYSNLENYKEERYTQVSSGKKFKKKAPKLQVKHYKCPALYRGNMFKMLDRNHAQIKIYKNNDWVWLKASLRKQGIKYIEKNCRGREFSPILVRKGRNYYLQFAYENKVEFRETSLKDRVVVSVDLGINHSAVCSAVDSKGTVTGRKFINQPEEKDLMNHLVGRLCRKQKQSGKKAKLTRAWNKINNLKREITNRTVHEIVSFAEKVNADTVVFEYLDRFPKIKGSRNKRIRMKLQMWTKIAIQNKVKHKAHSAGMRFSRVTPKNTSLLAYDGSGSVKRNKDNFSLCTFSTGKQYNCDLSASYNIGARYFIREYQKSIPAKEWSEAVAKELGLLRRTQSTLATLISLAGVVQIEK

SEQ ID NO: 46651 - protein, 402 aa, Clostridiaceae sp.
VANYERTNWTKESGLEYPSWYKQRKALKDHFWYKSLPSQTAQEVLKQLGDSWKSFYALKKTGSIENPKPPGYKHANFNVRYLNNGFVLQDGTLRLSLPKKLRIYLKEKYSITDRYLFLKMPAGKEISGTPKIVEIIPLPNNKKYSLNIIVEKQDVKLKENNGIYMGIDLGVNNLVTAYISTGKTFIISGRQLLSINRYFDKKISYYQSISDAQQSSKGIKHPKKSKRVRKLYEKRAKQVNHVLHTAAKKVVETAEKHNVCKIIVGDITNIRENKSFGKVNNQKFHKWFYKRLTDKITYKAEDRGISIEKQEESFSSQCSPNAKEVSKEYAERSNRKYRGLYKENNKIYNADCVGAYNILKKYLCRMEKSIPAVVGLDTPEMYRWSSIMGFIGNPKLSISMEM

SEQ ID NO: 46652 - protein, 192 aa, Photorhabdus sp.
VYTYPCLLIQSTGEKINNPRHLINAARNLRRKQKSLSRKQQSSANRGKARLRLAAVHERVTHARADFQHKLSRTMVDENQAIIVETLKSANMMKNHRIARAIGDSGWNSFLMKLEYKAAVAGVKLDQWFSSSKTCHGCGHKMPEIPLRKRIWPCPCCYVEHDRDINAAINIQRKGITELQAAGSSHLFHRLL

SEQ ID NO: 46653 - protein, 409 aa, Aphanocapsa sp.
MLIITYEYKLEPTLAQEAVIDDWLEICRKVYNYALAERKDWVRSRKSSIHACSIDREYIIPVDAKRPTFASQCKSLAAAKQEIPALKRPHAHVLQQVLRTLEASFVAMWERGHGFPRFKKRMRSFAFPQLNQGVVRGNRVNLPKLGWVKMRLSRPAPEGFAAKQLRVVKRASGYYVMIVFQSDVEVAAVQPHGEPLGIDVGIESYLATSAGELVENPRFFVHGQRKLKSLQGQLKRRKKGSNRWLALQRKIARHHEYLANARKDFQFKLAHHLCDQAGMVFVEKLNLKGLAKGMLAGQCLDAAWGRYLSTQEWVCWKRGVYFAAVEASGTGQECPGCAVVVKKDLSVRIYECPECGYTTNRDVASAQGVRNRGLAAVGHTDKKLREGNAEWAPSELRIPTPLGRGVSNG

SEQ ID NO: 46654 - protein, 462 aa, Lactobacillus sp.
  misc_feature (259)..(461): Xaa can be any naturally occurring amino acid
LDQSVVIKAQLLNIGNETARAFSITMLKYRDACNYISQYIFDHNFVLKQSKLNQALYHDLRDKFNLKSQMAQSAIKTVIARYKTVRTQLFQHPFRYDTGKKDSRGRAIWAQIYRNLTWLWQPIRFKRPQLDLQRSRDWSYKAANHQLSLNTLQGRKVVNFVCKGFDKYLDQTKWKFGSLKLLKLRNKWYVHLSATASLPEYQVSQAEHVVGIDRGLRFLTACYDEKGKTLLYSGQQILRKRRKYKRLRAQLQAKGTKSXXXXXXXXXXXXXXXXXXXXXXXXXXXXXXXXXXXXXXXXXXXXXXXXXXXXXXXXXXXXXXXXXXXXXXXXXXXXXXXXXXXXXXXXXXXXXXXXXXXXXXXXXXXXXXXXXXXXXXXXXXXXXXXXXXXXXXXXXXXXXXXXXXXXXXXXXXXXXXXXXXXXXXXXXXXXXXXXXXXXXXXXXXXXXXXXXXXXXXXXXXXE

SEQ ID NO: 46655 - protein, 332 aa, Lactobacillus sp.
LANAIQNYRKAWNHYRKIGHGIPTFHKKRSDWSYQTNCQYPKQKEAYLDNGTAKFIDAKHVKLPKLGVICIAGLRKLIKDRLLKRVSTRIGTVTIKKTAGDQFYLSMQLGSDIAFAQKLPKTQSQIGIDLNLDNFLTDSNGAMVANPCFYRQVKKKLAHVQSVLSRRQRRAKQEGHNLRMAKNYQKQRLLVAKLHAKICRQREDFLQVLSTALIKKHDLVVAEELRSKNLLKNHALSQAISDVGWRRFLNMLAYKAKLYGKEFQTIDPKYTTQRCHNCGTIMGQNGCRKLKLKDREWTCPMCQTYHIRDWNAAVNILEKGLGSWKNPKKQAA

SEQ ID NO: 46656 - protein, 334 aa, Okeania sp.
MVEVLNLRSSAFTWKNGQVYLAKCAEALPIRWSRQLPPGCVPSTITVKLDPSGRWSVCLRFNDNRDFQLKPLKKRVGVDVGISSLIATSDGTKVNNPKYFNKLYKKLRLSQKSLSRKTKGSNNYQKARLKVARIHAKIKDSRLDYTHKLTTQLIRENQTIVVEDLAVKNMVKNHKLARAISDANWGELVRQLEYKAEWYGRELIKIDRYFPSSKRCSECGYVVDKLPLDIREWDCPECAAHHDRDLNASINILAAGLAVSVCGATVRPEGSKSRRAGAMKQKAPSSDVKESRAVTQVQRREDVKQRTPRGRVVTSAAWRHLGFAPPDEQLSLKL

SEQ ID NO: 46657 - protein, 459 aa, Okeania sp.
MDSTLSEKVLEPYWTDSCEAISSQLLLPVGTDSPDLDSSLYSIWSNNTVEKSWFKGKLYTVQSQKWSPMFSLSSTFFRFESTDLESTSKKSKKIRIYLNCEQRQLLRQWIGVARFTYNRTVEYLQQPDTKANWKAIKAGILNNLPEWSKPVPYQIKSIAIRDACIAVREAKVKYSKTRQVQQVKFKSRKNPIQSCYIPKSAVSAKGIYHTKLGQIRFSEPLPESFGDCRIVIQRGEYYLCLPVDVPKHNTENQNRIVALDPGVRNFLTLFSENSFGWIGSGDIGKIQRLCYYLDDLISRLTKAKSKTKQRMKKAASRMRLKIRNLIDELHHKAALFLVQNFDVILLPTFEVSQMIIKSSRKLRSKSVRQMLNWAHYRFELFLKHKAVEYNKVVLDVCEAYTSKTVSWTGEILNNLGGRKVVTGNDGFRLDRDLKVPRGILIKSVVENFSTTLGDTPSAG

SEQ ID NO: 46658 - protein, 408 aa, Okeania sp.
MRLVERHIIQKKHRFYLEIDRLCLLSKNLYNYANYLVRKSFIFENTYLDYYDLQKTLSTQSDYQAMPAKVSQQILMILDRNWKSFLAANKIYQQNPSKFKSHPRLPRYKNKVTGRNIVVYTTQAISKRQLKQGIINPSKTGIYLKTLVPTSQIKQIRLVPRLNHYVIEVIYEATQKQYELEKNRCASIDIGLNNLATLTFNQAGIKPILINGRPLKSINQYYNKVKSFLQSQLRENQSSKRLKKLCNQREFKINDYLHKSSRLIIDTLTNQKIGTLIIGHNEDWKQKINLGKKNNQNFVSVPYNKLIEMLSYKAKMVGIDVIITEESYTSKASFIDNDILPVYRKGQKNQVTFSGKRVKRGLYRTANKGLINADVNGSLNIMRKAVPNVFDYGIEGVVVHPVRITPAK

SEQ ID NO: 46659 - protein, 460 aa, Solobacterium sp.
MYSAKTIFVQRSDPLFAWCDDIAHKANSLYNAALFRERQMMFAAKRTNIFELSDNELEVMSEFEWMNYYLPKDKQKILPPSGSISYTTLDCMMKLCKNPDYCCTGLPRQTAQQILKMTLRDICSFFAALKSYKRDPGKFTGRPKMPGYKHKKGACAFIVTNQDCVIRKNKKHRYTAKLPFTKQVVRLGREVHGKFVQLNVTPRNGTYKLSFVFDDGTNAPATADTAERIAAIDLGVDNLMAVTNNVGAECLLFKGGAAKSANHYFNKMSARIQSEQTSGSTDKFVPTKQYYRILQKRNNRINDCMLKDCKRLITWCVEKRIDTIVIGENKFWKQECSMGGTSNQNFMQIPFERLKRIITYSAERLGIRIIYQEESYTSKASFLDRDKIPVYSRDSEEHHKFSGVREKRGLYRSADGTKINADLNGSANILRKAIPDAFESGIEPDFRNIRAYYHPDLKLA

SEQ ID NO: 46660 - protein, 472 aa, Micromonospora sp.
VKVTRIAYSTALNPGKYAALVEQARRLGRVRSEVWQRYGSIAGVGSGLRDRQVRDRWLADGTHVTFGVLANAWKESVRDAMADIAANLAAAKVQVRRAASRRATDPAERKRMLSALAADRWAGDPFLARQMRKHWKRGRNRTHDHIVVRADQHNTLTDGRGRLWLAVPGLERRQKVRIPLSTTVAPTGTLRLILRGGRVEVHYQIDASQMRSSQRPCGDRTIGVDKGYTEALTDSDGTHHGTRLGKLLTAESDRLKQRNRRRAKLRSIANTAALRGDHAKAHRIRSNNLGTVKRDRRAARHRAQVRTEIFTAVHRVVDKAATVVAEDLTKRIAGRKRLGKNVNRRLAAWTKGVTAEALTNVSERRGSALVHVNAAYTSQACHRCGRFGRRSGDRFHCTRCGVVWQADVNAAINILQRAGDPDIALHTPQQKVKQILRDRTDRHRTRLPVQDSSPATPAERRANHPNPLAMSN

SEQ ID NO: 46661 - protein, 469 aa, unknown
  TnpB Polypeptide
MITSKTYTIETRLNQRDNVGLIEYVIEYHILYGKMLRFTWHRYNNGGRFSVKKSAFNTILQNRFHVNKRLANSVISEVEGLYKALYQLKWYEFNQLSRKIKKLYKKRKTLCEKVAALKEKSRNNQLSPSALTYYHQQKEKIFYTNQKLNKLKQKQANVLKEIQSKDLHLCFGSKKLFQAQYHLAENKLTSHTIWLDHFRNQRDNRSLYIGSKDEHRCNQIVQLTPMIHAGKGNRFAIQLRKNTKNREYVYGTCIFSYLSGPLTRMILRQDHGISYRIVFRGSKCYLQAMVTLDRDTDDCNTRKTYGTIGLDYNDGFIEVAETDDTGNLVRLKHYDLQYHGTGKKAESEIREVTSHIVNYAVSVGKDIVIEELDFRKAKSETTAAKSNQGKEYNKMIHAFDYSRYKKTFENCCYRRNVHLIQVNPAYTSKIAKQKYCDRKKLTIHQGASYVIARKGQGFVDKNIKQKKSA

SEQ ID NO: 46662 - protein, 457 aa, Moorea sp.
MIVREAKLLNGSKAQYQAIDSAIRTAQFIRNKAVRLWRDEPDVNKARLSELCKELARAYPFAKKLNSMARQASAQRAWNSISSFYRRCREGSKKKGYPQFKKHSRNGFADAARTVEYKTTGWKLSEDCLTINFTDGFQAGTFSLFCNHETREDLFRLKINRVRVVRRADGYYAQFCFDVNRKEAGNYTGNFVGIDLGLKYFYKDQNDNGAIYPKYLRRAQKRIKKLQRRLSRKFVKGKKPQSNNYHKARIRLGKAHLKVQRQRKDEVFAALGACIRENEDWAVKLARCVVHSNDVVVYVGASLPTLGGIDLKIQNMVKNHHLAQSISDASWYQFTQWLDYFGKVWDKTVIAVAPNYTSQDCSNCGHRVKKSLSTRTHQCPKCKTEICRDTNAALNILNKGMNILGVECNNNSTLGHRGSAGEPGTLEESSTAVDEEKSNSISCLDESRITVCENPAL

SEQ ID NO: 46663 - protein, 283 aa, unknown
  TnpB Polypeptide
LRKQPPLASRVSVPPTTKKCLGVDLGRTDIAHTSSGDKWNGKQITDKRNHYAKTRAILQKKATKGTRSSRRRCRQLQQRLSGKEKRFQSWVNHNISRRLVDQAATSRQAIAMEDLTGIREGTNQLPRSKKERRLSNNWAFYQLRQYITYKCLIKGVDLVFVPPAYTSQTCSKCLHIHPEKGKSYRKGKKFVCGHCGVKLDADRNGANNIAALGICVIDPRGSGLYCNLETEPTHPHPLLGGEKRGGWRDSFEALGLPKAPVECVADGSRLLLSSAVVVSALGA

SEQ ID NO: 46664 - protein, 452 aa, unknown
  TnpB Polypeptide
MTQVYCYETELKPSHNSDIIEYFEQYRTKFNEIVRFTWQYYNNQDPLIAQKSKLNTLMQNKFHISTRGANSIISYVAGKYRSLLELKKTELRNFQSEISELKKDIAELSIKVNNLSRKAANNKLNDKQLKKYRYLKNRLVAMKKRLDRRNNAIPKIEKQIETKKLSLCFGSKALFAHQRLETNHLSWYMDFIEARDSFIYYVGRREETHCNSQCQLFYDKKHNSFKIQLRKEDDHQVNNKDKHVYGQCYFRYGNKEIQETLSLKNSPISYRILKRDNRYFLQAIITVEKTDVRQEDNVIGVDFNKGFVALSEVKKDGNLVNTNKTYYRFRKGNGSKNDLRVLADVLAKRCISNNASLAIEDLNFVKKRTKAMKHKKDKKINEMLHSLAYSSFSEFIKRACFKNNIHLSLVNPAYTSIIGKEKYSEVKKLNVHTAASYVIGRRALNFIDNRPV

SEQ ID NO: 46665 - protein, 378 aa, Bacillus sp.
MEVKQMIINKAYKFRIYPNKEQASLINKTIGCSRFVFNHFLSLWDNAYKETGKGLTYGTCSAKLPAMKKKFVWLKEVDSIAIQSSVRNLADAYTRFFKKQNSAPRFKSKKNNVQSYTTKQTNENIAVVGNKIKLPKLGLIRFAKSREVKGRIVNATVRRNPSGSYFVSLLVETEIQELPKTHSYIGIDVGLKDFAILSDGKTYKNPKFFRLLEVKLAKAQRVLSRRTKGSTRWNKQQVKVARLHEYISNARKDYLDKISTEIIKNHDVIGIENLQVSNMLKNHKLAKAISEVSWSQFRTMLEYKAKWYGKQVIVVSKTFASSQLCSSCGYQNKDVKNLNLREWNCPSCHTHHDRDINASINIKNEAIRLLTARTAGLA

SEQ ID NO: 46666 - protein, 411 aa, Planktothrix sp.
MATKRVTFRLYPNQVQANKMHYWRKLHCLLYNACVEHRKTSYKRFNKSVNYYDQQNCLPEFKEFWTDYKELGSHALQDTVKRVDIAFQRFFKLKSGYPKFKKSRRYKGWTYPCQSGWKALTNGKNGSLKITNLGTIKMRGQARDWGKPKTCTILFKQGKWYASITVDCIPSRYQTDIGAIGLDFGTHHAIADSNGNVIENPRFIKTAQSKINKIAKTIRRKRPPKRETKASRRWKKTNKAIARIQSKVARQRQDWQHKVSTEIVSCNSFVATEKLNLKGMTRKSNGKNKRQKSGLNRSLLDVGIGNLKDLIKYKVTEAGGFYIEVPTQKVKPSQTCPNCGHQKKKTLAEREHHCVNCGFHCDRDVAAAMVMLNYARGMERASSDADETTSTWCGSFKQVSQLKRQKRTSQR

SEQ ID NO: 46667 - protein, 294 aa, Moorea sp.
MLMMNYRYRIYPSASQQVQILEWLETCRGVYNYALRELKDWLASRKCDVDRCSLSKEYIIPADTPFPSYHLQQNSLPKAKNLNPKLKEVHSQVLQTTIRRLHDTWENFRSRGFGFPRFKKFGQFKSFLYPQFKKNPIDNGTIALPKIGQVAINLHRPIPEVRPVANLIRQRKAHLNGFQVKQVRVLSRARSTQWYVVVTIAKDVEIPDNPSGGHAIGIDLGLEKFLTTSEGFTVERPKFFKDLKGKLKLLQRRAARKQKRSKNWEKAQVVVARLHHHIANTRACFPPENCTSVV

SEQ ID NO: 46668 - protein, 127 aa, unknown
  TnpB Polypeptide
MKNDRDKYLSHRARLQRNGSCNAKSQAEKGDTSNTSTTTPARQSWKKPYKAAKDLTHFCERIKAGHKVRARLHRWPFRELQQMIVDKVSRLGMRLMFVDPRYTSKTCSACGAIGKRKKHRFECHCGY

SEQ ID NO: 46669 - protein, 388 aa, unknown
  TnpB Polypeptide
MSESLATVHKTFKYQLQPTPEQEQELERVRRLCRRLYNIALEQRITIWQRCHVSVSRYQQEAELTAIRAEFPEYAAIHSHVLQDVLARLDKTYQAFFRRVQRGEKAGFPRFKGRDRYTSFTYKEFGNGARLDNGRLVLSKIGRLAVRWSRPLEGTPKTVTITREADGWYACFSCAEVPCKPLPLTGQETGIDLGLESFATLSDGSQMANPGIFRVAELNLKRAQRRVSRRQKGSHRRRKAVVLLAKAHQTVRRVRADFHHKTALALVRTYDTIAHEALQTANLVKNHHLAKSIADAGWSCFLNILSFKAAYAGKTVVAVPPAYTSQACSGCGVLVQKGLSVRWHACAECGASLHRDHNAARNILRVGRESRAGQALQALTWPGAASVA

SEQ ID NO: 46670 - protein, 414 aa, unknown
  TnpB Polypeptide
MQRLQAFKFELMPNGGQARDMRRFAGACRFVFNKALDLQQKTYASKKKQLSFAQLCKHLVAWKQEFAWLKESPSQALQQSLKDLDRAYQNFFAQHAAFPKFKKKGQQESFRFPQGFKIDQPNSRIFLPKLGWMRYRNSRDILGVAKNITLSQSGGKWFASIQTEREVEQPVPTATSAIGIDVGIARFATMSDGNFIEPLNSFKKHENRLAKYQRRMSRKVKFSKNWHKAKRKVQKVHVTIANTRKDFLHKKTAEISKNFRVVAVEDLQIKNMSKSAAGTADKPGKNVAAKSGLNKAIQDQGWFEFRRQLEYKLNWNGGILIAVPPQYTSQTCPCCGHIAKENRQTQAKFECVACDYANNADVVGAMNILARGYRVAACGEDGSGSVRKNRTKPVSMKQEPAEATSVSAMLVEAP

SEQ ID NO: 46671 - protein, 423 aa, unknown
  TnpB Polypeptide
MNEETRITKNENIKLSILETQKRREKQVCKTYTCKIDKSHLSKDKLSFLRKLFIEAKWLYNYQLSLDDIFDIPDNIKEVTILNKDKLPEQRELKTLSSQMIQELIQRTKASIYALSQLKALGFKAGKLKYKSFIGSIPLKQYNNTYKIIDDKYIKIQGYKKYFKVRGLKQIPKNAEYTRATLVNRLGDFYLLITCYLPKLPKELTGSVIGLDFGIKDNITTSNGEKYNFSFPETRQIKKASRKVNKAKLGSNNRHKKKKKLSKTYQNLTNQKEDAKNKIVSELVKENDKICIQDENIAAWKSSKMKGWGKRIQHSIMGGIISDLKKRSETTVIDKWYPSTKLCPTCGVLNVLRLSDRIYKCDCGYSEDRDIHSAKNILAEGLRISTGRRNLMPVEKFASILIYLNWFIISIQASSMKQEAMRL

SEQ ID NO: 46672 - protein, 387 aa, unknown
  TnpB Polypeptide
MIKTYKYRLYPTSQQIIILNKILGMCCWLYNSALQQRIEIYQKYKKGINCTYQQNELPNCKKEIPEFNNIYSQVLQNVLKRLDNTYQSFFKRLQLKDMKVGFPRFKSKNRYDSFTYTQTGFKIINRKLRLSKIGDIKLKINREIKGIIKTCTIKKDIDRWYVCFSVEIGFNILPKTGKSIGIDVGITNFAVLSDGNIIENPKFLKKSEKQLKRKQRRLSSKKKGSNNRKKQRLLVAKQHRKIREQRNDFHHKESRKLVNNYDTIIFEDLQIKNMMKNHKLAKAISDVAWNQFINFTKYKAEEAGRKVILVNPKNTSIICSRCGEKVHKTLKDRMHCCSFCGLEINRDLNAAINILDRVRNTQIYACGEILAQADSMKQEYANGLLRA

SEQ ID NO: 46673 - protein, 460 aa, Streptomyces sp.
MAERTVGEEAHRIKRDLLGVGERTKHRSRTAAPLKGFTGAPGAQQRVYRFRFYPTADQAAQLHRTFGACRWVYNEALALRSKAWQDHRVSLGFADTCRALTGWKGIPERAWLKEASSTVLQQSLRHLESAFSRFYKGVAKYPQRKSKHRSNDAATYVRTGFRWVEDARRPGTASVTLAKQTKPLDVRWSRALSPGLLPVKLTVTRDRAGRFFLAVLVEEVIAPLPAVFLPGDHEPKAVGLDLGLVSLVTLDDGEKLPHPRLLAKYGKQLATLQRELHRKLKGSKNRDKVRERVARLYARIGDVRRDLLNRFTTRLVRENQVLVVEDLPIANLMRGATGRGRRRKAALSRSITDAAWGELLRQLRYKCAWYGRTLVVVDRFFPSTRRCSACHTKGAKLDVSVREWCCAECGAVHDRDTNAAVNLRAEGMRLYWTVAASLPPPHRPPSVIRASELIALVPAA

SEQ ID NO: 46674 - protein, 281 aa, Paenibacillus sp.
LDKAYKNFFRDKKVGFPKFKSKKTNNHSFTTNNQNGTVAIENGTIKIPKLKTKIKIKLHRQLAGRIKSCTISKTPTGKYFAAVLVETDVIPLPKLESKMGIDLGLKDFAITSHGEIIPNPKYLRKSEKRLAKLQKDLSRKKKGGHNRYKARLKVAKLHEKIANQRKDFLHKLSTKMINDNQVIVMEDLRVKNMMQNHKLAKAISEVSWSMFREMLTYKSTWYGRELIIAPKNFASSQLCSCCGYKNAEVKNLGVRQWTCPECTTLHDRDVNAAKNLLKLAV

SEQ ID NO: 46675 - protein, 412 aa, unknown
  TnpB Polypeptide
MDQDMLVLVLVRKSFRYRVYPSETQIKRLEQWEHALRSLWNLALEQRLWGLARARDERRYYSAFDQINQLTELRAEIPWLAEVPRNVCAQLLVELDKAWQRCFKKLADEPRWKRKGRDIVNFCEPHPKVWHLEGAALHFPKLGMMRVVVHRPLEGKPKTCTIVREGDQWFAAISCEVEIAPPTPRTEPIVALDRGITNLVADSDGNITVNPKHLEQSLRQLRHTQRVVSRRQKGSRNKQKAVVRVNRLHRTVRRQRDHVLHALSATYAKSHGTVVVERLQIRNMVRNHHLSRRIGAAGWGRLVTFLGYKTAWAGGQTVEEEAAYSSQTCAVCGHVDAASRSGERFCCTKCGVVAHADVNAAKVLKARYLARTRVNRSGFACGGMPPEGARRSRKRLNVARRSSESSALLGRG

SEQ ID NO: 46676 - protein, 386 aa, Microtetraspora sp.
VFDVKLVVQVRLLPTAEQAAALEATLRACNDTANFASVTAFTTGDRREYALRKHTYREVKARGLGAQAAQHVIKKVADAYTTLKAGIRAGNLGPKGSARRARAESKPVTFRADAAQPFDDRCLSWDHTARTVSIWTTTGRVKNVAFVGSLDQLKMLAVCRKGESDLVCRDGMWFLYATCEIPDVPVTEPDGFIGVDLGIANIATTSDGTRHCGKGLNAVRHRNRELRRRLQAKATKSAKRLLKKRRRTEARFAADTNHTIAKQIVTEAERTGRGIALEDLGGIRDRVRLRKPQRVTLHSWSFHQLGSFIAYKAARHGVAVIHVDPAYTSQTCSACGHVDKANRPSQATFSCTSCGFAEHADVNAARNIASRGVAGWAVSHAANDAA

SEQ ID NO: 46677 - protein, 375 aa, unknown
  TnpB Polypeptide
MKIIRSAKCSLKFSTAHKKQQLGIILSEYGKVVNIFIEHFWKLEKLPGKTDLLKDIVDIPLTQTWLSARLRKVAAREAIDMILSVKAKKKGKKGIPVHKGERMNVSCTIVDLHIGDTAKEYDAWLHIASVGNKMILDLPINFHKQYLKWNTLGKRLNAYIITKNYVQFCFEVETGKKKEINTHIGIDSGINALASCSTGNQYGKDIKECVERVKRCKHGSNGQKIARRALRQRIDEITKQVINTENPDLIVVEQLKNLGKNSKAKRLLAKNIRRSIGIWNWRYGLMRLEQQCEENRVSFRSVSPYNTSITCSNCGHADRMNRQSQECFCCQKCGHADNADLNASKNILSRFVLGKYGSQCKQEKKDDDLPMGKFV

SEQ ID NO: 46678 - protein, 547 aa, unknown
  TnpB Polypeptide
MHDTVQTKPKPLEKGEHQAPISNSRRQKRSRRGAGLKRTVILHSLELNTGKLKDISQLISAYANQKDAFLVTYAHIKFLDALLSNRLRDSLVASGFKSPFGLKARAWKLALNDALQAIDVYWQAIIYVCKKYIFRKFSDEAERHYAFWTLKDYKRIQSLMSGQIPDGEPLKSKLDLSARQKIAKYLHRRLRKEVGSRPRVCLRRSICLDARMYRVFDEKGTQYISITKLFERGRVVIPLKGRHTISGNIRIVLNRITQTIEVHTTSDVLRKSLRTNSPDIGVDLGVSELFTDSEGIKWCSEYWDELKSYAEKVNATGKQRNKLHALEKSLRRRNPNKARRIRKFNLGKDKMMAKKSQFHSRIKTDVNTAINRFLDVRMPHRIAIEDLRGYSPEPGKGWFSRLLSFWTLGIINQRFTFKSQAGGSSLESVNAAYSSQTCPACGYLDPLNRKRDRFQCLNCGTVLDADTAASRNLKARLDDPDIQLWTSTKRVREILVQRFEKRRLEGLVVETQADTAGLTVSGKTPGTIMTEVRREWSTGERNFGVWV

SEQ ID NO: 46679 - protein, 460 aa, unknown
  TnpB Polypeptide
MANVNKKIISKGKATEEKEKKSSKSPVTVEVVDGVFVFHGGKGEHNITERKNKALEPYGKCIYNYGLLLELIPGDQTSRINQNIGNSRYVHNNYLAERIKYYDEHRETLSIDQYKKEFLPKLKEEKEFLKRTDKFVYQNACQNVDTAYQNFFSGKAGFPNFASSRKPNGNSFTTNYTNNNIELKMIDGLPYLKLPKIGNVRFVLPKGKTLADLQPQGVSIKSATVTRTNSRYRVSLQMETVIDRPVFPTVIHADEVFSVDLGLKVFGMFGNAKETFTVPNPRWIKVHARRLRRFQQSLSRKQYDQNTHRGSKNWEKARAKVAKEQRKTADQRRDFHHKLARAIADNYTAFICEDLAVKNMMKNRHLSKAIASVGWSQFLTIVKYKMEKAGKYFRRVSRWFPSSQTCRCCGYKNTEVKDLKVREWTCPQCGTWHDRDENAQKNIHAEGLSILKSEGIQIIM

SEQ ID NO: 46680 - protein, 444 aa, Rhodococcus sp.
MYTTVPNCLSTNSDDLLLTHGTKCYRAGVLKRYRYRAYPSGEQQKSLSQLFGCCRVVFNDALAARESARKTGRSIPSKSELSAALTAAKTTPERAWLAEVSSVPLQQSLADLHRAYANFFDSRTGKRKGRKVGAPRFKKRTHRQSARFTRNAGFSVLEPGGGIGLVRLPKIGRIRYEASRPLPADPSSVTVIREADGRHYVSFVVDEPVPAVVVPQPAPTRCAGVDVGLTDLAAIVYDDGTREKIANPRWLRSKERRLVRAQRAYSRTTKGSKNRDKARRKVAAAHRKVRETRLDHHHKLALRLIRENQAVALEGLSVAGLARTRVAKSVHDAGWSSLTCLIGEKAAQHGRAVHTVSQWEPTSQVCSGCGVRDGKKPLNVRVWVCPSCGMRLDRDYNAAVNVMLAAGLVERVNACGGSVRRVLACADPVKQEPAEQTSPPGAAA

SEQ ID NO: 46681 - protein, 492 aa, Rhodococcus sp.
MARFEIPDGWTAQAYTFALDPTPTQIRAFRSHAGGARKAHNTMLAAVKAVMNQRQAERTYGLDEDELTPALGWSLPALRKQWNARKHEVAPWWAENSKEAYNSGLDALARGLDAWSKSRKGTRAGKTIGFPRFKTAKSRRSVRFTTGTIRVETDRHHVTLPRLGRIHTCESTRKLARRIEAGTARILSATLSEDSAGRWHVAFQVLVHRAVAVPGHVGEGESVVGVDVGVKADSLIVATPDGRELDRVPAPKSLTAAQARLRVLQRRAARQRGPYDPSTKTKRRPSKRWVRQQRRIGRTHAHAAAVRRDVVHKHTTALAQRHRVIVVETLNASGMRSAGGSRKKGLNLALADAALAQIRRMLDYKTRWYGSTLVEAGRYFPSSKLCSGCGRRKSNLTLADRTYVCDHCGLTIDRDHNAAINLARLGETHRTGATGTGTGSSPAATVSGGDGRGATRESATTPVVNAAGEEASTRHQQLLGESGTVSSEGEAA

SEQ ID NO: 46682 - protein, 400 aa, unknown
  TnpB Polypeptide
MNKAYEYRIYPTADQVSIFNKTLGLCRLYYNLVVENKNKDHAMPVEGYKPTFTKFKPEALGWIKEVDSVPLGQMWSDVRGAYTNFFASVKGVRKGKPMQPPAFKSKKNPKASFRYPIQGNTAHINSNGLFVTRRLGYIKIASSCRFCEGKWKNITFKRSASGKWYVKICVELKEEQTKVQNGKAIGIDWNCDSDSFLAMSDGTRIKCPRFLKRKEWQLEKYQQVQSRRFVKGKQEQSKRYLKAKSKVARLYEKVANQRKDWLHKVSHDLANKYEYVFVEDVNLNKMASELEHGKTVGDQGFGLLRQYLAYKTNLVKVPAQNTSKRCNVCGNVNSEVVLGVKQWVCPVCNAEHNRDINAALNILYIGVKKTLGRGPAEVLNNARHQNRECPKPSAELFAVS

SEQ ID NO: 46683 - protein, 386 aa, unknown
  TnpB Polypeptide
MKKTLRKAFKFRLKVTPEINQKLGRFAGECRFVWNKSLSLNLTRLEQKRPIIWYEELNFWATLWKKSDEYGFLANLPSQVLQQKLKDLDKAFKDGFDKKQPLKRLPKFKRKGMADSFRYPQGFKVDQDKSKVFLPKIGWVSYRNSRKIIGEAKNITVSRKGKHWTISIQTEYEAELLAHKSTSIVGIDMGIKQFATLSDGTVYAPLNSFKSKAERLAKLQRQLKNKKKFSNNWKKVKAKITQCHEDIGNARKDYLHKVSTEICENQAVIVIEDLRVKNMSKSSKGSHEKQGKRVAQKSGLNRSILDQGWSMFATMLDYKQDWNNGSVLRVPAHYTSQTCPCCRHVAKENRLTQAEFVCVECGYSNNADLVGAINVLTKSHALIANQ

SEQ ID NO: 46684 - protein, 422 aa, unknown
  TnpB Polypeptide
MEKRNAKIKNTKLKGIKIRLYPNKKQIEHFKQEVGNQRFVWNYFLDLNKIKYETLEESMSYSEMANMLPFLKDEIDFLKIGVAQSLQQTLKDLEQSFKNFYRNVKNGTVSRIIAKKLSKGKQINNIPCLPKFKKQGQDDSYRIPQRFYLKGNKIQIPKVGKIRFRGLNKLKTNQVIKNVTISCENGKWYCSLCVEFKPKKFKKTHKSIGLDVGSVRLYTRSDGKKRKPIRNLDNVKAILFKIKSIQQQMSWKQEIWKNKTGREKLKKGEVISNSWLKLKVILSKLHEKLKRIKVDHLHKISTNLVRKFDLIVVEDLKLSNMTKSSKGTLLKPGKRVPQKSGLNRNLLSNSLSLLFQMLKYKCDWYGKEFKKVNPKFTSQTCSKCGTKNKKSRESQSRFRCKSCGFKINADHNAAINILNLAT

SEQ ID NO: 46685 - protein, 486 aa, unknown
  TnpB Polypeptide
VSQKIRIDGVKHVGASVFLGVDHCNNPRWTRNPERVMVWLCDGWRARFNQRREQRTHNIPVKDEAGGIVDWIKEPLGGPDVAELLSDKEARLRCSWMAGIPAPILSSTDRIENTEWSAGLKRKKTAGGRVPGFKSRHRGLGFVCWRNKDKTGNAIFHKTGRKSGVVVITGMNPTGWVKPGEKAHWRIVIHVRVSQPIRPYTSVHVDWTHRSLVFVNMPLPLPRTGDGVIGIDRGCVHTLASSDGTFEDMPRPSKAELKRLKYLQRRMARQDRTNEARGGGTAKFASKRRQRTLAGFNALQGRIVRRRNDWIEKTTTRIAQENVLVAMEDLGIQAVTRKPKPKPDPNKPGQYLRNGAKAKAGLDRSILSNCWSRTLKRLKDKMDANGGNLVIVPAAYTSQTCHKCGHVAKGNRESQAVFHCVKCGYEANADVNAAENILSRALSQTGGGTASDVEEPRWRTDEASTPSFPQAGSSFGVRSVKGIPRL

SEQ ID NO: 46686 - protein, 420 aa, unknown
  TnpB Polypeptide
VPWFRTYKFRLYPTTEQAQLINRTFGCCRVVWNLMLQDARQSYDKTNKLNHPNPASYKNEHPYLRVVDSTALNYVQLNLRTAFSRFFADRKDKKKARKSGFPRWKTKKQPKRSYTTSSTGTRPQIRIQGGKLRLPKLGLLRVGFHRRIQGKIKSVTVSQTAAGHYFVSILAEQPDVQITNIIDTSKTVGIDMSFHDIAVYSDGARLKHPRWYRSVERRLARAQRKLNRRTFGSAGYERQRIRVAKIHGRITNQRRDYLHKESRRLVDQFDVIVVEDIHLAGMARRGKRRRFGKSVHDMSFGMFRTFLQYKAEWTGKLLVKADRFYPSTQLCSSCGERNIELRGDLSIRQWCCSCGAQHDRDVNAAKNLVIWFHENNTGASPGIHAEGDLTSTDGSVISKPDRGTRKSRRTIDPVGLVLTS

SEQ ID NO: 46687 - protein, 431 aa, unknown
  TnpB Polypeptide
VNIQRGFKTELDLNNVQKTWCARHAGAARYAYNWGLARKQTAYQAGEKTPSAIDLHKELNQLKKGELGWMYDVSKCAPQEALRNLDNAFGHFFRRAKAKKAGHLTGKVGYPRFKSKKHGLGSFRLTGSIRVFERHIQLPRLGKLRLKERGYLPTSGAKILSATVSEHAGRWFVSVQVEMDIPDPLLTSKPSAGVDLGIKALATVSDGTVIPNPAALKRNLRQVKRLQRTVSRRVKGSANRRKAVRKLARAHLRVAHLRQNALHQATTPLAKTKSVIVVEDLNVSGMLKNHKLARAIADVGFGEFRRQLEYKGAWYGCQVMVADRFFPSSKTCSHCQHVKAELALRERVFRCEACGFVCDRDVNAALNLAQWAKQETTASSAESAAHLAAHATNALHSWRGNACGEEKSMPILRNGQVLFNEAGTEHHLGLS

SEQ ID NO: 46688 - protein, 401 aa, unknown
  TnpB Polypeptide
MLLTYKFRIYPKRKQIFRLLNNFNICKEVYNNLLELNINNYKETKKSLNKYKFNNYMKGKYKQIHSQVIQNVSDRVHKSFQNFYRRLKDKKCKKKGFPRFKSRIKSITYPQSGFKLNNNKLYCSKLGNIPIKLHRKLEGKIKTPTIKQNKANQYFAIFTCEIPDIKVSHSSAEKVGIDVGIENFATLSNGETIANPRHLIKAENQLKFLQRRLSRKVKGSANRRRARFKVARHHNKIANQRSDFLHKLSRSLALRFSIIAVEDLNVKGMLQNHCLAKHITDASWNQFINMLSYKEVTLGGQCLKNPRTRGSSHRCNKCGFYVKDMPLNKRTLSCPKCLNVCHRDFNASQNHLNDTVGLAGISTPVEILPLPSSNGKASGIMEAGTKRNESSKTIDAGSPLL

SEQ ID NO: 46689 - protein, 342 aa, Clostridioides sp.
  misc_feature (60)..(116): Xaa can be any naturally occurring amino acid
LYPNKKQQELINKTFGCCRFVYNKYLAKRIDVYKNDKETFTYKQCSSDLTNLKKELKWLXXXXXXXXXXXXXXXXXXXXXXXXXXXXXXXXXXXXXXXXXXXXXXXXXXXXXXXXXRILNATISKEPSGRYYVSLCCTDVDIEAFENTNNHIGLDLGIKEFCISSCGEFIENPKYLKKSLNKLAKLQRELSRKTIGSLNRNKARLKVARLQEHIANQRKDFLQKLSTKLIKENDIICIEDLQVKNMIRKRKLSRLISDVSWSEFIRQLEYKANWHGRQIVKVGKFFASSQICNKCGYKNEEVKNLNIREWICPSCNETHDRDINASRNILKEGLRLITIQNK

SEQ ID NO: 46690 - protein, 383 aa, unknown
  TnpB Polypeptide
MNTTHTYPFTHLSHTQFQRLRDAQAEAAQVWNLCMQMHRDARLQHDTWPGRNELQKATKGCSALHSQSIQMVVHAFLANIETTQQLRQTHPQMRMRYPYKDNRFYPVHWPAQAVSRERGRVVLPMGKGRKSLVLPLALPENSGACTLVWNNGYELHVCVEIPQAENPPGDNHATVDLGEIHLAAVTTNTGKALIVTGRGIRSLKRQRMMQIRSITKKQSKCTKSSRRWKKLQRAKNKQCRRAERRIRNQRHQATRKVINFCIERKVGTLFIGNPHGVRNQNKGRHHNQRMALWEYGRDIDYLTHKSKQAHMVCFTGSERGTSSQCPACGHKHKPRNRRWTCKACRFKGHRDLVGSINMHRLAFGEHVKFPRSFTYLRPSVLAC

SEQ ID NO: 46691 - protein, 216 aa, Bacillus sp.
  misc_feature (216)..(216): Xaa can be any naturally occurring amino acid
MTKQNKAYKFRLYPTEDQAHLMRKTFGCVRFVYNRMLAERKEAYEKHKDDKDQLKKQKLPTPAKYKAEFEWLKEVDSLALANAQLNLQTAYKNFFRGQNDFPTFKSKKDRKSYTTNVVNGNIMLLNGHIKLPKLKMVRIKQHREIPQGHIIKSCTISMTPTGKYYVSILTEYEKEIVQKEVETVVGLDFAMDQLYVSSEDERANYPKFYREMLDRX

SEQ ID NO: 46692 - protein, 398 aa, unknown
  TnpB Polypeptide
MLNMSNKKVKRAFRFRFYPTPEQEKKLLRTWGCVRLVYNKALDMRHTAWYKNQERVNYSQTSAALTQWKKHDELSFLKSVSSVPLQQCLRHLQAAFTNFFEKRAGYPRFKSYKKSRLGLTYSGSAFKFKGGDLYIAKLKESLNVVWSQDFDRNSVSRVTVIKDNANRWFVSCLGEVTIEKRRVTGKTVGIDVGVKDTIVLSTGEKLSPQDDRDMEKKQAKVIKYQQRLSKKQPGSKNFAKARTKLGKAHAEVVDAHHDWIHKITTRIVKDYDIICIEDLNVRGMTHSARGRGRKAKAGLNRRVLEQSFAEIRRCLEYKAEGCGGEVIAIDRFFPSSKTCSLCGYINESLTLNQRFWTCPQCCEHHDRDINAATNIKAAGLAVLACGDGVRPAKKPLVS

SEQ ID NO: 46693 - protein, 374 aa, Halomonas sp.
MTKRAYKERLYPTPEQAVLLAQSFGCVRLAWNNSLAYRTEAYQQHGESVSSSAAEKRLVDLKAEYPWLADVSSVILQQALRDQKAAFDNFFNPKLRARYPRFKRKDGRQSIRLTKAVFRYREGEITIAKSKVPLPIRWSRPLPSAPSSITISQDRAGRYFISCLCDFAPNALPITPKMAGIDLGLTDLFITSDGAKSGNPRHLKRYEAKLAYLQRQMAKKQKGSENRAKLRRKVATLHAKIADCRRDATHKATRTLINENQVLCVESLNIIGMVKNRSLAKAIGDAGWGEFVRQLEYKAAWASRQVVKVNQWFPSSKLCHGCGHKVEKLPLSQRHWHCDSCGQVIDRDINAAKNILTAGLAGLACGATGAGAAA

SEQ ID NO: 46694 - protein, 645 aa, Halomonas sp.
MAYGHGNSDSEKRMVSLGVGQLTDAKFHALVQLRDQYLEAANAMMTAVFVSEPLAGVPDKKTLDQALLAIQKDRQGLNKAYVEKARMAVKDHAHEAHGRYLRRLVGKLCHCADEIEGYQGSGRRYYHIDESLQDKISHAELSALQCNAEGWERALTLYRQVVVQGSGDGLSEAQAAVIHHLHEAVQSRYLPPVYGKDEAFTCQLHLDYRVVRGLKDGKVLDPLNKAAALLLHDQTNRCYQHFLEVSHPTPRQPPIRIPIHLTEKRLRRLGIEGLKTAFKSFVLEIGTSRIEVKGVVERVRPAYTAAQTTANASPVKLADDDFIALAKALNECDTLMGRDFGYANTIALTVLKRERALSADDLRELMVIRHLPRARAKAAMKEWFSSREGRDIEVVTQQCYSGRNFLKAIHGHCQYIDRLSSQIDCLYNKIDALKWILVTTLALNPEEWIPQKGLAFPDAFVKSLHQRFFHLLDKVTHLKAKRRQRYRRIAGLKKSWFGYLSNQEIALAKEHNAAMIREDLTVMAVEKTAPDYKGRRFNKMINNGSKGQYIQRASDKLLWNGIPELAMPTPYTSQACLYHQQLGKRQGERFTCPRCEKSRHSDLNAAMNIAGMLLTQWLGNSEKRSSFGRAISSENLVHEKPLPTA

SEQ ID NO: 46695 - protein, 437 aa, Arthrospira sp.
MAQTFAAQVNQLPDDPPLRAALEYLGTASNNLYNCTVYLARQLYFKAGKFSNGRWLSSQMKHNAHMKALYTSAAQQTCISVGEAFKGYRELLKLWRSGGLTEKPKPPNYRKSGGMFQLSYPRRWLRLVDGQVRVPMGTACKVWFDLPEIFLPFPSNLDWEKVREVQIVPRAGYFDAVWICEAPPVVPVVLDPEKSLAIDHGIDNWLTCVDSEGHSLIVDGKHLKALNQFYNKRVATIKEGKPHAFWCRLLDKLTGKRNRQMRDAVNKADRLVVNHCLKHGIGTVVFGWNQGQKNGASMGCQTNQKFVQIPTARLKNRIAQLCEAHGILFVEQEESYTSQASALDLDSIPVYGEKPEGWKASGRRIRRGTYRSAAGVEVNADCNGAWNIGRKAKVTGMQGIPARGVLTSPRRLRIWDLPGVSILTQKCCNPSGESPSL

SEQ ID NO: 46696 - protein, 345 aa, Arthrospira sp.
LSAIAVCAIGWIILKRIGYDLSKYCGVLAATFPFADELNSQARQASAEGAWSGISRFDENCKKKIPGKEGYPKFQKDCRSVEYKSTGWKLADDRKSITFTDKKGIGKLKIKGTRDLHFYQVRQIKRVRLVKRADGVYVQFCINVDRKENTAPTGNTIGLDVGLKEYYTDSDGVTVENPRFLRKGERVLKRSHRRVSMKVKGSKNRGKARQILGKHYLEISRQRKDHAVKLARCVVQSNDLIAYEDLRIKNLVQNHCLAKSINDASWYQFRVWLEYFAKVFERVTVAVNPQYTSQECSNCGAIVKKTLSTRTHVCKCGCSMDRDENAARNILSRGLSTVGHTGTFG

SEQ ID NO: 46697 - protein, 405 aa, unknown
  TnpB Polypeptide
MRTVVIPVRIPPPLLETLRDVRAAANRLVADWHGRPDESRFGATKRSYRGLRERYPHLASSWAVSICNETSATLNSWDRLLRRWKRTDPTKWARCRRQLPRRARLKASLHPCLYRMKEGRTLDVTLSPRRHVRFDLSSVRHPLFERYGAASGWKFGLAVTERALVFNFRVPEEERECADSVGVDVNMPSADFATTDGEVGSVDLKPITRIQGAMARKRASVQRHVSKDLRHQRTVLRRYRRRERDRVAPLLHRAAHELLEKVGERNVVLEDLTKTQEELLKTTGGRDRRRRLSAWTQGRLQRIVEYKARTRVLHVNPRGTSSECPRCGGRLAHPEWRRSVCANCQGDWHRDMVAATSILSRGQLVLRGTALSPRALDALLEKARWGVRSAGASVNADEANAAGVV

SEQ ID NO: 46698 - protein, 325 aa, unknown
  TnpB Polypeptide
VCDNHAIPVFYRDVMYREDTEEKDRVCLKLYDGHDWKWFRVSLSHTDMEYLRKNWAGKKAAAPVLEKRHRKYFLRFSYTEEVPLTKTPAKERIICSVDLGLNTDAVCTIMRSDGTVLGRRFIDFPSEKDRMYSVLGRISRFQREHGSAQVKSRWAYAKRLNTELGRKIAGAVTGYAEENHADVIVFEYLETKGKISGRKKQKLHLWRKRDIQKRCEHQAHRRGMRISRICAWNTSRLAYDGSGTVVRDPGNHSLCTFQNGKRYNCDLSASYNIGARYFIRELLKPIPVTERSLLEAKVPSVKRRISCVYADLRELFLEMELLRAA

SEQ ID NO: 46699 - protein, 583 aa, unknown
  TnpB Polypeptide
MYKSTGFLAKEYSVTNETILLWIKEGKFEKVKNNPYPKGDITGCGLTNQLPLFSMQEYLAQSKKALLKSKKNCSKGNTLMPDLFLTLPRDLTKIDVDIGPFWNKLSREIHCILWQPHQIELPEPDSHSLSGASNYRGGKSSFWKNQIIPSNYSTSLRYFVSTQKRLSLSLPASSTPTMEKEAQNVITSQKIRIYPKDEVLWFEALNLYRRAYNLTIEFMRKGRKPSSEFRTQICDWCKLECEEHDITYNSNLVQAAYRKACDTRSAVIKKRMKGEKAEMSFMSRNAPQQYFVVPRLSSNKQIFPRILKGCRWTEDAPSEAIGQTVIVTYTNGQWFANVKLNQSVEPTKTQSLSIVALDPGVRTFQTAFSFDSAVSYGDGFVNDRLVPLMLELDALLSVRDKLHCEDKSKQWVKDRLKNLNRRIAKVRARQQNLVDDLHRRVAYDLVSNHDVILLPTFETKQMVKKSTETRKRFLRRKTVRGMLGLAHYRFKQTLKWMAKKYGKTVRDANESYTSKTLWDGSILKNLGGKASILFQGKRVNRDIHGARNILIRFLTKVIEVLSPQGACPLNITKARFCGFGVLK

SEQ ID NO: 46700 - protein, 254 aa, Methanosarcina sp.
VNFENNTVKLPKIGEIKAVLHRKFEGELKTATVSRSCKGNYYISILVEDGKELSAKHPFTESTTVGIDVGIKDFAILSTGEKISNPMYLKNSLKRLKVLQKRVSRKQKGSKNRTKAKKSVAVLHEKISNQRNDFQNKLSFKLISENQAIALETLNVKGMVMNHHLSQSISDSAWSIFVTKLEYKAAWFGKTILRIGQFEPSSKLCNVCGYHNSDLTLKDREWTCSDCKTKHDRDINAAINIKKFALIDQNLIGL

SEQ ID NO: 46701 - protein, 397 aa, Lentzea sp.
MNGQVKRAFRYRFYPSDAQAAELSRTFRCVRKVYNLALQARTEAWTQRGERVGYGATSALLTAWKRTEELAFLAEVSAVPLQQALRHLQTGFTNFFAKRARYPRFKSRKKSRASAEYTRSAFRWRDGTLTLAKMSEPLDIRWSRPLPEDAVPSTATVSRDAAGRWFVSLLCEDSSVTPLPNTDSVVGIDVGLDHLLVMSTGEKIGNPRHEQPGRKALARAQRALCRKQRGSRNREKARVRVARTHARIADRRTDFLHKITARLVRETQTLVVEDLAVSNMVVNRRLARAIGDAGWRQFRQLLEYKAKWYGRDVITVDRWFPSSKLCSVCGALAVEMPLHVRTWTCGCGATHDRDVNAARNILAAGLAVTVCGAGVRPQRNTPGGRSVTKQKTLRREP

SEQ ID NO: 46702 - protein, 350 aa, Burkholderia sp.
MILVYRYRVKSLNGLLNKQSRAVNYVWNFCNDTQKHALKWSKKWPTGFDLNMLTTGSSKALGIHSGTINATCEQYAKSRSQHRRPYLRYRGRKSLGWVPLKGRDLKREGDAFRFAGNTFHVFNSRALPEGKIKDGTNFAQDARGNWFLNIVIEMPDVQARPIRSGVGIDLGLKDFATLSTGEKLPNDRFGRRAAEKLGKAQRARKHKRHIAKLHAKIANARADFQHKLALDLVRRFDYIAVGNVSAAKLARTRMAKSVYDASWSSFRNKLRYKAIAHGATFEEVDESGSTQSCSSCGSQASTTRPKGIAGLRIREWACSDCGLVHDRDINAALNILRCGRASPGVGILRL

SEQ ID NO: 46703 - protein, 658 aa, unknown
  TnpB Polypeptide
MPRPKKSKTGIGTEETIRSSELEDDIQHDSCLLENNVEGSQSEEEAVMISCVKMKLRSFCKMPRLVSVLNRIVIECNQIMLEAYCFANLHILRLFEAGETLPTIDRNFYYRCIMSIGTSKVKSGTLGQDFQESILLFDSLRNENTPKISLNGYNQVLADLSIIMATMASNHLWTNLEARIDKYLKTFHKSLKPKSRREIITALVRTPKANVREIVKNPSAILIAEELKNLMRLPSALQSKKHASLTIPLYIHILRSFEKLRDSQDKKDKHPKLFSILPLKSNFTISHIPISSMMMLGILKKHFGHKEIEGDGRNSNATYYWKKYFNLNAVETSQRKFGNRIITDGYAVSVPLKRVSATCCQNNVQDSKELTKMINNGKVDLICGVDPGISDVVTTTYYESIEELKNRKSVDNLVDNLKTLEVASYSSGMYYEKSKINSSRHSTSKWNEETKHITENSPKGCTSFVERFIDYIMYILKYEKELLEHRMKYRGPRFLRHMYRDKIIDEICDLIAPKDKVVIVGFGDWKLSNKSPISRKTCGPIEDIKKRLRSRTNVWILDIDEYCTSQKCSCCHQVLSNSKAYSTTYTKDGQKTTTFRKIHKMLHCKYHHTDKKVTKDLRCGITWNRDVNASKNILLLTIFEIFGEMRPKAFRRSRKLKT

SEQ ID NO: 46704 - protein, 344 aa, unknown
  TnpB Polypeptide
MIRRVQLSINNANIGKLNKLDKFRAESIHVINLYINLIWEQQDFSSKFISTKADTWLSARMQQCLGKQALEIVKSQRKRKRKTKPTFSGNSFNIDSRFVNIQFDNNSFDVWVKLSSLGNKIILNLPAHKHRQFFKYKEWKLKQSIRLRFSNNNYFVDLYYEKEPLPLKTTGNTKAIDIGYKKLIVSSDREFIGNTFIYEKISRKKQGSKAFNQALIERDELINKACKQLDLNNTNVLYAEDLKSVKHGSKGKIHKSFMNKLQRWSYSKVLNRLSMLCDESGIQFVKLSSQYTSQRCSKCGVICKSNRQGEIYKCACGNIMDADLNAAYNILHLGEYGLQVFKPI

SEQ ID NO: 46705 - protein, 583 aa, Moorea sp.
LKKGKSKELRHLEDFDDTTWTQSSLFQQQKLAKTKDLPFCMPEFQAALKKPILSNKYSFSSLVTQKQRLSKTSGAGLTSEEKVFNPYWTEFSAVLASILSLPTKIGFAALGSILSHGCAVNSKLKYWFSTKRTSAQSKKWLKMFLRSSTSSAVGCTDSESTKIKSLKTTTYRVYPSKELESIWKKWVSATRKVYNISIEQLNKNQGYIKVGKKGGKHGFRTWLKKSGLIPEWCKNLNVSKILDNASMEAYTAWKETAKQPLFIGFGKKRKPNLQAGLKIAKFRSVRNQKQTIQFDPTAYKAGRWMVSTTKHLPKPEFKGHDHCVLTDGSTELTYNKGRWFAHFPVEFETEPTHTQKVIALDPGVRTFMTGFDGGQFLEFGINDFQRIAKLCSYLDKLKSKHDSLKGHYNKPRRYRLKIAMEKVRTKIKNLRTEIHKQVASYLARNYDVIILPTFETSQMVVKKKRKLKSKTARAMMTWAFYQFSQILEHLCNRYGSNLVRITEEYTSLTCTKCGHVHRKLGSSKNFKCPKCGYEIDRDFNGAVGIFLKAMWDTTFLDSFGDVVLSLSDSADVLNVQDVAICPG

SEQ ID NO: 46706 - protein, 430 aa, Brasilonema sp.
MLVLEAKLEGSSEQYTILDEMIRTARFIRNSCVRYWMDNRDVGKNEISAYTAILASLYEWAGKLNSMARQASGERAWQSINRFYSNCKKKVPGKKGYPKFRREQTHGSVEYKTTGYKLSKDRRSITFTDKFDAGTFKMWGTRDLHFYQLNQIKRVRVVRRADGYYCQFCVDQERLEKREPTQTTVGLDVGLNHFYTDSKGNTVENPRYLRKGEKALKRLQKRVSRKKKGSSNRTKARKKLALKHLKVSRQRKDFAVKLARCVVISNDVVAYEDLKVRNMVKNTKLAKSISDAAWSLFRQCVEYFGKVFGVATVAVPPHNTSQNCSHCGNKVQKSLSTRTHRCPHCGTVLDRDPSGSQSPTEGDPPAALSHHNAALNILEIALRTVGHTGTKTSGDENDLCLGEETPSGKPTRGTRKSKAQVLESHGFLSK

SEQ ID NO: 46707 - protein, 505 aa, unknown
  TnpB Polypeptide
MHTLQLRLKTTAYDRQEITRRFYALSHIHNVLVKHAKKLLCQLEHNKEYQGMLTEYRTLSKIKEPTKESDSRKDALLQEMSSFRQRIGLTEAGLQSYIKVCGKRYKKLLSSQQVQKEASNVWRGVEKVLFGNGKQLHFKKNRDFTTISGKTNTNGAKFDKETLTVNWLGLSMLCKLPKREKDRQYIEASLSSDISYCQIHRKMFSTGWRYYVILVLSGDAPKKLQHIGDSTMGIDPGTSTIAGVSETKVILTELAPETKQYEKAIYRLQQSMDRSKRAMNPKKYKPDGTINKQNHDPWRFSHTYRKNRDRLKSLYRKKSTYIKQSHEILCNTLLADSRHFLVEKMNYAGLQKRSKHTARQEHLSEVKKKDGSTRKVYKYKRKKRFGRSLGSRAPAIFLHILQQKVQLYNGSYREINTRTFCASQYDHVENKNKKTPLSQRTKIIGGVKVQRDLYSAFLISNATNDLSHANRRKCNKKFADFIVMQEKEITRMKASGSSMKQCFGF

SEQ ID NO: 46708 - protein, 412 aa, unknown
  TnpB Polypeptide
MVVIQQVEKHMIKKSHPYYTMFCEYTHLAKNLYNHANYLVRNEFAETGKWLRYQDLDKILKEDLDFPDYRNMPASQSAQQVLRLLETDWKSFFNSIKDWSKNKDKYSGKPKLPKYKPKDGKMVLSLTNQQVKVKGDLLHFPKSFCGFTVKPRCVTLDNFEKINQIRLVPTNQTFCLEVVYSISVEFDLLSDNGRYMSIDLGLDNLATVVTNVGLNPIIVNGKGLKSNNQYYNKKKAHYQSVAKQMNNQNYTNRLYRLTQKRNLKVEDYLHKASRYIVNFALENQINTIIIGNNKNWKQSSSLGKVTNQAFVSIPHQKLIDKICYKSQLCGIQVILTEERYTSGTSFLDGELPQKEFYNKKRRVRRGLFVSNNGVKLNADVNAAFQIMKKVFPNVFTDGIEGVVLHPVRVGIV

SEQ ID NO: 46709 - protein, 455 aa, unknown
  TnpB Polypeptide
VLITQKDHLRLSKKEFEIIDRLCGYSKNLFNVTLYEVRKHYKNTEKHLKYKDAYHIVKSNENYKLLLSSCAQQTMKIVDRSYNGFFGLLKIDQNITVNPPKFLPKNGKFACVFPQTGFRIKGKKLLIGLSKTFRKVHQILAKDLEFIIPRNLRSVDSRQIKEIRIIPRLSGKYYDIEYIYKIKKKSMELELDSYQYLAIDLGLNNFATTIDTTNGTSEIIDGRYIKSINQWYNKEKARLQSIKDKQKIKFLTNREALMLQNRDNKINEFLNLSVNHIIKHCLNNKIGNLVLGDFHGIKQKIRLGKKTNQNFVQIPFFKFKQKLKSKCELHGIKYYIQEESYTSKCDALALEPIEKQVSYLGKRIKRGLFKSSTGVLLNADTNGVLNILRKVAGDSSIQGIISRGLVNRPRRIRLAFHTNIENDLQTSSVLNCSVVAKVSNPLKTIYKPRPSGRGS

SEQ ID NO: 46710 - protein, 391 aa, unknown
  TnpB Polypeptide
MIKSIKARLNPNNKQLTKLFQYAGCARFAYNWAIAREQENYKQGNKFLLDCELRKEFTQLKKQSEYQWLNEVSNNVTKQAIKDACNTYKKFFKRQCKCPKFKSKKYSISSFYQDNIKIRFTDTHVKVEGFSMSKKKNKQKLNWIKLCEKGRIPTDCKYMNPRFTYDGLHWYVSVGIEVNDNTDISSNEGVGIDLGIKDLAVCSDKNKYQNINKTQRVKKLEKRKRRLQRSISRRYEKNKKGASYCKTSNIIKREKELLKITKRLTNIRQNYLHQTTSEIVKRKPSFICIEDLNVSGMMKNKHLSKAVQQQGFYEFRRQIEYKSAWNNIPVIIADRFFPSSKLCSCCGQIKKDLKLSDRIYKCKCGNIIDRDYQAALNLKRYGENVLKQSVG

SEQ ID NO: 46711 - protein, 449 aa, unknown
  TnpB Polypeptide
MHLKKARAYKIKHSYNVKDSITRYQWILQLAIDYIWENIDWVEKKVRNYYTIPKTMKNVKLLKQQGKKFKVYGKKIYVYYTAKRLIPKIPRSPKFVKELRDYLQVFWKQTSYASHYVDSAIRTSYWILESWRENYLNSKFKRRKPTIKSRFARIKNSLFRVRDGELILTIVPRQIYQKFKLDDKWFYDRIKDWKLGEIILKDKELILMFTKETEDENISKVIGWDMNMFTMDGYGDEIGAVKKSIKELYRIHITYHNKRRKIQKMLKKNPKQAKRLLKKLSKRERDKVRDFIYKFTTEIAREFQDYVHVFEDLNKEAMYNRSKKHNRNISLHDWRKIVEVLKYKVKVVEVDPKFTTKTCSRCGSLNTVVKNGTVKCLDCNLEIDRQLNASINIYLKGKGLKLSHENWVKLGLTEDVGSLGVPPNGAEPDDVSPMNPEGNEGDVAQGEVG

SEQ ID NO: 46712 - protein, 428 aa, Haloferax sp.
MKKSLRQNLRDLDREEYEILRRMSRLSKNLYNVHLYEVRQYFFDNGEYLNYYNTYERIKNNENYEELPSQVAQQTMKQVDKGFKSFFKLVEKTREGKYNEEVNIPGYLEKDDFYLLDFPSQAFQMKEDYIRVGVPKQFREEYGFDRKEVRIPFTYDEVREKEIKRLQILPQSDAEYFEYRVVYEQEVEEVETEEGTFLSLDLGVDNLAACVDHSGRSFILDGRELKSLNRWYNKRKAKLQSIKDKQGIDGETQRMQRLRRKRENKVHDYLNKAVRGLVDYCVEHRIEKVIVGDGKGWKQDVDLGDQTNQNFVSIPHDKFKQKLKHKLEENGIEFELQNEAHTSKCSFLDDEAVEHHEKYVGSRVERGLFKASDGTEVNADVNAAANIAKKHIGKPNSELFSSEDGVESVVDTPKRIRKPDFTQVKMAV

SEQ ID NO: 46713 - protein, 379 aa, unknown
  TnpB Polypeptide
MIKTYTIKLYPNKQQIKSIIKHINACRYIWNIMIEKQEQNYNIGNRYLTAFSMSKLLTSLKKDDEHFWLNEVSTTSCQIICKDLDGAYQSFFKGKSNRPKYKSKKKSKLSFPVRNDRLRIISKKKIHIPNIGHMKCRIDDRLIIGDNYKFFNARVKNRNGKWILTVGIESENQTFLLTNKNMGIDLGIKDSAIVAYGDEKLVFPNINKSRKIRLIEQKIKYLQRTTSRKYEANKIGKKFIKTKNIERCEKQLNRLYARLLNIRKNYIHQSTHKLISLFPNRVVMENLNIIGMMKNKHLAKAIQEQCFYEWIWQMKYKCESKGIEFVQADRFYPSSKTCSRCGCIKHDLRLSDRTFICSECGLEIDRDYQAALNLMRYET

SEQ ID NO: 46714 - protein, 646 aa, unknown
  TnpB Polypeptide
MPAGQAMATIVLSLDSSDAHARRRLETLYFTIFNIRRALQRDAQRLCREYWERKSDRDEFGWKVVAGDLGLTRRGFEQLARGHALAAGWAMDHVSAALVYHMADAVFEDAARHLWSDASGKRHGPLKITKFHEFFTIFGRARSHTTDNKWESFRVYGALQGHLGAYGHGSLGTHPTLAQVMDLPAGTPLLHQKHMTTPAATKWSTYTGPLVMVFAGGPNSDAGELQLPVRLPQGRGQWERVTHFLSNPETWHKIDLVRRPDCSQPGGWRYEMHLLVLSEGWTSPKNKALLGLASTTRVACVDVNVSNLSVVSVGLDPRDLRSTVVAKDSQERDRLRRVEAKKKRGQRRCDRSRRAMNEAQYKLSRSQIKRDQKREAKGLRPVVTEVRGGARLEGRDGKPTQSYRRDTLSVSYKTQRRSLAEQARGQSTTKKIKAHDIALQLVAINGTNWIIEDCNISGWARLWGKSLHAFAPGMVTSELGAITTRLGGSFTKVSTAATALSSHCLCGNAKKKSLGDRVHNCGVCGLHGTRDLVSAALGTCVVVGDTKLPSTAHVDYTRAGAVLTALDSLHQGYQDALTSQTHPLGSWVSATKSQGARSVGIHRTARQNAKVSASSTKGPGQPGPAKVTHGPALARSSPRGQLRLNS

SEQ ID NO: 46715 - protein, 646 aa, unknown; identical to SEQ ID NO: 46714
  TnpB Polypeptide

SEQ ID NO: 46716 - protein, 383 aa, Domibacillus sp.
MIVNKAYKFRIYPTKKQEILITKTIGCSRFVFNHFLSKWNDTYKETGKGLTYNTCSAQLTQLKKQLVWLKEVDSIAVQSSLKNLADSYSRFFKKQNKAPRFKSKNNNVQSYTTKHTNGNIAIIDNKIKLPKIGLVKFAKTREVEGRILNATVTCNPSGKYFVSILVETKVEKKPKTGSSVGIDVGLKDFAILSDGTVYKNPKFFRSLEKKLAKEQRILSRRKEMAIKQKRKLSESKNYQKQRIKVARIHERMVNSRTDYLHKISTEIIKNHDVIGIEDLQVSNMLKNQKLAKAISEVSWSQFRTMLEYKAKWYGKQVVAVGKTFASSQLCSCCGYKNKDVKNLVVREWTCPGCHTHHDRDINASLNLQNEAIRLLTVGTTGLA

SEQ ID NO: 46717 - protein, 138 aa, unknown
  TnpB Polypeptide
VHRRIAHQRAAWHWDTAHALCQQYDTIYLEDLELRGMAALWGRKVSDLGFGRFVQILHQTATKLGTHIHHIDRFFPSTKLCHVCGTLNAFITLRDRVWTCACGTIHQRDRNAARNIYGEGASSHAQGRCKTTSVAATA

SEQ ID NO: 46718 - protein, 266 aa, unknown
  TnpB Polypeptide
VAGIGHLKLKWSRPIAGTIKTVTVKRDADQWYVIFSCEVEIEPVPVAAKPAVGIDMGLEYYASMSDGTHIENPRYYRIAQATIARRQRAFERTKKRVKLKDGTYRYGKNRARAGLLLKRAHRHVANQRKDMQHKAARKIVQTYGAVAVEVLSIDNMRKRPAPRPTGDGRYAPNGARAKAGLNKGIQDAAWGQFIAILMNKAAEAGSVVVAVNPAGTSQRCSGCGAKVPKALSERRHECAACGLSLQRDVNAARNILHRAGLARAVV

SEQ ID NO: 46719 - protein, 342 aa, Streptomyces sp.
MKLVMQVRLLPTPEQAAALEATMYSCNEAATWVSQVAFERGQFKNFALRRHVYGVVKSRWGLGAQAAQQVIKKTCDAYASLKANLRAGNLGRPGSRRHRQATERPIAFRPQGAQPYDDRMLSWQMPDRTVSVWTTYGRIKNVAFTGSAEQLTTLELYRKDESDLVLRDGMWFLFATCEVPEAPLNTDPVDFLGVDLGVVNIATTSDGEIMAGRALNRMRTRERGLRRKLQKKNTPSTKRRLRKRRRKEARRARDINHKIAKHVVAEAERTGRGIALEDLTGIRERVRLRKPGGTSHALEAVGEGHPLQLELRPAGFVHRVQGPPCRGAGGVRRSGIHLSYLR

SEQ ID NO: 46720 - protein, 370 aa, unknown
  TnpB Polypeptide
MEYSYKFRIYPSQMQKNQILRTFGWCSFVWNHYLAKRKEVYEQDGKTLNYYDCAGDMTQLKKSLEWLKEVDATALQSSVRDLDTAFQNFFRRVKQGEKPGYPRFKSKHDHRQSYKSKCVGANIKVLGKTIQLPKLGLVKCHVSKEVKGRILSATVSRNPSGKYFVALCCTDVEFAPLPSTGSAVGLDMGLKAFAITSGGVEYPNHRYLAKNQKKLAKLQRQLSRKSKGSSRREKARVKVARLQEHIANQRQDMLHKLSTGLVRRYDLIAIEDLAPSNMVKNHKLARSISDASWSEFRRQLEYKASWYGKVVVTVDRFFPSSQLCSACGAQWPGTKDLSVREWACPVYGEHHDRDINAAKNILKEGLRLLA

SEQ ID NO: 46721 - protein, 547 aa, unknown
  TnpB Polypeptide
MPKARKKKNSSFQTTITKSVFLYGRPNKEKLAVLRQMQNSYTALINRDIELLEKNPDIVLQLVKNDKKDPQMRKLEKAIRPEGINSAFCQNAFDAAVVQVSGHLNNIRLDLLSEGMGIFAQSKVLFAMSVMGCSKQKMEETMRQIEGTFYEDCAKTLHEMSEKDFSNLQLEFQERYASKSLEYRVPKLRFVSVPLDSRLMKIEQSTDTKMPYVIIITNPLKTRQRITIPIDTSGHFLHKIQNNKMAGTVLMQVRKGNLRIGWSYDSTRQQPATTNCIGVDTGISDCFHTSDGRKIGSMSPVIDFYHEAVEPAFAELANLRNKKRKIKHFLRKHDLPEDVRRSLIKKMDHLERMIQTAKAPYRKKRCYYALLDHEIKKSVTTYVDSISKDTLTAIEKLDIKEFNKSRKVNGMFSTFARGKLQRKLMEALNQKGCDFFEVEPDFTSQVCPVCSNLNAENRHSKGFCCTSCGYHDDADHVGAVNIRNRAGDKEILELCREHQYSHKNLQNAIRIVYEKRHIAYEEKKQHLHESRRDPVTSYMMLQDLICD

SEQ ID NO: 46722 - protein, 404 aa, Cyanobacteria sp.
MAKVTTTIKLLFVDLNQSKAELFAQMTQENTNLANYLLSIPLSERRKLTTAKVVTHLMSAVANQTIRHTTSNTGKKVKKYKVLPPEINKQNWSVHKIGDTYSLSFPTIKGTKRVPVGVASHHWQLVLDALVRDDKNLEKGSVKIIKHQRLWYAFVSITQEVPEVETTNRVGCDRGQNNLAVVAPSKGFGKFFSGKEVKHRRRYFQKRRESLQKAKKFRALKRWNKKERKWMEAVNHTVSRRIVRFAVVHNADVVIEDLEGCGKTMKQRHELRADAGESRQSWAYYSLEQKLSYKLVQAGLHLVKRPAPYTSKSCSTCGTLGNRHRHDFNCPHGHYHNADLNASRNLAQWDGFSCSLELQKAMSAMDIAASENGSLGTTPNSMNALPLTGQRTRRENPPTLTNEA

SEQ ID NO: 46723 - protein, 418 aa, unknown
  TnpB Polypeptide
MLLSKKTSIKVSREYANLIGHMCYAASKLWNVCNYERQHYKETGMAQYPDWYYQKKAHKEDLWYKQLPSQTAQEVCRLLDKAWKSFYALKRSGGIETPRPPRFKQESIPITYMQMGIVHERDTDRVRLSLPKTLKKYMEETYQIHENFLYLENKIFRGMDQIKQMRIYPPEKGSCKIIVVYEVPDQEELPQNGHELSIDLGLHNLMTCYDSENGKTFILGRKYLELERYFHKEIARVQAQWYGQQSGKGVKHPVTSKHIRKLYKRKQDSVTDYLHKITRYLAEYCREQGITCVVTGDIRNIRREKDLGHRTNQKLHSLPYNRIYIMLEYKLKRYGIRFIKQEESYTSQCSPLSPEVGKRYAEPSKRKERGLYRDGNRTYNADAVGAYNILRKYHSVSGVKRELSVTGLKTPEIIKVAV

SEQ ID NO: 46724 - protein, 510 aa, unknown
  TnpB Polypeptide
MVAKTRPSGRGRFLNGCFLLLLLLRRSVAVELETTKELNKLLYSVESVYLSIVREVVEYAVVNNVLSTTQLHGLFYSKYRLEYPSLNSQLIIQAIRQASEIAKSFVERRRKGLVNKPYPEVRNVSIRFTEKAWGYGKFVRSIAPVKITLSLLGERREVWLRPHKRFWLYWWRVLTGEAELASTLIVKRKVNKWYAIFIFEIKPKEEEPQSIIAFDINENTVAIGRIDIIATINKTADWNRRYATPQLYEIRTDFGRLAKRYERVRNAIIEKLKPKFALPSGNYVNVANTREFRKRVRKLRERVRKVGRVRHVASELTKTSALIVTEELGNNPQEEMINGVGKGELRHRIKQTPFKALEKAVEEKALERGSRVFHVSSYRNSRVCPIHFTRLEKTDDWHVLKCPLGHLVNRDYASVMNMAWKLTPEAWVKGVWWGLRKRMDWREHEGKSNTNIPYPIVQYLHAILRTFTASEQWPAMLARGSPMNPAGEADEGWARKPPQKGRRPGIHAWW

SEQ ID NO: 46725 - protein, 534 aa, unknown
  TnpB Polypeptide
LQLKASPFRAELHHCVGFHGGRSINPTLLEYLVTINDKPRHSWRGCFTVWVLGFINSPCPCCFVPGVVPFSSLGEPVGRLPTVFTTLGTSSSRKQKDGSKRTVRLRLLPNGAQERKLRRIADATARLWNELNYARLVQYRELGRVDFEGTEHEFYHRYKCVLGVNAGQVISLNNWMWNSFFELSRLYKQGKLPKFMGKPSPPGFWKDKLLGKRTLRILVRNDRYYIEPINGGEGYIILKDWGLRIKYAGRIKWSGKQGMLVIKYEGGRWFAYVPITVGEKPAKSNPKGYVRGIYEKIQIEKPKGSNKAFIDIGLNNLFAVVFNHTDVAILIKGSTIKAEYYWWKREIKTYQSIRDWLKNHGFESWRKYHTFYLHAIYKQRERLRHYYRTAIRFLAKTLHGMGIDEVFIGYPYMVSQDNGNEYNTNVWWYAKIINWLNDVLEEYGIKINVVNEYGTSKQCSICNVNHENGRVKRGLYVCKLTGIKINADLNAARNIARRVGYEVPIPRKILSYIVTTNGIKPITPKEGVTIETPE

SEQ ID NO: 46726 - protein, 504 aa, unknown
  TnpB Polypeptide
VAVELEVTRELNKLLYSVESVYLSIVREVATYAVANNVLSATQLQRLFYHRYRQEYPLNSRLVIQAIRQASEIAKSFVERRRKGLAQKPYPEVRSVSIRFDETAWNYEEFVKSVAPVRIAISPISTGRRGRSGRFEVWLRLHKRFWLYWWRVLNGEARLASTLIIKRKANRWYVVFVFEVKPKEGFPQSVISFDINENTVAVSRVDLPSTVGKVAKWNKQYLTPQLYSIRTDFGRLARRYGKIRNAIIEKLKPGFALPNGKYMNITNTREFRKRVRKLRERSRKLGRVRQVASELTKTPAIIITEELGNNPQEEMIEDIMKDELRHRIKQTPFKALEKAVEDKALERGSKLFHVSAYRNSRVCPIHFVRLKETNDWHVLYCPLGHYVDRDYASILNMLWKTTPEPWTKAFWWNLRKKMDWKVHEGDSNPIMPYPIVQYLHAMLKTFVASEQSPAMLARGSPMNPARGANEGWVRKPPRLGEEAREDDHAIISPRGHTIAQTRAV

SEQ ID NO: 46727 - protein, 256 aa, unknown
  TnpB Polypeptide
LPSPPSSVTVIKDAANRYFVSFVVEISPVKLPDNGQSVGIDLGITDFATLSTGEKIKAPKPLKKHLRKLHKAQRKLARKKKGSKRRELARRKVAKIYTKISDIRNDFLHKLSTRIIRENQAIVLEDLNVAGMMKNRKLSRAISDLGWRSFRTMLEAKSEMYGRDFRVISRWEPTSQRCSCCKQIGGKKELSVREWTCLFCGAVHDRDENAAINIKVAGGLPETVNGRGGRIKTTSNVASNSEASTHQFPRQLSLFK

SEQ ID NO: 46728 - protein, 459 aa, Streptomyces sp.
MTQQVKRAFKYRFYPTDEQAAELSRTFGCVRLVYNKALEQRTRAWYGEQRRISYVQSSAALTQWKKTGELAFLSEVSSVPLQQALRHLQTAFANFFAKRAKYPRYKSRKKSRASAEYTRSAFTWRDGKLTLAKMTDPLDVRWSRPLPRGAQPTTVTVSRDSAGRWFVSLLCQDTIAPAPATDATVGLDAGITSLVTLSWSRPLPRGAQPTTVTVSRDSAGRWFVSLLCQDTIAPAPATDATVGLDAGITSLVTLSTGEKVANPKHERRDRARLARAQRDLSRKAKGSANREKARRRVAQVHARIADRRRDFLHKLTTRLVRENQTVVIEDLTVRNLLKNGTLARAISDAAWTDLRMMLEYKCAWYGRTLVVIDRWFPSSKLCGACGTVAAKLPLNVREWTCDCGSVHDRDVNAARNILAAGLAASACGDGVRPQRESSRTGQSSVKQEPQRATAGIPRP

SEQ ID NO: 46729 - protein, 584 aa, unknown
  TnpB Polypeptide
MGMAEMVGDGGAGDCSVNIAVAVPVARPVLNADGSVRKPRARKRPKDALTHVVSVCLRPTPGQQSQIETRLDSGRKVYNACLAEFLARSRRVRADPEFEAAKKMPTGRQGTKVSADRSRAFAAVDERHGFTASAAMSFGSSLRQSWVRQHVLAQEAQTMAGRAFTAVHDWHVGVRGRPRFKSWRQGLRSMECKDNNGALHPKIVDGHVVGVLWGRGFLLELAPTDHTDTAERIRLDAWAAAGKVRSTRIVHTLIAGRDTYRAQMVIDGPAPIRHPVGTGSVSIDLGPSQVAVVVADNTGAPVSGQIHRLADGIEAQTKLLRRWQRKLDRQHRAGSPDCFDAKGKHRRGRCGWKDRSKAAQRTTMRIADAHRRIAAHRRSSHGHLVNELLAHGSDVRAEKLNYVSWQKNFPRSVRDRAPGLFMQELGRKAENAGGPYLAYSPWSTALSQTCVCGARVKKPLSVRLHRCPCGVAAGRDLFSAYRGLFVDRLVDEQSGASGDVLDLSAAAEDFPLFRGLLQESGGSPGSSTRGVKHRGRGRASVRSTARVSKRHHQRGGVRRGPTEMLGEQLSTLTMPAAAPTLLAA

SEQ ID NO: 46730 - protein, 370 aa, Bacillus sp.
MAKQNKAYKFRLYPTEEQIVMMHKTFGCVRFVYNKMLSERKETYESLKDDKEALKKVKHPTPAKYKKEYDWLKEVDSLALANAQLNLDKAYKAFFKGDAKFPKFKSKRHKQSYTTNVVNGNIQLLDGHIKLPKLKMVKIKQHRAIPSEYKIKSCTISVTSSGKYYVSILAEYEKEFESKKIEKVVGLDFAMDGLFVDSEGEKANYPKFYRQILEKLAKEQRKLSRKKKGSSNWNKQRIRVAKMQEKVANQRKNFLHHQSKKLVTNYDAVVMEDLDMKGMSKALKFGKSVTDNGWGMFTSFLQYKLKEQGKQLVKIDKWFPSTKTCSRCGSVKEIKLSERTYQCTCGLNLDRDYNSALNIKKEGMRLLESA

SEQ ID NO: 46731 - protein, 413 aa, Lyngbya sp.
MFKVVKVRLYPDVQQQQSLAQSFGCCRWLWNYCLNLMNQTYKETGKGLSGYAVKKIIPQLKKEYEWLTSTYSQCLQQVCLNLGVAFNNFFEKRAKYPRFKSKHGKQSIQYPQNVKVADNYLSLPKIGDVSAIIHRPIDGKVKTVTISKNCSNQYFAAILFDDGKDKPESNTDGKAIGIDLGLTHFVITSDGSKFENPRILNKHEKNLKFKQQQLSRKKKGSNNRIKARRKVARVHRKITNCREDFLHKLSRRIVNENQVIVAENLNVKGMMQNHKLAKAIHQVGWGMFCTMLKYKTEMEGKIYQEVDRFFPSSKICHVCLNQVGSLPLDVRYWTCNNCHTKHDRDVNAAINLRDEGLRILRVRNSPSHGECKTHSRQTPGTGDKACRPDVSRIDTPAAKSKILAGDSSFNQRT

SEQ ID NO: 46732 - protein, 267 aa, unknown
  TnpB Polypeptide
VDSAIKTAYSILNSWRKNYVKGDRKRRRPTARRLFTRAKQTLAKMEGEKLRLTVKTGEYVYLDLSKRYFSLPGEVSSAGLGEPIITPEKIHLPIHYEEDAQNSKPSVAWDFNLLSLDGFSPETGWIRIDTSKLASIHIASFEKRCSAQRKASRSKKARRVLSKYSNRERNRARKHQLEITRVIQSLCGPVGLEELKKQGMYTRSRIWNRRISRSDWRSITRILVGRLGEAKVKELDPYGSSFYCSVWVGEQRPEWGGFRVWWVRAPY

SEQ ID NO: 46733 - protein, 380 aa, unknown
  TnpB Polypeptide
MKTFAYRLYPTKPQERLLLSTIETCRHLYNDCLAERKEAWENEQRSVTRFQQMRLVKDVKATNPFAKDVHSHILQVAVSDLDKAFQSFFRRVKAGETPGYPRFKGRDRFDSFGLKEYGNGWKVDGRRLKLSGIGRVAVRWHRPMEGKPKTVRIIHKPDGWYACITCETPTHPLPATGKAVGIDVGLSFLITTSDGEKVPHPRWYRDEQRKLRVLQRTVARRTKGGKNRRKAVASLKRQHQRIGNRRADFLNKLACALVQRYDVIVVEDLRITNMVRNRHLAKGILDAGWGYFVQRLHAKAEDAARAVYEVNPAYTSQTCSACGQRFPEHLTLSVRWVSCGCGLAMDRDENAARNILARAGYVLWESTSTLVGVSQEAAVL

SEQ ID NO: 46734 - protein, 321 aa, Burkholderia sp.
VLTTGSSKELAIHSGTVNATCEQYAKSRSQHRRPYLRYRGRKSLGWVPVKGRDLKREGDAFRFAGNTFRVFNSRPLPEGKIKDGTNFAQDARGNWFLNIVIEMPDVPARPIRSGVGIDLGLKDFATLSTGEKLPNDQFGRRAAEKLAKAQRARKHKRHIAKLHAEVANARADFQHKLALDLVRRFDYIAIGTVSAVKLARTRMAKSVYDASWPSFRNKLRYKAIAHGATFEEVDESGSTQSCSSCGSKDSTTRPKGIAGLRIREWACDGCGVVHDPEQAGTTPWTNATTRCRFLNSLRCGARRSRTFSRTPNGRCANRCVI

SEQ ID NO: 46735 - protein, 400 aa, unknown
  TnpB Polypeptide
MTTPRARVSLLTCRRRSSSNSTNRNLMDNLNEIKYEKNYTLLKSSDNYKMLNSNMAQQILKEVDGSFKSFFGLLKLAKKGKYAFKDCKLPHYLPKDGYTTLVIGFVRLNGNKLILPFSNTYKKSHKPVEITIPPILLDKKVKEIRIIPKANARFFEIQYIYEAGHIQRNLNTNNALALDLGINNLVTAVSSTGKSFIIDGKKLKSINQWYNKQNAHLQSIKDKQHIGKRPTNKQKANARNRNNKINDYMNKTARIIIDYCINNDIGTLIVGYNETFQRNSNIGKINNQAFVNIPYRQLRSKLEYLCELNGIAFVKQEESYTSKASFWDKDNIPVYNNDNPKTYQFSGNRIYRGLYKTANGKYLNADVNGALNIMKKSSVVDMSILYGRGEVDTPVRIRIA

SEQ ID NO: 46736 - protein, 505 aa, unknown
  TnpB Polypeptide
MAIRGFSIEITDRLSGRQTTHFAQWIGGSNVMRNQKIEESLELIRADKGSEIHQKYAAIKAKPELAFLKEVPVQILRNSASMLIADVNACRSGLRKFPKPKGRNRKRSCVVTKEMFILEPLDRDRTLLTFYEKASKKPVRMFSIQLDYTPQQLAKQFRISRQGRRFYLSGSYNDGINSPTNEELLKDFVKQNLSDEELLAQITGIDRGVKLPISTSDGLRKAYSPDTAERLRQLARKKARYQRILARKKRQNNNKKTKRVESNEQQKLADKIANFDSKTARIRHDFLHQTSKEVVLAAKPIIALEDLKLKNMTKHAKPRRDKHGRGYVRNRARAKSGLNRSLLNVALGKLGDFIKYKANDYGKAVVTVNPAFTSQTCHVCGEKNTIRPQQDTLICLNGCGTFHADDNASIVVAQRAVPYIQESTFAQKAKPRKKIAIRKKAVMPPLGNELTSTEKSGELETASTDVSLACSRTQADVRPSSTASLVQRNSLTTMDTSQAGVLETR

SEQ ID NO: 46737 - protein, 384 aa, Bacillus sp.
MKKAYRTEILLNEKQQQKVHQTIGVCRYVYNLYLTTAQKHYKDTGKHLSGYDFSKWLNHVHTKQTDFWIKDVSSKAVKKSIMNGDQAFKNFFKGIAQLPKVKKKKHQEVKTYFPKNNPTDLLVERHRIKIPTLGWVQLKEYGYIPSNAKVSSCTVSQKANRYYLSVLCEVEQKQESQIPVHDGIGVDLGITDFAICSHHQTFKNINQTQKVKKLEKNLKRQQRKMSRSYELNKNRKRGEFCAKNRQQQLIKVQKLHARLANIRKEYVRLVVNQLVKTKPAYITIEDLNVKGLMKNRHVSKAVAGQRFYYFKEWLTSKCKQYGIELRQVDRFYPSSKLCSYCEHKKVKLSLSERNFTCDTCDTELDRDFNASLNLKYAKEYTVLT

SEQ ID NO: 46738 - protein, 416 aa, unknown
  TnpB Polypeptide
LHFLYPIINDAWEELSQYEFSNQKYNQIEKWIHSNKNNQARFDFDKNFPKLPSYLRRSAVSKALGVVSSYRSNLANWEREPKGRAPQLSLIHYDYPAYYKGNLFRNFNPDKQTIELKVFKDGDWVYEVYQLKRSDCTYYQTHLIGKKQNVPILQKKGRRFYVTFSYEEETRLVSEESISKICAVDLGLNTDATCSIMDQYGTVYTRKFISFSTEHDRLHTQLGRIKRNQKRGSYHNKTLWRKVVGISRDIADKTAKDILDFGNAHGVDVFVLEYLDFKGKKAIERAHFWRYKRIYKVLTQRAHQYGLRIARVNARYTSRLAFDGSGWSKRGREIAPDTPYALMEFPNGKIYNADLNASYNIGARYFIRYLLKTVTVTQRLALEAKVPQVAKRSTCTLSDLINLRSEFVALTTKTQA

SEQ ID NO: 46739 - protein, 320 aa, Erysipelotrichaceae sp.
MKPDDRYAMEAIRNNRLKYVRLLRKTVRGKTRYFVQLVLRGKPPKKHEYGSDTVVTGLDIGVSTVAEVSSRHVQLHELAPDIPAIDAEIRKISRSMDRSRRATNPSNYNPNGTIRKGIKLQWTYSAGYDRLRKKRKELYRKRAVLMRMSHEMLANEILERSTTVICETMNYRALQKRSKDMTRNAKNGRINRKSRFGKALANHAPSMFERILDQKLHYIGKELIHTDTAKIRASQINHVTGEMIKKDLSVRSFEIDGNTVQRDLYSAFITGHTLYSSEDSMKPDTVDYESCANDFESFIFLQNKELERLTSEKKLSWYIS

SEQ ID NO: 46740 - protein, 423 aa, Mycolicibacterium sp.
MAHRYRMYPSAHQARFMLERHCADARYVWNLALEQFNWGRSGRSGPGPAARQKQLAEARQAYDWLAAGSSSVQQQALRDFDRAVAGFFGGVYRHPTWRRKHLNEGFCIRDTRVEVVNRKWSQVFVPKLGLVKFRISRPLPAGTLGMARITYSNRRWHVSFPEPQSAVPGTPGRGDNMVGIDRGVATTLALSDGTMLRAPLMRRAERQRLAKLQRQLANCRKDSNRRSKVKARIARLHARVADRRKDWIEKATTRVASQYAVIAVEDLHIRNMVRAPKPKPDPAIPGRFLPNGAASKTGLNRNIYANCWGLIARRLEQKTTASGTVLVKVPAAYSSLECRACGHTAKENRKSQAEFRCVACGREDHADIQAAATILARATAPALTPGPGATPAQTGVLAQARRPDATEVAEGIPRSSLAGGGQR

SEQ ID NO: 46741 - protein, 452 aa, Moorea sp.
LYRTIPIKVNFSSEEKVFWEFQCKQANSLFNCAVYYAKQKHYQWLEDQEAYTTYWRGDELRLGWKTYKCSTKYPEIDKALKMSPHYKGMAAQSAQQTLKTVGEALNSYNKLVGLYYQGKVDRPKFPRYRKSGGFAAVTFPKQALTYKEGLFYPSVSKESKPELLTQITLAPPDFIDPDWVKEVTVRPCYGQLWVDWVIDDGKQPVTDNPNLDYSNAIGIDHGSDNWLTCVSTLGKSFIIDGRKLKSMNQGYCRLVAKHKSEKSEKYWDSDLDRIQLKRNNQMRDAVNKAARFLVNRCLNDETGNLIFGWNEGHKNRSNMGKKGNQQFVTIPTKRLIKRLNQLCTEYGINFIVTEESYTSKASFLDGDSLPKHGEKPSGWIPSGKRVRRGLYKTASGKLINADSNGAANILKKVTTQSFNLTKVVREALTLPHRYDLFTNLSKSYRYKGGAVG

SEQ ID NO: 46742 - protein, 447 aa, Glycomyces sp.
MITTCTRLTPSLTTSVRRYRDVPPPQRSRYRFRLYPTASQREALARSFGCARVIYNDAIAVRRAAHNDRSPYPSAATLSKRLITEAKRTPERAWLVEVSAVVLQQALADCDRAWRAFFDSRSGKRPGPKIGPPRFKRRSHRQAVRFTRNGRFRVLGDGRLRLPKIGDVKVAWSRELPSDPSSVTVIKTAAGRYYASFVVAVDEDAASQEPLPEAATGIDLGLKDFAVLRGGKVIESPKFFRSLERKLKRSQRELARKQRCSANRERARLKLARIHERIRDRRDDWLDKQVKAILEENQAVYVEDLNVKGPVRGRGAKSLHDQAFGGFLSRLESKAERRGRTFVRIDRFFPSTQLCSACGSLSGPKGLAGLKIRLWQCGCGAVHDRDVNAELNIRREGQRLADVAAGHAETRNASGGRIRPDTSGAARNPLQGRNEEPLGAGAAHAVL

SEQ ID NO: 46743 - protein, 533 aa, unknown
  TnpB Polypeptide
VERFRGEQGLGIMARGKRKRGKKWMWVVKPGDRIFVSRTAAIPSKKLSKREFRALEEILNIYGRMLGDVLPHASRNIIESYYRLKNEKYRELRNIYPDIPIHYIHGVCQDAVERVSSLRRNRARQYSREIFDELVKHLDLGKKDLRGRRVVGYLWRRSWEIARDQVDLEMMEGILMPRINSASLWLVDDHVWKPVNPTKININGVENIFFTSIAINTHRGWVHIDLEPSKEFYKLLARGFKPSSHAKIKLDRRNRRVIFHLSLEKEVEIYRPGNIKPVDVNENSVATLYEAFTVILETDLAKTTLGYSYRKKSIQRRNGSDSREARKAMKKLKEGKKKRDYRMKTANLIVRDALRMRGVIVVERISGEDVRIMIARYRNKQLRHRIYQSALKGELNTIIDKAREYGVPILMVDPRDTSKICPIHNAIIEYGEDRIGICSKGGERWHREVTALINLYFKALEALYEGSAQKGFRVLSIDGSPMPLGLKATHEPIEIPRSLWGRWKSLDDHRDVIASLWIKKQSNPKRININGNQ

SEQ ID NO: 46744 - protein, 392 aa, Nostoc sp.
MFAIKRELKLNKVETSLMRGNAGFKRWVYNFGLDLLTTSWSFEGVKLSDSKRLDAIKKVFTQITMEKAEYAWMKLYPSTVYQSAFIDLKDAFSRWRNGSAEFPKKKLKKKGDSFTVYKTAGIYLEKGKPPLPFTNRVVINAGKLIKLPGLKKLRLKERIDFICSSQTFTVSRTADKWFVAFVLDAEKVPPLIHPIEKIGIDLGVKVLATCSDGTFYDMPVTTKKAKTKLGKIQWRNRNQIVGNKKLKIRASNKAKKHYTQLAKQHAHIANIRQDTTQKMTTDISRKAAVIRIENLNVSGMVANHKLASAVSNNCFYEIRRQLTYKQPFYATRVELVDRWFPSSKMCCKCGHIQPMGLSERIYRCGSCENIQDRDDNASINLRDAPLDKIRLA
